(19) United States
(12) Patent Application Publication
(10) Pub. No.: US 2025/0101390 A1
(43) Pub. Date: Mar. 27, 2025

(54) ENGINEERED POLYMERASES WITH IMPROVED THERMAL STABILITY

(71) Applicant: Element Biosciences, Inc., San Diego, CA (US)

(72) Inventors: Jendrik BOOTHBY-HENTSCHEL, San Diego, CA (US); Michael KLEIN, Encinitas, CA (US); Mark AMBROSO, Escondido, CA (US); Tyler LOPEZ, Winchester, CA (US); Matthew KELLINGER, San Diego, CA (US); Virginia SAADE, San Diego, CA (US); Ramkrishna ADHIKARY, San Diego, CA (US)

(21) Appl. No.: 18/975,633

(22) Filed: Dec. 10, 2024

Related U.S. Application Data
(63) Continuation of application No. PCT/US2023/068193, filed on Jun. 9, 2023.
(60) Provisional application No. 63/491,374, filed on Mar. 21, 2023.
(60) Provisional application No. 63/422,855, filed on Nov. 4, 2022.
(60) Provisional application No. 63/351,294, filed on Jun. 10, 2022.

(51) Int. Cl. C12N 9/12; C12N 15/11; C12Q 1/48; C12Q 1/6869

(52) U.S. Cl. CPC C12N 9/1252; C12N 15/11; C12Q 1/485; C12Q 1/6869; C12N 2310/3517; C12Y 207/07007

(57) ABSTRACT

Provided herein are engineered variants of archaeal polymerases that exhibit exonuclease-minus activity, enhanced thermostability, enhanced incorporation of 3′ modified nucleotides, improved uracil-tolerance and/or reduce sequence-specific errors in polymerase-catalyzed nucleotide binding and extension reactions relative to wild type polymerase enzymes. Also provided are uses of the engineered polymerases for forming complexed polymerases and forming binding complexes, and uses for conducting nucleic acid sequencing reactions.

### CROSS-REFERENCE TO RELATED APPLICATIONS

[0001] This application is a continuation of International Application No. PCT/US2023/068193, filed Jun. 9, 2023, which claims priority to and benefit of U.S. Provisional Application No. 63/351,294, filed Jun. 10, 2022; 63/422,855, filed Nov. 4, 2022; and 63/491,374, filed Mar. 21, 2023; the entire disclosures of which are hereby incorporated by reference in their entireties.

[0002] Throughout this application various publications, patents, and/or patent applications are referenced. The disclosures of the publications, patents and/or patent applications are hereby incorporated by reference in their entireties into this application in order to more fully describe the state of the art to which this disclosure pertains.

### SEQUENCE LISTING

[0003] The instant application contains a Sequence Listing, which has been submitted electronically in XML format and is hereby incorporated by reference in its entirety. Said XML copy, created on Jun. 7, 2023, is named 55744WO_CRF_sequencelisting.xml and is 5,786,113 bytes in size.

### TECHNICAL FIELD

[0004] The present disclosure provides mutant polymerases that are engineered for improved thermal stability, exhibit improved binding of nucleotide reagents and/or improved binding and incorporation of nucleotide reagents, improved uracil-tolerance and/or reduced sequence-specific sequencing errors. Exemplary nucleotide reagents include detectably labeled nucleotides, non-labeled nucleotides, nucleotides comprising a 3′ chain terminating moiety, phosphate chain-labeled nucleotides, and multivalent molecules. In some embodiments, the engineered polymerases exhibit reduced transitioning from nucleotide polymerization conformation to exonuclease conformation. The mutant polymerases exhibit increased incorporation rate, compared to wild type polymerases.

### BACKGROUND

[0005] Next-generation sequencing (NGS) techniques have become a powerful tool for acquiring sequencing data used in molecular biology techniques, taxonomy, agriscience, medical diagnostics, and the development of new therapies. The present disclosure provides engineered polymerase that are useful for conducting any nucleic acid sequencing method that employs labeled or non-labeled chain terminating nucleotides, where the chain terminating nucleotides include a 3′-O-azido group (or 3′-O-methylazido group) or any other type of bulky blocking group at the sugar 3′ position. For example, the engineered polymerases can be used to conduct sequencing-by-avidity methods (SBA) using labeled multivalent molecules and non-labeled chain terminating nucleotides. Additionally, the engineered polymerases can be used for conducting sequencing-by-synthesis (SBS) methods which employ labeled chain-terminating nucleotides, and for conducting sequencing-by-binding methods (SBB) which employ non-labeled chain-terminating nucleotides.

[0006] The addition of a single nucleotide to a strand of DNA alone does not produce enough signal to easily detect. Currently available SBS technologies overcome this problem by increasing the signal to noise of the nucleotide addition coupled to a detection method with sufficient sensitivity to make an accurate base call. The most commercially successful platforms employ monoclonal template DNA amplification in a spatially constrained matrix to generate discrete DNA islands that contain multiple copies of a sequence to interrogate. The result of this amplification is a “colony” of DNA copies such that addition of a single DNA base on all of the copies concentrates the detection modality in a manner sufficient to overcome the signal to noise problem. The sequencing of multiple spatially constrained identical copies of DNA further increases the reliance on a controlled stepping mechanism to ensure that one, and only one, nucleotide bases can be added to ensure that all of the copies within a DNA colony remain at the same position (N, N+1, N+2, N+3, etc. . . . ) relative to each other.

[0007] The molecular engine needed to perform SBS is a DNA polymerase. In vivo, this class of enzymes is responsible for DNA replication and maintaining genome integrity. Under native conditions DNA dependent DNA polymerases (dDdP's) catalyze the addition of deoxynucleotide triphosphates (dNTP) to DNA in a 5′ to 3′ direction creating phosphodiester bonds between the 3′ hydroxyl of the primer DNA terminus and the 5′ alpha phosphate of the incoming nucleotide. This chemistry occurs with high fidelity for the correct Watson-Crick base pair due to hydrogen bonding between the correct incoming dNTP and the templating base. This “correct” base pairing induces a conformational change in the enzyme that aligns catalytic amino acids to efficiently perform phosphodiester bond formation. The newly added dNTP also possesses a 3′OH which is used in the next round of catalysis to further extend the DNA strand.

[0008] To ensure that only a single dNTP is added to the growing strands of DNA per SBS cycle a reversibly terminated dNTP is employed. These bases contain modifications to the 3′ hydroxyl of the dNTP that block subsequent rounds of incorporation. The most commercially successful reversible terminator is the 3′ methylazido, however others including 3′-aminoallyl, and 3′ oxyamine has also been used. Each of these reversibly terminated dNTPs function in the same manner; once incorporated the bulky 3′ block inhibits addition of the next nucleotide because no 3′ hydroxyl is present. When exposed to a catalyst, the 3′ block reacts to re-generate a 3′ hydroxyl capable of forming a new phosphodiester bond during the next cycle. While effective, these bulky 3′ modifications present a challenge for the polymerase.

[0009] The evolutionary need for high fidelity genome replication and stability has resulted in polymerases that only incorporate a non-Watson-Crick base pair in every 10⁴-10⁷ incorporation events. Polymerases often also need to discriminate between vast excesses of nucleotides in the cellular environment. Discrimination between nucleotides is typically done through a steric gate where the presence of a 2′hydroxyl sterically clashes with an amino acid side chain at the nucleotide binding site to select against nucleotide binding and catalysis. Additionally, damage or modification to the 3′ hydroxyl of the nucleotide is also sensed by the enzyme because bases containing non-viable 3′ hydroxyls can act as chain terminators that inhibit DNA synthesis. Discrimination of these unwanted bases occurs through a kinetic pathway where incorrect nucleotide substrates bind with a weaker overall affinity and phosphodiester bond formation occurs at rates 10²-10⁴ orders of magnitude more slowly. This occurs due to the lack of an induced fit that would properly align catalytic amino acids for bond formation. As a result, naturally evolved polymerases incorporate reversible chain-terminator nucleotides poorly.

### BRIEF DESCRIPTION OF THE DRAWINGS

[0010] The novel advantages and features of the compositions and methods disclosed herein are set forth with particularity in the appended claims. A better understanding of the features and advantages of the compositions and methods of the present disclosure will be obtained by reference to the following detailed description that sets forth illustrative embodiments and the accompanying drawings of which:

[0011] FIG. 1 is a schematic of an exemplary low binding support comprising a glass substrate and alternating layers of hydrophilic coatings which are covalently or non-covalently adhered to the glass, and which further comprises chemically-reactive functional groups that serve as attachment sites for oligonucleotide primers (e.g. capture oligonucleotides). In an alternative embodiment, the support can be made of any material such as glass, plastic or a polymer material.

[0012] FIG. 2 is a schematic of various exemplary configurations of multivalent molecules. Left (Class I): schematics of multivalent molecules having a “starburst” or “helter-skelter” configuration. Center (Class II): a schematic of a multivalent molecule having a dendrimer configuration. Right (Class III): a schematic of multiple multivalent molecules formed by reacting streptavidin with 4-arm or 8-arm PEG-NHS with biotin and dNTPs. Nucleotide units are designated ‘N’, biotin is designated ‘B’, and streptavidin is designated ‘SA’.

[0013] FIG. 3 is a schematic of an exemplary multivalent molecule comprising a generic core attached to a plurality of nucleotide-arms.

[0014] FIG. 4 is a schematic of an exemplary multivalent molecule comprising a dendrimer core attached to a plurality of nucleotide-arms.

[0015] FIG. 5 shows a schematic of an exemplary multivalent molecule comprising a core attached to a plurality of nucleotide-arms, where the nucleotide arms comprise biotin, spacer, linker and a nucleotide unit.

[0016] FIG. 6 is a schematic of an exemplary nucleotide-arm comprising a core attachment moiety, spacer, linker and nucleotide unit.

[0017] FIG. 7 shows the chemical structure of an exemplary spacer (TOP), and the chemical structures of various exemplary linkers, including an 11-atom Linker, 16-atom Linker, 23-atom Linker and an N3 Linker (BOTTOM).

[0018] FIG. 8 shows the chemical structures of various exemplary linkers, including Linkers 1-9.

[0019] FIG. 9A shows the chemical structures of various exemplary linkers joined/attached to nucleotide units.

[0020] FIG. 9B shows the chemical structures of various exemplary linkers joined/attached to nucleotide units.

[0021] FIG. 9C shows the chemical structures of various exemplary linkers joined/attached to nucleotide units.

[0022] FIG. 9D shows the chemical structures of various exemplary linkers joined/attached to nucleotide units.

[0023] FIG. 10 shows the chemical structure of an exemplary biotinylated nucleotide-arm. In this example, the nucleotide unit is connected to the linker via a propargyl amine attachment at the 5 position of a pyrimidine base or the 7 position of a purine base.

[0024] FIG. 11 is the amino acid sequence of a wild DNA polymerase having a backbone sequence from RLF 89458.1 (SEQ ID NO:1).

[0025] FIG. 12 is the amino acid sequence of a wild DNA polymerase having a backbone sequence from RLF 78286.1 (SEQ ID NO:2).

[0026] FIG. 13 is the amino acid sequence of a wild DNA polymerase having a backbone sequence from NOZ 58130.1 (SEQ ID NO:1714).

[0027] FIG. 14 is the amino acid sequence of a wild type DNA polymerase having a backbone sequence from RMF 90817.1 (SEQ ID NO:2789).

[0028] FIG. 15 is the amino acid sequence of a wild type DNA polymerase having a backbone sequence from MBC 7218772.1 (SEQ ID NO:2790).

[0029] FIG. 16 is the amino acid sequence of a wild type DNA polymerase having a backbone sequence from WP 175059460.1 (SEQ ID NO:2791).

[0030] FIG. 17 is the amino acid sequence of a wild type DNA polymerase having a backbone sequence from KUO 42443.1 (SEQ ID NO:2792).

[0031] FIG. 18 is the amino acid sequence of a wild DNA polymerase having a backbone sequence from NOZ 77387.1 (SEQ ID NO:2793).

[0032] FIG. 19 is the amino acid sequence of a wild type DNA polymerase having a backbone sequence from Geobacillus stearothermophilus (Bst polymerase) (SEQ ID NO:2794).

[0033] FIG. 20 is the amino acid sequence of a 9° N polymerase (SEQ ID NO:2795).

[0034] FIG. 21 is the amino acid sequence of a 9° N polymerase UniProt Q56366 (SEQ ID NO:2796).

[0035] FIG. 22 is the amino acid sequence of THERMINATOR polymerase (SEQ ID NO:2797).

[0036] FIG. 23 is the amino acid sequence of a VENT polymerase UniProt P30317 (SEQ ID NO:2798).

[0037] FIG. 24 is the amino acid sequence of a DEEP VENT polymerase UniProt Q51334 (SEQ ID NO:2799).

[0038] FIG. 25 is the amino acid sequence of a Pfu polymerase UniProt P61875 (SEQ ID NO:2800).

[0039] FIG. 26 is the amino acid sequence of a Pyrococcus abyssi polymerase UniProt POCL77 (SEQ ID NO:2801).

[0040] FIG. 27 is the amino acid sequence of an RB69 polymerase (SEQ ID NO:2802).

[0041] FIG. 28 is the amino acid sequence of a Phi29 polymerase (SEQ ID NO:2803).

[0042] FIG. 29 shows the amino acid sequences of domains of an RLF 89458.1 polymerase.

[0043] FIG. 30 shows the amino acid sequences of domains of a NOZ 58130.1 polymerase.

[0044] FIG. 31 (115 sheets) is Table 1 which lists the protein unfolding transition temperature of Tm1 and Tm2 (in ° C.), and activity, of mutant variants (SEQ ID NOS:3-1713) having a backbone sequence of RLF 89458.1 and carrying mutation substitution sites. In Table 1, a truncation is designated with a “\hat{ }”. In Table 1, a deleted amino acid is designated with an “X”. In Table 1, in inserted amino acid is designated with “[insert X after P411]” where X is a single letter amino acid code.

[0045] FIG. 32 (68 sheets) is Table 2 which lists the protein unfolding transition temperature of Tm1 and Tm2 (in ° C.), and activity, of mutant variants (SEQ ID NOS:1715-2787) having a backbone sequence of NOZ 58130.1 and carrying mutation substitution sites. In Table 2, a truncation is designated with a “\hat{ }”. In Table 2, a deleted amino acid is designated with an “X”. In Table 2, a deleted portion is designated with “[delete . . . ]” where the deleted portion is indicated with a single letter amino acid code.

[0046] FIG. 33 (5 sheets) shows amino acid sequence alignments of DNA polymerases from: RLF 89458.1 (SEQ ID NO:1); WP 175059460 (SEQ ID NO:2791); MBC 7218772 (SEQ ID NO:2790); KUO 42443 (SEQ ID NO:2792); NOZ 58130 (SEQ ID NO:1714); RMF 90817 (SEQ ID NO:2789); and NOZ 77387 (SEQ ID NO:2793).

[0047] FIG. 34 (5 sheets) shows amino acid sequence alignments of DNA polymerases from: RLF 89458.1 (SEQ ID NO:1); Geobacillus stearothermophilus (Bst polymerase) (SEQ ID NO:2794); 9° N (SEQ ID NO:2795); Pfu polymerase (SEQ ID NO:2800); and Pyrococcus abyssi polymerase (SEQ ID NO:2801).

[0048] FIG. 35 (5 sheets) shows amino acid sequence alignments of DNA polymerases from: NOZ 58130 (SEQ ID NO:1714); Geobacillus stearothermophilus (Bst polymerase) (SEQ ID NO:2794); 9° N (SEQ ID NO:2795); Pfu polymerase (SEQ ID NO:2800); and Pyrococcus abyssi polymerase (SEQ ID NO:2801).

[0049] FIG. 36 (5 sheets) shows amino acid sequence alignments of DNA polymerases from: RMF 90817 (SEQ ID NO:2789); Geobacillus stearothermophilus (Bst polymerase) (SEQ ID NO:2794); 9° N (SEQ ID NO:2795); Pfu polymerase (SEQ ID NO:2800); and Pyrococcus abyssi polymerase (SEQ ID NO:2801).

[0050] FIG. 37 (5 sheets) shows amino acid sequence alignments of DNA polymerases from: MBC 7218772 (SEQ ID NO:2790); Geobacillus stearothermophilus (Bst polymerase) (SEQ ID NO:2794); 9° N (SEQ ID NO:2795); Pfu polymerase (SEQ ID NO:2800); and Pyrococcus abyssi polymerase (SEQ ID NO:2801).

[0051] FIG. 38 (5 sheets) shows amino acid sequence alignments of DNA polymerases from: WP 175059460 (SEQ ID NO:2791); Geobacillus stearothermophilus (Bst polymerase) (SEQ ID NO:2794); 9° N (SEQ ID NO:2795); Pfu polymerase (SEQ ID NO:2800); and Pyrococcus abyssi polymerase (SEQ ID NO:2801).

[0052] FIG. 39 (5 sheets) shows amino acid sequence alignments of DNA polymerases from: KUO 42443 (SEQ ID NO:2792); Geobacillus stearothermophilus (Bst polymerase) (SEQ ID NO:2794); 9° N (SEQ ID NO:2795); Pfu polymerase (SEQ ID NO:2800); and Pyrococcus abyssi polymerase (SEQ ID NO:2801).

[0053] FIG. 40 (5 sheets) shows amino acid sequence alignments of DNA polymerases from: NOZ 77387 (SEQ ID NO:2793); Geobacillus stearothermophilus (Bst polymerase) (SEQ ID NO:2794); 9° N (SEQ ID NO:2795); Pfu polymerase (SEQ ID NO:2800); and Pyrococcus abyssi polymerase (SEQ ID NO:2801).

[0054] FIG. 41 is a schematic showing a predicted three-dimensional ribbon model of wild type polymerase RLF 89458.1 (SEQ ID NO:1) with an N-terminal His-tag. The ribbon model includes predicted positions of post-translational modification at certain amino acid residues. The ribbon model is based on mass spectrometry data.

[0055] FIG. 42 is a schematic showing a predicted three-dimensional ribbon model of wild type polymerase NOZ 58130.1 (SEQ ID NO:1714) with an N-terminal His-tag. The ribbon model includes predicted positions of post-translational modification at certain amino acid residues. The ribbon model is based on mass spectrometry data.

[0056] FIG. 43 is a graph showing the % error for a 150 cycle sequencing run of a nucleic acid library prepared from E. coli DNA.

[0057] FIG. 44 is a schematic of an exemplary immobilized nucleic acid template molecule hybridized to a first and a second nucleic acid primer. The nucleic acid template molecule shown in FIG. 44 comprises a concatemer which is hybridized with a plurality of nucleic acid primers.

[0058] FIG. 45 is a schematic of exemplary complexed polymerases indicated by the dashed circles, where individual complexed polymerases comprise a DNA polymerase bound to nucleic acid duplex, where each duplex comprises a nucleic acid template hybridized to a nucleic acid primer.

[0059] FIG. 46 is a schematic of an exemplary first binding complex (e.g., indicated by a dashed circle) comprising a first nucleic acid primer, a first DNA polymerase, and a first multivalent molecule bound to a first portion of a concatemer template molecule thereby forming a first binding complex. FIG. 46 also shows a plurality of multivalent molecules that are not part of the first binding complex.

[0060] FIG. 47 is a schematic of an exemplary avidity complex (e.g., indicated by a dashed circle) comprising (i) a first binding complex which comprises a first nucleic acid primer, a first DNA polymerase, and a first multivalent molecule bound to a first portion of a concatemer template molecule thereby forming a first binding complex, wherein a first nucleotide unit of the multivalent molecule is bound to the first DNA polymerase, and (ii) the second binding complex which comprises a second nucleic acid primer, a second DNA polymerase, and the same first multivalent molecule bound to a second portion of the same concatemer template molecule thereby forming a second binding complex, wherein a second nucleotide unit of the multivalent molecule is bound to the second DNA polymerase, and wherein the first and second binding complexes which include the same multivalent molecule forms an avidity complex.

### DETAILED DESCRIPTION

### Definitions

[0061] The headings provided herein are not limitations of the various aspects of the disclosure, which aspects can be understood by reference to the specification as a whole.

[0062] Unless defined otherwise, technical and scientific terms used herein have meanings that are commonly understood by those of ordinary skill in the art unless defined otherwise. Generally, terminologies pertaining to techniques of molecular biology, nucleic acid chemistry, protein chemistry, genetics, microbiology, transgenic cell production, and hybridization described herein are those well-known and commonly used in the art. Techniques and procedures described herein are generally performed according to conventional methods well known in the art and as described in various general and more specific references that are cited and discussed throughout the instant specification. For example, see Sambrook et al., Molecular Cloning: A Laboratory Manual (Third ed., Cold Spring Harbor Laboratory Press, Cold Spring Harbor, N.Y. 2000). See also Ausubel et al., Current Protocols in Molecular Biology, Greene Publishing Associates (1992). The nomenclatures utilized in connection with, and the laboratory procedures and techniques described herein are those well-known and commonly used in the art.

[0063] Unless otherwise required by context herein, singular terms shall include pluralities and plural terms shall include the singular. Singular forms “a”, “an” and “the”, and singular use of any word, include plural referents unless expressly and unequivocally limited on one referent.

[0064] It is understood the use of the alternative term (e.g., “or”) is taken to mean either one or both or any combination thereof of the alternatives.

[0065] The term “and/or” used herein is to be taken mean specific disclosure of each of the specified features or components with or without the other. For example, the term “and/or” as used in a phrase such as “A and/or B” herein is intended to include: “A and B”; “A or B”; “A” (A alone); and “B” (B alone). In a similar manner, the term “and/or” as used in a phrase such as “A, B, and/or C” is intended to encompass each of the following aspects: “A, B, and C”; “A, B, or C”; “A or C”; “A or B”; “B or C”; “A and B”; “B and C”; “A and C”; “A” (A alone); “B” (B alone); and “C” (C alone).

[0066] As used herein and in the appended claims, terms “comprising”, “including”, “having” and “containing”, and their grammatical variants, as used herein are intended to be non-limiting so that one item or multiple items in a list do not exclude other items that can be substituted or added to the listed items. It is understood that wherever aspects are described herein with the language “comprising,” otherwise analogous aspects described in terms of “consisting of” and/or “consisting essentially of” are also provided.

[0067] As used herein, the terms “about” and “approximately” refer to a value or composition that is within an acceptable error range for the particular value or composition as determined by one of ordinary skill in the art, which will depend in part on how the value or composition is measured or determined, i.e., the limitations of the measurement system. For example, “about” or “approximately” can mean within one or more than one standard deviation per the practice in the art. Alternatively, “about” or “approximately” can mean a range of up to 10% (i.e., ±10%) or more depending on the limitations of the measurement system. For example, about 5 mg can include any number between 4.5 mg and 5.5 mg. Furthermore, particularly with respect to biological systems or processes, the terms can mean up to an order of magnitude or up to 5-fold of a value. When particular values or compositions are provided in the instant disclosure, unless otherwise stated, the meaning of “about” or “approximately” should be assumed to be within an acceptable error range for that particular value or composition. Also, where ranges and/or subranges of values are provided, the ranges and/or subranges can include the endpoints of the ranges and/or subranges.

[0068] The terms “peptide”, “polypeptide” and “protein” and other related terms used herein are used interchangeably and refer to a polymer of amino acids and are not limited to any particular length. Polypeptides may comprise natural and non-natural amino acids. Polypeptides include recombinant or chemically-synthesized forms. Polypeptides also include precursor molecules that have not yet been subjected to post-translation modification such as proteolytic cleavage, cleavage due to ribosomal skipping, hydroxylation, methylation, lipidation, acetylation, SUMOylation, ubiquitination, glycosylation, phosphorylation and/or disulfide bond formation. These terms encompass native and artificial proteins, protein fragments and polypeptide analogs (such as muteins, variants, chimeric proteins and fusion proteins) of a protein sequence as well as post-translationally, or otherwise covalently or non-covalently, modified proteins.

[0069] The term “polymerase” and its variants, as used herein, comprises any enzyme that can catalyze polymerization of nucleotides (including analogs thereof) into a nucleic acid strand. Typically but not necessarily such nucleotide polymerization can occur in a template-dependent fashion. Typically, a polymerase comprises one or more active sites at which nucleotide binding and/or catalysis of nucleotide polymerization can occur. In some embodiments, a polymerase includes other enzymatic activities, such as for example, 3′ to 5′ exonuclease activity or 5′ to 3′ exonuclease activity. In some embodiments, a polymerase has strand displacing activity. A polymerase can include without limitation naturally occurring polymerases and any subunits and truncations thereof, mutant polymerases, variant polymerases, recombinant, fusion or otherwise engineered polymerases, chemically modified polymerases, synthetic molecules or assemblies, and any analogs, derivatives or fragments thereof that retain the ability to catalyze nucleotide polymerization (e.g., catalytically active fragment). In some embodiments, a polymerase can be isolated from a cell, or generated using recombinant DNA technology or chemical synthesis methods. In some embodiments, a polymerase can be expressed in prokaryote, eukaryote, viral, or phage organisms. In some embodiments, a polymerase can be post-translationally modified proteins or fragments thereof. A polymerase can be derived from a prokaryote, eukaryote, virus or phage. A polymerase comprises DNA-directed DNA polymerase and RNA-directed DNA polymerase.

[0070] As used herein, the term “fidelity” refers to the accuracy of DNA polymerization by template-dependent DNA polymerase. The fidelity of a DNA polymerase is typically measured by the error rate (the frequency of incorporating an inaccurate nucleotide, i.e., a nucleotide that is not complementary to the template nucleotide). The accuracy or fidelity of DNA polymerization is maintained by both the polymerase activity and the 3′-5′ exonuclease activity of a DNA polymerase.

[0071] As used herein, the term “binding complex” refers to a complex formed by binding together a nucleic acid duplex, a polymerase, and a free nucleotide or a nucleotide unit of a multivalent molecule, where the nucleic acid duplex comprises a nucleic acid template molecule hybridized to a nucleic acid primer. In the binding complex, the free nucleotide or nucleotide unit may or may not be bound to the 3′ end of the nucleic acid primer at a position that is opposite a complementary nucleotide in the nucleic acid template molecule. A “ternary complex” is an example of a binding complex which is formed by binding together a nucleic acid duplex, a polymerase, and a free nucleotide or nucleotide unit of a multivalent molecule, where the free nucleotide or nucleotide unit is bound to the 3′ end of the nucleic acid primer (as part of the nucleic acid duplex) at a position that is opposite a complementary nucleotide in the nucleic acid template molecule.

[0072] The term “persistence time” and related terms refers to the length of time that a binding complex remains stable without dissociation of any of the components, where the components of the binding complex include a nucleic acid template and nucleic acid primer, a polymerase, a nucleotide unit of a multivalent molecule or a free (e.g., unconjugated) nucleotide. The nucleotide unit or the free nucleotide can be complementary or non-complementary to a nucleotide residue in the template molecule. The nucleotide unit or the free nucleotide can bind to the 3′ end of the nucleic acid primer at a position that is opposite a complementary nucleotide residue in the nucleic acid template molecule. The persistence time is indicative of the stability of the binding complex and strength of the binding interactions. Persistence time can be measured by observing the onset and/or duration of a binding complex, such as by observing a signal from a labeled component of the binding complex. For example, a labeled nucleotide or a labeled reagent comprising one or more nucleotides may be present in a binding complex, thus allowing the signal from the label to be detected during the persistence time of the binding complex. One exemplary label is a fluorescent label. The binding complex (e.g., ternary complex) remains stable until subjected to a condition that causes dissociation of interactions between any of the polymerase, template molecule, primer and/or the nucleotide unit or the nucleotide. For example, a dissociating condition comprises contacting the binding complex with any one or any combination of a detergent, EDTA and/or water.

[0073] The terms “nucleic acid”, “polynucleotide” and “oligonucleotide” and other related terms used herein are used interchangeably and refer to polymers of nucleotides and are not limited to any particular length. Nucleic acids include recombinant and chemically-synthesized forms. Nucleic acids include DNA molecules (e.g., cDNA or genomic DNA), RNA molecules (e.g., mRNA), analogs of the DNA or RNA generated using nucleotide analogs (e.g., peptide nucleic acids and non-naturally occurring nucleotide analogs), and chimeric forms containing DNA and RNA. Nucleic acids can be single-stranded or double-stranded. Nucleic acids comprise polymers of nucleotides, where the nucleotides include natural or non-natural bases and/or sugars. Nucleic acids comprise naturally-occurring internucleosidic linkages, for example phosphdiester linkages. Nucleic acids comprise non-natural internucleoside linkages, including phosphorothioate, phosphorothiolate, or peptide nucleic acid (PNA) linkages. In some embodiments, nucleic acids comprise a one type of polynucleotides or a mixture of two or more different types of polynucleotides.

[0074] The term “primer” and related terms used herein refers to an oligonucleotide, either natural or synthetic, that is capable of hybridizing with a DNA and/or RNA polynucleotide template to form a duplex molecule. Primers may have any length, but typically range from 4-50 nucleotides. A typical primer comprises a 5′ end and 3′ end. The 3′ end of the primer can include a 3′ OH moiety which serves as a nucleotide polymerization initiation site in a polymerase-mediated primer extension reaction. Alternatively, the 3′ end of the primer can lack a 3′ OH moiety, or can include a terminal 3′ blocking group that inhibits nucleotide polymerization in a polymerase-mediated reaction. Any one nucleotide, or more than one nucleotide, along the length of the primer can be labeled with a detectable reporter moiety. A primer can be in solution (e.g., a soluble primer) or can be immobilized to a support (e.g., a capture primer).

[0075] The term “template nucleic acid”, “template polynucleotide”, “target nucleic acid” “target polynucleotide”, “template strand” and other variations refer to a nucleic acid strand that serves as the basis nucleic acid molecule for generating a complementary nucleic acid strand. The sequence of the template nucleic acid can be partially or wholly complementary to the sequence of the complementary strand. The template nucleic acid can be obtained from a naturally-occurring source, recombinant form, or chemically synthesized to include any type of nucleic acid analog. The template nucleic acid can be linear, circular, or other forms. The template nucleic acids can be isolated in any form, including chromosomal, genomic, organellar (e.g., mitochondrial, chloroplast or ribosomal), recombinant molecules, cloned, amplified, cDNA, RNA such as precursor mRNA or mRNA, oligonucleotides, whole genomic DNA, obtained from fresh frozen paraffin embedded tissue, needle biopsies, cell free circulating DNA, or any type of nucleic acid library. The template nucleic acid molecules may be isolated from any source including from organisms such as prokaryotes, eukaryotes (e.g., humans, plants and animals), fungus, and viruses; cells; tissues; normal or diseased cells or tissues, body fluids including blood, urine, serum, lymph, tumor, saliva, anal and vaginal secretions, amniotic samples, perspiration, and semen; environmental samples; culture samples; or synthesized nucleic acid molecules prepared using recombinant molecular biology or chemical synthesis methods. The template nucleic acid can be subjected to nucleic acid analysis, including sequencing and composition analysis.

[0076] When used in reference to nucleic acid molecules, the terms “hybridize” or “hybridizing” or “hybridization” or other related terms refers to hydrogen bonding between two different nucleic acids to form a duplex nucleic acid. Hybridization also includes hydrogen bonding between two different regions of a single nucleic acid molecule to form a self-hybridizing molecule having a duplex region. Hybridization can comprise Watson-Crick or Hoogstein binding to form a duplex double-stranded nucleic acid, or a double-stranded region within a nucleic acid molecule. The double-stranded nucleic acid, or the two different regions of a single nucleic acid, may be wholly complementary, or partially complementary. Complementary nucleic acid strands need not hybridize with each other across their entire length. The complementary base pairing can be the standard A-T or C-G base pairing, or can be other forms of base-pairing interactions. Duplex nucleic acids can include mismatched base-paired nucleotides.

[0077] The term “nucleotides” and related terms refers to a molecule comprising an aromatic base, a five carbon sugar (e.g., ribose or deoxyribose), and at least one phosphate group. Canonical or non-canonical nucleotides are consistent with use of the term. The phosphate in some embodiments comprises a monophosphate, diphosphate, or triphosphate, or corresponding phosphate analog. In some embodiments, the nucleotide comprises 1, 2, 3, 4, 5, 6, 7, 8, 9 or 10 phosphate groups. The term “nucleoside” refers to a molecule comprising an aromatic base and a sugar.

[0078] Nucleotides (and nucleosides) typically comprise a hetero cyclic base including substituted or unsubstituted nitrogen-containing parent heteroaromatic ring which are commonly found in nucleic acids, including naturally-occurring, substituted, modified, or engineered variants, or analogs of the same. The base of a nucleotide (or nucleoside) is capable of forming Watson-Crick and/or Hoogstein hydrogen bonds with an appropriate complementary base. Exemplary bases include, but are not limited to, purines and pyrimidines such as: 2-aminopurine, 2,6-diaminopurine, adenine (A), ethenoadenine, N⁶-Δ²-isopentenyladenine (6iA), N⁶-Δ²-isopentenyl-2-methylthioadenine (2ms6iA), N⁶-methyladenine, guanine (G), isoguanine, N²-dimethylguanine (dmG), 7-methylguanine (7mG), 2-thiopyrimidine, 6-thioguanine (6sG), hypoxanthine and O⁶-methylguanine; 7-deaza-purines such as 7-deazaadenine (7-deaza-A) and 7-deazaguanine (7-deaza-G); pyrimidines such as cytosine (C), 5-propynylcytosine, isocytosine, thymine (T), 4-thiothymine (4sT), 5,6-dihydrothymine, O⁴-methylthymine, uracil (U), 4-thiouracil (4sU) and 5,6-dihydrouracil (dihydrouracil; D); indoles such as nitroindole and 4-methylindole; pyrroles such as nitropyrrole; nebularine; inosines; hydroxymethylcytosines; 5-methycytosines; base (Y); as well as methylated, glycosylated, and acylated base moieties; and the like. Additional exemplary bases can be found in Fasman, 1989, in “Practical Handbook of Biochemistry and Molecular Biology”, pp. 385-394, CRC Press, Boca Raton, Fla.

[0079] Nucleotides (and nucleosides) typically comprise a sugar moiety, such as carbocyclic moiety (Ferraro and Gotor 2000 Chem. Rev. 100: 4319-48), acyclic moieties (Martinez, et al., 1999 Nucleic Acids Research 27: 1271-1274; Martinez, et al., 1997 Bioorganic & Medicinal Chemistry Letters vol. 7: 3013-3016), and other sugar moieties (Joeng, et al., 1993 J. Med. Chem. 36: 2627-2638; Kim, et al., 1993 J. Med. Chem. 36: 30-7; Eschenmosser 1999 Science 284:2118-2124; and U.S. Pat. No. 5,558,991). The sugar moiety comprises: ribosyl; 2′-deoxyribosyl; 3′-deoxyribosyl; 2′,3′-dideoxyribosyl; 2′,3′-didehydrodideoxyribosyl; 2′-alkoxyribosyl; 2′-azidoribosyl; 2′-aminoribosyl; 2′-fluororibosyl; 2′-mercaptoriboxyl; 2′-alkylthioribosyl; 3′-alkoxyribosyl; 3′-azidoribosyl; 3′-aminoribosyl; 3′-fluororibosyl; 3′-mercaptoriboxyl; 3′-alkylthioribosyl carbocyclic; acyclic or other modified sugars.

[0080] In some embodiments, nucleotides comprise a chain of one, two or three phosphorus atoms where the chain is typically attached to the 5′ carbon of the sugar moiety via an ester or phosphoramide linkage. In some embodiments, the nucleotide is an analog having a phosphorus chain in which the phosphorus atoms are linked together with intervening O, S, NH, methylene or ethylene. In some embodiments, the phosphorus atoms in the chain include substituted side groups including O, S or BH₃. In some embodiments, the chain includes phosphate groups substituted with analogs including phosphoramidate, phosphorothioate, phosphordithioate, and O-methylphosphoroamidite groups.

[0081] When used in reference to nucleic acids, the terms “extend”, “extending”, “extension” and other variants, refers to incorporation of one or more nucleotides into a nucleic acid molecule. Nucleotide incorporation comprises polymerization of one or more nucleotides into the terminal 3′ OH end of a nucleic acid strand, resulting in extension of the nucleic acid strand. Nucleotide incorporation can be conducted with natural nucleotides and/or nucleotide analogs. Typically, but not necessarily, nucleotide incorporation occurs in a template-dependent fashion. Any suitable method of extending a nucleic acid molecule may be used, including primer extension catalyzed by a DNA polymerase or RNA polymerase.

[0082] The term “reporter moiety”, “reporter moieties” or related terms refers to a compound that generates, or causes to generate, a detectable signal. A reporter moiety is sometimes called a “label”. Any suitable reporter moiety may be used, including luminescent, photoluminescent, electroluminescent, bioluminescent, chemiluminescent, fluorescent, phosphorescent, chromophore, radioisotope, electrochemical, mass spectrometry, Raman, hapten, affinity tag, atom, or an enzyme. A reporter moiety generates a detectable signal resulting from a chemical or physical change (e.g., heat, light, electrical, pH, salt concentration, enzymatic activity, or proximity events). A proximity event includes two reporter moieties approaching each other, or associating with each other, or binding each other. It is well known to one skilled in the art to select reporter moieties so that each absorbs excitation radiation and/or emits fluorescence at a wavelength distinguishable from the other reporter moieties to permit monitoring the presence of different reporter moieties in the same reaction or in different reactions. Two or more different reporter moieties can be selected having spectrally distinct emission profiles, or having minimal overlapping spectral emission profiles. Reporter moieties can be linked (e.g., operably linked) to nucleotides, nucleosides, nucleic acids, enzymes (e.g., polymerases or reverse transcriptases), or support (e.g., surfaces).

[0083] A reporter moiety (or label) comprises a fluorescent label or a fluorophore. Exemplary fluorescent moieties which may serve as fluorescent labels or fluorophores include, but are not limited to fluorescein and fluorescein derivatives such as carboxyfluorescein, tetrachlorofluorescein, hexachlorofluorescein, carboxynapthofluorescein, fluorescein isothiocyanate, NHS-fluorescein, iodoacetamidofluorescein, fluorescein maleimide, SAMSA-fluorescein, fluorescein thiosemicarbazide, carbohydrazinomethylthioacetyl-amino fluorescein, rhodamine and rhodamine derivatives such as TRITC, TMR, lissamine rhodamine, Texas Red, rhodamine B, rhodamine 6G, rhodamine 10, NHS-rhodamine, TMR-iodoacetamide, lissamine rhodamine B sulfonyl chloride, lissamine rhodamine B sulfonyl hydrazine, Texas Red sulfonyl chloride, Texas Red hydrazide, coumarin and coumarin derivatives such as AMCA, AMCA-NHS, AMCA-sulfo-NHS, AMCA-HPDP, DCIA, AMCE-hydrazide, BODIPY and derivatives such as BODIPY FL C3-SE, BODIPY 530/550 C3, BODIPY 530/550 C3-SE, BODIPY 530/550 C3 hydrazide, BODIPY 493/503 C3 hydrazide, BODIPY FL C3 hydrazide, BODIPY FL IA, BODIPY 530/551 IA, Br-BODIPY 493/503, Cascade Blue and derivatives such as Cascade Blue acetyl azide, Cascade Blue cadaverine, Cascade Blue ethylenediamine, Cascade Blue hydrazide, Lucifer Yellow and derivatives such as Lucifer Yellow iodoacetamide, Lucifer Yellow CH, cyanine and derivatives such as indolium based cyanine dyes, benzo-indolium based cyanine dyes, pyridium based cyanine dyes, thiozolium based cyanine dyes, quinolinium based cyanine dyes, imidazolium based cyanine dyes, Cy 3, Cy5, lanthanide chelates and derivatives such as BCPDA, TBP, TMT, BHHCT, BCOT, Europium chelates, Terbium chelates, Alexa Fluor dyes, DyLight dyes, Atto dyes, LightCycler Red dyes, CAL Flour dyes, JOE and derivatives thereof, Oregon Green dyes, WellRED dyes, IRD dyes, phycoerythrin and phycobilin dyes, Malachite green, stilbene, DEG dyes, NR dyes, near-infrared dyes and others known in the art such as those described in Haugland, Molecular Probes Handbook, (Eugene, Oreg.) 6th Edition; Lakowicz, Principles of Fluorescence Spectroscopy, 2nd Ed., Plenum Press New York (1999), or Hermanson, Bioconjugate Techniques, 2nd Edition, or derivatives thereof, or any combination thereof. Cyanine dyes may exist in either sulfonated or non-sulfonated forms, and consist of two indolenin, benzo-indolium, pyridium, thiozolium, and/or quinolinium groups separated by a polymethine bridge between two nitrogen atoms. Commercially available cyanine fluorophores include, for example, Cy3, (which may comprise 1-[6-(2,5-dioxopyrrolidin-1-yloxy)-6-oxohexyl]-2-(3-{1-[6-(2,5-dioxopyrrolidin-1-yloxy)-6-oxohexyl]-3,3-dimethyl-1,3-dihydro-2H-indol-2-ylidene}prop-1-en-1-yl)-3,3-dimethyl-3H-indolium or 1-[6-(2,5-dioxopyrrolidin-1-yloxy)-6-oxohexyl]-2-(3-{1-[6-(2,5-dioxopyrrolidin-1-yloxy)-6-oxohexyl]-3,3-dimethyl-5-sulfo-1,3-dihydro-2H-indol-2-ylidene}prop-1-en-1-yl)-3,3-dimethyl-3H-indolium-5-sulfonate), Cy5 (which may comprise 1-(6-((2,5-dioxopyrrolidin-1-yl)oxy)-6-oxohexyl)-2-((1E,3E)-5-((E)-1-(6-((2,5-dioxopyrrolidin-1-yl)oxy)-6-oxohexyl)-3,3-dimethyl-5-indolin-2-ylidene)penta-1,3-dien-1-yl)-3,3-dimethyl-3H-indol-1-ium or 1-(6-((2,5-dioxopyrrolidin-1-yl)oxy)-6-oxohexyl)-2-((1E,3E)-5-((E)-1-(6-((2,5-dioxopyrrolidin-1-yl)oxy)-6-oxohexyl)-3,3-dimethyl-5-sulfoindolin-2-ylidene)penta-1,3-dien-1-yl)-3,3-dimethyl-3H-indol-1-ium-5-sulfonate), and Cy7 (which may comprise 1-(5-carboxypentyl)-2-[(1E,3E,5E,7Z)-7-(1-ethyl-1,3-dihydro-2H-indol-2-ylidene)hepta-1,3,5-trien-1-yl]-3H-indolium or 1-(5-carboxypentyl)-2-[(1E,3E,5E,7Z)-7-(1-ethyl-5-sulfo-1,3-dihydro-2H-indol-2-ylidene)hepta-1,3,5-trien-1-yl]-3H-indolium-5-sulfonate), where “Cy” stands for ‘cyanine’, and the first digit identifies the number of carbon atoms between two indolenine groups. Cy2 which is an oxazole derivative rather than indolenin, and the benzo-derivatized Cy3.5, Cy5.5 and Cy7.5 are exceptions to this rule.

[0084] In some embodiments, the reporter moiety can be a FRET pair, such that multiple classifications can be performed under a single excitation and imaging step. As used herein, FRET may comprise excitation exchange (Forster) transfers, or electron-exchange (Dexter) transfers.

[0085] Many pH buffering agents are known to the skilled artisan. The full name of the pH buffering agents is listed herein. The term “Tris” refers to a pH buffering agent Tris(hydroxymethyl)-aminomethane. The term “Tris-HCl” refers to a pH buffering agent Tris(hydroxymethyl)-aminomethane hydrochloride. The term “Tri s-acetate” refers to a pH buffering agent comprising an acetate salt of Tris (hydroxymethyl)-aminomethane. The term “Tricine” refers to a pH buffering agent N-[tris(hydroxyrethyl)methyl]glycine. The term “Bicine” refers to a pH buffering agent N,N-bis(2-hydroxyethyl)glycine. The term “Bis-Tris propane” refers to a pH buffering agent 1,3 Bis[tris(hydroxymethyl)methylamino]propane. The term “HEPES” refers to a pH buffering agent 4-(2-hydroxyethyl)-1-piperazineethanesulfonic acid. The term “MES” refers to a pH buffering agent 2-(N-morpholino)ethanesulfonic acid). The term “MOPS” refers to a pH buffering agent 3-(N-morpholino)propanesulfonic acid. The term “MOPSO” refers to a pH buffering agent 3-(N-morpbolino)-2-hydroxypropanesulfonic acid. The term “BES” refers to a pH buffering agent N,N-bis(2-hydroxyethyl)-2-arinoethanesulfonic acid. The term “TES” refers to a pH buffering agent 2-[(2-Hydroxy-1,1bis(hydroxymethyl)ethyl)amino]ethanesulfonic acid). The term “CAPS” refers to a pH buffering agent 3-(cyclohexylamino)-1-propanesuhinic acid. The term “TAPS” refers to a pH buffering agent N-[Tris(hydroxymethyl)methyl]-3-amino propane sulfonic acid. The term “TAPSO” refers to a pH buffering agent N-[Tris(hydroxylmethyl)methyl]-3-amino-2-hyidroxypropansulfonic acid. The term “ACES” refers to a pH buffering agent N-(2-Acetamido)-2-aminoethanesulfonic acid. The term “PIPES” refers to a pH buffering agent piperazine-1,4-bis(2-ethanesulfonic acid. The term “ethanolamine” refers to a pH buffering agent that is also known as 2-aminoethanol.

[0086] The terms “linked”, “joined”, “attached”, and variants thereof comprise any type of fusion, bond, adherence or association between any combination of compounds or molecules that is of sufficient stability to withstand use in the particular procedure. The procedure can include but are not limited to: nucleotide transient-binding; nucleotide incorporation; de-blocking; washing; removing; flowing; detecting; imaging and/or identifying. Such linkage can comprise, for example, covalent, ionic, hydrogen, dipole-dipole, hydrophilic, hydrophobic, or affinity bonding, bonds or associations involving van der Waals forces, mechanical bonding, and the like. In some embodiments, such linkage occurs intramolecularly, for example linking together the ends of a single-stranded or double-stranded linear nucleic acid molecule to form a circular molecule. In some embodiments, such linkage can occur between a combination of different molecules, or between a molecule and a non-molecule, including but not limited to: linkage between a nucleic acid molecule and a solid surface; linkage between a protein and a detectable reporter moiety; linkage between a nucleotide and detectable reporter moiety; and the like. Some examples of linkages can be found, for example, in Hermanson, G., “Bioconjugate Techniques”, Second Edition (2008); Aslam, M., Dent, A., “Bioconjugation: Protein Coupling Techniques for the Biomedical Sciences”, London: Macmillan (1998); Aslam, M., Dent, A., “Bioconjugation: Protein Coupling Techniques for the Biomedical Sciences”, London: Macmillan (1998).

[0087] The term “operably linked” and “operably joined” or related terms as used herein refers to juxtaposition of components. The juxtapositioned components can be linked together covalently. For example, two nucleic acid components can be enzymatically ligated together where the linkage that joins together the two components comprises phosphodiester linkage. A first and second nucleic acid component can be linked together, where the first nucleic acid component can confer a function on a second nucleic acid component. For example, linkage between a primer binding sequence and a sequence of interest forms a nucleic acid library molecule having a portion that can bind to a primer. In another example, a transgene (e.g., a nucleic acid encoding a polypeptide or a nucleic acid sequence of interest) can be ligated to a vector where the linkage permits expression or functioning of the transgene sequence contained in the vector. In some embodiments, a transgene is operably linked to a host cell regulatory sequence (e.g., a promoter sequence) that affects expression of the transgene. In some embodiments, the vector comprises at least one host cell regulatory sequence, including a promoter sequence, enhancer, transcription and/or translation initiation sequence, transcription and/or translation termination sequence, polypeptide secretion signal sequences, and the like. In some embodiments, the host cell regulatory sequence controls expression of the level, timing and/or location of the transgene.

[0088] In some embodiments, the support is solid, semi-solid, or a combination of both. In some embodiments, the support is porous, semi-porous, non-porous, or any combination of porosity. In some embodiments, the support can be substantially planar, concave, convex, or any combination thereof. In some embodiments, the support can be cylindrical, for example comprising a capillary or interior surface of a capillary.

[0089] In some embodiments, the surface of the support can be substantially smooth. In some embodiments, the support can be regularly or irregularly textured, including bumps, etched, pores, three-dimensional scaffolds, or any combination thereof.

[0090] In some embodiments, the support comprises a bead having any shape, including spherical, hemi-spherical, cylindrical, barrel-shaped, toroidal, disc-shaped, rod-like, conical, triangular, cubical, polygonal, tubular or wire-like.

[0091] The support can be fabricated from any material, including but not limited to glass, fused-silica, silicon, a polymer (e.g., polystyrene (PS), macroporous polystyrene (MPPS), polymethylmethacrylate (PMMA), polycarbonate (PC), polypropylene (PP), polyethylene (PE), high density polyethylene (HDPE), cyclic olefin polymers (COP), cyclic olefin copolymers (COC), polyethylene terephthalate (PET)), or any combination thereof. Various compositions of both glass and plastic substrates are contemplated.

[0092] In some embodiments, the surface of the support is coated with one or more compounds to produce a passivated layer on the support. In some embodiments, the support comprises a low non-specific binding surface that enable improved nucleic acid hybridization and amplification performance on the support. In general, the support may comprise one or more layers of a covalently or non-covalently attached low-binding, chemical modification layers, e.g., silane layers, polymer films, and one or more covalently or non-covalently attached oligonucleotides that may be used for immobilizing a plurality of nucleic acid template molecules to the support.

[0093] In some embodiments, the degree of hydrophilicity (or “wettability” with aqueous solutions) of the surface coatings may be assessed, for example, through the measurement of water contact angles in which a small droplet of water is placed on the surface and its angle of contact with the surface is measured using, e.g., an optical tensiometer. In some embodiments, a static contact angle may be determined. In some embodiments, an advancing or receding contact angle may be determined. In some embodiments, the water contact angle for the hydrophilic, low-binding support surfaced disclosed herein may range from about 0 degrees to about 30 degrees. In some embodiments, the water contact angle for the hydrophilic, low-binding support surfaced disclosed herein may no more than 50 degrees, 40 degrees, 30 degrees, 25 degrees, 20 degrees, 18 degrees, 16 degrees, 14 degrees, 12 degrees, 10 degrees, 8 degrees, 6 degrees, 4 degrees, 2 degrees, or 1 degree. In many cases the contact angle is no more than 40 degrees. Those of skill in the art will realize that a given hydrophilic, low-binding support surface of the present disclosure may exhibit a water contact angle having a value of anywhere within this range.

[0094] The present disclosure provides a plurality (e.g., two or more) of nucleic acid templates immobilized to a support. In some embodiments, the immobilized plurality of nucleic acid templates have the same sequence or have different sequences. In some embodiments, individual nucleic acid template molecules in the plurality of nucleic acid templates are immobilized to a different site on the support. In some embodiments, two or more individual nucleic acid template molecules in the plurality of nucleic acid templates are immobilized to a site on the support. In some embodiments, the support comprises a plurality of sites arranged in an array. The term “array” refers to a support comprising a plurality of sites located at pre-determined locations on the support to form an array of sites. The sites can be discrete and separated by interstitial regions. In some embodiments, the pre-determined sites on the support can be arranged in one dimension in a row or a column, or arranged in two dimensions in rows and columns. In some embodiments, the plurality of pre-determined sites is arranged on the support in an organized fashion. In some embodiments, the plurality of pre-determined sites is arranged in any organized pattern, including rectilinear, hexagonal patterns, grid patterns, patterns having reflective symmetry, patterns having rotational symmetry, or the like. The pitch between different pairs of sites can be that same or can vary. In some embodiments, the support can have nucleic acid template molecules immobilized at a plurality of sites at a surface density of about 10²-10¹⁵ sites per mm², or more, to form a nucleic acid template array. In some embodiments, the support comprises at least 10² sites, at least 10³ sites, at least 10⁴ sites, at least 10⁵ sites, at least 10⁶ sites, at least 10⁷ sites, at least 10⁸ sites, at least 10⁹ sites, at least 10¹⁰ sites, at least 10¹¹ sites, at least 10¹² sites, at least 10¹³ sites, at least 10¹⁴ sites, at least 10¹⁵ sites, or more, where the sites are located at pre-determined locations on the support. In some embodiments, a plurality of pre-determined sites on the support (e.g., 10²-10¹⁵ sites or more) are immobilized with nucleic acid templates to form a nucleic acid template array. In some embodiments, the nucleic acid templates that are immobilized at a plurality of pre-determined sites by hybridization to immobilized surface capture primers, or the nucleic acid templates are covalently attached to the surface capture primers. In some embodiments, the nucleic acid templates that are immobilized at a plurality of pre-determined sites, for example immobilized at 10²-10¹⁵ sites or more. In some embodiments, the nucleic acid templates that are immobilized at a plurality of sites on the support comprise linear or circular nucleic acid template molecules or a mixture of both linear and circular molecules. In some embodiments, the immobilized nucleic acid templates are clonally-amplified to generate immobilized nucleic acid polonies at the plurality of pre-determined sites. In some embodiments, individual immobilized nucleic acid template molecules comprise one copy of a target sequence of interest, or comprise concatemers having two or more tandem copies of a target sequence of interest.

[0095] In some embodiments, a support comprising a plurality of sites located at random locations on the support is referred to herein as a support having randomly located sites thereon. The location of the randomly located sites on the support are not pre-determined. The plurality of randomly-located sites is arranged on the support in a disordered and/or unpredictable fashion. In some embodiments, the support comprises at least 10² sites, at least 10³ sites, at least 10⁴ sites, at least 10⁵ sites, at least 10⁶ sites, at least 10⁷ sites, at least 10⁸ sites, at least 10⁹ sites, at least 10¹⁰ sites, at least 10¹¹ sites, at least 10¹² sites, at least 10¹³ sites, at least 10¹⁴ sites, at least 10¹⁵ sites, or more, where the sites are randomly located on the support. In some embodiments, a plurality of randomly located sites on the support (e.g., 10²-10¹⁵ sites or more) are immobilized with nucleic acid templates to form a support immobilized with nucleic acid templates. In some embodiments, the nucleic acid templates that are immobilized at a plurality of randomly located sites by hybridization to immobilized surface capture primers, or the nucleic acid templates are covalently attached to the surface capture primer. In some embodiments, the nucleic acid templates that are immobilized at a plurality of randomly located sites, for example immobilized at 10²-10¹⁵ sites or more. In some embodiments, the nucleic acid templates that are immobilized at a plurality of sites on the support comprise linear or circular nucleic acid template molecules or a mixture of both linear and circular molecules. In some embodiments, the immobilized nucleic acid templates are clonally-amplified to generate immobilized nucleic acid polonies at the plurality of randomly located sites. In some embodiments, individual immobilized nucleic acid template molecules comprise one copy of a target sequence of interest, or comprise concatemers having two or more tandem copies of a target sequence of interest.

[0096] In some embodiments, with respect to nucleic acid template molecules immobilized to pre-determined or random sites on the support, the plurality of immobilized nucleic acid template molecules on the support are in fluid communication with each other to permit flowing a solution of reagents (e.g., enzymes including polymerases, multivalent molecules, nucleotides, divalent cations and/or buffers and the like) onto the support so that the plurality of immobilized nucleic acid template molecules on the support can be reacted with the reagents in a massively parallel manner. In some embodiments, the fluid communication of the plurality of immobilized nucleic acid template molecules can be used to conduct nucleotide binding assays and/or conduct nucleotide polymerization reactions (e.g., primer extension or sequencing) on the plurality of immobilized nucleic acid template molecules, and to conduct detection and imaging for massively parallel sequencing. In some embodiments, the term “immobilized” and related terms refer to nucleic acid molecules or enzymes (e.g., polymerases) that are attached to the support at pre-determined or random locations, where the nucleic acid molecules or enzymes are attached directly to a support through covalent bond or non-covalent interaction, or the nucleic acid molecules or enzymes are attached to a coating on the support.

[0097] As used herein, the term “clonally amplified” and it variants refers to a nucleic acid template molecule that has been subjected to one or more amplification reactions either in-solution or on-support. In the case of in-solution amplified template molecules, the resulting amplicons are distributed onto the support. Prior to amplification, the template molecule comprises a sequence of interest and at least one universal adaptor sequence. In some embodiments, clonal amplification comprises the use of a polymerase chain reaction (PCR), multiple displacement amplification (MDA), transcription-mediated amplification (TMA), nucleic acid sequence-based amplification (NASBA), strand displacement amplification (SDA), real-time SDA, bridge amplification, isothermal bridge amplification, rolling circle amplification (RCA), circle-to-circle amplification, helicase-dependent amplification, recombinase-dependent amplification, single-stranded binding (SSB) protein-dependent amplification, or any combination thereof.

[0098] As used herein, the term “sequencing” and its variants comprise obtaining sequence information from a nucleic acid strand, typically by determining the identity of at least some nucleotides (including their nucleobase components) within the nucleic acid template molecule. While in some embodiments, “sequencing” a given region of a nucleic acid molecule includes identifying each and every nucleotide within the region that is sequenced, in some embodiments “sequencing” comprises methods whereby the identity of only some of the nucleotides in the region is determined, while the identity of some nucleotides remains undetermined or incorrectly determined. Any suitable method of sequencing may be used. In an exemplary embodiment, sequencing can include label-free or ion based sequencing methods. In some embodiments, sequencing can include labeled or dye-containing nucleotide or fluorescent based nucleotide sequencing methods. In some embodiments, sequencing can include polony-based sequencing or bridge sequencing methods. In some embodiments, sequencing includes massively parallel sequencing platforms that employ sequence-by-synthesis, sequence-by-hybridization or sequence-by-binding procedures. Examples of massively parallel sequence-by-synthesis procedures include polony sequencing, pyrosequencing (e.g., from 454 Life Sciences; U.S. Pat. Nos. 7,211,390, 7,244,559 and 7,264,929), chain-terminator sequencing (e.g., from Illumina; U.S. Pat. No. 7,566,537; Bentley 2006 Current Opinion Genetics and Development 16:545-552; and Bentley, et al., 2008 Nature 456:53-59, ion-sensitive sequencing (e.g., from Ion Torrent), probe-anchor ligation sequencing (e.g., Complete Genomics), DNA nanoball sequencing, nanopore DNA sequencing. Examples of single molecule sequencing include Heliscope single molecule sequencing, and single molecule real time (SMRT) sequencing. An example of sequence-by-hybridization includes SOLiD sequencing (e.g., from Life Technologies; WO 2006/084132). An example of sequence-by-binding includes Omniome sequencing (e.g., U.S. Pat. No. 10,246,744).

Engineered Polymerases that Exhibit Increased Thermal Stability

[0099] The present disclosure provides compositions comprising mutant polymerases having amino acid substitutions and/or truncated amino acid sequences, nucleic acids encoding the mutant polymerases, and systems and kits comprising mutant polymerases. Further provided herein are methods using the mutant polymerases, including methods for binding a nucleic acid duplex, binding a complementary nucleotide or binding a multivalent molecule having a complementary nucleotide unit, incorporating a complementary nucleotide, extending a primer, and nucleic acid sequencing, where the methods employ any of the mutant polymerases described herein. The mutant polymerases are engineered to exhibit desirable characteristics including exonuclease-minus activity and increased stability, improved uracil-tolerance and/or reduced sequence-specific errors. Additionally, the mutant polymerase can be engineered to express a higher fraction of soluble expressed enzyme.

[0100] The present disclosure provides mutant polymerases that are engineered to reduce post-translational modifications in order to improve protein activity and stability. Post-translational modification of recombinant proteins can reduce protein activity, cause misfolding, increase heterogeneity, reduce thermal stability, and increase protein aggregation. These modifications pose challenges for achieving consistent manufacturability and retaining a long shelf-life. Many recombinant proteins undergo post-translational modification, including phosphorylation, acetylation, ubiquitination, succinylation, methylation, glycosylation (e.g., N-linked, O-linked and C-linked), hydroxylation, oxidation, deamidation, nitrosylation, sulfation, SUMOylation, disulfide bonding, proteolysis and/or lipidation (e.g., palmitoylation).

[0101] Examples of undesirable impacts of post-translational modification include oxidative damage of sulfur-containing amino acids such as cysteine and methionine. Histidine, tryptophan, lysine and serine are also known to be susceptible to oxidative damage. Deamidation of asparagine and glutamine can lead to protein degradation which reduces shelf-life. Acetylation can involve cleavage of the N-terminal methionine and replacement with an acetyl group. In some proteins, the N-terminal methionine plays an important role in enzyme activity and removal of this methionine residue can change enzyme activity. Acetylation can also involve serine and lysine. Methylation can lead to changes in hydrophobicity and side chain charge. Ubiquitination, can lead to protein degradation.

[0102] Analytical techniques such as mass spectrometry and tandem mass spectrometry can be used to detect post-translational modifications, particularly oxidized methionine and lysine residues, which enables rational mutagenesis to improve protein production and stability.

[0103] The present disclosure provides mutant polymerases that are engineered to exhibit reduced editing mode conformation. Many DNA polymerases possess 5′ to 3′ nucleotide polymerization activity, and 3′ to 5′ exonuclease proofreading activity. Generally, the polymerization site in a polymerase is located at a different site from the proofreading site. During polymerization mode, the template and the growing end of the primer strand are located in the polymerization site. In many family B and C polymerases, amino acid residues in the finger, thumb and palm domains form at least a portion of the polymerization site. In proofreading mode, the growing end of the primer is physically transferred from the polymerization site to the exonuclease site, and the mis-incorporated nucleotide at the end of the growing primer strand is excised by the 3′ to 5′ proofreading activity of the polymerase. The transfer of the primer end from the polymerization site to the exonuclease site can involve local unpairing of several base pairs at the primer/template junction which prevents further strand elongation (e.g., polymerization) until the primer end is transferred back to the polymerization site and primer/template pairing is restored. Amino acid residues that play a role in transfer of the primer end are independent from amino acid residues involved in exonuclease activity. The polymerization and exonuclease sites are located in two different domains. Polymerases sometimes undergo this polymerization-to-exonuclease conformational switching unnecessarily when the correct nucleotide is incorporated which stalls primer elongation. In E. coli DNA polymerase III, it has been previously determined that the timescale for primer end transfer and primer/template unpairing is approximately ten milliseconds which is an order of magnitude longer than nucleotide incorporation (Dodd, et al., 2020 Nature Communication 11:5379, “Polymerization and editing modes of a high-fidelity DNA polymerase are linked by a well-defined path”). Thus, it is desirable to engineer sequencing polymerases that exhibit reduced editing mode conformation when the correct nucleotide is incorporated, or when the correct nucleotide unit from a multivalent molecule is bound at the polymerization site. It is postulated that editing mode mutant polymerases will retain 3′ to 5′ exonuclease activity.

[0104] Protein modeling and mass spectrometry can identify key amino acid residues along the path of transferring the primer end from the polymerization site to the exonuclease site without impacting exonuclease activity. Mutation of at least some of these key amino acid residues can reduce unnecessary polymerization-to-exonuclease conformational switching. For example, mutation of amino acid residues that play a role in guiding the primer end to the exonuclease site, or mutation of amino acid residues that stabilize the transferred primer end at the exonuclease site, may reduce transition to editing mode conformation. In another example, mutation of amino acid residues that interact with and stabilize the template molecule during polymerization may retain the template molecule at the polymerization site.

[0105] The present disclosure provides mutant polymerases that can be used to conduct a two-stage nucleic acid sequencing method. In some embodiments, the first stage generally comprises binding detectably-labeled multivalent molecules to complexed polymerases to form multivalent-complexed polymerases under a condition suitable to inhibit incorporation of a nucleotide unit, and detecting the multivalent-complexed polymerases. The first stage can be conducted using a trapping polymerase. In some embodiments, the second stage generally comprises polymerase-catalyzed nucleotide incorporation using a stepping polymerase.

[0106] The present disclosure provides mutant polymerases that can be used for conducting trapping or stepping events for nucleic acid sequencing. Some of the mutant polymerases can be used for both trapping and stepping events.

[0107] The present disclosure provides mutant polymerases that can be used for trapping a multivalent molecule which comprises a complexed mutant polymerase binding to a multivalent molecule having a complementary nucleotide unit (e.g., exemplary multivalent molecules are shown in FIGS. 2-5). In some embodiments, the multivalent molecule comprises a central core attached to multiple polymer arms each having a nucleotide unit at the end of the arms. The multivalent molecule can be labeled with a detectable reporter moiety. The complexed mutant polymerase includes a mutant polymerase bound to a template/primer duplex. The mutant polymerases are engineered to exhibit reduced sequence-specific errors that occur after certain motif sequences in the primer strand and/or template strand. The sequence-specific errors for a trapping polymerase may be characterized by a substantial loss of signal intensity which leads to a base miscall (e.g., base substitution) or no call at a specific sequencing cycle. The signal often recovers in the next cycle. The motif sequences that lead to the miscalls are specific to a given polymerase and can occur on either template strand in the forward or reverse sequencing direction.

[0108] The present disclosure provides mutant polymerases that can be used for binding a complementary nucleotide (e.g., a non-conjugated nucleotide) and incorporating the nucleotide into the 3′ end of the primer which is called the stepping event. The mutant polymerases are engineered to exhibit reduced sequence-specific errors which are characterized by substantial loss of nucleotide incorporation that occur after certain motif sequences in the primer strand and/or the template strand. Sequence-specific errors for a stepping enzyme may be characterized by massive phasing after the sequence motif. The motif sequences that lead to phasing are specific to a given polymerase and can occur on either template strand in the forward or reverse sequencing direction.

[0109] Without wishing to be bound by theory, it is postulated that mutant polymerases that exhibit trapping or stepping sequence-specific errors at certain sequence motifs during sequencing switch from a nucleotide incorporation conformation to an editing conformation. During a trapping event, the editing conformation occludes binding of a complementary nucleotide unit from a multivalent molecule which leads to a reduction in signal intensity. During a stepping event, the editing conformation occludes binding and incorporation of a complementary nucleotide or nucleotide analog which leads to a reduction in signal intensity. Designing a trapping and stepping polymerase carrying one or more mutation sites that reduce switching conformations from nucleotide polymerization to editing can reduce trapping sequence-specific errors.

[0110] In some embodiments, the mutant polymerases comprise polypeptides, or fragments thereof, derived from directed evolution of recently identified novel B-family and A-family polymerases, where the mutant polymerases exhibit improvements in their specificity while maintaining high discrimination for the correct Watson-crick base-pairing.

[0111] The present disclosure provides polymerases that have been engineered to include substitution mutations, including polymerases having amino acid sequence backbones of RLF 89458.1 (e.g., from Thermococci archaeon, isolate B13_G1) (SEQ ID NO:1), RLF 78286.1 (e.g., from Thermococci archaeon, isolate B89_G9) (SEQ ID NO:2), NOZ 58130.1 (e.g., from Euryarchaeota archaeon, isolate M_BaxBin.100) (SEQ ID NO:1714), RMF 90817.1 (e.g., from Euryarchaeota archaeon, isolate J060) (SEQ ID NO:2789), MBC 7218772.1 (e.g., from Hadesarchaea archaeon, isolate MAG-18) (SEQ ID NO:2790), WP 175059460.1 (e.g., from Thermococcus sp. 2319x1) (SEQ ID NO:2791), KUO 42443.1 (e.g., from Candidatus Hadarchaem, yellowstonense, isolate YNP_45) (SEQ ID NO:2792), and NOZ 77387.1 (e.g., from Euryarchaeota archaeon, isolate M_MaxBin.027) (SEQ ID NO:2793).

[0112] Polypeptides described herein include but are not limited to polypeptides possessing enzymatic activity, such as polymerase activity, and are often described as families. Often, polymerases are DNA polymerases, RNA polymerases, template-independent polymerases, reverse transcriptases, or other enzymes capable of nucleotide binding and nucleotide incorporation (e.g., primer extension). Many DNA polymerases are known in the art, and such enzymes in some instances are mutated to generate the compositions described herein. Members of the DNA polymerase family are often defined in terms of polymerase activity, active site structure, domain homology/function, or sequence homology to other known DNA polymerase family members. For example, DNA polymerases include but are not limited to E. coli DNA polymerase I, E. coli DNA polymerase II, or other members of the DNA polymerase family. Known thermostable DNA polymerases include Taq polymerase, Pfu polymerase, and 9° N polymerase or other members of the DNA polymerase family. Wild-type DNA polymerases are or may be obtained from any number of origins, such as eukaryotic, prokaryotic, or viral origins, and in some embodiments for purposes of the present disclosure, from archaeal origins. In some embodiments, polymerases comprising amino acid sequences of any of SEQ ID NOS: 1, 2, 1714, 2789-2793 and 2803 are members of a DNA polymerase family.

[0113] The polymerases described herein can include one or more amino acid substitution and/or truncation which increases the thermal stability of the polymerase. In some embodiments, thermal stability of a polymerase can be determined by measuring the temperature at which the polymerase unfolds and/or aggregates. For example, a thermal shift assay using differential scanning fluorimetry can be used to determine the thermal stability of a polymerase. Differential scanning fluorimetry can be used to determine a protein unfolding transition (T(m)) at which approximately 50% of the protein is in its native conformation and approximately 50% of the protein is denatures. The protein unfolding transition (T(m)) can be obtained from a melt peak in which increasing temperature is plotted along the x-axis and the first derivative curve of fluorescence over change in temperature (e.g., dF/dT or dRFU/dT) is plotted along the y-axis. Some proteins exhibit two protein transitions, T(m1) and T(m2). For example the T(m1) temperature is the temperature at which at least 50% of the protein transitions from folded to unfolded. In another example the T(m2) temperature is a temperature which is higher compared to the T(m1) temperature, where at the T(m2) temperature more of the protein transitions from folded to unfolded. Fully denatured protein and protein aggregation (T(agg)) can be obtained from a melt curve in which increasing temperature is plotted along the x-axis and the fluorescence (e.g., RFU) is plotted along the y-axis. For example, Tables 1-2 (e.g., FIGS. 31-32) list Tm1 and Tm2 of the engineered polymerases.

[0114] In some embodiments, the engineered polymerase exhibits protein unfolding transition at an elevated temperature (e.g., thermal stability) compared to a wild type polymerase or compared to an engineered polymerase having mutations that do not confer increased thermal stability. In some embodiments, the engineered polymerase exhibits increased thermal stability at an elevated temperature of about 72-75° C., or about 75-80° C., or about 80-85° C., or about 85-90° C., or higher temperatures. Many of the engineered polymerases described herein exhibit nucleotide binding and incorporation activity at a temperature range of about 25-50° C., or about 45-75° C., or about 65-80° C., or about 80-90° C. Thus, these engineered polymerases are thermal stable at moderately high temperature ranges (e.g., mesothermal polymerase). The engineered polymerases described herein are suitable for conducting nucleotide binding, nucleotide unit binding, nucleotide incorporation and/or nucleic acid sequencing reactions at a temperature range of about 25-50° C., or about 45-75° C., or about 65-80° C., or about 80-90° C., or higher temperatures. In some embodiments, the mutant polymerases exhibit increased thermal stability by about 2-4° C., or about 4-6° C., or about 6-8° C., or about 8-10° C.

[0115] By contrast, DNA polymerases exhibiting significantly higher thermal stability that exceeds 95° C. include 9° N, THERMINATOR, VENT, DEEP VENT, Pfu and Pyrococcus abyssi. Thermostable polymerases, such as for example 9° N, VENT, DEEP VENT, Pfu and Pyrococcus abyssi polymerases, are suitable for use in a PCR reaction where typical cycling steps are conducted at temperatures that exceed 90-95° C. or higher temperatures, and may not be suitable for use in a nucleotide binding, nucleotide incorporation, and/or nucleic acid sequencing reactions, that are conducted at lower temperature ranges. DNA polymerase from Geobacillus stearothermophilus (e.g., Bst DNA polymerase) is typically stable up to 65° C.

[0116] Polymerases variously comprise DNA polymerases, RNA polymerases, template-independent polymerases, reverse transcriptases, or other enzymes capable of catalyzing nucleotide incorporation. Archaeal polymerases are often derived from thermophilic organisms, and thus can represent classes of thermostable or thermotolerant enzymes. Therefore, polypeptide backbones derived from archaeal polymerases provide desirable protein engineering targets to further enhance reversible terminator nucleotide incorporation for applications that may be improved by the application of enzymes with enhanced thermostability or otherwise enhanced resistance to degradation such as by repeated exposure to high temperatures, changes in buffer conditions, and the like.

[0117] The present disclosure provides compositions and methods comprising mutant polymerase enzymes that exhibit improved shelf-life compared to a wild type polymerase or compared to an engineered polymerase having mutations that do not confer improved shelf-life. For example, mutant polymerases can retain enzymatic activity after storage for months or years at a give temperature. In some embodiments, the mutant polymerases can retain about 90-100% activity for 2-12 months of storage at a temperature of about 0-plus 27° C., or a temperature of about minus 20° C.-minus 45° C., or a temperature of about minus 45° C.-minus 80° C. In some embodiments, the mutant polymerases can retain about 80-90% activity for 2-12 months of storage at a temperature of about 0-plus 27° C., or a temperature of about minus 20° C.-minus 45° C., or a temperature of about minus 45° C.-minus 80° C. In some embodiments, the mutant polymerases can retain about 70-80% activity for 2-12 months of storage at a temperature of about 0-plus 27° C., or a temperature of about minus 20° C.-minus 45° C., or a temperature of about minus 45° C.-minus 80° C. In some embodiments, the mutant polymerases can retain about 70-100% activity for about 12-36 months of storage at a temperature of about 0-plus 27° C., or a temperature of about minus 20° C.-minus 45° C., or a temperature of about minus 45° C.-minus 80° C.

[0118] In some embodiments, the wild type or engineered polymerase can be stored in a storage buffer comprising a solvent, at least one pH buffering agent, at least one salt, at least one chelating agent, at least one viscosity agent, and at least one detergent. In some embodiments, the solvent comprises water.

[0119] In some embodiments, the buffering agent comprises MES, HEPES, ACES, Tris and/or Tris-HCl, or any other pH buffering agent known to the skilled artisan. In some embodiments, the pH of the pH buffering agent is about 6-6.5, or the pH of the pH buffering agent is about 6.5-7, or the pH of the pH buffering agent is about 7-7.5, or the pH of the pH buffering agent is about 7.5-8, or the pH of the pH buffering agent is about 8-8.5. In some embodiments, the storage buffer includes at least one pH buffering agent at a concentration of about 10-20 mM, or about 20-30 mM, or about 30-40 mM, or about 40-50 mM.

[0120] In some embodiments, the salt comprises a monovalent salt comprising NaCl, KCl, NH₂SO₄ and/or potassium glutamate. In some embodiments, the storage buffer includes at least one monovalent salt at a concentration of about 50-100 mM, or about 100-200 mM, or about 200-300 mM, or about 300-400 mM, or about 400-500 mM, or about 500-600 mM, or about 600-800 mM.

[0121] In some embodiments, the chelating agent comprises EDTA (ethylenediaminetetraacetic acid), EGTA (ethylene glycol tetraacetic acid), HEDTA (hydroxyethylethylenediaminetriacetic acid), DPTA (diethylene triamine pentaacetic acid), NTA (N,N-bis(carboxymethyl)glycine), citrate anhydrous, sodium citrate, calcium citrate, ammonium citrate, ammonium bicitrate, citric acid, potassium citrate and/or magnesium citrate. In some embodiments, the storage buffer includes at least one chelating at a concentration of about 0.0125-0.025 mM, or about 0.025-0.05 mM, or about 0.05-0.1 mM, or about 0.1-0.2 mM.

[0122] In some embodiments, the viscosity agent comprises a saccharide such as trehalose, sucrose, cellulose, xylitol, mannitol, sorbitol and/or inositol. In some embodiments, the viscosity agent comprises glycerol or a glycol compound such as ethylene glycol and/or propylene glycol. In some embodiments, the storage buffer includes at least one viscosity agent at about 20-30%, or about 30-40%, or about 40-50%, or about 50-60%, or about 60-70%, or about 70-80%.

[0123] In some embodiments, the detergent comprises an ionic detergent such as SDS (sodium dodecyl sulfate). In some embodiments, the detergent comprises a non-ionic detergent such as Triton X-100, Tween 20, Tween 80 or Nonidet P-40. In some embodiments, the detergent comprises a zwitterionic detergent such as CHAPS (3-[(3-cholamidopropyl) dimethylammonio]-1-propanesulfonate) or N-Dodecyl-N,N-dimethyl-3-amonio-1-propanesulfate (DetX). In some embodiments, the detergent comprises LDS (lithium dodecyl sulfate), sodium taurodeoxycholate, sodium taurocholate, sodium glycocholate, sodium deoxycholate or sodium cholate. In some embodiments, the storage buffer includes at least one detergent at about 0.025-0.5%, or about 0.5-0.1%, or about 0.1-0.2%, or about 0.2-0.4%, or about 0.4-0.8%, or about 0.8-1.6%.

[0124] The present disclosure provides compositions and methods comprising mutant polymerase enzymes that exhibit improved ability to bind complementary nucleotide units of multivalent molecules compared to a wild type polymerase or compared to an engineered polymerase having mutations that do not confer improved binding to complementary nucleotide units of multivalent molecules. Multivalent molecules generally comprises a central moiety (e.g., a core) attached to a plurality of arms where each arm is attached to a nucleotide unit. The multivalent molecules comprise a star, comb, cross-linked, bottle brush, or dendrimer configuration (e.g., see FIG. 2).

[0125] We made the surprising discovery that many of the engineered polymerases described herein exhibit enhanced incorporation rate of nucleotide analogs compared to a wild type polymerase or compared to an engineered polymerase having mutations that do not confer enhanced incorporation rate of nucleotide analogs. Compared to wild type polymerase, some of the engineered polymerases also exhibited one or more desirable characteristics, including increased binding affinity to nucleotide analogs having a 3′ chain terminating group, improved ability to incorporate a dATP nucleotide opposite a uracil-containing template molecule (e.g., uracil-tolerant mutant polymerases), improved ability to bind complementary nucleotide units of multivalent molecules, increased thermal stability up to approximately 90° C., increased shelf-life, and reduced sequence-specific errors.

[0126] The present disclosure provides compositions and methods comprising mutant polypeptides relating to polymerase enzymes that exhibit increased capacity for binding and discrimination of nucleotide analogs, and improved incorporation of nucleotide analogs compared to a corresponding wild type polymerase. The nucleotide analogs include for example nucleotides comprising a chain terminating group attached to the sugar 2′ or 3′ position. The chain terminating group comprises an azide, azido or azidomethyl group, or another type of chain terminating group. The engineered DNA polymerases exhibit increased incorporation rate of nucleotide analogs, compared to a corresponding wild type polymerase having an amino acid sequence backbone of any of RLF 89458.1 (SEQ ID NO:1), RLF 78286.1 (SEQ ID NO:2), NOZ 58130.1 (SEQ ID NO:1714), RMF 90817.1 (SEQ ID NO:2789), MBC 7218772.1 (SEQ ID NO:2790), WP 175059460.1 (SEQ ID NO:2791), KUO 42443.1 (SEQ ID NO:2792), and NOZ 77387.1 (SEQ ID NO:2793).

[0127] The data shown in Tables 1 and 2 provide numerous exemplary mutant polymerases that exhibit increased thermal stability compared to their corresponding wild type polymerases or compared to an engineered polymerase having the same backbone sequence and mutations that do not confer increased thermal stability. Many of these mutant polymerases include mutations at the LYP motif and/or other positions. In some embodiments, the mutant polymerases exhibit increased incorporation rates of nucleotide analogs by about 5%, 10%, 20%, 30%, 40%, 50%, 60%, 70%, 80%, 90%, 100%, 150%, 200%, 250%, 300%, 500%, or 1000% relative to a corresponding wild type enzyme or enzyme variants currently known in the art. Exemplary mutant polymerase that exhibit increased thermal stability are listed in Tables 1 and 2.

[0128] The present disclosure provides compositions and methods comprising mutant polymerases having at least one amino acid residue inserted before or after the LYP motif. In some embodiments, the at least one amino acid residue inserted before or after the LYP motif can move the LYP motif as a unit in the folded polypeptide which may increase or decrease activity of the LYP motif in the mutant enzyme. In some embodiments, insertion of at least one amino acid residue before or after the LYP motif may be more effective in modulating the activity of the LYP motif compared to conventional amino acid substitutions which are designed to change amino acid side chains in and around the LYP motif. In some embodiments, the at least one amino acid residue inserted before or after the LYP motif can modulate (e.g., increase or decrease) the incorporation rate of nucleotide analogs compared to a mutant polymerase that lacks the at least one inserted amino acid residue.

[0129] In some embodiments, a polymerase that binds a nucleotide (or nucleotide analog) or a multivalent molecule under a condition suitable for inhibiting a polymerase-catalyzed nucleotide incorporation reaction comprises at least one amino acid residue inserted before or after the LYP motif. In some embodiments, a polymerase that binds a nucleotide (or nucleotide analog) or a multivalent molecule under a condition suitable for promoting a polymerase-catalyzed nucleotide incorporation reaction comprises at least one amino acid residue inserted before or after the LYP motif.

[0130] In some embodiments, the at least one amino acid residue inserted before or after the LYP motif comprises any of the 20 amino acids (e.g., W, I, M, P, F, G, A, V, L, H, R, K, D, E, N, Y, C, S, T, or Q). In some embodiments, the at least one amino acid residue inserted before or after the LYP motif comprises proline or glycine. Exemplary mutant polymerases comprise amino acid sequences of any of SEQ ID NOS: 1076, 1094, 1197 or 1351.

[0131] In some embodiments, the mutant polypeptide having at least one amino acid residue inserted before or after the LYP motif comprises a backbone sequence of any of RLF 89458.1 (SEQ ID NO:1), RLF 78286.1 (SEQ ID NO:2), NOZ 58130.1 (SEQ ID NO:1714), RMF 90817.1 (SEQ ID NO:2789), MBC 7218772.1 (SEQ ID NO:2790), WP 175059460.1 (SEQ ID NO:2791), KUO 42443.1 (SEQ ID NO:2792), and NOZ 77387.1 (SEQ ID NO:2793).

[0132] In some embodiments, at least one amino acid residue can be inserted before or after the LYP motif where the LYP motif in RLF 89458.1 (SEQ ID NO:1) and RLF 78286 (SEQ ID NO:2) are located at positions L409, Y410 and P411.

[0133] In some embodiments, at least one amino acid residue can be inserted before or after the LYP motif where the LYP motif in NOZ 58130 (SEQ ID NO:1714) is located at positions L440, Y441 and P442.

[0134] In some embodiments, at least one amino acid residue can be inserted before or after the LYP motif where the LYP motif in RMF 90817 (SEQ ID NO:2789) is located at positions L421, Y422 and P423.

[0135] In some embodiments, at least one amino acid residue can be inserted before or after the LYP motif where the LYP motif in MBC 7218772 (SEQ ID NO:2790) is located at positions L451, Y452 and P453.

[0136] In some embodiments, at least one amino acid residue can be inserted before or after the LYP motif where the LYP motif in WP 175059460 (SEQ ID NO:2791) is located at positions L411, Y412 and P413.

[0137] In some embodiments, at least one amino acid residue can be inserted before or after the LYP motif where the LYP motif in KUO 42443 (SEQ ID NO:2792) is located at positions L448, Y449 and P450.

[0138] In some embodiments, at least one amino acid residue can be inserted before or after the LYP motif where the LYP motif in NOZ 77387 (SEQ ID NO:2793) is located at positions L432, Y433 and P434.

[0139] In some embodiments, the mutant polypeptide having at least one amino acid residue inserted before or after the LYP motif comprises a sequence that has at least 70%, 75%, 80%, 85%, 90%, 91%, 92%, 93%, 94%, 95%, 96%, 97%, 98%, 99%, or greater than 99% sequence identity to any of SEQ ID NOs: 1-1713, 1714-2787, 2789, 2790, 2791, 2792, 2793 and 2803.

[0140] Sites that confer certain activities to a polypeptide may be conserved and can be located by aligning the amino acid sequences of various polymerases. For example, certain residues that are associated with polymerase activity (e.g., nucleotide incorporation) can be found at: residues D405, D539 and/or D541 of a polymerase having a backbone sequence of RLF 89458.1 (SEQ ID NO:1); or at residues D405, D539 and/or D541 of a polymerase having a backbone sequence of RLF 78286.1 (SEQ ID NO:2); or at residues D436, D570 and/or D572 of a polymerase having a backbone sequence of NOZ 58130 (SEQ ID NO:1714); or at residues D417, D551 and/or D553 of a polymerase having a backbone sequence of RMF 90817 (SEQ ID NO:2789); or at residues D447, D585 and/or D587 of a polymerase having a backbone sequence of MBC 7218772 (SEQ ID NO:2790); or at residues D407, D543 and/or D545 of a polymerase having a backbone sequence of WP 175059460 (SEQ ID NO:2791); or at residues D444, D582 and/or D584 of a polymerase having a backbone sequence of KUO 42443 (SEQ ID NO:2792); or at residues D428, D562 and/or D564 of a polymerase having a backbone sequence of NOZ 77387 (SEQ ID NO:2793).

[0141] The skilled artisan can locate these sites and other functional equivalent sites in other polymerase by reviewing the sequence alignments shown in FIG. 33. Such sites are often found at analogous positions in other regions and domains and polypeptides that comprise such domains are consistent with methods and compositions described herein.

[0142] Mutations in the polymerases described herein variously comprise one or more changes to amino acid residues present in the polypeptide. Additions, substitutions, deletions and/or truncations are all examples of mutations that are used to generate mutant polypeptides. Substitutions in some embodiments comprise the exchange of one amino acid for an alternative amino acid, and such alternative amino acids differ from the original amino acid with regard to size, shape, conformation, and/or chemical structure. Mutations in some embodiments are conservative or non-conservative. Conservative mutations comprise the substitution of an amino acid with an amino acid that possesses similar chemical properties. Additions often comprise the insertion of one or more amino acids at the N-terminal, C-terminal, or internal positions of the polypeptide. In some cases, additions comprise fusion polypeptides, wherein one or more additional polypeptides is connected to the polypeptide. Such additional polypeptides in some embodiments comprise domains with additional activity, or sequences with additional function (e.g., improve expression, aid purification, improve solubility, attach to a solid support, or other function). Often a polypeptide described herein comprises one or more non-amino acid groups. Fusion polypeptides optionally comprise an amino acid or other chemical linker that connects the one or more proteins. Any number of mutations can be introduced into a polypeptide or portion of a polypeptide described herein such as 1, 2, 3, 4, 5, 6, 7, 8, 9, 10, 20, 50, or more than 50 mutations.

[0143] In some embodiments, entire domains (portions of the polypeptide with a defined function) are added, deleted or substituted with domains from other polypeptides. Exemplary domains include DNA/RNA binding domains, nucleotide binding domains, nuclease domains, subcellular localization domains such as nuclear localization domains, or other domains. In some embodiments, the methods and compositions of the present disclosure comprise the attachment of a domain serving as a spacer or label, and/or providing for the attachment of a linker such as a SNAP tag, an avidin moiety, a streptavidin moiety, an epitope tag, a fluorescent protein, an affinity tag, a metal binding (i.e., a His6 (SEQ ID NO: 2850) or polyhistidine tag) or the like. In some embodiments, one or more mutations are present at any location, for example in an exonuclease domain, a nucleic acid binding domain, a nucleotide binding domain and/or a catalytic site. The polypeptide comprises at least one mutation and can be based on a wild type backbone sequence of any one of SEQ ID NOS: 1, 2, 1714, 2789, 2790, 2791, 2792, 2793 or 2803.

[0144] As used herein, the term “surrounding” an amino acid residue or sequence position has its ordinary meaning in the art, including and incorporating modifications such as substitutions, deletions, insertions, or post-translational modifications at residues from 1, 2, 3, 4, 5, 6, 7, 8, 9, 10, 11, or 12 or more residues distant from the named residue, i.e., N-terminal or C-terminal from the named residue. In some contexts, a residue greater than 12 residues or sequence positions N or C terminal from the named residue can be considered “surrounding” a named residue based on the sequence or structural (i.e., 3-dimensional) context as would be understood by one of ordinary skill in the art.

[0145] It is understood that substitutions or modifications of the residues described herein also may incorporate or may include nonstandard amino acids as are known in the art, including but not limited to hydroxyproline, N-formylmethionine, selenomethionine, selenocysteine, phosphotyrosine, phosphohistidine, and the like. The mutations, modifications, truncations, substitutions and the like as described herein may be made by any method as is known in the art, particularly the art of molecular biology and/or protein engineering. Such methods may include site directed mutagenesis using mutagenic and/or partially degenerate primers, in vitro gene assembly, gene editing (such as by CRISPR or related methods) and the like. The mutant or engineered proteins described herein may additionally be expressed, isolated, and/or purified by any such means as is known in the art. Relevant methods are described in: Green, M. and Sambrook, J., Molecular Cloning: A Laboratory Manual (Fourth Edition) which is hereby incorporated by reference in its entirety and especially with respect to its disclosure of methods for modifying, transferring, and expressing, recombinant, modified, and engineered gene sequences as well as extracting, isolating, and/or purifying engineered proteins.

[0146] The polypeptides disclosed herein have been shown to function as nucleotide polymerases that exhibit higher thermostability and higher rates of incorporation of 3′-O-azidomethyl derivatized nucleosides, increased uracil-tolerance and/or improved binding to complementary nucleotide units of a multivalent molecule, compared to their corresponding wild type enzymes. The polypeptides disclosed herein may be used for the elongation of a nucleic acid during replication or synthesis, or may trap/bind a nucleotide at the site of nucleotide addition by, for example, use of a non-incorporable or blocked nucleotide, or can be used under conditions in which a required salt or cofactor is absent. The polypeptides disclosed herein may be utilized, for example, in polynucleotides sequencing applications such as, for example, sequencing by synthesis and sequencing by binding applications. Disclosed herein are mutant polymerases comprising at least 70%, 75%, 80%, 85%, 90%, 91%, 92%, 93%, 94%, 95%, 96%, 97%, 98%, 99%, or greater than 99% sequence identity to any one of SEQ ID NOS: 1, 2, 1714, 2789, 2790, 2791, 2792, 2793 or 2803.

[0147] The present disclosure provides engineered DNA polymerases comprising the amino acid sequence backbone of a family-B or family-A polymerase which typically include replicative polymerases that exhibit high fidelity. Examples of family-B type polymerases include family-B archaeal DNA polymerases and Phi29 polymerase. In some embodiments, engineered DNA polymerases comprise family-B archaeal DNA polymerases which can be selected from Thermococcus, Thermoplasmata, Pyrococcus, Methanococcus, Hadesarchaea, Euryarchaeota, or Candidatus. In some embodiments, engineered DNA polymerases that are family-B polymerases comprise the amino acid sequence backbone from 9° N polymerase (including THERMINATOR polymerase), VENT polymerase, DEEP VENT polymerase, Pfu polymerase or Pyrococcus abyssi polymerase. In some embodiments, engineered DNA polymerases that are family-A polymerases comprise the amino acid sequence backbone of Geobacillus stearothermophilus (e.g., Bst DNA polymerase).

[0148] Engineered DNA polymerases can be designed and prepared by introducing one or more mutations into the amino acid sequence of a DNA polymerase of interest and the resulting phenotype of the engineered polymerase can be determined. Any one or any combination of two or more mutation sites can be transferred from one type of polymerase to a positionally equivalent site (or functionally equivalent site) in a second type of polymerase. For example, any one or any combination of two or more mutation sites from a DNA polymerase comprising any one of SEQ ID NOS: 1, 2, 1714, 2789, 2790, 2791, 2792, 2793 and 2803, or any one of SEQ ID NOS:3-1713 or 1715-2787, can be introduced into a positionally equivalent site (or functionally equivalent site) in a Geobacillus stearothermophilus (e.g., Bst DNA polymerase) (SEQ ID NO:2794), a 9° N polymerase (SEQ ID NOS:2795 or 2796) (including THERMINATOR polymerase; SEQ ID NO:2797), VENT polymerase (SEQ ID NO:2798), DEEP VENT polymerase (SEQ ID NO:2799), Pfu polymerase (SEQ ID NO:2800) and/or Pyrococcus abyssi polymerase (SEQ ID NO:2801), RB69 polymerase (SEQ ID NO:2802) or Phi29 polymerase (SEQ ID NO:2803).

[0149] Exemplary sequence alignments are provided in FIGS. 33-40. The mutations include any one or any combination of two or more amino acid substitutions, insertions, deletions and/or truncations.

[0150] Functional equivalents of a residue comprise one or more amino acid residues that occupy a similar position in the sequence (e.g., sequence alignment) and/or three-dimensional structure of an enzyme (e.g., DNA polymerase), and performs substantially the same function as a known amino acid residue in a known enzyme. A functionally equivalent amino acid substitution includes one or more amino acid residues at a particular position in a basis polypeptide that has the same functional role in another polypeptide. A functionally equivalent amino acid substitution includes any one or any combination of conservative and/or non-conservative amino acid substitutions. Sequence alignments are provided in FIGS. 33-40, which list examples of amino acid residues at sites in a DNA polymerase having a backbone sequence of any one of SEQ ID NOS: 1, 2, 1714, 2789, 2790, 2791, 2792, 2793 and 2803, and functionally equivalent amino acid sites in Geobacillus stearothermophilus (e.g., Bst DNA polymerase) (SEQ ID NO:2794), 9° N DNA polymerase (relative to SEQ ID NO:2795 or 2796), THERMINATOR polymerase (relative to SEQ ID NO:2797), VENT polymerase (relative to SEQ ID NO:2798), DEEP VENT polymerase (relative to SEQ ID NO:2799), Pfu DNA polymerase (relative to SEQ ID NO:2800), Pyrococcus abyssi DNA polymerase (relative to SEQ ID NO:2801), RB69 polymerase (relative to SEQ ID NO:2802), or Phi29 polymerase (relative to SEQ ID NO:2803).

[0151] Wild type polypeptide sequences are often starting points for protein or enzyme engineering to generate mutant polypeptides. In some embodiments, a mutant polypeptide differs from a wild-type polypeptide by at least one amino acid residue. Often a mutant polypeptide differs by at least one amino acid residue from the nearest wild-type polypeptide. In some embodiments, a mutant polypeptide differs from a wild-type polypeptide by at least two amino acid residues. In some embodiments, a mutant polypeptide differs from a wild-type polypeptide by at least three, four, five, six or more amino acid residues. Often, a wild type sequence is the closest wild type sequence, identified by aligning the polypeptide comprising at least one mutation within a wild type sequence. In some embodiments, a wild type polypeptide sequence includes a sequence of a naturally-occurring polypeptide.

[0152] An amino acid substitution refers to replacing an amino acid residue at a selected position in a polypeptide with a different amino acid having a similar or different biochemical property, such as similar size, shape, conformation, chemical structure, charge and/or hydrophobicity. The amino acid substitution can be a conservative or non-conservative amino acid replacement. In some embodiments, an amino acid residue at a selected position in a polypeptide can be replaced with an amino acid having a polar side-chain. Examples of amino acids having a polar side-chain include arginine, asparagine, aspartic acid, glutamine, glutamic acid, histidine, lysine, serine and threonine. In some embodiments, an amino acid residue at a selected position in a polypeptide can be replaced with an amino acid having a nonpolar side-chain. Examples of amino acids having a nonpolar side-chain include alanine, cysteine, glycine, isoleucine, leucine, methionine, phenylalanine, prolific, tryptophan, tyrosine and valine. In some embodiments, an amino acid residue at a selected position in a polypeptide can be replaced with an amino acid having a hydrophobic side-chain. Examples of amino acids having a hydrophobic side-chain include glycine, alanine, valine, leucine, isoleucine, proline, phenylalanine, methionine, tyrosine and tryptophan. In some embodiments, an amino acid residue at a selected position in a polypeptide can be replaced with an amino acid having an uncharged side-chain. Examples of amino acids having an uncharged side-chain include glycine, serine, cysteine, asparagine, glutamine, tyrosine, and threonine. In some embodiments, an amino acid residue at a selected position in a polypeptide can be replaced with an amino acid having a positive charged side-chain. Examples of amino acids having a positive charged side-chain include arginine, histidine and lysine. In some embodiments, an amino acid residue at a selected position in a polypeptide can be replaced with an amino acid having a negative charged side-chain. Examples of amino acids having a negative charged side-chain include aspartic acid and glutamic acid.

[0153] Exemplary polypeptide mutants described herein are listed in Tables 1-2 (FIGS. 31-32).

[0154] In some embodiments, a polypeptide comprises a backbone sequence of RLF 89458.1 and having a sequence that has at least 70%, 75%, 80%, 85%, 90%, 91%, 92%, 93%, 94%, 95%, 96%, 97%, 98%, 99%, or greater than 99% sequence identity to any of SEQ ID NOS: 1 or 2 and the polypeptide comprises at least one of the mutations listed in Table 1, FIG. 31 (e.g., SEQ ID NOS:3-1713).

[0155] In some embodiments, a polypeptide comprises a backbone sequence of NOZ 58130.1 and having a sequence that has at least 70%, 75%, 80%, 85%, 90%, 91%, 92%, 93%, 94%, 95%, 96%, 97%, 98%, 99%, or greater than 99% sequence identity to any of SEQ ID NOS:1714 and the polypeptide comprises at least one of the mutations listed in Table 2, FIG. 32 (e.g., SEQ ID NOS:1715-2787).

[0156] In some embodiments, a polypeptide comprises a backbone sequence of RMF 90817 and having a sequence that has at least 70%, 75%, 80%, 85%, 90%, 91%, 92%, 93%, 94%, 95%, 96%, 97%, 98%, 99%, or greater than 99% sequence identity to SEQ ID NO:2787 and the polypeptide comprises at least one mutation that is positionally equivalent to the mutations listed in Tables 1 and/or 2 (FIGS. 31 and 32, respectively) (e.g., SEQ ID NOS:3-1713) (e.g., SEQ ID NOS:1715-2787). In some embodiments, positionally equivalent amino acid positions are shown in FIGS. 33 and 36.

[0157] In some embodiments, a polypeptide comprises a backbone sequence of MBC 7218772.1 and having a sequence that has at least 70%, 75%, 80%, 85%, 90%, 91%, 92%, 93%, 94%, 95%, 96%, 97%, 98%, 99%, or greater than 99% sequence identity to SEQ ID NO:2790 and the polypeptide comprises at least one of the mutations and the polypeptide comprises at least one mutation that is positionally equivalent to the mutations listed in Tables 1 and/or 2 (FIGS. 31 and 32, respectively) (e.g., SEQ ID NOS:3-1713) (e.g., SEQ ID NOS:1715-2787). In some embodiments, positionally equivalent amino acid positions are shown in FIGS. 33 and 37.

[0158] In some embodiments, a polypeptide comprises a backbone sequence of WP 175059460.1 and having a sequence that has at least 70%, 75%, 80%, 85%, 90%, 91%, 92%, 93%, 94%, 95%, 96%, 97%, 98%, 99%, or greater than 99% sequence identity to SEQ ID NO:2791 and the polypeptide comprises at least one mutation that is positionally equivalent to the mutations listed in Tables 1 and/or 2 (FIGS. 31 and 32, respectively) (e.g., SEQ ID NOS:3-1713) (e.g., SEQ ID NOS:1715-2787). In some embodiments, positionally equivalent amino acid positions are shown in FIGS. 33 and 38.

[0159] In some embodiments, a polypeptide comprising a backbone sequence of KUO 42443.1 and having a sequence that has at least 70%, 75%, 80%, 85%, 90%, 91%, 92%, 93%, 94%, 95%, 96%, 97%, 98%, 99%, or greater than 99% sequence identity to SEQ ID NO:2792 and the polypeptide comprises at least one mutation that is positionally equivalent to the mutations listed in Tables 1 and/or 2 (FIGS. 31 and 32, respectively) (e.g., SEQ ID NOS:3-1713) (e.g., SEQ ID NOS:1715-2787). In some embodiments, positionally equivalent amino acid positions are shown in FIGS. 33 and 39.

[0160] In some embodiments, a polypeptide comprising a backbone sequence of NOZ 77387.1 and having a sequence that has at least 70%, 75%, 80%, 85%, 90%, 91%, 92%, 93%, 94%, 95%, 96%, 97%, 98%, 99%, or greater than 99% sequence identity to SEQ ID NO:2793 and the polypeptide comprises at least one mutation that is positionally equivalent to the mutations listed in Tables 1 and/or 2 (FIGS. 31 and 32, respectively) (e.g., SEQ ID NOS:3-1713) (e.g., SEQ ID NOS:1715-2787). In some embodiments, positionally equivalent amino acid positions are shown in FIGS. 33 and 39.

[0161] In some embodiments, a polypeptide comprising a backbone sequence of Phi29 and having a sequence that has at least 70%, 75%, 80%, 85%, 90%, 91%, 92%, 93%, 94%, 95%, 96%, 97%, 98%, 99%, or greater than 99% sequence identity to SEQ ID NO:2803 and the polypeptide comprises at least one mutation that is positionally equivalent to the mutations listed in Tables 1 and/or 2 (FIGS. 31 and 32, respectively) (e.g., SEQ ID NOS:3-1713) (e.g., SEQ ID NOS:1715-2787).

[0162] Further described herein are segments, or portions of a larger polypeptide. Optionally, segments have catalytic activity such as nucleotide incorporation and nucleic acid extension activity, particularly in the context of a nucleotide polymerization or exonuclease domain as described herein. Described herein are polypeptides comprising any full-length or segment derived from any one of SEQ ID NOS: 1-1713, 1714-2787, 2789, 2790, 2791, 2792, 2793 and 2803, and at least one additional residue at the N-terminus or C-terminus (e.g., +1 residue). In some embodiments both the N and C terminus has at least an additional residue, two, three four five, six seven, eight, nine, ten 11, 12, 13, 14, 15, 16, 17, 18, 19, 20, 21, 22, 23, 24, 25, 26, 27, 28, 29, 30, 35, 40, 45, 50, 60, 70, 80, 90, 100, or more than 100 additional residues.

[0163] For example, described herein are polypeptides comprising any of one of SEQ ID NOS: 1-1713, 1714-2787, 2789, 2790, 2791, 2792, 2793 and 2803 (+1 residue), such as an adjacent N-terminal aspartic acid, an adjacent C-terminal arginine, or a combination thereof, or additional residues such as residues identified through an alignment of any one of SEQ ID NOS: 1-1713, 1714-2787, 2789, 2790, 2791, 2792, 2793 and 2803. Described herein are polypeptides comprising any one of SEQ ID NOS: 1-1713, 1714-2787, 2789, 2790, 2791, 2792, 2793 and 2803 (+1 residue), such as an adjacent N-terminal glutamine, an adjacent C-terminal histidine, or a combination thereof, or additional residues such as residues identified through an alignment of any one of SEQ ID NOS: 1-1713, 1714-2787, 2789, 2790, 2791, 2792, 2793 and 2803. Described herein are polypeptides comprising any one of SEQ ID NOS: 1-1713, 1714-2787, 2789, 2790, 2791, 2792, 2793 and 2803 (+1 residue), such as an adjacent N-terminal valine, an adjacent C-terminal cysteine, or a combination thereof, or additional residues such as residues identified through an alignment of any one of SEQ ID NOS: 1-1713, 1714-2787, 2789, 2790, 2791, 2792, 2793 and 2803. Described herein are polypeptides comprising any one of SEQ ID NOS: 1-1713, 1714-2787, 2789, 2790, 2791, 2792, 2793 and 2803 (+1 residue), such as an adjacent N-terminal threonine, an adjacent C-terminal cysteine, or a combination thereof, or additional residues such as residues identified through an alignment of any one of SEQ ID NOS: 1-1713, 1714-2787, 2789, 2790, 2791, 2792, 2793 and 2803. Described herein are polypeptides comprising any one of SEQ ID NOS: 1-1713, 1714-2787, 2789, 2790, 2791, 2792, 2793 and 2803 (+1 residue), such as an adjacent N-terminal threonine, an adjacent C-terminal cysteine, or a combination thereof, or additional residues such as residues identified through an alignment of any one of SEQ ID NOS: 1-1713, 1714-2787, 2789, 2790, 2791, 2792, 2793 and 2803. Described herein are polypeptides comprising any one of SEQ ID NOS: 1-1713, 1714-2787, 2789, 2790, 2791, 2792, 2793 and 2803 (+1 residue), such as an adjacent N-terminal aspartic acid, an adjacent C-terminal leucine, or a combination thereof, or additional residues such as residues identified through an alignment of any one of SEQ ID NOS: 1-1713, 1714-2787, 2789, 2790, 2791, 2792, 2793 and 2803. Described herein are polypeptides comprising any of SEQ ID NOS: 1-1713, 1714-2787, 2789, 2790, 2791, 2792, 2793 and 2803 (+1 residue), such as an adjacent N-terminal aspartic acid, an adjacent C-terminal arginine, or a combination thereof, or additional residues such as residues identified through an alignment of any one of SEQ ID NOS: 1-1713, 1714-2787, 2789, 2790, 2791, 2792, 2793 and 2803. Described herein are polypeptides comprising any one of SEQ ID NOS: 1-1713, 1714-2787, 2789, 2790, 2791, 2792, 2793 and 2803 (+1 residue), such as an adjacent N-terminal threonine, an adjacent C-terminal threonine, or a combination thereof, or additional residues such as residues identified through an alignment of any one of SEQ ID NOS: 1-1713, 1714-2787, 2789, 2790, 2791, 2792, 2793 and 2803. Described herein are polypeptides comprising any one of SEQ ID NOS: 1-1713, 1714-2787, 2789, 2790, 2791, 2792, 2793 and 2803 (+1 residue), such as an adjacent N-terminal threonine, an adjacent C-terminal asparagine, or a combination thereof, or additional residues such as residues identified through an alignment of any one of SEQ ID NOS: 1-1713, 1714-2787, 2789, 2790, 2791, 2792, 2793 and 2803. Described herein are polypeptides comprising any one of SEQ ID NOS: 1-1713, 1714-2787, 2789, 2790, 2791, 2792, 2793 and 2803 (+1 residue), such as an adjacent N-terminal threonine, an adjacent C-terminal asparagine, or a combination thereof, or additional residues such as residues identified through an alignment of any one of SEQ ID NOS: 1-1713, 1714-2787, 2789, 2790, 2791, 2792, 2793 and 2803. Described herein are polypeptides comprising any one of SEQ ID NOS: 1-1713, 1714-2787, 2789, 2790, 2791, 2792, 2793 and 2803 (+1 residue), such as an adjacent N-terminal threonine, an adjacent C-terminal serine, or a combination thereof, or additional residues such as residues identified through an alignment of any one of SEQ ID NOS: 1-1713, 1714-2787, 2789, 2790, 2791, 2792, 2793 and 2803.

### Engineered Polymerases Comprising RLF 89458.1 or RLF 78286.1 Backbone Sequence

[0164] The present disclosure provides one or more mutant polymerases comprising a backbone sequence of RLF 89458.1 or RLF 78286.1 and having 100%, at least 99%, at least 98%, at least 97%, at least 95%, at least 90% at least 85%, at least 80%, at least 75%, at least 70%, at least 65%, at least 60%, at least 55%, or at least 50% sequence identity to any of SEQ ID NOS: 1-1713 (Table 1 and FIGS. 11-12). The amino acid sequences of RLF 89458.1 and RLF 78286.1 differ by an amino acid substitution at position 235, where RLF 78286.1 includes D235E.

[0165] In some embodiments, the mutant polymerases having a backbone sequence of RLF 89458.1 (e.g., SEQ ID NO:1) or RLF 78286.1 (SEQ ID NO:2) comprise various domains.

[0166] In some embodiments, the N-terminal domain comprises amino acid residues 1-134 (SEQ ID NO:2804) (e.g., FIG. 29).

[0167] In some embodiments, the exonuclease domain (e.g., 3′ to 5′ exonuclease domain) comprises amino acid residues 135-356 (SEQ ID NO:2805) (e.g., FIG. 29).

[0168] In some embodiments, the first palm domain comprises amino acid residues 357-454 (SEQ ID NO:2806) (e.g., FIG. 29).

[0169] In some embodiments, the finger(s) domain comprises amino acid residues 455-504 (SEQ ID NO:2807) (e.g., FIG. 29).

[0170] In some embodiments, the second palm domain comprises amino acid residues 505-615 (SEQ ID NO:2808) (e.g., FIG. 29).

[0171] In some embodiments, the thumb domain comprises amino acid residues 616-765 (SEQ ID NO:2809) (e.g., FIG. 29).

[0172] The present disclosure provides compositions and methods comprising mutant polymerases have a backbone sequence of RLF 89458.1 (e.g., SEQ ID NO:1) or RLF 78286.1 (SEQ ID NO:2) and comprise at least one amino acid substitution mutation that reduces 3′ to 5′ exonuclease activity compared to a polymerase that lacks an exo-minus mutation. For example, the mutant polymerases comprise at least one amino acid substitution at positions D141 and/or E143. In some embodiments, the mutant polymerases comprise a mutation D141A, D141V, D141L, D141I, D141F, D141Y, D141N, D141T, D141S, D141R, D141K, D141Q, D141W, D141E, D141M, D141P, D141G, D141H or D141C. In some embodiments, the mutant polymerases comprise a mutation E143A, E143V, E143L, E1431, E143F, E143Y, E143N, E143T, E143S, E143W, E143M, E143P, E143F, E143G, E143H, E143R, E143K, E143D, E143C or E143Q. In some embodiments, position E143 is not mutated. In some embodiments, the mutant polymerases comprise any combination of mutations at the D141 and the E143 sites.

[0173] In some embodiments, the mutant polymerases comprise non-mutated E143E, and a mutation D141A, D141V, D141L, D141I, D141F, D141Y, D141N, D141T, D141S, D141R, D141K, D141Q, D141W, D141E, D141M, D141P, D141G, D141H or D141C.

[0174] The present disclosure provides compositions and methods comprising mutant polymerase enzymes that can be used for sequencing a uracil-containing nucleic acid template molecule. The mutant polymerases can exhibit uracil-tolerance having increased ability to incorporate dATP into the 3′ end of a nucleic acid primer at a position that is opposite a uracil base in a nucleic acid template molecule. The mutant polymerases may also be capable of binding an adenine-bearing nucleotide unit of a multivalent molecule at a position that is opposite a uracil base in the nucleic acid template molecule. The mutant polymerases can exhibit increased uracil-tolerance compared to a wild type polymerase or compared to an engineered polymerase having mutations that do not confer uracil-tolerance. Mutant polymerases having a backbone sequence of RLF 89458 or RLF 78286 (e.g., SEQ ID NOS:1 or 2 respectively) that are uracil-tolerant may comprise a mutation at position Y7, T9, H89, Q91, V93 and/or R97. In some embodiments, the mutant polymerase comprises a backbone sequence of RLF 89458 or RLF 78286 (e.g., SEQ ID NOS:1 or 2 respectively) and having an amino acid substitution at position Y7, where the mutations comprise any of Y7A, Y7F, Y7N, Y7D, Y7R, Y7W, Y7H or Y7Q. In some embodiments, the mutant polymerase comprises a backbone sequence of RLF 89458 or RLF 78286 (e.g., SEQ ID NOS:1 or 2 respectively) and having an amino acid substitution at position T9, where the mutations comprise any of T9N, T9E, T9S, T9L, T9I, T9D, T9A or T9R. In some embodiments, the mutant polymerase comprises a backbone sequence of RLF 89458 or RLF 78286 (e.g., SEQ ID NOS:1 or 2 respectively) and having an amino acid substitution at position H89, where the mutations comprise any of H89D, H89A, H89Y, H89R, H89N, H89Q, H89K, H89F, H89L or H89V. In some embodiments, the mutant polymerase comprises a backbone sequence of RLF 89458 or RLF 78286 (e.g., SEQ ID NOS:1 or 2 respectively) and having an amino acid substitution at position Q91, where the mutations comprise any of Q91L, Q91H, Q91R, Q91W, Q91A, Q91K, Q91N, Q91P, Q91V or Q91Y. In some embodiments, the mutant polymerase comprises a backbone sequence of RLF 89458 or RLF 78286 (e.g., SEQ ID NOS:1 or 2 respectively) and having an amino acid substitution at position V93, where the mutations comprise any of V93A, V93M, V93E, V93F, V93Y, V93G, V93S, V93K, V93T or V93I. In some embodiments, the mutant polymerase comprises a backbone sequence of RLF 89458 or RLF 78286 (e.g., SEQ ID NOS:1 or 2 respectively) and having an amino acid substitution at position R97, where the mutations comprise any of R97C, R97H, R97S, R97P, R97L, R97A, R97N, R97Q, R97E, R97I, R97K, R97M or R97T.

[0175] Other uracil-tolerant mutant polymerases having a backbone sequence of NOZ 58130 (SEQ ID NO:1714), RMF 90817 (SEQ ID NO:2789), MBC 7218772 (SEQ ID NO:2790), WP 175059460 (SEQ ID NO:2791), KUO 42443 (SEQ ID NO:2792) or NOZ 77387 (SEQ ID NO:2793) may include a mutation that is positionally equivalent to Y7, T9, H89, Q91, V93 and/or R97 in RLF 89458 (SEQ ID NO:1). FIG. 33 shows a sequence alignment of these various polymerases and their positionally equivalent amino acid residues.

[0176] The present disclosure provides compositions and methods comprising mutant polymerases having a backbone sequence of RLF 89458.1 (e.g., SEQ ID NO:1) or RLF 78286.1 (SEQ ID NO:2) and comprise at least one amino acid substitution mutations of an LYP motif, for example at positions L409, Y410 and P411. In some embodiments, at least one mutation in the LYP motif can increase the incorporation rate of nucleotide analogs. In some embodiments, any one or any combination of the first, second and/or third positions of the LYP motif can be mutated. For example, mutations of the LYP motif include AAG, AAP, AAV, AAI, AGA, AGG, AGI, AGP, AGV, FAA, FAG, FAI, FAP, FAV, FGA, FGG, FGP, FGV, LAG, LAI, LAP, LGG, LGI, LGV, SAA, SAG, SAI, SAV, SGA, SGG, SGI, YAA, YAG, YAI, YAP, YGA, YGG, YGI, YGP, LAA, LAV, LGP, LGA, FGI, SGV, YAV, YGV, SYP, SAP, AAA, SGP, LFP, IFP, VFP, LMP, VMP, IMP, LLP, VLP, ILP, LDP, VDP, IDP, LTP, VTP, ITP, LIP, TIP, NNP, NDP, NAP, SYG, SSG, SSS, CAG, ASG, SSG, MFG and FTA.

[0177] In some embodiments, the polymerases comprise a backbone sequence of RLF 89458 or RLF 78286 (e.g., SEQ ID NOS:1 or 2 respectively) and having a substitution mutation at position L409 comprises a nonpolar amino acid or polar non-charged amino acid. In some embodiments, the amino acid substitution mutation at position L409 comprises valine, glycine, threonine, alanine, serine, isoleucine, leucine, phenylalanine, tyrosine or methionine. SEQ ID NOS: 1-1713 comprise exemplary amino acid substitution mutation at position L409.

[0178] In some embodiments, the polymerases comprise a backbone sequence of RLF 89458 or RLF 78286 (e.g., SEQ ID NOS:1 or 2 respectively) and having a substitution mutation at position Y410 comprises a non-polar amino acid or a polar uncharged amino acid. In some embodiments, the amino acid substitution mutation at position Y410 comprises threonine, serine, glycine, alanine, valine, isoleucine or tyrosine. SEQ ID NOS: 1-1713 comprise exemplary amino acid substitution mutation at position Y410.

[0179] In some embodiments, the polymerases comprise a backbone sequence of RLF 89458 or RLF 78286 (e.g., SEQ ID NOS:1 or 2 respectively) and having a substitution mutation at position P411 comprises a polar uncharged amino acid, non-polar amino acid or a positively charged amino acid. In some embodiments, the amino acid substitution mutation at position P411 comprises serine, glycine, alanine, valine, cysteine, lysine, isoleucine, threonine or proline. SEQ ID NOS: 1-1713 comprise exemplary amino acid substitution mutation at position P411.

[0180] The present disclosure provides compositions and methods comprising mutant polymerases having a backbone sequence of RLF 89458 or RLF 78286 (e.g., SEQ ID NOS:1 or 2 respectively) and having at least one mutation to reduce post-translational modifications. In some embodiments, the polymerase comprises at least one mutation or any combination of mutations of methionine, lysine, histidine, tryptophan and/or cysteine residue(s). In some embodiments, the polymerases comprise an amino acid substitution at position M1, M129, M159, M313, M329, M467 and/or M759. In some embodiments, the mutation at position M1 comprises M1F, M1I, M1L, M1S, M1N, M1A, M1V, M1Y, M1Q, M1K, M1V or M1A. In some embodiments, the mutation at position M129 comprises M129I, M129V, M129K, M129L, M129E, M129F, M129N, M129S, M129R or M129Y. In some embodiments, the mutation at position M159 comprises M159W, M159F or M159Y. In some embodiments, the mutation at position M313 comprises M313I, M313K, M313L, M313V, M313D, M313R, M313E, M313A, M313L or M313N. In some embodiments, the mutation at position M329 comprises M329L, M329S, M329W, M329A, M329R, M329I, M329Q, M329N or M329E. In some embodiments, the mutation at position M467 comprises M467V, M467K, M467D, M467T, M467R, M467E, M467Q or M467L. In some embodiments, the mutation at position M759 comprises M759T, M759S, M759N, M759R, M759E, M759D or M759A.

[0181] In some embodiments, the polymerases comprise a backbone sequence of RLF 89458 or RLF 78286 (e.g., SEQ ID NOS:1 or 2 respectively) and having an amino acid substitution to reduce post-translational modifications, including a mutation at position K240, K306, K371, K429, K468, K476, and/or K592. In some embodiments, the mutation at position K240 comprises K240S, K240E, K240R, K240D, K240N, K240Q or K240A. In some embodiments, the mutation at position K306 comprises K306R, K306N, K306Q, K306A, K306V, K306I or K306F. In some embodiments, the mutation at position K371 comprises K371R, K371D, K371N, K371Q, K371Y, K371T, K371V or K371L. In some embodiments, the mutation at position K429 comprises K429R, K429S, K429M, K429A, K429N, K429D, K429Q, K429H, K429Y, K429V, K429L or K429E. In some embodiments, the mutation at position K468 comprises K468R, K468E, K468Y, K468T or K468L. In some embodiments, the mutation at position K476 comprises K476R, K476D, K476A, K476F or K476R. In some embodiments, the mutation at position K592 comprises K592Q, K592R, K592W, K592Y, K592A, K592F, K5921, K592T, K592N or K592S.

[0182] In some embodiments, the polymerases comprise a backbone sequence of RLF 89458 or RLF 78286 (e.g., SEQ ID NOS:1 or 2 respectively) and having an amino acid substitution to reduce post-translational modifications, including a mutation at position W299 and/or W767. In some embodiments, the mutation at position W299 comprises W299F, W299E, W299N, W299Q, W299Y, W299A or W299F. In some embodiments, the mutation at position W767 comprises W767H, W767Y, W767F, W767S, W767R, W767D, W767A or W767N.

[0183] In some embodiments, the polymerases comprise a backbone sequence of RLF 89458 or RLF 78286 (e.g., SEQ ID NOS:1 or 2 respectively) and having an amino acid substitution to reduce post-translational modifications, including a mutation at position H601. In some embodiments, the mutation at position H601 comprises H601R, H601I, H601A, H601T, H601V, H601L, H601N or H601K.

[0184] In some embodiments, the polymerases comprise a backbone sequence of RLF 89458 or RLF 78286 (e.g., SEQ ID NOS:1 or 2 respectively) and having an amino acid substitution to reduce post-translational modifications, including a mutation at position C428. In some embodiments, the mutation at position C428 comprises C428Y.

[0185] The present disclosure provides compositions and methods comprising mutant polymerases having a backbone sequence of RLF 89458 or RLF 78286 (e.g., SEQ ID NOS:1 or 2 respectively) and having at least one mutation to remove unpaired cysteines which may reduce oxidative damage to the polymerases. In some embodiments, removal of at least one unpaired cysteine increases thermal stability of the mutant polymerase and/or reduces protein aggregation. In some embodiments, removal of at least one unpaired cysteine increases the amount of protein in a lysate preparation. In some embodiments, the polymerase comprises at least one mutation or any combination of mutations of cysteines at position 223 and/or 509. In some embodiments, the mutation at position C223 comprises an amino acid substitution C223L, C223M, C223A, C223S, C223P, C223K, C223N, C223D or C223V. In some embodiments, the mutation at position C509 comprises an amino acid substitution C509V, C509Y, C509S, C509M, C509A, C509N, C509D, C509H or C509Q.

[0186] In some embodiments, the polymerases comprise a backbone sequence of RLF 89458 or RLF 78286 (e.g., SEQ ID NOS:1 or 2 respectively) and having an amino acid substitution to remove unpaired cysteines, including an amino acid substitution at positions C509 and V419. In some embodiments, the mutation at C509 comprises any of C509V, C509Y, C509S, C509M, C509A, C509N, C509D, C509H or C509Q. In some embodiments, the mutation at V419 comprises any of V419I, V419L or V419R.

[0187] In some embodiments, the polymerases comprise a backbone sequence of RLF 89458 or RLF 78286 (e.g., SEQ ID NOS:1 or 2 respectively) and having an amino acid substitution to remove unpaired cysteines, including an amino acid substitution at positions C509 and Q497. In some embodiments, the mutation at C509 comprises any of C509V, C509Y, C509S, C509M, C509A, C509N, C509D, C509H or C509Q. In some embodiments, the mutation at Q497 comprises Q497H, Q497G, Q497M, Q497N, Q497F, Q497L, Q497R, Q497K, Q497T, Q497E, Q497D or Q497Y.

[0188] In some embodiments, the polymerases comprise a backbone sequence of RLF 89458 or RLF 78286 (e.g., SEQ ID NOS:1 or 2 respectively) and having an amino acid substitution to remove unpaired cysteines, including an amino acid substitution at positions C509 and 5512. In some embodiments, the mutation at C509 comprises any of C509V, C509Y, C509S, C509M, C509A, C509N, C509D, C509H or C509Q. In some embodiments, the mutation at S512 comprises S512R, S512D, S512E, S512H, S512F, S512K, S512W or S512D.

[0189] The present disclosure provides compositions and methods comprising mutant polymerases having a backbone sequence of RLF 89458 or RLF 78286 (e.g., SEQ ID NOS:1 or 2 respectively) and having at least one mutation to increase thermal stability of the polymerase compared to a wild type polymerase or compared to an engineered polymerase having mutations that do not confer increased thermal stability. In some embodiments, the polymerase exhibits thermal stability at an elevated temperature of about 72-75° C., or about 75-80° C., or about 80-85° C., or about 85-90° C., or higher temperatures. In some embodiments, a thermal shift assay using differential scanning fluorimetry can be used to determine the thermal stability of a polymerase.

[0190] In some embodiments, the polymerases comprise a backbone sequence of RLF 89458 or RLF 78286 (e.g., SEQ ID NOS:1 or 2 respectively) and having an amino acid substitution to increase thermal stability comprise an amino acid substitution at one or more positions that also confers exonuclease-minus activity including D141 and/or E143. In some embodiments, polymerases that are engineered to exhibit increased thermal stability comprise an amino acid substitution at position M329 alone or in combination with D141 and/or E143. In some embodiments, polymerases that are engineered to exhibit increased thermal stability comprise an amino acid substitution at position D315 alone or in combination with D141 and/or E143. In some embodiments, polymerases that are engineered to exhibit increased amounts of protein (e.g., polymerase enzyme) in a lysate preparation comprise an amino acid substitution D141N alone or in combination with non-mutated E143 or any amino acid substitution of E143. An increased amount of protein in a lysate preparation can increase the yield of active polymerase in a manufacturing process.

[0191] In some embodiments, the mutation at D141 comprises D141A, D141V, D141L, D141I, D141F, D141Y, D141N, D141T, D141S, D141R, D141K, D141Q, D141W, D141E, D141M, D141P, D141G, D141H or D141C.

[0192] In some embodiments, the mutation at E143 comprises E143A, E143V, E143L, E143I, E143F, E143Y, E143N, E143T, E143S, E143W, E143M, E143P, E143G, E143H, E143R, E143K, E143D, E143C or E143Q.

[0193] In some embodiments, the mutation at M329 comprises M329L, M329S, M329W, M329A, M329R, M329I, M329Q, M329N or M329E.

[0194] In some embodiments, the mutation at D315 comprises D315A, D315E, D315R, D315W, D315L, D315W, D315F.

[0195] The present disclosure provides compositions and methods comprising mutant polymerases having a backbone sequence of RLF 89458 or RLF 78286 (e.g., SEQ ID NOS:1 or 2 respectively) and having a C-terminus truncation to increase thermal stability of the polymerase compared to a non-truncated polymerase having the same wild type or engineered backbone sequence. The C-terminal region of a polymerase may be disordered and may contribute to protein aggregation. Thus, truncation at a C-terminal region can reduce protein aggregation and improve stability. In some embodiments, the polymerase exhibits thermal stability at an elevated temperature of about 72-75° C., or about 75-80° C., or about 80-85° C., or about 85-90° C., or higher temperatures. In some embodiments, a thermal shift assay using differential scanning fluorimetry can be used to determine the thermal stability of a polymerase.

[0196] In some embodiments, the polymerases comprise a backbone sequence of RLF 89458 or RLF 78286 (e.g., SEQ ID NOS:1 or 2 respectively) and are engineered to exhibit increased thermal stability, where the polymerases comprise a truncation at an amino acid position including K464 (truncated), R465 (truncated), E475 (truncated), Y481 (truncated), E616 (truncated), E620 (truncated), E755 (truncated), Y756 (truncated), Q757 (truncated), R758 (truncated), M759 (truncated), T762 (truncated), W767 (truncated) or M770 (truncated). In Table 1 and 2, a truncation is designated with a “\hat{ }”.

[0197] The present disclosure provides compositions and methods comprising mutant polymerases having a backbone sequence of RLF 89458 or RLF 78286 (e.g., SEQ ID NOS:1 or 2 respectively) and having an N-terminus truncation to increase thermal stability of the polymerase compared to a non-truncated polymerase having the same wild type or engineered backbone sequence. In some embodiments, the engineered polymerase comprises a deleted methionine at position 1. Table 1 lists various engineered polymerases having deleted methionine at position 1 which is designated “M1X”, and their Tm1 and Tm2 data.

[0198] The present disclosure provides compositions and methods comprising mutant polymerases having a backbone sequence of RLF 89458 or RLF 78286 (e.g., SEQ ID NOS:1 or 2 respectively) and having at least one mutation that reduces polymerization-to-exonuclease conformational switching compared to a wild type polymerase or compared to an engineered polymerase having mutations that do not reduce conformational switching. In some embodiments, protein modeling can identify key amino acid residues that interact with the primer or the primer end, where these amino acid residues may play a role in interacting with the primer, or transferring the primer end from the polymerization site to the exonuclease site. In some embodiments, the polymerases comprise an amino acid substitution at any one or any combination of positions V610, D613, Q664, E668, P677 and/or D671.

[0199] In some embodiments, the mutation at V610 comprises V610D, V610A, V610K, V610S, V610T, V610N, V610R or V610Q.

[0200] In some embodiments, the mutation at D613 comprises D613S, D613E, D613R, D613K, D613N, D613Q, D613A, D613V, D613Y or D613F.

[0201] In some embodiments, the mutation at Q664 comprises Q664A, Q664L, Q664V, Q664F, Q664I, Q664R, Q664K, Q664T, Q664N or Q664M.

[0202] In some embodiments the mutation at E668 comprises E668G, E668K, E668M, E668A, E668P, E668S, E668R, E688N, E688D, E668Y or E668Q.

[0203] In some embodiments, the mutation at P677 comprises P677L, P677R, P677K or P677A.

[0204] In some embodiments, the mutation at D671 comprises D671G, D671R, D671Y, D671S, D671A, D671K or D671N.

[0205] The present disclosure provides compositions and methods comprising mutant polymerases having a backbone sequence of RLF 89458 or RLF 78286 (e.g., SEQ ID NOS:1 or 2 respectively) and having at least one mutation that reduces protein aggregation by reducing intermolecular interactions compared to a wild type polymerase or compared to an engineered polymerase having mutations that do not confer reduced aggregation. In some embodiments, the mutant polymerase aggregates at an elevated temperature of about 72-75° C., or about 75-80° C., or about 80-85° C., or about 85-90° C., or higher temperatures, compared to a wild type polymerase or compared to an engineered polymerase having mutations that do not confer reduced aggregation. In some embodiments, a thermal shift assay using differential scanning fluorimetry can be used to determine the temperature of aggregation of a protein.

[0206] In some embodiments, the polymerases comprise a backbone sequence of RLF 89458 or RLF 78286 (e.g., SEQ ID NOS:1 or 2 respectively) and having an amino acid substitution to reduce aggregation comprise an amino acid substitution at one or more positions N11, K507, K511 and/or K637.

[0207] In some embodiments, the mutation at position N11 comprises N11S, N11A, N11R, N11Q, N11E, N11K, N11T or N11D.

[0208] In some embodiments, the mutation at position K507 comprises K507L, K507E, K507S, K507A, K507N, K507Q, K507E, K507T or K507D.

[0209] In some embodiments, the mutation at position K511 comprises E511K, E511S, E511A, E511R, E511N, E511T, E511Q, E511L, E511D or E511A.

[0210] In some embodiments, the mutation at position K637 comprises K637M, K637A, K637N, K637Q, K637E, K637S or K637T.

[0211] The present disclosure provides compositions and methods comprising mutant polymerases having a backbone sequence of RLF 89458.1 (e.g., SEQ ID NO:1) or RLF 78286.1 (SEQ ID NO:2) and comprising amino acid substitution mutations at any one or any combination of positions including M1, L3, D4, D6, Y7, I8, T9, E10, N11, G12, K13, P14, V15, I16, R17, I18, F19, K20, K21, E22, K23, G24, E25, F26, K27, 128, E29, Y30, D31, R32, N33, F34, E35, P36, Y37, 138, Y39, A40, L41, L42, E43, D44, D45, E46, S47, 148, E49, D50, I51, K52, K53, 154, T55, R58, G56, E57, R58, H59, G60, K61, K62, V63, I65, I66, R67, V68, E69, K70, V71, K72, K73, K74, F75, L76, G77, E78, P79, 180, E81, V82, W83, K84, L85, V86, F87, E88, H89, P90, Q91, D92, V93, P94, A95, I96, R97, D98, A99, I100, R101, S102, H103, P104, A105, V106, R107, E108, I109, F110, E111, Y112, D113, I114, P115, F116, A117, K118, R119, Y120, L121, I122, D123, K124, L126, V127, P128, M129, E130, G131, G132, E133, L135, K136, L137, L138, A139, F140, D141, I142, E143, T144, F145, Y146, H147, E148, D150, E151, E156, M159, S166, W173, K174, I176, Y180, A190, I191, K192, L195, L198, R199, Q196, P203, V205, L207, Y209, G211, N213, F214, D215, F216, A217, Y218, 1219, K220, C223, E224, K225, G227, L228, K229, F230, T231, 1232, G233, R234, S237, E238, P239, K240, 1241, Q242, R243, M244, G245, D246, R247, A249, E251, L258, Y261, P262, V264, R265, H266, T267, 1268, R269, L270, P271, T272, Y273, T274, L275, E276, A277, V278, V282, F283, K285, K286, K287, E288, K289, V290, Y291, A292, 1295, E297, A298, W299, K300, S301, E302, L305, K306, R307, V308, A309, Q310, Y311, M313, D315, R317, A318, Y320, E321, P328, V331, M329, E332, L333, A334, 1337, G338, Q339, V341, D343, S345, S347, S348, T349, G350, N351, L352, V353, W355, Y356, L357, R359, V360, Y362, N365, E366, L367, K371, P372, G373, G374, E375, E376, Y377, Q378, M381, S383, S384, Y385, 1386, G388, Y389, E394, K395, G396, E399, S400, A402, Y403, L404, F406, R407, S408, L409, Y410, P411, S412, I413, V415, H417, V419, P421, D422, T423, L424, E425, E427, C428, K429, N430, Y431, V433, A434, 1436, Y439, R440, K443, K446, G447, F448, 1449, P450, S451, 1452, L453, E454, D455, 1457, T459, K462, V463, K464, R465, M467, K468, T470, 1471, D472, 1474, E475, K476, M478, Y481, R484, A485, L486, K487, 1488, N491, S492, Y493, Y494, G495, Q497, G498, Y499, P500, K501, S506, K507, E508, C509, E511, S512, V513, T514, G517, R518, H519, 1521, T523, A528, E529, K534, V535, Y537, A538, D539, T540, D541, G542, F543, F544, 1547, N549, E550, K551, P552, 1555, S557, K558, A559, K560, K561, L563, K564, H565, E568, K569, G572, M573, E575, E577, L583, G585, F586, V588, T589, K592, Y593, L595, 1596, D599, H601, T604, R605, G606, L607, V609, V610, R611, R612, D613, E616, 1617, K619, E620, T621, Q622, A623, K624, V625, L626, E627, V628, 1629, L630, R631, E632, G633, S634, 1635, E636, K637, A638, A639, G640, 1641, V642, K644, V645, V646, E647, D648, L649, A650, N651, Y652, R653, V654, V656, E657, K658, 1660, H662, E663, Q664, 1665, T666, R667, E668, K670, D671, Y672, K673, A674, T675, G676, P677, H678, V679, A680, 1681, A682, K683, R684, L685, Q686, A687, R688, G689, 1690, K691, V692, K693, P694, T696, 1698, S699, Y700, V701, V702, L703, K704, G705, S706, K707, K708, I709, D711, R712, V713, I714, L715, F716, D717, E718, Y719, D720, S721, S722, R723, K725, Y726, P728, Y730, Y731, 1732, H733, N734, Q735, V736, P738, A739, V740, L741, R742, 1743, L744, E745, A746, F747, G748, Y749, K750, E751, K752, D753, L754, E755, Y756, Q757, R758, M759, K760, Q761, T762, G763, L764, G765, A766, W767, L768 and/or M770.

[0212] The present disclosure provides compositions and methods comprising mutant polymerases having a backbone sequence of RLF 89458.1 (e.g., SEQ ID NO:1) or RLF 78286.1 (SEQ ID NO:2) and comprise amino acid substitution mutations at any one or any combination of positions including M1F, M1I, M1L, M1S, M1N, M1A, M1V, M1Y, M1Q, M1K, M1V, M1A, L3I, D4R, D4A, D6S, D6R, Y7A, Y7F, Y7N, Y7D, Y7R, Y7W, Y7H, Y7Q, I8S, T9N, T9E, T9S, T9L, T9I, T9D, T9A, T9R, E10V, E10D, E10K, E10R, E10A, E10N, N11S, N11A, N11R, N11Q, N11E, N11K, N11T, N11D, G12S, G12D, G12E, K13E, P14Q, P14N, P14S, V151, 116T, I16N, I16F, R17H, R17C, I18V, I18L, F19Y, F19S, F19I, K20M, K20E, K21E, E22G, E22V, E22K, K23E, K23M, K23R, K23A, K23N, G24S, E25K, F26L, K27M, I28F, I28N, I28T, I28V, I28F, E29V, E29D, Y30F, Y30N, Y30D, Y30K, D31V, R32C, R32S, N33S, F34S, F34I, E35K, E35G, E35D, P36L, P36A, P36G, P36V, P36M, P36T, P36K, Y37N, Y37F, I38T, I38N, Y39F, A40G, A40V, A40T, L41P, L41F, L41Y, L41D, L41E, L42P, L42Q, E43V, E43K, E43D, D44N, D44G, D45V, E46V, E46S, S47N, S47G, S47R, S47A, I48V, E49G, E49K, D50V, D50G, D50N, D50E, I51K, I51F, 151V, K52I, K52R, K53E, I54T, I54N, I54F, I54K, I54V, T55I, T55S, T55A, G56D, G56S, G56V, G56A, E57G, E57K, R58C, R58L, R58H, H59L, H59Y, G60S, G60D, K61M, K61T, K62N, K62E, K62R, K62T, K62V, V63A, V63I, V63D, I65T, I65V, I65F, I65N, I66V, I66T, I66N, I66K, R67C, V68M, V68A, E69K, K70I, V71I, K72H, K72R, K72V, K72Q, K73E, K74E, K74R, K74N, K74Q, F75C, L76Q, G77D, G77S, E78K, E78G, E78N, E78S, E78R, P79S, I80F, I80N, I80K, I80S, I80R, E81D, E81V, V82A, W83R, K84R, L85V, L85Q, L85A, V86D, V86I, V86A, V86Y, F87I, F87L, F87C, E88K, E88D, E88N, E88T, H89D, H89A, H89Y, H89R, H89N, H89Q, H89K, H89F, H89L, H89V, P90L, P90S, P90D, P90R, P90A, P90G, P90V, P90M, P90T, P90K, Q91L, Q91H, Q91R, Q91W, Q91A, Q91K, Q91N, Q91P, Q91V, Q91Y, D92N, D92V, D92E, D92R, V93A, V93M, V93E, V93F, V93Y, V93G, V93S, V93K, V93T, V93I, V93L, P94L, P94W, P94Y, P94Q, P94F, P94S, A95V, I96T, I96K, I96S, R97C, R97H, R97S, R97P, R97L, R97A, R97N, R97Q, R97E, R97I, R97K, R97M, R97T, D98E, D98N, D98V, A99T, A99K, HOOT, R101C, R101H, S102N, S102G, S102E, H103R, H103L, H103Q, H103Y, P104T, P104L, A105S, V106A, V106T, R107C, R107S, R107V, E108V, I109K, I109N, I109F, F110L, F110S, F110Y, E111V, E111G, Y112C, D113G, D113Y, I114T, I114A, I114G, I114V, I114M, I114T, I114K, P115C, P115L, P115S, P115R, P115F, F116L, F116S, F116A, A117T, A117V, A117K, K118M, K118R, K118A, K118Q, K118Y, K118N, R119H, R119S, R119C, R119A, R119G, R119V, R119M, R119T, R119K, R119Y, Y120C, Y120N, L121M, I122V, I122F, I122N, I122D, D123G, D123E, D123N, D123V, K124N, K124E, K124R, L126F, L126P, L126Q, V127M, V127I, P128L, P128M, M129I, M129V, M129K, M129L, M129E, M129F, M129N, M129S, M129R, M129Y, E130D, E130G, E130V, E130K, E130T, G131S, G132S, G132D, E133K, L135M, L135P, L135Q, K136E, K136R, K136L, L137F, L137M, L138P, A139E, F140Y, F140L, F140S, D141A, D141V, D141L, D141I, D141F, D141Y, D141N, D141T, D141S, D141R, D141K, D141Q, D141W, D141E, D141M, D141P, D141G, D141H, D141C, I142V, I142F, I142A, E143A, E143V, E143L, E143I, E143F, E143Y, E143N, E143T, E143S, E143W, E143M, E143P, E143G, E143H, E143R, E143K, E143D, E143C, E143Q, T144F, F145L, Y146C, Y146A, Y146E, Y146S, Y146E, Y146K, Y146T, Y146R, H147E, H147R, H147E, H147D, H147N, H147Q, H147K, H147A, E148S, E148D, E148R, E148A, D150R, D150E, E151R, E156P, M159W, M159F, M159Y, S166E, W173R, W173A, W173Q, W173N, W173H, W173F, K174N, K174D, K174E, K174Q, I176V, Y180F, A190V, A190M, I191L, K192L, L195A, R199H, Q196R, L198I, L198V, P203S, V205A, L207I, L207V, Y209A, Y209E, Y209W, G211S, N213E, N213W, N213Y, F214A, F214E, F214W, F214V, D215A, D215N, D215Q, D215E, D215R, D215K, D215P, F216L, A217N, A217T, A217Q, A217S, Y218H, I219V, I219L, K220R, K220N, K220Q, K220H, K220I, K220L, K220M, K220Y, C223V, C223E, C223S, C223L, C223M, C223A, C223P, C223K, C223N, C223D, E224V, E224R, E224K, K225E, G227S, L228P, L228I, L228V, K229R, K229N, K229Q, K229H, F230L, T231I, T231P, I232F, G233D, R234C, S237G, S237C, E238S, E238R, P239S, K240S, K240E, K240R, K240D, K240N, K240Q, K240A, I241T, I241Q, I241E, I241N, I241A, I241S, I241D, I241P, Q242N, Q242S, Q242R, Q242D, Q242E, Q242V, R243E, M244T, M244K, G245D, G245S, G245R, G245A, G245N, G245K, D246R, D246L, D246E, D246V, D246Q, R247E, R247D, R247S, R247H, A249G, A249V, E251S, E251R, E251A, L258I, L258Q, L258F, Y261A, Y261P, Y261T, P262S, P262R, P262L, P262D, P262E, P262Q, V264I, V264A, R265D, R265I, H266F, H266W, H266Y, H266R, H266I, H266L, H266A, H266K, T267A, T267F, T267M, T267V, T267W, T267Y, T267I, T267S, I268A, I268F, I268M, I268V, I268W, I268Y, R269L, R269K, R269S, R269T, R269V, R269N, R269H, R269Y, L270R, P271S, P271F, P271E, P271L, P271Q, P271N, T272A, T272Y, T272V, T272S, T272L, T272E, T272C, T272R, T272W, T272N, T272F, T272H, T272K, Y273A, Y273W, T274E, T274W, T274S, T274D, T274V, T274A, T274R, T274N, L275P, L275M, E276K, A277V, V278M, V282L, V282T, V282G, V282I, F283L, K285I, K285Q, K286E, K286P, K287R, E288G, E288K, K289E, K289Q, K289N, K289I, K289R, V290E, Y291F, Y291N, Y291D, Y291K, Y291R, Y291Q, Y291A, A292N, A292T, A2921, 1295N, E297G, A298G, W299F, W299E, W299N, W299Q, W299Y, W299A, W299F, K300S, K300E, S301N, S301T, E302G, L305P, K306R, K306N, K306Q, K306A, K306V, K306I, K306F, R307C, V308I, V308A, A309S, Q310R, Y311A, Y311E, Y311W, Y311F, M313I, M313K, M313L, M313V, M313D, M313R, M313E, M313A, M313L, M313N, D315A, D315E, D315R, D315W, D315L, D315W, D315F, R317C, R317K, A318V, Y320F, E321L, P328A, M329L, M329S, M329W, M329A, M329R, M329I, M329Q, M329N, M329E, V331A, E332K, E332G, E332Q, L333A, L333V, L333I, L333F, A334S, I337V, G338D, Q339N, V341L, D343E, D343N, D343R, D343A, S345C, S345R, S347N, S347T, S347R, S347A, S348C, T349A, T349E, T349F, T349I, T349L, T349N, T349S, T349Y, G350S, N351S, N351Q, N351R, N351I, N351Y, N351K, N351A, N351E, L352M, V353Q, V353E, W355R, W355F, Y356N, Y356C, Y356L, Y356F, L357P, R359H, V360A, V360D, V360I, V360K, Y362I, Y362E, Y362F, Y362N, Y362D, Y362K, Y362R, Y362T, N365S, E366A, E366D, E366N, E366Q, E366R, L367P, K371R, K371D, K371N, K371Q, K371Y, K371T, K371V, K371L, P372S, P372M, G373S, G373D, G374E, E375R, E375K, E376K, Y377L, Q378R, Q378A, Q378E, Q378K, M381I, M381R, M381V, M381D, M381L, S383G, S383Q, S383E, S383T, S384A, S384R, S384D, S384Q, S384E, S384T, Y385R, Y385S, Y385F, Y385K, Y385H, Y385W, Y385A, Y385M, Y385F, Y385D, I386A, I386N, I386D, I386E, I386K, I386T, I386L, G388S, G388R, Y389R, Y389S, Y389F, Y389N, Y389D, Y389K, Y389A, Y389Q, Y389E, Y389I, E394G, K395R, G396S, E399D, S400N, S400D, A402T, A402V, Y403H, Y403L, Y403D, Y403Q, Y403E, Y403H, Y403K, Y403F, Y403W, Y403R, L404Q, F406Y, F406R, F406I, R407N, R407K, R407A, R407L, R407V, R407I, S408A, S408G, L409S, L409F, L409A, L409Y, L409I, L409V, L409T, L409N, L409C, L409M, Y410A, Y410G, Y410F, Y410M, Y410L, Y410D, Y410T, Y410I, Y410N, Y410V, Y410E, Y410S, Y410L, P411G, P411A, P4111, P411V, P411S, P411T, P411L, S412N, S412A, S412G, I413F, I413V, V415M, V415K, V415R, V415N, V415T, V415I, H417I, H417R, H417F, H417Y, H417V, V419I, V419L, V419R, P421S, D422V, T423I, T423L, L424Q, E425N, E427G, E427R, C428Y, K429R, K429S, K429M, K429A, K429N, K429D, K429Q, K429H, K429Y, K429V, K429L, K429E, N430E, Y431A, Y431D, V433A, A434V, A434D, A434P, I436T, I436F, I436A, I436R, I436N, I436D, I436Q, I436E, I436H, I436K, I436S, Y439H, R440H, K443R, K446P, G447D, F448I, F448L, I449N, I449F, P450L, S451N, S451T, S451A, S451D, I452L, L453Q, E454D, E454N, E454T, E454G, D455N, I457L, T459E, K462D, V463M, V463I, K464C, R465C, R465T, M467V, M467K, M467D, M467T, M467R, M467E, M467Q, M467L, K468R, K468E, K468Y, K468T, K468L, T470S, T470A, I471K, I471Q, I471S, I471V, I471K, D472V, D472E, D472N, I474C, I474F, I474V, I474L, E475C, K476R, K476D, K476A, K476F, K476R, M478L, Y481C, Y481A, Y481F Y481T, Y481V, Y481W, R484D, R484N, R484K, R484S, R484T, R484V, R484L, A485S, A485T, A485L, A485V, A485G, A485R, L486I, K487M, K487R, K487N, K487A, K487Q, K487Y, I488A, I488V, I488S, I488T, I488M, I488R, I488N, I488Q, I488E, I488K, I488L, N491T, N491S, N491A, N491I, S492G, S492Y, S492D, S492K, S492T, S492N, S492E, Y493T, Y493S, Y493I, Y493F, Y493W, Y494A, Y494N, Y494G, Y494F, Y494W, G495S, Q497H, Q497G, Q497M, Q497N, Q497F, Q497L, Q497R, Q497K, Q497T, Q497E, Q497D, Q497Y, G498R, G498D, G498E, G498F, G498I, G498S, Y499F, P500A, K501R, K501A, K501Q, K501Y, K501N, S506C, S506R, S506A, S506L, S506T, S506N, S506D, S506H, S506V, K507L, K507E, K507S, K507A, K507N, K507Q, K507E, K507T, K507D, E508Q, E508C, C509V, C509Y, C509S, C509M, C509A, C509N, C509D, C509H, C509Q, E511K, E511S, E511A, E511R, E511N, E511T, E511Q, E511L, E511D, E511A, S512R, S512D, S512E, S512H, S512F, S512K, S512W, S512D, V513T, V513I, V513L, V513M, V513F, V513A, V513S, T514A, T514G, T514S, T514V, T514I, T514S, G517A, G517S, G517V, G517T, R518C, H519N, H519Y, H519E, H519Q, I521N, I521T, I521E, I521H, T523I, T523A, A528L, A528I, E529N, K534N, K534S, K534R, V535N, V535K, V535S, V535R, Y537H, A538V, A538G, D539A, D539G, D539E, D539V, D539L, D539S, D539N, D539I, T540I, D541A, D541G, D541E, G542S, G542E, G542D, G542N, G542R, G542T, F543L, F544H, F544Y, I547F, I547T, I547P, N549G, E550A, K551D, P552L, I555V, S557C, S557K, K558A, K558V, K558Q, K558R, A559K, K561N, K561E, L653M, K564S, K564Q, H565Y, H565S, H565N, E568K, K569E, G572S, M573I, M573V, M573K, M573D, M573A, M573R, M573L, E575K, E577D, L583P, G585D, G585A, G585I, G585V, G585Y, G585F, G585T, F586I, V588E, V588T, T589K, K592Q, K592R, K592W, K592Y, K592A, K592F, K592I, K592T, K592N, K592S, Y593R, Y593N, Y593E, Y593H, Y593K, Y593F, Y593A, L595V, I596T, D599E, H601R, H601I, H601A, H601T, H601V, H601L, H601N, H601K, T604S, R605K, R605N, R605Q, R605H, R605D, R605E, R605S, R605T, R605Y, R605A, G606S, G606R, G606Y, G606Q, G606N, G606E, G606D, L607F, V609I, V609L, V610D, V610A, V610K, V610S, V610T, V610N, V610R, V610Q, R611M, R611E, R612E, R612H, R612F, R612W, R612M, R612S, R612N, R612G, R612L, R612I, D613S, D613E, D613R, D613K, D613N, D613Q, D613A, D613V, D613Y, D613F, E616C, E616G, I617V, K619R, K619A, K619S, K619T, K619V, E620D, E620K, E620C, E620V, T621I, T621S, Q622L, A623T, A623C, A623K, K624I, K624R, V625F, L626I, E627K, V628L, V628I, V628A, I629F, I629C, L630Q, L630M, R631H, R631C, R631D, R631K, E632G, E632C, E632D, E632H, G633S, G633D, S634C, S634D, I635V, I635N, I635T, E636G, E636K, E636D, K637M, K637A, K637N, K637Q, K637E, K637S, K637T, A638E, A638V, A638T, A639T, A639V, G640D, G640R, I641F, I641V, I641A, V642I, V642A, K644E, V645E, V645I, V645M, V646A, V646D, E647G, E647D, E647K, D648V, D648C, D648L, D648G, L649Q, A650E, A650V, A650T, A650N, A650S, N651S, N651K, Y652H, Y652C, Y652M, Y652L, Y652F, R653C, R653H, R653Y, R653E, V654M, V656I, V656I, E657V, K658R, K658E, K658I, K658L, I660V, H662V, E663K, E663R, E663S, E663M, E663Q, E663V, Q664A, Q664L, Q664V, Q664F, Q664I, Q664R, Q664K, Q664T, Q664N, Q664M, I665V, I665F, I665P, I665M, I665F, T666A, R667E, E668G, E668K, E668M, E668A, E668P, E668S, E668R, E688N, E688D, E668Y, E668Q, K670E, K670I, K670R, K670S, D671G, D671R, D671Y, D671S, D671A, D671K, D671N, Y672F, K673I, K673Y, K673R, K673S, K673E, A674T, A674V, A674S, T675S, T675I, T675A, G676S, G676F, G676E, G676Y, G676R, G676L, G676Q, P677L, P677R, P677K, P677A, H678R, H678K, H678Q, H678F, H678W, V679S, V679M, A680V, A680I, A680D, I681T, I681L, I681F, I681V, A682T, A682S, K683R, R684H, L685E, Q686R, Q686C, Q686L, Q686A, A687C, A687T, A687S, R688S, G689S, G689D, I690V, I690F, I690R, I690N, I690Q, I690K, I690T, I690Y, K691R, K691V, K691T, K691D, K691E, K691Q, K691N, V692I, K693M, K693V, K693Q, K693R, K693A, K693T, K693N, K693Y, K693S, K693E, K693D, P694R, T696S, T696I, T696L, T696M, I698K, I698M, I698F, I698Q, S699I, S699G, Y700W, Y700S, V701I, V702A, V702I, L703P, K704E, K704I, K704N, G705D, S706N, S706C, S706G, K707I, K707G, K707N, K708M, K708R, I709F, I709V, I709L, D711G, R712C, V713I, V713A, I714F, L715P, L715Q, F716L, D717N, E718K, E718V, Y719F, D720V, D720Y, D720E, S721N, S721C, S721G, S721P, S722G, R723H, K725E, K725L, K725R, Y726F, P728S, P728L, P728A, Y730H, Y731H, I732T, I732F, I732N, H733R, H733E, N734Y, N734R, N734P, N734D, N734K, N734T, Q735H, Q735R, V736A, P738L, A739V, V740I, L741A, L741Q, L741E, R742K, R742L, R742C, I743V, I743E, L744A, E745V, E745F, E745R, A746V, A746G, F747L, F747Y, G748V, G748K, Y749F, Y749E, K750N, K750R, E751K, E751D, E751M, K752E, K752L, D753V, D753E, D753G, L754Y, L754S, E755G, E755Q, E755D, E755K, E755Y, E755R, Y756C, Y756F, Y756I, Y756R, Y756Q, Y756K, Q757L, Q757H, Q757S, Q757M, R758H, R758A, R758K, M759T, M759S, M759N, M759R, M759E, M759D, M759A, Q761L, T762N, G765S, G765R, G765L, G765F, G765Y, G765I, G765T, G765D, G765E, W767H, W767Y, W767F, W767S, W767R, W767D, W767A, W767N, M770S, M770T and/or M770N.

[0213] In some embodiments, the mutant polymerases have a backbone sequence of RLF 89458.1 (e.g., SEQ ID NO:1) or RLF 78286.1 (SEQ ID NO:2) and comprise an amino acid deletion at any one or any combination of positions including M1 (deleted), R58 (deleted), V93 (deleted) and/or E755 (deleted).

[0214] In some embodiments, the mutant polymerases have a backbone sequence of RLF 89458.1 (e.g., SEQ ID NO:1) or RLF 78286.1 (SEQ ID NO:2) and having a substitution mutation at position M1. In some embodiments, the amino acid substitution at position M1 comprises any of the 20 natural amino acids (i.e., W, I, M, P, F, G, A, V, L, H, R, K, D, E, N, C, S, T, or Q) or with non-natural amino acids as are known to those of skill in the art.

[0215] In some embodiments, the mutant polymerases have a backbone sequence of RLF 89458.1 (e.g., SEQ ID NO:1) or RLF 78286.1 (SEQ ID NO:2) and having a substitution mutation at position Y7. In some embodiments, the amino acid substitution at position Y7 comprises any of the 20 natural amino acids (i.e., W, I, M, P, F, G, A, V, L, H, R, K, D, E, N, C, S, T, or Q) or with non-natural amino acids as are known to those of skill in the art.

[0216] In some embodiments, the mutant polymerases have a backbone sequence of RLF 89458.1 (e.g., SEQ ID NO:1) or RLF 78286.1 (SEQ ID NO:2) and having a substitution mutation at position K74. In some embodiments, the amino acid substitution at position K74 comprises any of the 20 natural amino acids (i.e., W, I, M, P, F, G, A, V, L, H, R, K, D, E, N, C, S, T, or Q) or with non-natural amino acids as are known to those of skill in the art.

[0217] In some embodiments, the mutant polymerases have a backbone sequence of RLF 89458.1 (e.g., SEQ ID NO:1) or RLF 78286.1 (SEQ ID NO:2) and having a substitution mutation at position E88. In some embodiments, the amino acid substitution at position E88 comprises any of the 20 natural amino acids (i.e., W, I, M, P, F, G, A, V, L, H, R, K, D, E, N, C, S, T, or Q) or with non-natural amino acids as are known to those of skill in the art.

[0218] In some embodiments, the mutant polymerases have a backbone sequence of RLF 89458.1 (e.g., SEQ ID NO:1) or RLF 78286.1 (SEQ ID NO:2) and having a substitution mutation at position V93. In some embodiments, the amino acid substitution at position V93 comprises any of the 20 natural amino acids (i.e., W, I, M, P, F, G, A, L, H, R, K, D, E, N, Y, C, S, T, or Q) or with non-natural amino acids as are known to those of skill in the art.

[0219] In some embodiments, the mutant polymerases have a backbone sequence of RLF 89458.1 (e.g., SEQ ID NO:1) or RLF 78286.1 (SEQ ID NO:2) and having a substitution mutation at position A217. In some embodiments, the amino acid substitution at position A217 comprises any of the 20 natural amino acids (i.e., W, I, M, P, F, G, A, L, H, R, K, D, E, N, Y, C, S, T, or Q) or with non-natural amino acids as are known to those of skill in the art.

[0220] In some embodiments, the mutant polymerases have a backbone sequence of RLF 89458.1 (e.g., SEQ ID NO:1) or RLF 78286.1 (SEQ ID NO:2) and having a substitution mutation at position Y261. In some embodiments, the amino acid substitution at position Y261 comprises any of the 20 natural amino acids (i.e., W, I, M, P, F, G, A, V, L, H, R, K, D, E, N, C, S, T, or Q) or with non-natural amino acids as are known to those of skill in the art.

[0221] In some embodiments, the mutant polymerases have a backbone sequence of RLF 89458.1 (e.g., SEQ ID NO:1) or RLF 78286.1 (SEQ ID NO:2) and having a substitution mutation at position T267. In some embodiments, the amino acid substitution at position T267 comprises any of the 20 natural amino acids (i.e., W, I, M, P, F, G, A, V, L, H, R, K, D, E, N, Y, C, S or Q) or with non-natural amino acids as are known to those of skill in the art.

[0222] In some embodiments, the mutant polymerases have a backbone sequence of RLF 89458.1 (e.g., SEQ ID NO:1) or RLF 78286.1 (SEQ ID NO:2) and having a substitution mutation at position 1268. In some embodiments, the amino acid substitution at position 1268 comprises any of the 20 natural amino acids (i.e., W, M, P, F, G, A, V, L, H, R, K, D, E, N, Y, C, S, T, or Q) or with non-natural amino acids as are known to those of skill in the art.

[0223] In some embodiments, the mutant polymerases have a backbone sequence of RLF 89458.1 (e.g., SEQ ID NO:1) or RLF 78286.1 (SEQ ID NO:2) and having a substitution mutation at position E366. In some embodiments, the amino acid substitution at position E366 comprises any of the 20 natural amino acids (i.e., W, M, P, F, G, A, V, L, H, R, K, D, E, N, Y, C, S, T, or Q) or with non-natural amino acids as are known to those of skill in the art.

[0224] In some embodiments, the mutant polymerases have a backbone sequence of RLF 89458.1 (e.g., SEQ ID NO:1) or RLF 78286.1 (SEQ ID NO:2) and having a substitution mutation at position 1436. In some embodiments, the amino acid substitution at position 1436 comprises any of the 20 natural amino acids (i.e., W, M, P, F, G, A, V, L, H, R, K, D, E, N, Y, C, S, T, or Q) or with non-natural amino acids as are known to those of skill in the art.

[0225] In some embodiments, the mutant polymerases have a backbone sequence of RLF 89458.1 (e.g., SEQ ID NO:1) or RLF 78286.1 (SEQ ID NO:2) and having a substitution mutation at position A485. In some embodiments, the amino acid substitution at position A485 comprises any of the 20 natural amino acids (i.e., W, I, M, P, F, G, V, L, H, R, K, D, E, N, Y, C, S, T, or Q) or with non-natural amino acids as are known to those of skill in the art.

[0226] In some embodiments, the mutant polymerases have a backbone sequence of RLF 89458.1 (e.g., SEQ ID NO:1) or RLF 78286.1 (SEQ ID NO:2) and having a substitution mutation at position T514. In some embodiments, the amino acid substitution at position T514 comprises any of the 20 natural amino acids (i.e., W, I, M, P, F, G, A, V, L, H, R, K, D, E, N, Y, C, S or Q) or with non-natural amino acids as are known to those of skill in the art.

[0227] In some embodiments, the mutant polymerases have a backbone sequence of RLF 89458.1 (e.g., SEQ ID NO:1) or RLF 78286.1 (SEQ ID NO:2) and having a substitution mutation at position D671. In some embodiments, the amino acid substitution at position D671 comprises any of the 20 natural amino acids (i.e., W, I, M, P, F, G, A, V, L, H, R, K, E, N, Y, C, S, T, or Q) or with non-natural amino acids as are known to those of skill in the art.

### Engineered Polymerases Comprising NOZ 58130.1 Backbone Sequence

[0228] The present disclosure provides compositions and methods comprising mutant polymerases having a backbone sequence of NOZ 58130.1 and having 100%, at least 99%, at least 98%, at least 97%, at least 95%, at least 90% at least 85%, at least 80%, at least 75%, at least 70%, at least 65%, at least 60%, at least 55%, or at least 50% sequence identity to any of SEQ ID NOS: 1714-2787 (Table 2 at FIG. 32, and FIG. 13).

[0229] In some embodiments, the mutant polymerases having a backbone sequence of NOZ 58130.1 (e.g., SEQ ID NO:1714) comprise various domains.

[0230] In some embodiments, the N-terminal domain comprises amino acid residues 1-162 (SEQ ID NO:2810) (e.g., FIG. 30).

[0231] In some embodiments, the exonuclease domain (e.g., 3′ to 5′ exonuclease domain) comprises amino acid residues 163-405 (SEQ ID NO:2811) (e.g., FIG. 30).

[0232] In some embodiments, the palm domain comprises amino acid residues 406-640 (SEQ ID NO:2812) (e.g., FIG. 30).

[0233] In some embodiments, the finger(s) sub-domain within the palm domain comprises amino acid residues 480-527 (SEQ ID NO:2813) (e.g., FIG. 30).

[0234] In some embodiments, the thumb domain comprises amino acid residues 641-792 (SEQ ID NO:2814) (e.g., FIG. 30).

[0235] The present disclosure provides compositions and methods comprising mutant polymerases having a backbone sequence of NOZ 58130.1 (SEQ ID NO:1714) and comprise at least one amino acid substitution mutation that reduces 3′ to 5′ exonuclease activity compared to a polymerase that lacks an exo-minus mutation. For example, the mutant polymerases comprise at least one amino acid substitution at positions D168 and/or E170. In some embodiments, the mutant polymerases comprise a mutation D168A, D168V, D168L, D1681, D168F, D168Y, D168N, D168K, D168T, D168S, D168W, D168M, D168P, D168G, D168H, D168R, D168E, D168C or D168Q. In some embodiments, the mutant polymerases comprise a mutation E170A, E170V, E170L, E1701, E170F, E170Y, E170N, E170K, E170T, E170S, E170W, E170M, E170P, E170G, E170H, E170R, E170D, E170C or E170Q. In some embodiments, the mutant polymerases comprise any combination of mutations at the D168 and the E170 sites. SEQ ID NOS:1714-2787 comprise exemplary amino acid substitution mutations at positions D168 and E170.

[0236] The present disclosure provides compositions and methods comprising mutant polymerases having a backbone sequence of NOZ 58130.1 (SEQ ID NO:1714) and comprise at least one amino acid substitution mutations of an LYP motif, for example at positions L440, Y441 and P442. In some embodiments, at least one mutation in the LYP motif can increase the incorporation rate of nucleotide analogs. In some embodiments, any one or any combination of the first, second and/or third positions of the LYP motif can be mutated. For example, mutations of the LYP motif include YAG, FAG, YGP, YAP, FGP, SAP, AAA, YGA, YAA, FGA, FTA, AAG, AAP, AAV, AAI, AGA, AGG, AGI, AGP, AGV, FAA, FAI, FAP, FAV, FGG, FGV, LAG, LAI, LAP, LGG, LGI, LGV, SAA, SAG, SAI, SAV, SGA, SGG, SGI, YAI, YGG, YGI, LAA, LAV, LGP, LGA, FGI, SGV, YAV, YGV, SYP, SGP, LFP, IFP, VFP, LMP, VMP, IMP, LLP, VLP, ILP, LDP, VDP, IDP, LTP, VTP, ITP, LIP, TIP, NNP, NDP, NAP, MFG and SYG.

[0237] In some embodiments, the polymerases comprise a backbone sequence of NOZ 58130.1 (SEQ ID NO:1714) and having a substitution mutation at position L440 comprises a nonpolar amino acid or polar non-charged amino acid. In some embodiments, the amino acid substitution mutation at position L440 comprises valine, glycine, threonine, alanine, serine, isoleucine, leucine, phenylalanine, tyrosine or methionine. SEQ ID NOS: 1714-2787 comprise exemplary amino acid substitution mutation at position L440.

[0238] In some embodiments, the polymerases comprise a backbone sequence of NOZ 58130.1 (SEQ ID NO:1714) and having a substitution mutation at position Y441 comprises a non-polar amino acid or a polar uncharged amino acid. In some embodiments, the amino acid substitution mutation at position Y441 comprises threonine, serine, glycine, alanine, valine, isoleucine or tyrosine. SEQ ID NOS: 1715-2787 comprise exemplary amino acid substitution mutation at position Y441.

[0239] In some embodiments, the polymerases comprise a backbone sequence of NOZ 58130.1 (SEQ ID NO:1714) and having a substitution mutation at position P442 comprises a polar uncharged amino acid, non-polar amino acid or a positively charged amino acid. In some embodiments, the amino acid substitution mutation at position P442 comprises serine, glycine, alanine, valine, cysteine, lysine, isoleucine, threonine or proline. SEQ ID NOS: 1715-2787 comprise exemplary amino acid substitution mutation at position P442.

[0240] The present disclosure provides compositions and methods comprising mutant polymerases having a backbone sequence of NOZ 58130.1 (SEQ ID NO:1714) and having at least one mutation to reduce post-translational modifications compared to a wild type polymerase or compared to an engineered polymerase lacking mutations to reduce post-translational modifications. In some embodiments, the polymerase comprises at least one mutation or any combination of mutations of methionine, lysine, tryptophan and/or serine residue(s). In some embodiments, the polymerases are engineered to include any one or any combination of amino acid substitution mutations at W135, M187, W329, K335, M389, S473, M527, K552, M629, W641, K650, K711, M723 and/or W791.

[0241] In some embodiments, the polymerases comprise a backbone sequence of NOZ 58130.1 (SEQ ID NO:1714) and having a mutation at position W135 comprising W135S, W135L, W135R, W135Y, W135F, W135D, W135A, W135V or W135G.

[0242] In some embodiments, the polymerases comprise a backbone sequence of NOZ 58130.1 (SEQ ID NO:1714) and having a mutation at position M187 comprising M187S, M187L, M187R, M187Y, M187I, M187T, M187A or M187V.

[0243] In some embodiments, the polymerases comprise a backbone sequence of NOZ 58130.1 (SEQ ID NO:1714) and having a mutation at position W329 comprising W329Y, W329F, W329L, W329D, W329A or W329V.

[0244] In some embodiments, the polymerases comprise a backbone sequence of NOZ 58130.1 (SEQ ID NO:1714) and having a mutation at position K335 comprising K335R, K335L, K335S or K335A.

[0245] In some embodiments, the polymerases comprise a backbone sequence of NOZ 58130.1 (SEQ ID NO:1714) and having a mutation at position M389 comprising M389D, M389E, M389L, M389Y, M389S, M389A or M389V.

[0246] In some embodiments, the polymerases comprise a backbone sequence of NOZ 58130.1 (SEQ ID NO:1714) and having a mutation at position S473 comprising S473K, S473R, S473T, S473Q or S473A.

[0247] In some embodiments, the polymerases comprise a backbone sequence of NOZ 58130.1 (SEQ ID NO:1714) and having a mutation at position M527 comprising M527H, M527G, M527Q, M527L, M527D, M527A or M527V.

[0248] In some embodiments, the polymerases comprise a backbone sequence of NOZ 58130.1 (SEQ ID NO:1714) and having a mutation at position M549 comprising M549N, M549Y, M549H, M549T, M549D, M549R, M549A or M549V.

[0249] In some embodiments, the polymerases comprise a backbone sequence of NOZ 58130.1 (SEQ ID NO:1714) and having a mutation at position K552 comprising K552R, K552T, K552N, K552Q or K552A.

[0250] In some embodiments, the polymerases comprise a backbone sequence of NOZ 58130.1 (SEQ ID NO:1714) and having a mutation at position M629 comprising M629L, M629A, M629D, M629R or M629V.

[0251] In some embodiments, the polymerases comprise a backbone sequence of NOZ 58130.1 (SEQ ID NO:1714) and having a mutation at position W641 comprising W641R, W641A, W641L, W641F, W641Y or W641V.

[0252] In some embodiments, the polymerases comprise a backbone sequence of NOZ 58130.1 (SEQ ID NO:1714) and having a mutation at position K650 comprising K650T, K650C, K650A, K650R or K650S.

[0253] In some embodiments, the polymerases comprise a backbone sequence of NOZ 58130.1 (SEQ ID NO:1714) and having a mutation at position K711 comprising K711R, K711L, K711T or K711D.

[0254] In some embodiments, the polymerases comprise a backbone sequence of NOZ 58130.1 (SEQ ID NO:1714) and having a mutation at position M723 comprising M723S, M7231, M723T, M723N, M723R, M723L, M723A or M723C.

[0255] In some embodiments, the polymerases comprise a backbone sequence of NOZ 58130.1 (SEQ ID NO:1714) and having a mutation at position W791 comprising W791R, W791Y, W791D, W791S, W791L, W791A or W791V.

[0256] The present disclosure provides compositions and methods comprising mutant polymerases having a backbone sequence of NOZ 58130.1 (SEQ ID NO:1714) and having at least one mutation to remove unpaired cysteines which may reduce oxidative damage to the polymerases. In some embodiments, removal of at least one unpaired cysteine increases thermal stability of the mutant polymerase and/or reduces protein aggregation. In some embodiments, removal of at least one unpaired cysteine increases the amount of protein in a lysate preparation. In some embodiments, the polymerase comprises at least one mutation or any combination of mutations of cysteines at position 362 and/or 539. In some embodiments, the mutation at position C362 comprises an amino acid substitution C362A, C362L, C362I, C362S, C362F, C362Y, C362V, C362P, C362K, C362N or C362D. In some embodiments, the mutation at position C539 comprises an amino acid substitution C539A, C539V, C539L, C539S, C539Y, C539D, C539K, C539N or C539P.

[0257] In some embodiments, the polymerases comprise a backbone sequence of NOZ 58130.1 (SEQ ID NO:1714) and having a non-mutated or mutated C362, and an amino acid substitution R536C.

[0258] In some embodiments, the polymerases comprise a backbone sequence of NOZ 58130.1 (SEQ ID NO:1714) and having a non-mutated or mutated C539, and an amino acid substitution R536C.

[0259] In some embodiments, the polymerases comprise a backbone sequence of NOZ 58130.1 (SEQ ID NO:1714) and having a non-mutated or mutated C362, and an amino acid substitution D451C.

[0260] The present disclosure provides compositions and methods comprising mutant polymerases having a backbone sequence of NOZ 58130.1 (SEQ ID NO:1714) and having a C-terminus truncation to increase thermal stability of the polymerase compared to a non-truncated polymerase having the same wild type or engineered backbone sequence. The C-terminal region of a polymerase may be disordered and may contribute to protein aggregation. Thus, truncation at a C-terminal region can reduce protein aggregation and improve stability. In some embodiments, the polymerase exhibits thermal stability at an elevated temperature of about 72-75° C., or about 75-80° C., or about 80-85° C., or about 85-90° C., or higher temperatures. In some embodiments, a thermal shift assay using differential scanning fluorimetry can be used to determine the thermal stability of a polymerase.

[0261] In some embodiments, the polymerases comprise a backbone sequence of NOZ 58130.1 (SEQ ID NO:1714) and having a C-terminal truncation for increased thermal stability including M723 (truncated), G773 (truncated), D777 (truncated), E781 (truncated), T784 (truncated), Q785 (truncated), R790 (truncated), W791 (truncated) or F792 (truncated). In Table 2, a truncation is designated with a “\hat{ }”.

[0262] The present disclosure provides compositions and methods comprising mutant polymerases having a backbone sequence of NOZ 58130.1 (SEQ ID NO:1714) and having at least one mutation that reduces polymerization-to-exonuclease conformational switching compared to a wild type polymerase or compared to an engineered polymerase having mutations that do not reduce conformational switching. In some embodiments, protein modeling can identify key amino acid residues that interact with the primer or the primer end, where these amino acid residues may play a role in interacting with the primer, or transferring the primer end from the polymerization site to the exonuclease site. In some embodiments, the polymerases comprise an amino acid substitution at any one or any combination of positions Q95, I186, V304, L313 and/or E318.

[0263] In some embodiments, the polymerases comprise a backbone sequence of NOZ 58130.1 (SEQ ID NO:1714) and having a mutation at Q95 comprising Q95L, Q95H, Q95R, Q95W, Q95A, Q95K, Q95N or Q95P.

[0264] In some embodiments, the polymerases comprise a backbone sequence of NOZ 58130.1 (SEQ ID NO:1714) and having a mutation at 1186 comprising I186R or I186N.

[0265] In some embodiments, the polymerases comprise a backbone sequence of NOZ 58130.1 (SEQ ID NO:1714) and having a mutation at V304 comprising V304D.

[0266] In some embodiments, the polymerases comprise a backbone sequence of NOZ 58130.1 (SEQ ID NO:1714) and having a mutation at L313 comprising L313M, L313D, L313F, L313K, L313R, L313A or L313E.

[0267] In some embodiments, the polymerases comprise a backbone sequence of NOZ 58130.1 (SEQ ID NO:1714) and having a mutation at E318 comprising E318V.

[0268] The present disclosure provides compositions and methods comprising mutant polymerases having a backbone sequence of NOZ 58130 (SEQ ID NO: 1714) and having at least one mutation that reduces protein aggregation by reducing intermolecular interactions compared to a wild type polymerase or compared to an engineered polymerase having mutations that do not confer reduced aggregation. In some embodiments, the mutant polymerase aggregates at an elevated temperature of about 72-75° C., or about 75-80° C., or about 80-85° C., or about 85-90° C., or higher temperatures, compared to a wild type polymerase or compared to an engineered polymerase having mutations that do not confer reduced aggregation. In some embodiments, a thermal shift assay using differential scanning fluorimetry can be used to determine the temperature of aggregation of a protein. In some embodiments, the mutant polymerase comprises a sequence that has at least 70%, 75%, 80%, 85%, 90%, 91%, 92%, 93%, 94%, 95%, 96%, 97%, 98%, 99%, or greater than 99% sequence identity to any of SEQ ID NOs: 1714-2787 and includes at least one mutation that reduces protein aggregation by reducing intermolecular interactions.

[0269] In some embodiments, the polymerases comprise a backbone sequence of NOZ 58130 (SEQ ID NO:1714) and having an amino acid substitution to reduce aggregation comprise an amino acid substitution at one or more positions E76, K254, R537, E541 and/or K664.

[0270] In some embodiments, the mutation at position E76 comprises E76N, E76A, E76R, E76K, E76T, E76V, E76S, E76Q, E76D or E76I.

[0271] In some embodiments, the mutation at position K254 comprises K254E, K254D, K254A, K254N, K254T, K254V, K254S, K254Q, K254G, K254I or K254R.

[0272] In some embodiments, the mutation at position R537 comprises R537S, R537T, R537N, R537Q, R537A, R537V, R537D, R537I, R537E, R537G, R537K or R537L.

[0273] In some embodiments, the mutation at position E541 comprises E541A, E541R, E541N, E541K, E541T, E541V, E541S, E541Q, E541D or E541I.

[0274] In some embodiments, the mutation at position K664 comprises K664R, K664A, K664N, K664Q, K664E, K664S, K664T, K664D, K664G, K664V or K6641.

[0275] In some embodiments, the mutant polymerases comprise a backbone sequence of NOZ 58130.1 (SEQ ID NO:1714) and a deleted portion of any of the domains including the N-terminal domain (SEQ ID NO:2810), exonuclease domain (SEQ ID NO:2811), first palm domain (SEQ ID NO:2812), fingers domain (SEQ ID NO:2813), thumb domain (SEQ ID NO:2814).

[0276] In some embodiments, the mutant deletion polymerase comprises a sequence that has at least 70%, 75%, 80%, 85%, 90%, 91%, 92%, 93%, 94%, 95%, 96%, 97%, 98%, 99%, or greater than 99% sequence identity to any of SEQ ID NOs: 1714-2787 and includes a deleted portion of any of the domains.

[0277] In some embodiments, the mutant deletion polymerase comprises a backbone sequence of NOZ 58130.1 (SEQ ID NO:1714) and the deleted portion comprises I130-P160 or any sub-region therein. In some embodiments, the deleted portion comprises an N-terminus of any of I130, T134, L136, L138, R143, G151 or E156. In some embodiments, the deleted portion comprises a C-terminus of any of P160, E156, V152, A147, G145 or L136.

[0278] In some embodiments, the deleted portion comprises any of I130-P160, L136-P160, L138-P160, R143-P160, I130-V152, L136-V152, L138-V152, R143-V152, I130-A147, L136-A147, L138-A147, R143-A147, I130-G145, L136-G145, L138-G145, R143-G145, I130-L136, G151-P160, G151-V152, E156-P160 or T134-E156.

[0279] In some embodiments, the portion that is deleted in the mutant polymerase (e.g., having a backbone sequence of NOZ 58130.1, SEQ ID NO:1714) is a sequence or a region that is absent in other Archaea Family B polymerases including RLF 89458 (SEQ ID NO:1), RLF 78286 (SEQ ID NO:2), WP 175059460 (SEQ ID NO:2791), 9° N (SEQ ID NOS:2795 and 2796), THERMINATOR (SEQ ID NO:2797), VENT (SEQ ID NO:2798), DEEP VENT (SEQ ID NO:2799), Pfu (SEQ ID NO:2800) and P. abyssi (SEQ ID NO:2801). For example, see the sequence alignments in FIGS. 33 and 35 which shows a region that is present in NOZ 58130 but absent in other Archaea Family B polymerases. In some embodiments, the portion that is deleted in the mutant polymerase comprises the amino acid sequence TWLRLEVEERDGRALLRGVEQLE (SEQ ID NO:2788) which is 23 amino acids in length. In some embodiments, the deleted portion is larger or smaller than SEQ ID NO:2788.

[0280] The present disclosure provides compositions and methods comprising mutant polymerases having a backbone sequence of NOZ 58130.1 (e.g., SEQ ID NO: 1714) and comprising amino acid substitution mutations at any one or any combination of positions including Y14, E15, V17, E18, R20, F26, L25, L27, G29, F34, V35, V36, F41, S42, P43, F45, L48, P49, G50, R55, E58, L61, A62, S63, A65, E67, A68, 169, K71, V72, 174, E76, K77, L79, F80, T82, P83, R84, V85, A86, L87, T90, V91, S92, H93, P94, Q95, D96, V97, P98, R99, 1100, R101, E102, R103, R105, E108, D111, L112, 1113, N114, E115, H116, D117, 1118, V121, R122, R123, Y124, 1126, R128, 1130, K131, P132, L133, T134, W135, L136, E139, G145, R150, E153, E156, E157, E158, R163, V164, A165, V167, D168, 1169, E170, V171, Y172, N173T, P174, E184, I186, M187, V190, T192, S193, E197, L200, V205, G207, E209, Q210, Q215, D216, M220, L222, E226, K229, G231, Y233, 1236, V237, G238, N240, T241, S243, F244, Y248, R252, L253, K254, L260, L265, D266, L269, S272, G275, A276, L277, 1282, A286, V288, L290, Y291, P292, 1293, V294, R295, H297, V298, K299, N301, S302, Y303, V304, S307, V309, L312, L313, G314, E318, K319, L320, D321, G322, R324, L325, F326, T327, W329, D330, E331, K335, R336, L338, L339, A343, Y342, L344, D346, A352, A354, K356, L360, C362, 1367, A376, M378, T379, V384, L387, M389, R390, T393, L398, 1399, P400, E407, Y408, A409, R413, Y416, R422, V429, V434, F435, D436, F437, S439, L440, Y441, P442, S443, I444, I445, V446, T454, A465, S473, F479, 1480, R496, D504, F511, A515, S522, F523, Y524, Y526, M527, R536, R537, E538, C539, E541, V543, A544, F546, A547, M549, 1551, K552, M555, A558, E559, F562, L564, E565, V566, D570, D572, V576, V577, 1578, P580, L585, A586, Q587, K588, K592, V593, E595, M597, I601, F608, L613, V615, T616, R619, L622, L623, K628, M629, V631, F636, V637, R638, R639, D640, W641, A642, K650, 1655, L656, A660, K664, A665, L668, 1673, E674, R675, R677, S682, D685, T687, Y689, T690, Q691, R695, S698, S701, E703, V707, A708, K711, E718, V719, M723, I724, I729, T730, K734, G735, S737, Q738, T741, D752, D758, N759, I761, I765, R767, 1772, Y774, L779, K780, E781, G782, 1783, T784, Q785, T786, S787, L788, S789, R790, W791 and/or F792.

[0281] The present disclosure provides compositions and methods comprising mutant polymerases having a backbone sequence of NOZ 58130.1 (e.g., SEQ ID NO: 1714) and comprise amino acid substitution mutations at any one or any combination of positions including Y14F, Y14D, Y14I, Y14N, E15I, V17E, E18S, E18N, E18D, R20K, L25F, F26Y, F26S, F26I, L27Q, L27K, G29E, G29K, F34K, V35M, V35K, V36F, V36N, V36T, V361, V36E, F41S, F41I, F41Y, S42K, S42G, S42D, S42E, P43L, P43A, P43G, P43V, P43M, P43T, P43K, F45T, F45N, F45I, L48D, P49V, P49K, P49D, P49E, P49L, G50K, R55G, R55K, R55E, R55I, E58V, L61I, L61S, L61A, L61T, A62D, A62S, A62V, A62G, S63G, S63K, S63E, A65L, A65Y, A65H, E67M, E67K, E67V, A68R, I69A, I69D, I69V, K71T, K71V, K71F, K71N, K711, V72T, V72N, V721, 174K, E76Q, E76N, E76A, E76R, E76K, E76T, E76V, E76S, E76D, E761, K77E, L79F, F80L, T82K, T82G, T82N, T82S, T82E, P83R, R84N, R84K, R84S, V85R, V85E, A86V, L87W, T90D, T90I, T90A, T90V, V91I, V91L, V91C, V91F, H93D, H93A, H93Y, P94L, P94S, P94D, P94R, P94A, P94G, P94V, P94M, P94T, P94K, Q95L, Q95H, Q95R, Q95W, Q95A, Q95K, Q95N, Q95P, D96N, D96V, V97S, V97A, V97F, V97Y, V97Q, P98L, P98W, P98Y, P98Q, P98F, P98S, R99V, R99A, HOOT, I100K, I100S, R101C, R101H, R101S, R101P, R101L, E102N, E102V, E102D, R103T, R103A, R105C, R105H, E108N, D111C, D111S, D111R, L112N, L112Q, L112T, I113K, I113N, I113F, I113A, I113D, I113N, I113T, L114N, L114T, E115V, E115G, H116C, H116Y, H116L, D117G, D117Y, I118T, I118A, I118G, I118V, I118M, I118T, 1118K, V121T, V121K, V121A, R122S, R122M, R122K, R123H, R123S, R123C, R123A, R123G, R123V, R123M, R123T, R123K, R123Y, Y124R, Y124C, I126V, I126F, I126N, I126D, R128K, I130L, K131I, P132L, P132M, L133I, L133V, L133K, L133L, L133E, L133M, T134E, W135S, W135L, W135R, W135Y, W135F, W135D, W135A, W135V, W135G, L136D, E139V, G145S, R150A, R150V, R150L, R150K, R150F, E153A, E153V, E153L, E153K, E153R, E153F, E156N, E156R, E157A, E157V, E157L, E157K, E157R, E157F, E157D, E157G, E157T, E158S, E158G, R163E, R163L, R163K, R163H, V164F, V164L, V164M, V164I, A165P, A165L, V167I, V167F, D168A, D168V, D168L, D168I, D168F, D168Y, D168N, D168T, D168S, D168W, D168M, D168P, D168G, D168H, D168R, D168E, D168C, D168K, D168Q, I169V, I169F, I169A, I169R, I169W, E170A, E170V, E170L, E170I, E170F, E170Y, E170N, E170T, E170S, V171F, V171T, V171R, Y172R, Y172T, N173T, P174R, E184N, I186R, I186L, I186N, M187S, M187L, M187R, M187Y, M187I, M187T, M187A, M187V, V190Y, T192D, S193E, E197A, L200I, V205I, G207D, E209P, Q210Y, Q215S, D216T, M220I, L222K, E226R, K229E, G231K, Y233P, I236L, V237I, G238T, N240G, N240T, N240S, T241G, S243N, F244S, Y248D, Y248R, R252A, R252S, L253V, L253E, L253C, K254E, K254R, K254A, K254N, K254Q, K254S, K254T, K254D, K254G, K254V, K254I, L260F, L265D, D266G, L269P, S272Q, G275N, G275K, G275S, G275R, A276M, A276N, A276Q, A276D, L277R, L277M, L277D, I282V, A286I, V288F, L290I, Y291A, Y291P, Y291G, Y291D, Y291N, P292R, I293V, V294M, V294I, R295A, H297F, H297Y, V298I, K299N, N301R, N301P, S302N, S302T, Y303G, Y303D, Y303A, V304D, V304A, V304E, V304H, V304I, V304L, V304M, V304P, V304R, V304T, V304W, V304Y, V304F, V304G, V304K, V304N, V304Q, V304S, S307A, V309Y, L312V, L312I, L313M, L313D, L313F, L313K, L313R, L313A, L313E, G314S, G314D, G314K, G314R, G314E, E318V, K319V, K319R, L320V, D321F, G322D, G322S, R324E, L325R, F326N, F326T, F326A, T327Q, W329Y, W329F, W329L, W329D, W329A, W329V, D330N, D330E, E331N, E331R, K335R, K335L, K335S, K335A, R336L, L338E, L339V, Y342N, Y342A, Y342R, A343S, L344M, D346G, D346A, D346R, A352L, A352E, A352D, A352Q, A354G, K356R, K356D, K356E, L360I, L360Q, L360V, L360M, C362A, C362L, C362I, C362S, C362F, C362Y, C362V, C362P, C362K, C362N, C362D, I367L, A376C, A376R, A376S, M378R, M378T, M378A, T379D, T379K, T379N, T379S, V384Q, V384E, L387N, L387C, L387Y, L387F, M389D, M389E, M389L, M389Y, M389S, M389A, M389V, R390M, L398D, I399A, I399N, I399R, I399F, P400H, P400N, P400S, E407R, Y408R, A409R, A409Q, R413Q, R413T, Y416H, R422V, R422T, R422D, V429W, V434H, V434L, V434Y, F435L, D436T, F437Y, F437R, F437I, S439A, S439G, S439R, L440, L440Y, L440F, L440S, L440A, Y441, Y441A, Y441G, Y441T, P442, P442G, P442A, S443R, S443N, S443A, S443G, I444F, I445L, I445F, V446M, V446K, V446R, V446N, V446T, D451C, T454I, T454L, T454R, A465V, A465D, A465P, S473K, S473R, S473T, S473Q, S473A, F479I, F479L, I480F, I480Y, R496T, R496A, R496G, R496C, D504E, F511Y, F511L, F511V, A515L, A515S, A515T, A515V, A515G, A515R, S522D, S522K, S522T, S522N, S522E, S522G, S522Y, F523A, F523S, F523T, F523V, F523I, F523Y, Y524A, Y524N, Y524G, Y524F, Y524L, Y526C, M527H, M527G, M527Q, M527L, M527D, M527A, M527V, R536C, R537K, R537E, R537G, R537S, R537L, R537A, R537N, R537Q, R537T, R537D, R537V, R537I, E538A, E538C, C539A, C539V, C539L, C539S, C539Y, C539D, C539K, C539N, C539P, E541K, E541S, E541A, E541R, E541N, E541T, E541V, E541Q, E541D, E541I, V543T, V543I, V543A, V543S, V543G, A544G, A544S, A544T, F546W, A547G, M549N, M549Y, M549H, M549T, M549D, M549R, M549A, M549V, I551N, I551T, I551E, I551H, I551L, I551V, I551A, K552R, K552T, K552N, K552Q, K552A, M555Y, M555I, A558I, E559N, E559K, E559D, F562E, F562N, F562Q, F562R, L564F, E565N, E565K, E565S, E565R, V566N, V566K, V566S, V566R, D570A, D570G, D570E, D570V, D570L, D570S, D572A, D572G, D572E, V576A, V577T, I578F, I578T, I578P, I578R, I578T, I578E, I578N, P580G, L585K, L585S, L585E, L585Q, L585R, L585T, L585V, A586K, K588N, K588Q, K588R, K588S, K592A, K592G, K592R, K592T, K592N, K592S, V593I, V593A, E595K, M597L, I601L, F608Y, L613F, V615E, V615T, T616K, R619E, L622V, L623I, K628R, K628I, K628H, M629L, M629A, M629D, M629R, M629V, M629I, V631T, F636I, V637D, V637N, V637R, R638D, R639D, R639N, D640R, D640K, W641R, W641A, W641L, W641F, W641Y, W641V, A642S, K650T, K650C, K650A, K650R, K650S, I655L, I655V, I655A, L656I, A660G, A665E, A665V, A665T, K664R, K664A, K664N, K664Q, K664E, K664S, K664T, K664D, K664G, K664V, K664I, L668I, I673T, E674G, E674D, E674K, R675V, R675C, R675L, R675D, R677E, R677V, R677T, R677N, R677A, S682P, D685R, D685E, D685I, D685L, D685K, T687V, Y689D, Y689N, T690K, T690R, T690S, T690M, T690Q, T690V, T690E, T690N, Q691S, Q691T, R695K, S698D, S698K, S698R, S698G, S698Y, S698D, S701T, S701V, S701A, S701R, S701E, E703R, E703S, E703K, V707I, V707D, V707A, A708V, K711R, K711L, K711T, K711D, E718R, E718V, E718K, V719I, M723S, M723I, M723T, M723N, M723R, M723L, M723A, M723C, I724D, I724V, I729V, T730L, K734I, K734G, K734N, G735M, G735R, G735K, G735S, G735P, G735T, G735E, S737R, S737E, Q738D, Q738S, Q738E, Q738, Q738R, T741I, D752Q, D752T, D758N, N759P, N759D, N759K, N759T, N759Y, N759R, I761V, I765V, R767E, I772L, I772Y, I772F, Y774F, Y774E, L779G, L779Q, L779D, L779K, L779Y, L779E, K780C, K780F, K780I, K780R, K780Q, K780Y, E781L, E781H, E781S, E781M, E781Q, G782H, G782A, G782K, G782R, Q785L, T786N, S789G, W791R, W791Y, W791D, W791S, W791L, W791A, W791V and/or F792R.

[0282] In some embodiments, the mutant polymerases have a backbone sequence of NOZ 58130.1 (SEQ ID NO:1714) and having a substitution mutation at position Y14. In some embodiments, the amino acid substitution at position Y14 comprises any of the 20 natural amino acids (i.e., W, I, M, P, F, G, A, V, L, H, R, K, D, E, N, C, S, T, or Q) or with non-natural amino acids as are known to those of skill in the art.

[0283] In some embodiments, the mutant polymerases have a backbone sequence of NOZ 58130.1 (SEQ ID NO:1714) and having a substitution mutation at position L48. In some embodiments, the amino acid substitution at position L48 comprises any of the 20 natural amino acids (i.e., W, I, M, P, F, G, A, V, L, H, R, K, D, E, N, C, S, T, or Q) or with non-natural amino acids as are known to those of skill in the art.

[0284] In some embodiments, the mutant polymerases have a backbone sequence of NOZ 58130.1 (SEQ ID NO:1714) and having a substitution mutation at position E76. In some embodiments, the amino acid substitution at position E76 comprises any of the 20 natural amino acids (i.e., W, I, M, P, F, G, A, V, L, H, R, K, D, E, N, C, S, T, or Q) or with non-natural amino acids as are known to those of skill in the art.

[0285] In some embodiments, the mutant polymerases have a backbone sequence of NOZ 58130.1 (SEQ ID NO:1714) and having a substitution mutation at position V97. In some embodiments, the amino acid substitution at position V97 comprises any of the 20 natural amino acids (i.e., W, I, M, P, F, G, A, L, H, R, K, D, E, N, Y, C, S, T, or Q) or with non-natural amino acids as are known to those of skill in the art.

[0286] In some embodiments, the mutant polymerases have a backbone sequence of NOZ 58130.1 (SEQ ID NO:1714) and having a substitution mutation at position R122. In some embodiments, the amino acid substitution at position R122 comprises any of the 20 natural amino acids (i.e., W, I, M, P, F, G, A, V, L, H, K, D, E, N, Y, C, S, T, or Q) or with non-natural amino acids as are known to those of skill in the art.

[0287] In some embodiments, the mutant polymerases have a backbone sequence of NOZ 58130.1 (SEQ ID NO:1714) and having a substitution mutation at position Y124. In some embodiments, the amino acid substitution at position Y124 comprises any of the 20 natural amino acids (i.e., W, I, M, P, F, G, A, V, L, H, K, D, E, N, Y, C, S, T, or Q) or with non-natural amino acids as are known to those of skill in the art.

[0288] In some embodiments, the mutant polymerases have a backbone sequence of NOZ 58130.1 (SEQ ID NO:1714) and having a substitution mutation at position R150. In some embodiments, the amino acid substitution at position R150 comprises any of the 20 natural amino acids (i.e., W, I, M, P, F, G, A, V, L, H, K, D, E, N, Y, C, S, T, or Q) or with non-natural amino acids as are known to those of skill in the art.

[0289] In some embodiments, the mutant polymerases have a backbone sequence of NOZ 58130.1 (SEQ ID NO:1714) and having a substitution mutation at position K254. In some embodiments, the amino acid substitution at position K254 comprises any of the 20 natural amino acids (i.e., W, I, M, P, F, G, A, V, L, H, K, D, E, N, Y, C, S, T, or Q) or with non-natural amino acids as are known to those of skill in the art.

[0290] In some embodiments, the mutant polymerases have a backbone sequence of NOZ 58130.1 (SEQ ID NO:1714) and having a substitution mutation at position V304. In some embodiments, the amino acid substitution at position V304 comprises any of the 20 natural amino acids (i.e., W, I, M, P, F, G, A, V, L, H, K, D, E, N, Y, C, S, T, or Q) or with non-natural amino acids as are known to those of skill in the art.

[0291] In some embodiments, the mutant polymerases have a backbone sequence of NOZ 58130.1 (SEQ ID NO:1714) and having a substitution mutation at position C362. In some embodiments, the amino acid substitution at position C362 comprises any of the 20 natural amino acids (i.e., W, I, M, P, F, G, A, V, L, H, R, K, D, E, N, Y, S, T, or Q) or with non-natural amino acids as are known to those of skill in the art.

[0292] In some embodiments, the mutant polymerases have a backbone sequence of NOZ 58130.1 (SEQ ID NO:1714) and having a substitution mutation at position R496. In some embodiments, the amino acid substitution at position R496 comprises any of the 20 natural amino acids (i.e., W, I, M, P, F, G, A, V, L, H, K, D, E, N, Y, C, S, T, or Q) or with non-natural amino acids as are known to those of skill in the art.

[0293] In some embodiments, the mutant polymerases have a backbone sequence of NOZ 58130.1 (SEQ ID NO:1714) and having a substitution mutation at position A515. In some embodiments, the amino acid substitution at position A515 comprises any of the 20 natural amino acids (i.e., W, I, M, P, F, G, V, L, H, R, K, D, E, N, Y, C, S, T, or Q) or with non-natural amino acids as are known to those of skill in the art.

[0294] In some embodiments, the mutant polymerases have a backbone sequence of NOZ 58130.1 (SEQ ID NO:1714) and having a substitution mutation at position R537. In some embodiments, the amino acid substitution at position R537 comprises any of the 20 natural amino acids (i.e., W, I, M, P, F, G, A, V, L, H, K, D, E, N, Y, C, S, T, or Q) or with non-natural amino acids as are known to those of skill in the art.

[0295] In some embodiments, the mutant polymerases have a backbone sequence of NOZ 58130.1 (SEQ ID NO:1714) and having a substitution mutation at position E559. In some embodiments, the amino acid substitution at position E559 comprises any of the 20 natural amino acids (i.e., W, I, M, P, F, G, A, V, L, H, R, K, D, N, Y, C, S, T, or Q) or with non-natural amino acids as are known to those of skill in the art.

[0296] In some embodiments, the mutant polymerases have a backbone sequence of NOZ 58130.1 (SEQ ID NO:1714) and having a substitution mutation at position K664 In some embodiments, the amino acid substitution at position K664 comprises any of the 20 natural amino acids (i.e., W, I, M, P, F, G, A, V, L, H, R, K, D, N, Y, C, S, T, or Q) or with non-natural amino acids as are known to those of skill in the art.

[0297] In some embodiments, the mutant polymerases have a backbone sequence of NOZ 58130.1 (SEQ ID NO:1714) and comprise an amino acid deletion at any position including D117 (deleted).

[0298] In some embodiments, the mutant polymerases have a backbone sequence of NOZ 58130.1 (SEQ ID NO:1714) and comprise a truncation at an amino acid position including Q587 (truncated), M723 (truncated), G773 (truncated), Y774 (truncated), D777 (truncated), E781 (truncated), G782 (truncated), T784 (truncated), Q785 (truncated), R790 (truncated), W791 (truncated) or F792 (truncated). Truncated polymerases can exhibit increase thermal stability compared to a non-truncated polymerase having the same backbone sequence. In Table 2, a truncation is designated with the symbol “\hat{ }”.

[0299] In some embodiments, the mutant polymerases have a backbone sequence of NOZ 58130.1 (SEQ ID NO:1714) and comprise a truncation portion at the C-terminal end. In some embodiments, the truncated mutant polymerase comprises a sequence that has at least 70%, 75%, 80%, 85%, 90%, 91%, 92%, 93%, 94%, 95%, 96%, 97%, 98%, 99%, or greater than 99% sequence identity to any of SEQ ID NOs: 1714-2787 and a truncated portion at the C-terminal end. In some embodiments, the truncated portion can be 2-5, 5-10, 10-15 or 15-20 amino acids in length. In some embodiments, the truncated portion comprises G782-F792 and is 11 amino acids in length. Truncated polymerases can exhibit increase thermal stability compared to a non-truncated polymerase having the same backbone sequence. In Table 2, a truncated portion is designated with the letter “X”.

### Compositions Comprising Engineered Polymerases

[0300] The present disclosure provides polymerases that are mutated at two or more positions to increase thermal stability of the enzyme exhibit improved binding of nucleotide reagents and/or improved binding and incorporation of nucleotide reagents, improved incorporation rate of nucleotide analogs, improved uracil-tolerance and/or reduced sequence-specific errors compared to a wild type polymerase comprising an amino acid sequence of any of SEQ ID NOS: 1, 2, 1714, 2789-2793 and 2803. For example, the mutant polymerases exhibit increased thermal stability at a temperature range of about 25-50° C., or about 45-75° C., or about 65-90° C. In another example, the mutant polymerases exhibit increased incorporation rates of nucleotide analogs comprising a chain terminating moiety (e.g., blocking moiety) at the sugar 2′ position and/or at the 3′ sugar position. The mutant polymerases may exhibit increased uracil tolerance. The mutant polymerases may exhibit improved binding to complementary nucleotide units of a multivalent molecule. In some embodiments, the mutant polymerases comprise an amino acid sequence that is at least 80%, 85%, 90%, 95%, 99% identical, or a higher level sequence identity, to any of SEQ ID NOS: 1, 2, 1714, 2789-2793 and 2803.

[0301] In some embodiments, the mutant polymerases comprise the backbone sequence of RLF 89458.1 or RLF 78286.1 and comprising an amino acid sequence of any of SEQ ID NOS: 1-1713, and includes amino acid substitutions which can confer exonuclease-minus activity including any of D141A, D141V, D141L, D141I, D141F, D141Y, D141N, D141T, D141S, D141R, D141K, D141Q, D141W, D141E, D141M, D141P, D141G, D141H or D141C. In some embodiments, the mutant polymerases comprise the backbone sequence of RLF 89458.1 or RLF 78286.1 and comprising an amino acid sequence of any of SEQ ID NOS: 1-1713, and includes amino acid substitutions which can confer exonuclease-minus activity including a non-mutated E143 or mutated E143A, E143V, E143L, E1431, E143F, E143Y, E143N, E143T, E143S, E143W, E143M, E143P, E143F, E143G, E143H, E143R, E143K, E143D, E143C or E143Q.

[0302] In some embodiments, the mutant polymerases comprise the backbone sequence of NOZ 58130.1 and comprising an amino acid sequence of any of SEQ ID NOS: 1714-2787 and 2249-2479 and includes amino acid substitutions which can confer exonuclease-minus activity including any of D168A, D168V, D168L, D168I, D168F, D168Y, D168N, D168K, D168T, D168S, D168W, D168M, D168P, D168G, D168H, D168R, D168E, D168C or D168Q. In some embodiments, the mutant polymerases comprise the backbone sequence of NOZ 58130 and comprising an amino acid sequence of any of SEQ ID NOS: 1714-2787 and includes amino acid substitutions which can confer exonuclease-minus activity including any of E170A, E170V, E170L, E1701, E170F, E170Y, E170N, E170K, E170T, E170S, E170W, E170M, E170P, E170G, E170H, E170R, E170D, E170C or E170Q.

[0303] The present disclosure provides engineered archaeal family-B DNA or family-A polymerases, including Geobacillus stearothermophilus (e.g., Bst DNA polymerase) (SEQ ID NO:2794), 9° N polymerase (SEQ ID NOS: 2795 or 2796) (including THERMINATOR polymerase; SEQ ID NO:2797), VENT polymerase (SEQ ID NO:2798), DEEP VENT polymerase (SEQ ID NO:2799), Pfu polymerase (SEQ ID NO:2800) and/or Pyrococcus abyssi polymerase (SEQ ID NO:2801) and RB69 polymerase (SEQ ID NO:2802), that are mutated in one or more positions that are positionally equivalent (or functionally equivalent sites) to the amino acid substitutions at any one or any combination of positions of a polymerase having a backbone sequence of RLF 89458.1 (e.g., any of SEQ ID NOS:1 or 3-1713) or RLF 78286.1 (SEQ ID NO:2) including M1, L3, D4, D6, Y7, I8, T9, E10, N11, G12, K13, P14, V15, I16, R17, I18, F19, K20, K21, E22, K23, G24, E25, F26, K27, 128, E29, Y30, D31, R32, N33, F34, E35, P36, Y37, 138, Y39, A40, L41, L42, E43, D44, D45, E46, S47, 148, E49, D50, 151, K52, K53, 154, T55, R58, G56, E57, R58, H59, G60, K61, K62, V63, I65, I66, R67, V68, E69, K70, V71, K72, K73, K74, F75, L76, G77, E78, P79, I80, E81, V82, W83, K84, L85, V86, F87, E88, H89, P90, Q91, D92, V93, P94, A95, I96, R97, D98, A99, I100, R101, S102, H103, P104, A105, V106, R107, E108, 1109, F110, E111, Y112, D113, 1114, P115, F116, A117, K118, R119, Y120, L121, I122, D123, K124, L126, V127, P128, M129, E130, G131, G132, E133, L135, K136, L137, L138, A139, F140, D141, I142, E143, T144, F145, Y146, H147, D150, E151, M159, W173, K174, 1176, Y180, A190, I191, K192, L195, L198, R199, Q196, P203, V205, L207, Y209, G211, N213, F214, F216, A217, Y218, 1219, C223, E224, G227, L228, F230, T231, 1232, G233, R234, S237, E238, P239, K240, 1241, Q242, R243, M244, G245, D246, R247, A249, E251, L258, Y261, P262, V264, R265, H266, T267, 1268, R269, L270, P271, T272, Y273, T274, L275, E276, A277, V278, V282, F283, K285, K286, K287, E288, K289, V290, Y291, A292, 1295, E297, A298, W299, K300, S301, L305, K306, R307, V308, A309, Y311, M313, D315, R317, A318, Y320, E321, P328, M329, V331, E332, L333, A334, 1337, G338, Q339, V341, D343, S345, S347, S348, T349, G350, N351, L352, V353, W355, Y356, L357, R359, V360, Y362, N365, E366, L367, K371, P372, G373, E376, Q378, M381, S384, Y385, 1386, G388, Y389, E394, G396, A402, Y403, L404, F406, R407, S408, L409, Y410, P411, S412, I413, V415, H417, V419, P421, D422, T423, L424, E427, C428, K429, A434, 1436, R440, K443, G447, F448, I449, P450, S451, 1452, L453, E454, D455, 1457, V463, K464, R465, M467, K468, D472, I474, E475, K476, Y481, R484, A485, L486, K487, 1488, N491, S492, Y493, Y494, G495, Q497, G498, Y499, P500, K501, S506, K507, E508, C509, E511, S512, V513, T514, G517, R518, H519, 1521, T523, A528, E529, K534, V535, A538, E539, D541, G542, I547, I555, P552, S557, K558, A559, K560, K561, L563, K564, H565, E568, K569, G572, M573, E575, E577, L583, G585, F586, V588, T589, K592, L595, 1596, H601, T604, G606, V609, V610, R611, R612, D613, E616, 1617, K619, E620, T621, Q622, A623, K624, V625, L626, E627, V628, 1629, L630, R631, E632, G633, S634, 1635, E636, K637, A638, A639, G640, 1641, V642, V645, V646, E647, D648, L649, A650, N651, Y652, R653, V654, V656, E657, K658, I660, H662, E663, Q664, 1665, T666, R667, E668, K670, D671, Y672, K673, A674, T675, G676, P677, H678, V679, A680, 1681, A682, K683, R684, L685, Q686, A687, R688, G689, I690, K691, V692, K693, P694, T696, 1698, S699, Y700, V701, V702, L703, K704, G705, S706, K707, K708, I709, D711, R712, V713, I714, L715, F716, D717, E718, D720, S721, S722, R723, K725, Y726, P728, Y730, Y731, 1732, H733, N734, Q735, V736, P738, A739, V740, L741, R742, 1743, L744, E745, A746, F747, G748, Y749, K750, E751, K752, D753, L754, E755, Y756, Q757, R758, M759, K760, Q761, T762, G763, L764, G765, A766, W767, L768 and/or M770. From the sequence alignment shown in FIG. 34, the skilled artisan can ascertain positionally equivalent positions (or functionally equivalent sites) in Geobacillus stearothermophilus (e.g., Bst DNA polymerase) (SEQ ID NO:2794), 9° N polymerase (SEQ ID NOS: 2795 or 2796) (including THERMINATOR polymerase; SEQ ID NO:2797), VENT polymerase (SEQ ID NO:2798), DEEP VENT polymerase (SEQ ID NO:2799), Pfu polymerase (SEQ ID NO:2800) and/or Pyrococcus abyssi polymerase (SEQ ID NO:2801) and RB69 polymerase (SEQ ID NO:2802).

[0304] The present disclosure provides engineered archaeal family-B DNA or family-A polymerases, including Geobacillus stearothermophilus (e.g., Bst DNA polymerase) (SEQ ID NO:2794), 9° N polymerase (SEQ ID NOS: 2795 or 2796) (including THERMINATOR polymerase; SEQ ID NO:2797), VENT polymerase (SEQ ID NO:2798), DEEP VENT polymerase (SEQ ID NO:2799), Pfu polymerase (SEQ ID NO:2800) and/or Pyrococcus abyssi polymerase (SEQ ID NO:2801) and RB69 polymerase (SEQ ID NO:2802), that are mutated in one or more positions that are positionally equivalent (or functionally equivalent sites) to the amino acid substitutions at any one or any combination of positions of a polymerase having a backbone sequence of NOZ 58130.1 (e.g., any of SEQ ID NOS:1714-2787) including Y14, E18, F26, L27, G29, F34, V35, V36, F41, S42, P43, F45, L48, P49, R55, L61, A62, S63, A65, E67, 169, K71, V72, E76, K77, T82, P83, R84, V85, T90, V91, S92, H93, P94, Q95, D96, V97, P98, R99, I100, R101, E102, R103, R105, E108, D111, L112, I113, N114, E115, H116, D117, I118, V121, R122, R123, Y124, I126, I130, P132, L133, W135, G145, R150, E153, E156, E157, E158, R163, V164, A165, V167, D168, 1169, E170, V171, Y172, N173T, P174, E184, I186, M187, V190, L200, V205, M220, K229, Y233, 1236, V237, G238, N240, F244, Y248, R252, L253, K254, L260, L269, G275, A276, L277, 1282, A286, V288, L290, Y291, P292, 1293, V294, R295, H297, V298, N301, S302, Y303, V304, S307, V309, L312, L313, G314, E318, K319, L320, D321, G322, L325, F326, T327, W329, D330, E331, K335, L338, L339, A343, Y342, L344, D346, A352, A354, K356, L360, C362, 1367, A376, M378, T379, V384, L387, M389, R390, T393, L398, 1399, P400, E407, Y408, A409, R413, Y416, R422, V429, V434, F435, D436, F437, S439, L440, Y441, P442, S443, I444, I445, V446, T454, A465, S473, F479, 1480, R496, D504, F511, A515, S522, F523, Y524, Y526, M527, R536, R537, E538, C539, E541, V543, A544, F546, A547, M549, 1551, K552, M555, A558, E559, F562, L564, E565, V566, D570, D572, V576, V577, I578, P580, L585, A586, Q587, K588, K592, V593, E595, M597, 1601, F608, L613, V615, T616, R619, L622, L623, K628, M629, V631, F636, V637, R638, R639, D640, W641, A642, K650, 1655, L656, A660, K664, A665, L668, 1673, E674, R675, R677, S682, D685, T687, Y689, T690, Q691, R695, S698, S701, E703, V707, A708, K711, E718, V719, M723, I724, I729, T730, K734, G735, S737, Q738, T741, D752, D758, N759, I761, I765, R767, 1772, Y774, L779, K780, E781, G782, 1783, T784, Q785, T786, S787, L788, S789, R790, W791 and/or F792. From the sequence alignment shown in FIG. 35, the skilled artisan can ascertain positionally equivalent positions (or functionally equivalent sites) in Geobacillus stearothermophilus (e.g., Bst DNA polymerase) (SEQ ID NO:2794), 9° N polymerase (SEQ ID NOS: 2795 or 2796) (including THERMINATOR polymerase; SEQ ID NO:2797), VENT polymerase (SEQ ID NO:2798), DEEP VENT polymerase (SEQ ID NO:2799), Pfu polymerase (SEQ ID NO:2800) and/or Pyrococcus abyssi polymerase (SEQ ID NO:2801) and RB69 polymerase (SEQ ID NO:2802).

[0305] The present disclosure provides engineered archaeal family-B DNA or family-A polymerases, including Geobacillus stearothermophilus (e.g., Bst DNA polymerase) (SEQ ID NO:2794), 9° N polymerase (SEQ ID NOS: 2795 or 2796) (including THERMINATOR polymerase; SEQ ID NO:2797), VENT polymerase (SEQ ID NO:2798), DEEP VENT polymerase (SEQ ID NO:2799), Pfu polymerase (SEQ ID NO:2800) and/or Pyrococcus abyssi polymerase (SEQ ID NO:2801) and RB69 polymerase (SEQ ID NO:2802), that are mutated in one or more positions that are positionally equivalent (or functionally equivalent sites) to the amino acid substitutions at any one or any combination of positions of a polymerase having a backbone sequence of RMF 90817.1 (SEQ ID NO:2789) including Y11, D15, F23, K25, 128, L29, F34, Q35, P36, F38, H43, E49, G55, A56, V57, R62, R67, 175, L76, S77, H78, P79, S80, E81, V82, P83, K84, 185, R86, E87, E88, R90, E96, 198, E100, H101, D102, 1103, A106, R108, 1111, P117, L118, E138, G139, R144, V145, M146, D149, I150, E151, T152, A234, Y272, C307, R312, E333, A357, V365, L368, F374, L390, V415, D417, F418, S420, L421, Y422, P423, 1425, V427, T435, P445, F459, A496, S503, F504, Y505, M508, K518, E519, C520, S523, V524, T525, M530, T532, D551, D553, V559, R566, A567, M568, R576, 1596, T597, N609, Q631, V636, A646, N655, R656, K658, D666, T671, R679, N682, K688, E699, M704, G715, L716, N740, L753, Y755, K761, E762, E763, M764, V765, Q766, G767, S768, L769, Q770, R771, W772 and/or F773. From the sequence alignment shown in FIG. 36, the skilled artisan can ascertain positionally equivalent positions (or functionally equivalent sites) in Geobacillus stearothermophilus (e.g., Bst DNA polymerase) (SEQ ID NO:2794), 9° N polymerase (SEQ ID NOS: 2795 or 2796) (including THERMINATOR polymerase; SEQ ID NO:2797), VENT polymerase (SEQ ID NO:2798), DEEP VENT polymerase (SEQ ID NO:2799), Pfu polymerase (SEQ ID NO:2800) and/or Pyrococcus abyssi polymerase (SEQ ID NO:2801) and RB69 polymerase (SEQ ID NO:2802).

[0306] The present disclosure provides engineered archaeal family-B DNA or family-A polymerases, including Geobacillus stearothermophilus (e.g., Bst DNA polymerase) (SEQ ID NO:2794), 9° N polymerase (SEQ ID NOS: 2795 or 2796) (including THERMINATOR polymerase; SEQ ID NO:2797), VENT polymerase (SEQ ID NO:2798), DEEP VENT polymerase (SEQ ID NO:2799), Pfu polymerase (SEQ ID NO:2800) and/or Pyrococcus abyssi polymerase (SEQ ID NO:2801) and RB69 polymerase (SEQ ID NO:2802), that are mutated in one or more positions that are positionally equivalent (or functionally equivalent sites) to the amino acid substitutions at any one or any combination of positions of a polymerase having a backbone sequence of MBC 7218772.1 (SEQ ID NO:2790) including 110, C468 and/or T560. From the sequence alignment shown in FIG. 37, the skilled artisan can ascertain positionally equivalent positions (or functionally equivalent sites) in Geobacillus stearothermophilus (e.g., Bst DNA polymerase) (SEQ ID NO:2794), 9° N polymerase (SEQ ID NOS: 2795 or 2796) (including THERMINATOR polymerase; SEQ ID NO:2797), VENT polymerase (SEQ ID NO:2798), DEEP VENT polymerase (SEQ ID NO:2799), Pfu polymerase (SEQ ID NO:2800) and/or Pyrococcus abyssi polymerase (SEQ ID NO:2801) and RB69 polymerase (SEQ ID NO:2802).

[0307] The present disclosure provides engineered archaeal family-B DNA or family-A polymerases, including Geobacillus stearothermophilus (e.g., Bst DNA polymerase) (SEQ ID NO:2794), 9° N polymerase (SEQ ID NOS: 2795 or 2796) (including THERMINATOR polymerase; SEQ ID NO:2797), VENT polymerase (SEQ ID NO:2798), DEEP VENT polymerase (SEQ ID NO:2799), Pfu polymerase (SEQ ID NO:2800) and/or Pyrococcus abyssi polymerase (SEQ ID NO:2801) and RB69 polymerase (SEQ ID NO:2802), that are mutated in one or more positions that are positionally equivalent (or functionally equivalent sites) to the amino acid substitutions at any one or any combination of positions of a polymerase having a backbone sequence of WP 175059460.1 (SEQ ID NO:2791) including Y7, D11, I51, K61, V93, A117, M129, D141, 1142, E143, T144, A223, E302, E323, D407, F408, S410, L411, Y412, P413, R487, A488, S495, Y496, K510, T517, 1524, K562, A563, R564, S572, T593, R605, K652, D675, K695, T700, R712, R759, Y760, Q761, S762, S763, K764, Q765 and/or T766. From the sequence alignment shown in FIG. 38, the skilled artisan can ascertain positionally equivalent positions (or functionally equivalent sites) in Geobacillus stearothermophilus (e.g., Bst DNA polymerase) (SEQ ID NO:2794), 9° N polymerase (SEQ ID NOS: 2795 or 2796) (including THERMINATOR polymerase; SEQ ID NO:2797), VENT polymerase (SEQ ID NO:2798), DEEP VENT polymerase (SEQ ID NO:2799), Pfu polymerase (SEQ ID NO:2800) and/or Pyrococcus abyssi polymerase (SEQ ID NO:2801) and RB69 polymerase (SEQ ID NO:2802).

[0308] The present disclosure provides engineered archaeal family-B DNA or family-A polymerases, including Geobacillus stearothermophilus (e.g., Bst DNA polymerase) (SEQ ID NO:2794), 9° N polymerase (SEQ ID NOS: 2795 or 2796) (including THERMINATOR polymerase; SEQ ID NO:2797), VENT polymerase (SEQ ID NO:2798), DEEP VENT polymerase (SEQ ID NO:2799), Pfu polymerase (SEQ ID NO:2800) and/or Pyrococcus abyssi polymerase (SEQ ID NO:2801) and RB69 polymerase (SEQ ID NO:2802), that are mutated in one or more positions that are positionally equivalent (or functionally equivalent sites) to the amino acid substitutions at any one or any combination of positions of a polymerase having a backbone sequence of KUO 42443.1 (SEQ ID NO:2792) including Y7, D170, E172, T557 and/or S558. From the sequence alignment shown in FIG. 39, the skilled artisan can ascertain positionally equivalent positions (or functionally equivalent sites) in Geobacillus stearothermophilus (e.g., Bst DNA polymerase) (SEQ ID NO:2794), 9° N polymerase (SEQ ID NOS: 2795 or 2796) (including THERMINATOR polymerase; SEQ ID NO:2797), VENT polymerase (SEQ ID NO:2798), DEEP VENT polymerase (SEQ ID NO:2799), Pfu polymerase (SEQ ID NO:2800) and/or Pyrococcus abyssi polymerase (SEQ ID NO:2801) and RB69 polymerase (SEQ ID NO:2802).

[0309] The present disclosure provides engineered archaeal family-B DNA or family-A polymerases, including Geobacillus stearothermophilus (e.g., Bst DNA polymerase) (SEQ ID NO:2794), 9° N polymerase (SEQ ID NOS: 2795 or 2796) (including THERMINATOR polymerase; SEQ ID NO:2797), VENT polymerase (SEQ ID NO:2798), DEEP VENT polymerase (SEQ ID NO:2799), Pfu polymerase (SEQ ID NO:2800) and/or Pyrococcus abyssi polymerase (SEQ ID NO:2801) and RB69 polymerase (SEQ ID NO:2802), that are mutated in one or more positions that are positionally equivalent (or functionally equivalent sites) to the amino acid substitutions at any one or any combination of positions of a polymerase having a backbone sequence of NOZ 77387.1 (SEQ ID NO:2793) including Y10, C41, C531 and/or T536. From the sequence alignment shown in FIG. 40, the skilled artisan can ascertain positionally equivalent positions (or functionally equivalent sites) in Geobacillus stearothermophilus (e.g., Bst DNA polymerase) (SEQ ID NO:2794), 9° N polymerase (SEQ ID NOS: 2795 or 2796) (including THERMINATOR polymerase; SEQ ID NO:2797), VENT polymerase (SEQ ID NO:2798), DEEP VENT polymerase (SEQ ID NO:2799), Pfu polymerase (SEQ ID NO:2800) and/or Pyrococcus abyssi polymerase (SEQ ID NO:2801) and RB69 polymerase (SEQ ID NO:2802).

[0310] The present disclosure provides polymerases operably linked to a detectable reporter moiety. Any of the polymerases described herein can be labeled with a detectable reporter moiety, including polymerases having a mutant amino acid sequence backbone of any polymerase described herein, including any of SEQ ID NOS:1-2787, 2789-2793, Geobacillus stearothermophilus (e.g., Bst DNA polymerase) (SEQ ID NO:2794), 9° N polymerase (SEQ ID NOS: 2795 or 2796) (including THERMINATOR polymerase; SEQ ID NO:2797), VENT polymerase (SEQ ID NO:2798), DEEP VENT polymerase (SEQ ID NO:2799), Pfu polymerase (SEQ ID NO:2800) and/or Pyrococcus abyssi polymerase (SEQ ID NO:2801), RB69 polymerase (SEQ ID NO:2802) and Phi29 (SEQ ID NO:2803).

[0311] In some embodiments, the detectable reporter moiety generates a detectable signal resulting from a chemical or physical change (e.g., heat, light, electrical, pH, salt concentration, enzymatic activity, or proximity events such as FRET). In some embodiments, the detectable reporter moiety comprises a luminescent moiety, fluorescent moiety, or quencher. In some embodiment, the detectable moiety comprises a fluorescent moiety that behaves as a FRET donor or acceptor. The detectable reporter moiety can be attached to the polymerase at the N-terminus, C-terminus or any internal location. The detectable reporter moiety is attached to the polymerase in a manner that does not interfere with the ability of the polymerase to bind a nucleic acid template molecule, a nucleic acid primer, or a nucleotide. The detectable reporter moiety is attached to the polymerase in a manner that does not interfere with catalytic activity of the polymerase including nucleotide incorporation.

[0312] The present disclosure provides recombinant fusion polypeptides which include any of the DNA polymerases described herein operably linked to any one or any combination of two or more exogenous amino acid sequences for affinity purification, cleavage and/or solubilization. In some embodiments, the recombinant fusion polypeptides comprise polymerases having a mutant amino acid sequence backbone of any polymerase described herein operably linked to an affinity purification tag, a cleavage tag and/or a solubilization tag, including any of SEQ ID NOS: 1-2787, 2789-2793, Geobacillus stearothermophilus (e.g., Bst DNA polymerase) (SEQ ID NO:2794), 9° N polymerase (SEQ ID NOS: 2795 or 2796) (including THERMINATOR polymerase; SEQ ID NO:2797), VENT polymerase (SEQ ID NO:2798), DEEP VENT polymerase (SEQ ID NO:2799), Pfu polymerase (SEQ ID NO:2800) and/or Pyrococcus abyssi polymerase (SEQ ID NO:2801) and RB69 polymerase (SEQ ID NO:2802) and Phi29 (SEQ ID NO:2803).

[0313] In some embodiments, the recombinant fusion polypeptides comprise any of the wild type and mutant polymerases operably linked at their N- and/or C-terminus end(s) to at least one affinity purification tag sequence, where the affinity purification tag sequence(s) include a Histidine tag (e.g., His-tag), FLAG tag, T7 tag, Strep II tag, S tag (e.g., from pancreatic ribonuclease A), HA tag (e.g., from human influenza hemagglutinin protein) and/or c-Myc tag. In some embodiments, the affinity purification tag sequence comprises a plurality of histidine residues, for example (3-10 histidine residues SEQ ID NO: 2851). In some embodiments, the affinity purification tag sequence comprises a plurality of consecutive histidine residues, for example 3-10 consecutive histidine residues (SEQ ID NO: 2851).

[0314] In some embodiments, the wild type and engineered polymerases are recombinant proteins that can be expressed by a host cell harboring a cloned expression vector. It has been previously demonstrated that recombinant proteins carrying an affinity purification His-tag can undergo post-translational by an E. coli expression host cell. An example of post-translational modification includes N-phosphogluconoylation in which a gluconic acid derivative is attached to a His-tag at the N-terminus of the recombinant protein. The N-phosphogluconoylation is catalyzed by an E. coli 6-phosphoglucono-1,5-lactone pathway (Geoghegan 1999 Analytical Biochemistry 267:169-184; Aon 2008 Applied and Environmental Microbiology 74(4):950-958). Another example of post-translational modification includes N-gluconoylation in which an N-phosphogluconoylated recombinant protein is further modified an E. coli host cell's phosphatase. N-gluconoylation of recombinant proteins arises from a non-enzymatic acylation modification and is known to reduce protein activity, increases susceptibility to oxidation, and reduce protein crystallization. Thus, N-phosphogluconoylation and/or N-gluoconoylation are undesirable post-translational modifications which can adversely impact production and shelf-life of recombinant proteins including the engineered polymerases.

[0315] It has been previously demonstrated by others that N-gluconoylation can be decreased by changes in host cell culture conditions, adaptation of modified purification processes or site directed mutagenesis of amino acid residues near the N-terminus in the recombinant protein. For example, recombinant proteins carrying N-terminal His-tags, where the amino acid sequence of the His-tag is modified, exhibit decreased N-gluoconoylation (Martos-Maldonado, et al., 2018 Nature Communications 9:3307 (doi:10.1038/s41467-018-05695-3)).

[0316] In some embodiments, any of the engineered polymerases comprising any of SEQ ID NOS: 1-2787, can be linked at the N-terminal or C-terminal end to a conventional His-tag. In some embodiments, the conventional His-tag comprises the sequence MGSSHHHHHH (SEQ ID NO:2815), MGSSHHHHHHGS (SEQ ID NO:2816) or MGSSHHHHHHSSG (SEQ ID NO:2817).

[0317] In some embodiments, the engineered polymerases can be linked at the N-terminal or C-terminal end to a modified His-tag to generate a tagged polymerase that exhibits reduced N-phosphogluconoylation and/or N-gluoconoylation when expressed by an expression host cell harboring a cloned expression vector, wherein the modified His-tag comprises the sequence MGSDKIHHHHHH (SEQ ID NO:2818), MAHHHHHH (SEQ ID NO:2819), MHHHHHH (SEQ ID NO:2820), MRGSPHHHHHH (SEQ ID NO:2821), MRGSHHHHHH (SEQ ID NO:2822), MHHHHHHSSG (SEQ ID NO:2823), or GGHHHHHH (SEQ ID NO:2824).

[0318] In some embodiments, the engineered polymerases can be linked at the N-terminal or C-terminal end to a His-tag that is modified by replacing one or more amino acid residues that are susceptible to N-phosphogluconoylation and/or N-gluconoylation. In some embodiments, the engineered polymerases can be linked at the N-terminal or C-terminal end to a modified N-terminal His-tag, to generate a tagged polymerase that exhibits reduced N-phosphogluconoylation and/or N-gluoconoylation when expressed by an expression host cell harboring a cloned expression vector, wherein the modified His-tag comprises a glycine at position 2 that is replaced with Phenylalanine (F) or proline (P). In some embodiments, the modified His-tag comprises the sequence MFGSDKIHHHHHH (SEQ ID NO:2825), MPGSDKIHHHHHH (SEQ ID NO:2826), MFGSSHHHHHHGS (SEQ ID NO:2827), MPGSSHHHHHHGS (SEQ ID NO:2828), MFRGSPHHHHHH (SEQ ID NO:2829), MPRGSPHHHHHH (SEQ ID NO:2830), MFRGSHHHHHH (SEQ ID NO:2831), MPRGSHHHHHH (SEQ ID NO:2832), MFGSSHHHHHHSSGLVPRGSH (SEQ ID NO:2846), MPGSSHHHHHHSSGLVPRGSH (SEQ ID NO:2847), MPSSHHHHHHSSGLVPRGS (SEQ ID NO:2848) or MPGSSHHHHHHSSGLVPRGS (SEQ ID NO:2849).

[0319] In some embodiments, the tagged polymerase that exhibits reduced N-phosphogluconoylation and/or N-gluoconoylation also exhibits increased enzymatic activity and/or reduced oxidation compared to a tagged polymerase that carries a non-modified His-tag. In some embodiments, the tagged polymerase that exhibits reduced N-phosphogluconoylation and/or N-gluoconoylation also exhibits an increased fraction of active polymerase enzyme in a prepared batch (e.g., manufactured batch) and/or increase shelf-life compared to a tagged polymerase that carries a non-modified His-tag.

[0320] In some embodiments, the engineered polymerases comprises any of SEQ ID NOS: 1-2787 and 2789-2793) operably linked at their N- and/or C-terminus end(s) to at least one polypeptide cleavage sequence, or the polypeptide cleavage sequence can be positioned between an affinity tag sequence and the N-terminus or C-terminus end of the polymerase sequence. In some embodiments, the polypeptide cleavage sequence can be recognized and cleaved with a protease or a reducing condition. In some embodiments, the polypeptide cleavage sequence comprises a thrombin cleavage sequence, TEV cleavage sequence (e.g., from tobacco etch virus including AcTEV and ProTEV), factor Xa cleavage sequence, enterokinase cleavage sequence, and SUMO cleavage sequence (e.g., Small ubiquitin-like modified including Ulp1, Senp2 and SUMOstar).

[0321] In some embodiments, the engineered polymerases can be linked at the N-terminal or C-terminal end to a tag comprising a thrombin cleavage sequence. For example, a conventional thrombin cleavage sequence comprises the sequence LVPRGS (SEQ ID NO:2833), where the cleavage occurs after the arginine (R).

[0322] In some embodiments, the engineered polymerases can be linked at the N-terminal or C-terminal end to a tag comprising a modified thrombin cleavage sequence to generate a tagged polymerase that exhibits reduced N-phosphogluconoylation and/or N-gluoconoylation when expressed by an expression host cell harboring a cloned expression vector, wherein the modified thrombin cleavage sequence comprises an additional amino acid residue inserted after the arginine at position 4. In some embodiments, the modified thrombin cleavage sequence comprises the sequence LVPRAGSH (SEQ ID NO:2834), LVPRGGSH (SEQ ID NO:2835) or LVPRSGSH (SEQ ID NO:2836).

[0323] In some embodiments, the engineered polymerases can be linked at the N-terminal or C-terminal end to a His-tag comprising a thrombin cleavage sequence. In some embodiments, the His-tag which comprises a conventional thrombin cleavage sequence comprises the sequence

[0324] MGSSHHHHHHSSGLVPRGSH (SEQ ID NO:2837) or MGSSHHHHHHSSGLVPRGS (SEQ ID NO:2838). In some embodiments, the His-tag which comprises a thrombin cleavage sequence comprises the sequence MGSSHHHHHHSSGLHHRSGLVPRGSH (SEQ ID NO:2839), MGSSHHHHHHSSGLVPRQS (SEQ ID NO:2840) or MGSSHHHHHHSSGLVPGGSH (SEQ ID NO:2841).

[0325] In some embodiments, the engineered polymerases can be linked at the N-terminal or C-terminal end to a His-tag which comprises a modified thrombin cleavage sequence to generate a tagged polymerase that exhibits reduced N-phosphogluconoylation and/or N-gluoconoylation when expressed by an expression host cell harboring a cloned expression vector, wherein the His-tag which comprises a modified thrombin cleavage sequence comprises the sequence MGSSHHHHHHSSGLVPRAGSH (SEQ ID NO:2842), MGSSHHHHHHSSGLVPRGGSH (SEQ ID NO:2843) or MGSSHHHHHHSSGLVPRSGSH (SEQ ID NO:2844).

[0326] In some embodiments, the recombinant fusion polypeptides comprise any of the wild type and mutant polymerases described herein operably linked at their N- and/or C-terminus end(s) to at least one exogenous amino acid sequence for improving solubilization, including maltose binding protein (MBP), small ubiquitin-like modifier (SUMO) and glutathione S-transferase (GST).

[0327] The present disclosure provides a composition comprising: one or more mutant polymerases and at least one nucleic acid template molecule and at least one nucleic acid primer. In some embodiments, the one or more mutant polymerases may, or may not, be bound to the at least one nucleic acid template molecule and at least one nucleic acid primer. In some embodiments, the primer provides an initiation site for nucleotide polymerization. In some embodiments, the primer comprises a 3′ extendible end for a polymerase-catalyzed nucleotide incorporation reaction, or the primer comprises a 3′ non-extendible end. In some embodiments, the nucleic acid template molecule includes at least one uridine nucleotide or lacks a uridine nucleotide. In some embodiments, the mutant polymerases comprise an amino acid sequence that is at least 80%, 85%, 90%, 95%, 99% identical, or a higher level sequence identity, to any of SEQ ID NOS: 1-2787 and 2789-2793. In some embodiments, the mutant polymerases include amino acid substitutions that confer exonuclease-minus activity. In some embodiments, the polymerases comprise at least one mutation that increases thermal stability of the enzyme, improves binding of nucleotide reagents and/or improved binding and incorporation of nucleotide reagent, improves incorporation rate of nucleotide analogs, improves uracil-tolerance and/or reduced sequence-specific errors compared to their corresponding wild type polymerase.

[0328] The present disclosure provides a composition comprising: one or more mutant polymerases and at least one nucleic acid template molecule having a self-priming 3′ end. In some embodiments, the one or more mutant polymerases may, or may not, be bound to the at least one nucleic acid template molecule having a self-priming 3′ end. In some embodiments, the self-priming 3′ end of the template molecule provides an initiation site for nucleotide polymerization. In some embodiments, the nucleic acid template molecule includes at least one uridine nucleotide or lacks a uridine nucleotide. In some embodiments, the mutant polymerases comprise an amino acid sequence that is at least 80%, 85%, 90%, 95%, 99% identical, or a higher level sequence identity, to any of SEQ ID NOS: 1-2787 and 2789-2793. In some embodiments, the mutant polymerases include amino acid substitutions that confer exonuclease-minus activity. In some embodiments, the polymerases comprise at least one mutation that increases thermal stability of the enzyme, improves incorporation rate of nucleotide analogs and/or improves uracil-tolerance compared to their corresponding wild type polymerase.

[0329] In some embodiments, the composition comprises: one or more mutant polymerases bound to nucleic acid duplexes each comprising a nucleic acid template hybridized to a nucleic acid primer, thereby forming a complexed polymerase. In some embodiments, the primer provides an initiation site for nucleotide polymerization. In some embodiments, the mutant polymerase is bound to a nucleic acid template molecule having a self-priming 3′ end to form a complexed polymerase that lacks a separate primer molecule. In some embodiments, the nucleic acid template molecule includes at least one uridine nucleotide or lacks a uridine nucleotide. In some embodiments, the mutant polymerases comprise an amino acid sequence that is at least 80%, 85%, 90%, 95%, 99% identical, or a higher level sequence identity, to any of SEQ ID NOS: 1-2787 and 2789-2793. In some embodiments, the mutant polymerases are recombinant polymerases.

[0330] In some embodiments, the composition comprises one or more mutant polymerases, at least one nucleic acid template molecule, and an initiation site for nucleotide polymerization, wherein the mutant polymerases are in solution, the nucleic acid template molecules are in solution, and the initiation sites (e.g., primers) are in solution. In some embodiments, the composition comprises one or more mutant polymerases, at least one nucleic acid template molecule, and an initiation site for nucleotide polymerization, wherein the composition comprises any combination of mutant polymerases that are in solution, the nucleic acid template molecules that are in solution or immobilized to a support, and the initiation sites (e.g., primers) that are in solution or immobilized to a support. In some embodiments, the composition comprises one or more mutant polymerases, at least one nucleic acid template molecule, and an initiation site for nucleotide polymerization, wherein the composition comprises any combination of mutant polymerases that are in solution or immobilized to a support, the nucleic acid template molecules that are in solution or immobilized to a support, and the initiation sites (e.g., primers) that are in solution or immobilized to a support.

[0331] In some embodiments, the mutant polymerases exhibit increased thermal stability compared to the wild type polymerase or compared to an engineered polymerase having the same backbone sequence including polymerases having the amino acid sequence of any of SEQ ID NOS: 1-2787 and 2789-2793. For example, the mutant polymerases exhibit increased thermal stability at a temperature range of about 25-50° C. or about 45-90° C.

[0332] In some embodiments, the mutant polymerases exhibit increased incorporation rate of nucleotide analogs compared to a wild type polymerase or compared to an engineered polymerase having the same backbone sequence including polymerases having the amino acid sequence of any of SEQ ID NOS: 1-2787 and 2789-2793, where the nucleotide analogs comprise a chain terminating moiety (e.g., blocking moiety) at the sugar 2′ position and/or at the 3′ sugar position.

[0333] In some embodiments, the mutant polymerases exhibit increased uracil-tolerance compared to a wild type polymerase compared to a wild type polymerase or compared to an engineered polymerase having the same backbone sequence including polymerases having the amino acid sequence of any of SEQ ID NOS: 1-2787 and 2789-2793.

[0334] In some embodiments, the mutant polymerases exhibit increased ability to bind complementary nucleotide units of a multivalent molecule compared to a wild type polymerase or compared to an engineered polymerase having the same backbone sequence including polymerases having the amino acid sequence of any of SEQ ID NOS: 1-2787 and 2789-2793.

[0335] In some embodiments, the mutant polymerases exhibit reduced switching from polymerization conformation to exonuclease conformation (e.g., reduced switching to editing mode) compared to a wild type polymerase or compared to an engineered polymerase having the same backbone sequence including polymerases having the amino acid sequence of any of SEQ ID NOS: 1-2787 and 2789-2793.

[0336] In some embodiments, the composition comprises: one or more mutant polymerases, and a plurality of nucleic acid duplexes each comprising a nucleic acid template hybridized to a nucleic acid primer. In some embodiments, the one or more polymerases and the nucleic acid duplex further comprises nucleotide reagents. The one or more mutant polymerases may or may not be bound to the nucleic acid duplex. The one or more mutant polymerases may or may not be bound to the nucleotide reagents. In some embodiments, the one or mutant polymerases is bound to the nucleic acid duplex comprising a nucleic acid template hybridized to a nucleic acid primer, thereby forming a complexed polymerase. In some embodiments, the complexed polymerase further comprises a nucleotide reagent. In some embodiments, the mutant polymerases comprise an amino acid sequence that is at least 80%, 85%, 90%, 95%, 99% identical, or a higher level sequence identity, to any of SEQ ID NOS: 1-2787 and 2789-2793. In some embodiments, the mutant polymerases are recombinant polymerases.

[0337] In some embodiments, nucleotide reagents comprise any one or any combination of nucleotides and/or multivalent molecules. In some embodiments, the nucleotides comprise canonical nucleotides. In some embodiments, the nucleotides comprise non-labeled nucleotides. In some embodiments, the nucleotides comprise detectably labeled nucleotides each comprising a detectable reporter moiety joined to a nucleo-base or one of the phosphate moieties of the phosphate chain. In some embodiments, the nucleotides comprise nucleotides carrying a removable or non-removable chain terminating moiety. In some embodiments, the reversible chain terminating nucleotides can be detectably labeled or non-labeled. In some embodiments, individual multivalent molecules comprise a central core attached to multiple polymer arms each having a nucleotide unit at the end of the arms.

[0338] In some embodiments, the complexed polymerase further comprises a nucleotide reagent which comprises a nucleotide. In some embodiments, a nucleotide can bind to a complexed polymerase without incorporation. In some embodiments, a complementary nucleotide can bind a complexed polymerase without undergoing polymerase-catalyzed incorporation to form a ternary complex in which the complementary nucleotide binds the 3′ end of the primer at a position that is opposite a complementary nucleotide in the template strand.

[0339] In some embodiments, at least one nucleotide in the plurality of nucleotides comprise a base, sugar and at least one phosphate group. In some embodiments, at least one nucleotide in the plurality comprises an aromatic base, a five carbon sugar (e.g., ribose or deoxyribose), and one or more phosphate groups (e.g., 1-10 phosphate groups). The plurality of nucleotides can comprise at least one type of nucleotide selected from a group consisting of dATP, dGTP, dCTP, dTTP and dUTP. The plurality of nucleotides can comprise at a mixture of any combination of two or more types of nucleotides selected from a group consisting of dATP, dGTP, dCTP, dTTP and/or dUTP.

[0340] In some embodiments, at least one nucleotide in the plurality of nucleotides comprise a chain of one, two or three phosphorus atoms where the chain is typically attached to the 5′ carbon of the sugar moiety via an ester or phosphoramide linkage. In some embodiments, at least one nucleotide in the plurality is an analog having a phosphorus chain in which the phosphorus atoms are linked together with intervening O, S, NH, methylene or ethylene. In some embodiments, the phosphorus atoms in the chain include substituted side groups including O, S or BH₃. In some embodiments, the chain includes phosphate groups substituted with analogs including phosphoramidate, phosphorothioate, phosphordithioate, and O-methylphosphoroamidite groups.

[0341] In some embodiments, at least one nucleotide in the plurality of nucleotides comprises a nucleotide analog having a chain terminating moiety (e.g., blocking moiety) at the sugar 2′ position, at the sugar 3′ position, or at the sugar 2′ and 3′ position. In some embodiments, the chain terminating moiety can inhibit polymerase-catalyzed incorporation of a subsequent nucleotide unit or free nucleotide in a nascent strand during a primer extension reaction. In some embodiments, the chain terminating moiety is attached to the 3′ sugar hydroxyl position where the sugar comprises a ribose or deoxyribose sugar moiety. In some embodiments, the chain terminating moiety is removable/cleavable from the 3′ sugar hydroxyl position to generate a nucleotide having a 3′OH sugar group which is extendible with a subsequent nucleotide in a polymerase-catalyzed nucleotide incorporation reaction. In some embodiments, the chain terminating moiety comprises an alkyl group, alkenyl group, alkynyl group, allyl group, aryl group, benzyl group, azide group, amine group, amide group, keto group, isocyanate group, phosphate group, thio group, disulfide group, carbonate group, urea group, silyl group or acetal group. In some embodiments, the chain terminating moiety is cleavable/removable from the nucleotide, for example by reacting the chain terminating moiety with a chemical agent, pH change, light or heat. In some embodiments, the chain terminating moieties alkyl, alkenyl, alkynyl and allyl are cleavable with tetrakis(triphenylphosphine)palladium(0) (Pd(PPh₃)₄) with piperidine, or with 2,3-Dichloro-5,6-dicyano-1,4-benzo-quinone (DDQ). In some embodiments, the chain terminating moieties aryl and benzyl are cleavable with H2 Pd/C. In some embodiments, the chain terminating moieties amine, amide, keto, isocyanate, phosphate, thio, disulfide are cleavable with phosphine or with a thiol group including beta-mercaptoethanol or dithiothritol (DTT). In some embodiments, the chain terminating moiety carbonate is cleavable with potassium carbonate (K₂CO₃) in MeOH, with triethylamine in pyridine, or with Zn in acetic acid (AcOH). In some embodiments, the chain terminating moieties urea and silyl are cleavable with tetrabutylammonium fluoride, pyridine-HF, with ammonium fluoride, or with triethylamine trihydrofluoride. In some embodiments, the chain terminating moiety may be cleavable/removable with nitrous acid. In some embodiments, a chain terminating moiety may be cleavable/removable using a solution comprising nitrite, such as, for example, a combination of nitrite with an acid such as acetic acid, sulfuric acid, or nitric acid. In some further embodiments, said solution may comprise an organic acid.

[0342] In some embodiments, at least one nucleotide in the plurality of nucleotides comprises a terminator nucleotide analog having a chain terminating moiety (e.g., blocking moiety) at the sugar 2′ position, at the sugar 3′ position, or at the sugar 2′ and 3′ position. In some embodiments, the chain terminating moiety comprises an azide, azido or azidomethyl group. In some embodiments, the chain terminating moiety comprises a 3′-O-azido or 3′-O-azidomethyl group. In some embodiments, the chain terminating moieties azide, azido and azidomethyl group are cleavable/removable with a phosphine compound. In some embodiments, the phosphine compound comprises a derivatized tri-alkyl phosphine moiety or a derivatized tri-aryl phosphine moiety. In some embodiments, the phosphine compound comprises Tris(2-carboxyethyl)phosphine (TCEP) or bis-sulfo triphenyl phosphine (BS-TPP) or Tri(hydroxyproyl)phosphine (THPP). In some embodiments, the cleaving agent comprises 4-dimethylaminopyridine (4-DMAP). In some embodiments, the chain terminating moiety comprising one or more of a 3′-O-amino group, a 3′-O-aminomethyl group, a 3′-O-methylamino group, or derivatives thereof may be cleaved with nitrous acid, through a mechanism utilizing nitrous acid, or using a solution comprising nitrous acid. In some embodiments, the chain terminating moiety comprising one or more of a 3′-O-amino group, a 3′-O-aminomethyl group, a 3′-O-methylamino group, or derivatives thereof may be cleaved using a solution comprising nitrite. In some embodiments, for example, nitrite may be combined with or contacted with an acid such as acetic acid, sulfuric acid, or nitric acid. In some further embodiments, for example, nitrite may be combined with or contacted with an organic acid such as, for example, formic acid, acetic acid, propionic acid, butyric acid, isobutyric acid, or the like. In some embodiments, the chain terminating moiety comprises a 3′-acetal moiety which can be cleaved with a palladium deblocking reagent (e.g., Pd(0)).

[0343] In some embodiments, the nucleotide analog comprise a chain terminating moiety which is selected from a group consisting of 3′-deoxy nucleotides, 2′,3′-dideoxynucleotides, 3′-methyl, 3′-azido, 3′-azidomethyl, 3′-O-azidoalkyl, 3′-O-ethynyl, 3′-O-aminoalkyl, 3′-O-fluoroalkyl, 3′-fluoromethyl, 3′-difluoromethyl, 3′-trifluoromethyl, 3′-sulfonyl, 3′-malonyl, 3′-amino, 3′-O-amino, 3′-sulfhydral, 3′-aminomethyl, 3′-ethyl, 3′butyl, 3′-tert butyl, 3′-Fluorenylmethyloxycarbonyl, 3′ tert-Butyloxycarbonyl, 3′-O-alkyl hydroxylamino group, 3′-phosphorothioate, and 3-O-benzyl, or derivatives thereof.

[0344] In some embodiments, the plurality of nucleotides comprises a plurality of nucleotides that lack a detectable reporter moiety, for example a fluorophore. In some embodiments, the plurality of nucleotides comprises a plurality of nucleotides labeled with detectable reporter moiety. The detectable reporter moiety comprises a fluorophore. In some embodiments, the fluorophore is attached to the nucleotide base. In some embodiments, the fluorophore is attached to the nucleotide base with a linker which is cleavable/removable from the base.

[0345] In some embodiments, the cleavable linker on the base comprises a cleavable moiety comprising an alkyl group, alkenyl group, alkynyl group, allyl group, aryl group, benzyl group, azide group, amine group, amide group, keto group, isocyanate group, phosphate group, thio group, disulfide group, carbonate group, urea group, or silyl group. In some embodiments, the cleavable linker on the base is cleavable/removable from the base by reacting the cleavable moiety with a chemical agent, pH change, light or heat. In some embodiments, the cleavable moieties alkyl, alkenyl, alkynyl and allyl are cleavable with tetrakis(triphenylphosphine)palladium(0) (Pd(PPh₃)₄) with piperidine, or with 2,3-Dichloro-5,6-dicyano-1,4-benzo-quinone (DDQ). In some embodiments, the cleavable moieties aryl and benzyl are cleavable with H2 Pd/C. In some embodiments, the cleavable moieties amine, amide, keto, isocyanate, phosphate, thio, disulfide are cleavable with phosphine or with a thiol group including beta-mercaptoethanol or dithiothritol (DTT). In some embodiments, the cleavable moiety carbonate is cleavable with potassium carbonate (K₂CO₃) in MeOH, with triethylamine in pyridine, or with Zn in acetic acid (AcOH). In some embodiments, the cleavable moieties urea and silyl are cleavable with tetrabutylammonium fluoride, pyridine-HF, with ammonium fluoride, or with triethylamine trihydrofluoride.

[0346] In some embodiments, the cleavable linker on the base comprises cleavable moiety including an azide, azido or azidomethyl group. In some embodiments, the cleavable moieties azide, azido and azidomethyl group are cleavable/removable with a phosphine compound. In some embodiments, the phosphine compound comprises a derivatized tri-alkyl phosphine moiety or a derivatized tri-aryl phosphine moiety. In some embodiments, the phosphine compound comprises Tris(2-carboxyethyl)phosphine (TCEP) or bis-sulfo triphenyl phosphine (BS-TPP) or Tri(hydroxyproyl)phosphine (THPP). In some embodiments, the cleaving agent comprises 4-dimethylaminopyridine (4-DMAP).

[0347] In some embodiments, the chain terminating moiety (e.g., at the sugar 2′ and/or sugar 3′ position) and the cleavable linker on the base have the same or different cleavable moieties. In some embodiments, the chain terminating moiety (e.g., at the sugar 2′ and/or sugar 3′ position) and the detectable reporter moiety linked to the base are chemically cleavable/removable with the same chemical agent. In some embodiments, the chain terminating moiety (e.g., at the sugar 2′ and/or sugar 3′ position) and the detectable reporter moiety linked to the base are chemically cleavable/removable with different chemical agents.

[0348] In some embodiments, the composition comprises: one or more mutant polymerases and a nucleic acid duplex each comprising a nucleic acid template hybridized to a nucleic acid primer. In some embodiments, the one or more polymerases and the nucleic acid duplex further comprises a plurality of nucleotide reagents. In some embodiments, the one or more polymerases and the nucleic acid duplex further comprises a plurality of multivalent molecules. The one or more mutant polymerases may or may not be bound to the nucleic acid duplex. The one or more mutant polymerases may or may not be bound to one or more of the multivalent molecules. In some embodiments, the one or mutant polymerases is bound to the nucleic acid duplex comprising a nucleic acid template hybridized to a nucleic acid primer, thereby forming a complexed polymerase. In some embodiments, the complexed polymerase further comprises at least one nucleotide reagent (e.g., plurality of multivalent molecules). In some embodiments, the mutant polymerases comprise an amino acid sequence that is at least 80%, 85%, 90%, 95%, 99% identical, or a higher level sequence identity, to any of SEQ ID NOS: 1-2787 and 2789-2793. In some embodiments, the mutant polymerases are recombinant polymerases.

[0349] In some embodiments, nucleotide reagents comprise any one or any combination of nucleotides and/or multivalent molecules. In some embodiments, the nucleotides comprise canonical nucleotides. In some embodiments, the nucleotides comprise non-labeled nucleotides. In some embodiments, the nucleotides comprise nucleotide analogs comprise detectably labeled nucleotides and/or nucleotides carrying a removable or non-removable chain terminating moiety. In some embodiments, individual multivalent molecules comprise a central core attached to multiple polymer arms each having a nucleotide unit at the end of the arms.

[0350] In some embodiments, the multivalent molecule generally comprises a central moiety (e.g., a core) attached to a plurality of arms where each arm is attached to a nucleotide unit. The multivalent molecule comprises a star, comb, cross-linked, bottle brush, or dendrimer configuration. In some embodiments, the multivalent molecule may comprise 2-4, 4-10, 10-20, or up to 64 arms. In some embodiments, the arms may radiate from a central moiety.

[0351] In some embodiments, at least one multivalent molecule in the plurality of multivalent molecules comprises: (a) a core; and (b) a plurality of nucleotide arms which comprise (i) a core attachment moiety, (ii) a spacer (e.g., comprising a PEG moiety), (iii) a linker, and (iv) a nucleotide unit, wherein the core is attached to the plurality of nucleotide arms, wherein the spacer is attached to the linker, wherein the linker is attached to the nucleotide unit. In some embodiments, the nucleotide unit comprises a base, sugar and at least one phosphate group, and the linker is attached to the nucleotide unit through the base. In some embodiments, the linker comprises an aliphatic chain or an oligo ethylene glycol chain where both linker chains having 2-6 subunits. In some embodiments, the linker also includes an aromatic moiety. Exemplary multivalent molecules are shown in FIGS. 2-5. An exemplary nucleotide arm is shown in FIG. 6. An exemplary spacer is shown in FIG. 7 (top). Various exemplary linkers are shown in FIG. 7 (bottom) and FIG. 8. Examples of various linkers joined/attached to nucleotide units are shown in FIGS. 9A-D, where the 5 position of a pyrimidine base or the 7 position of a purine base is attached to the linker via a propargyl amine attachment (see also FIG. 10).

[0352] In some embodiments, the nucleotide-arm is designed so that the nucleotide unit of the nucleotide-arm is capable of interacting with a polymerase enzyme in a manner similar to a free nucleotide. The nucleotide unit of a nucleotide-arm can bind a polymerase which is complexed with a nucleic acid template and nucleic acid primer (e.g., nucleotide association). The nucleotide unit can also dissociate from the complexed polymerase and either re-bind the same complexed polymerase or bind a different complexed polymerase that is proximal to the multivalent molecule. Since a multivalent molecule comprises multiple nucleotide-arms, the nucleotide units of a single multivalent molecule can bind multiple complexed polymerases at the same time. The multivalent molecules effectively increase the local concentration of nucleotides which can enhance signals in a nucleotide binding reaction.

[0353] In some embodiments, a nucleotide unit of the multivalent molecule can bind to a complexed polymerase without incorporation. In some embodiments, a complementary nucleotide unit of a multivalent molecule can bind a complexed polymerase without undergoing polymerase-catalyzed incorporation in which the complementary nucleotide unit binds the 3′ end of the primer at a position that is opposite a complementary nucleotide in the template strand.

[0354] In some embodiments, a nucleotide unit of the multivalent molecule can bind to a complexed polymerase, and undergo primer extension by incorporating into the 3′ end of an extendible primer (e.g., complexed with the polymerase) resulting in primer extension. When the nucleotide unit includes a sugar 3′OH then a subsequent nucleotide can be incorporated into the nascent extended primer. When the nucleotide unit includes a sugar 3′OH substituted with a blocking group, then a subsequent nucleotide is blocked from being incorporated into the nascent extended primer strand. A nucleotide unit (of a multivalent molecule) can bind the 3′ end of the primer at a position that is opposite a complementary nucleotide in the template strand. The nucleotide unit can undergo nucleotide incorporation in a polymerase-catalyzed reaction, thereby extending the primer by one nucleotide.

[0355] In some embodiments, the core, linker and/or nucleotide unit of the multivalent molecule can be labeled with a detectable reporter moiety (e.g., fluorophore) in a manner that permits distinction between different multivalent molecules carrying a different type of nucleotide unit. For example, the core unit of a first multivalent molecule is labeled with a first fluorophore, where the first multivalent molecule comprises multiple nucleotide-arms with dGTP nucleotide units. The core unit of a second multivalent molecule is labeled with a second fluorophore (which differs from the first fluorophore), where the second multivalent molecule comprises multiple nucleotide-arms with dATP nucleotide units. The binding and incorporating events of the nucleotide unit can be detected, and the specific base of the nucleotide unit (as part of the multivalent molecule) can be identified based on detection and identification of the detectable reporter moiety on the core. In another example, the linker and/or nucleotide unit of a first multivalent molecule is labeled with a first fluorophore, where the first multivalent molecule comprises multiple nucleotide-arms with dGTP nucleotide units. The linker and/or nucleotide unit of a second multivalent molecule is labeled with a second fluorophore (which differs from the first fluorophore), where the second multivalent molecule comprises multiple nucleotide-arms with dATP nucleotide units. The binding and incorporating events of the nucleotide unit can be detected, and the specific base of the nucleotide unit (as part of the multivalent molecule) can be identified based on detection and identification of the detectable reporter moiety on the core. In some embodiments, the core, linker and nucleotide unit are not labeled with a detectable reporter moiety.

[0356] In some embodiments, at least one nucleotide unit attached to the nucleotide arm of the multivalent molecule can be labeled with a detectable reporter moiety (e.g., fluorophore) in a manner that permits distinction between different multivalent molecules carrying a different type of nucleotide unit. For example, the nucleotide unit of a first multivalent molecule is labeled with a first fluorophore, where the first multivalent molecule comprises multiple nucleotide-arms with dGTP nucleotide units. The nucleotide unit of a second multivalent molecule is labeled with a second fluorophore (which differs from the first fluorophore), where the second multivalent molecule comprises multiple nucleotide-arms with dATP nucleotide units. The binding and incorporating events of the nucleotide unit can be detected, and the specific base of the nucleotide unit (as part of the multivalent molecule) can be identified based on detection and identification of the detectable reporter moiety on the nucleotide unit.

[0357] In some embodiments, individual multivalent molecules in the plurality of multivalent molecules comprise a core attached to multiple nucleotide arms, and wherein the multiple nucleotide arms have the same type of nucleotide unit which is selected from a group consisting of dATP, dGTP, dCTP, dTTP and dUTP.

[0358] In some embodiments, the nucleotide unit of the at least one multivalent molecule comprises an aromatic base, a five carbon sugar (e.g., ribose or deoxyribose), and one or more phosphate groups (e.g., 1-10 phosphate groups). The plurality of multivalent molecules can comprise one type multivalent molecule having one type of nucleotide unit selected from a group consisting of dATP, dGTP, dCTP, dTTP and dUTP. The plurality of nucleotides can comprise at a mixture of any combination of two or more types of multivalent molecules, where individual multivalent molecules in the mixture comprise nucleotide units selected from a group consisting of dATP, dGTP, dCTP, dTTP and/or dUTP.

[0359] In some embodiments, the plurality of complexed mutant DNA polymerases further comprise a first and second binding complex and a multivalent molecule which forms an avidity complex, wherein (i) the first binding complex comprises a first nucleic acid primer, a first DNA polymerase, and a first multivalent molecule bound to a first portion of a concatemer template molecule thereby forming a first binding complex (e.g., FIGS. 44-46), wherein a first nucleotide unit of the multivalent molecule is bound to the first DNA polymerase, and (ii) the second binding complex comprises a second nucleic acid primer, a second DNA polymerase, and the first multivalent molecule bound to a second portion of the same concatemer template molecule thereby forming a second binding complex (e.g., FIGS. 44-46), wherein a second nucleotide unit of the multivalent molecule is bound to the second DNA polymerase, wherein the first and second binding complexes which include the same multivalent molecule forms an avidity complex (e.g., FIG. 47). In some embodiments, the first polymerase comprises any mutant polymerase described herein. In some embodiments, the second polymerase comprises any mutant polymerase described herein. The concatemer template molecule comprises tandem repeat sequences of a sequence of interest and at least one universal sequencing primer binding site. The first and second nucleic acid primers can bind to a sequencing primer binding site along the concatemer template molecule.

[0360] In some embodiments, in the system, the plurality of complexed DNA polymerases further comprise a first and second binding complex and a multivalent molecule which forms an avidity complex, wherein (i) the first binding complex comprises a first nucleic acid primer, a first DNA polymerase, and a first multivalent molecule bound to a first template molecule thereby forming a first binding complex, wherein a first nucleotide unit of the multivalent molecule is bound to the first DNA polymerase, and (ii) the second binding complex comprises a second nucleic acid primer, a second DNA polymerase, and the first multivalent molecule bound to a second template molecule thereby forming a second binding complex, wherein a second nucleotide unit of the multivalent molecule is bound to the second DNA polymerase, wherein the first and second binding complexes which include the same multivalent molecule forms an avidity complex. In some embodiments, the first polymerase comprises any mutant polymerase described herein. In some embodiments, the second polymerase comprises any mutant polymerase described herein. In some embodiments, the first and second template molecules are clonally amplified template molecules. In some embodiments, the first and second template molecules are localized in close proximity to each other. For example, the clonally-amplified first and second template molecules comprise linear template molecules that are generated via bridge amplification and are immobilized to the same location or feature on a support. The first and second template molecules comprise a sequence of interest and at least one universal sequencing primer binding site. The first and second nucleic acid primers can bind to a sequencing primer binding site on the first and second template molecules, respectively.

[0361] In some embodiments, at least one multivalent molecule in the plurality of multivalent molecules comprise a nucleotide unit having a chain of one, two or three phosphorus atoms where the chain is typically attached to the 5′ carbon of the sugar moiety via an ester or phosphoramide linkage. In some embodiments, at least one nucleotide unit is a nucleotide analog having a phosphorus chain in which the phosphorus atoms are linked together with intervening O, S, NH, methylene or ethylene. In some embodiments, the phosphorus atoms in the chain include substituted side groups including O, S or BH₃. In some embodiments, the chain includes phosphate groups (e.g., 1-10 phosphate groups) substituted with analogs including phosphoramidate, phosphorothioate, phosphordithioate, and O-methylphosphoroamidite groups.

[0362] In some embodiments, individual multivalent molecules in the plurality of multivalent molecule comprise a core attached to multiple nucleotide arms, and wherein individual nucleotide arms comprise a nucleotide unit having a chain terminating moiety (e.g., blocking moiety) at the sugar 2′ position, at the sugar 3′ position, or at the sugar 2′ and 3′ position.

[0363] In some embodiments, at least one multivalent molecule in the plurality of multivalent molecules comprises a nucleotide unit comprising a nucleotide analog having a chain terminating moiety (e.g., blocking moiety) at the sugar 2′ position, at the sugar 3′ position, or at the sugar 2′ and 3′ position. In some embodiments, the chain terminating moiety can inhibit polymerase-catalyzed incorporation of a subsequent nucleotide unit or free nucleotide in a nascent strand during a primer extension reaction. In some embodiments, the chain terminating moiety is attached to the 3′ sugar hydroxyl position where the sugar comprises a ribose or deoxyribose sugar moiety. In some embodiments, the chain terminating moiety is removable/cleavable from the 3′ sugar hydroxyl position to generate a nucleotide having a 3′OH sugar group which is extendible with a subsequent nucleotide in a polymerase-catalyzed nucleotide incorporation reaction. In some embodiments, the chain terminating moiety comprises an alkyl group, alkenyl group, alkynyl group, allyl group, aryl group, benzyl group, azide group, amine group, amide group, keto group, isocyanate group, phosphate group, thio group, disulfide group, carbonate group, urea group, or silyl group. In some embodiments, the chain terminating moiety is cleavable/removable from the nucleotide, for example by reacting the chain terminating moiety with a chemical agent, pH change, light or heat. In some embodiments, the chain terminating moieties alkyl, alkenyl, alkynyl and allyl are cleavable with tetrakis(triphenylphosphine)palladium(0) (Pd(PPh₃)₄) with piperidine, or with 2,3-Dichloro-5,6-dicyano-1,4-benzo-quinone (DDQ). In some embodiments, the chain terminating moieties aryl and benzyl are cleavable with H2 Pd/C. In some embodiments, the chain terminating moieties amine, amide, keto, isocyanate, phosphate, thio, disulfide are cleavable with phosphine or with a thiol group including beta-mercaptoethanol or dithiothritol (DTT). In some embodiments, the chain terminating moiety carbonate is cleavable with potassium carbonate (K₂CO₃) in MeOH, with triethylamine in pyridine, or with Zn in acetic acid (AcOH). In some embodiments, the chain terminating moieties urea and silyl are cleavable with tetrabutylammonium fluoride, pyridine-HF, with ammonium fluoride, or with triethylamine trihydrofluoride.

[0364] In some embodiments, at least one multivalent molecule in the plurality of multivalent molecules comprises a nucleotide unit comprising a terminator nucleotide analog having a chain terminating moiety (e.g., blocking moiety) at the sugar 2′ position, at the sugar 3′ position, or at the sugar 2′ and 3′ position. In some embodiments, the chain terminating moiety comprises an azide, azido or azidomethyl group. In some embodiments, the chain terminating moiety comprises a 3′-O-azido or 3′-O-azidomethyl group. In some embodiments, the chain terminating moieties azide, azido and azidomethyl group are cleavable/removable with a phosphine compound. In some embodiments, the phosphine compound comprises a derivatized tri-alkyl phosphine moiety or a derivatized tri-aryl phosphine moiety. In some embodiments, the phosphine compound comprises Tris(2-carboxyethyl)phosphine (TCEP) or bis-sulfo triphenyl phosphine (BS-TPP) or Tri(hydroxyproyl)phosphine (THPP). In some embodiments, the cleaving agent comprises 4-dimethylaminopyridine (4-DMAP).

[0365] In some embodiments, at least one multivalent molecule in the plurality of multivalent molecules comprises a nucleotide unit comprising a chain terminating moiety which is selected from a group consisting of 3′-deoxy nucleotides, 2′,3′-dideoxynucleotides, 3′-methyl, 3′-azido, 3′-azidomethyl, 3′-O-azidoalkyl, 3′-O-ethynyl, 3′-O-aminoalkyl, 3′-O-fluoroalkyl, 3′-fluoromethyl, 3′-difluoromethyl, 3′-trifluoromethyl, 3′-sulfonyl, 3′-malonyl, 3′-amino, 3′-O-amino, 3′-sulfhydral, 3′-aminomethyl, 3′-ethyl, 3′butyl, 3′-tert butyl, 3′-Fluorenylmethyloxycarbonyl, 3′ tert-Butyloxycarbonyl, 3′-O-alkyl hydroxylamino group, 3′-phosphorothioate, and 3-O-benzyl, or derivatives thereof.

[0366] In some embodiments, at least one multivalent molecule in the plurality of multivalent molecules comprises a core attached to multiple nucleotide arms, wherein the core is labeled with detectable reporter moiety. In some embodiments, the detectable reporter moiety comprises a fluorophore.

[0367] In some embodiments, at least one multivalent molecule in the plurality of multivalent molecules comprises a nucleotide unit attached to multiple nucleotide arms, wherein the nucleotide unit is labeled with detectable reporter moiety. In some embodiments, the detectable reporter moiety comprises a fluorophore.

[0368] In some embodiments, at least one multivalent molecule in the plurality of multivalent molecules comprises at least one linker that is part of a nucleotide arm, wherein the linker is labeled with detectable reporter moiety. In some embodiments, the detectable reporter moiety comprises a fluorophore.

[0369] In some embodiments, the core comprises an streptavidin-type or avidin-type moiety and the core attachment moiety comprises biotin. In some embodiments, the core comprises an streptavidin-type or avidin-type moiety which includes an avidin protein, as well as any derivatives, analogs and other non-native forms of avidin that can bind to at least one biotin moiety. Other forms of avidin moieties include native and recombinant avidin and streptavidin as well as derivatized molecules, e.g. non-glycosylated avidin and truncated streptavidins. For example, avidin moiety includes de-glycosylated forms of avidin, bacterial streptavidin produced by Streptomyces (e.g., Streptomyces avidinii), as well as derivatized forms, for example, N-acyl avidins, e.g., N-acetyl, N-phthalyl and N-succinyl avidin, and the commercially-available products ExtrAvidin™, Captavidin™, Neutravidin™, and Neutralite Avidin™ Exemplary multivalent molecules are shown in FIGS. 2-3 and 5 in which a generic core is conjugated to a plurality of nucleotide-arms. An exemplary multivalent molecule is shown in FIG. 4 in which a generic dendrimer core is conjugated to a plurality of nucleotide-arms. An exemplary design for a multivalent molecule is shown in FIG. 5, which shows a core (e.g., streptavidin core) attached/bound to a plurality of nucleotide-arms, where the nucleotide arms comprise a core attachment moiety (e.g., biotin), spacer, linker and nucleotide unit. An exemplary biotinylated nucleotide-arm comprising biotin, spacer, linker and nucleotide unit, is shown in FIG. 6.

[0370] In some embodiments, the composition comprises: one or more mutant polymerases which are bound to nucleic acid duplexes each comprising a nucleic acid template hybridized to a nucleic acid primer, thereby forming a complexed polymerase, and the composition further comprises at least one cation. In some embodiment, the at least one cation is selected from the group consisting of strontium, barium, sodium, magnesium, potassium, manganese, calcium, lithium, nickel and cobalt. In some embodiments, the cation comprises a catalytic divalent cation that promotes polymerase-catalyzed nucleotide incorporation, wherein the catalytic divalent cations comprise magnesium or manganese. In some embodiments, the cation comprises a non-catalytic divalent cation that inhibits polymerase-catalyzed nucleotide incorporation, wherein the non-catalytic divalent cations comprise strontium, barium and/or calcium.

[0371] In some embodiments, the composition comprises: one or more mutant polymerases which are bound to nucleic acid duplexes each comprising a nucleic acid template molecule hybridized to a nucleic acid primer, thereby forming a complexed polymerase. In some embodiments, the nucleic acid template molecule comprises a linear nucleic acid molecule, or a circular nucleic acid molecule, or a mixture of both linear and circular nucleic acid molecules. In some embodiments, the nucleic acid template molecules in the plurality of nucleic acid template molecules comprise the same target sequence of interest or different target sequences of interest. In some embodiments, the nucleic acid template molecule comprises an amplified nucleic acid molecule. In some embodiments, the nucleic acid template molecule comprises a clonally-amplified template molecule or a single nucleic acid template molecule. In some embodiments, the nucleic acid template molecule comprises one copy of a target sequence of interest. In some embodiments, the nucleic acid template molecule comprises two or more tandem copies of a target sequence of interest (e.g., a concatemer). In some embodiments, the nucleic acid template molecules includes at least one uridine nucleotide or lacks a uridine nucleotide. In some embodiments, the primer provides an initiation site for nucleotide polymerization. In some embodiments, the nucleic acid primer comprises an extendible 3′ terminal end or a non-extendible 3′ terminal end. In some embodiments, the mutant polymerases comprise an amino acid sequence that is at least 80%, 85%, 90%, 95%, 99% identical, or a higher level sequence identity, to any of SEQ ID NOS: 1-2787 and 2789-2793.

[0372] In some embodiments, the complexed polymerase is immobilized to a support, where any of the nucleic acid template, nucleic acid primer and/or polymerase is/are immobilized to the support. In some embodiments, the composition comprises a plurality of complexed polymerases immobilized to a support. In some embodiments, about 10²-10¹⁵ complexed polymerases are immobilized to a support at different sites on the support. In some embodiments, the plurality of complexed polymerases are immobilized to pre-determined sites (e.g., locations) on the support. In some embodiments, the plurality of complexed polymerases are immobilized to random sites (e.g., locations) on the support. In some embodiments, the plurality of immobilized complexed mutant DNA polymerases are in fluid communication with each other to permit flowing a solution of reagents (e.g., enzymes including polymerases, multivalent molecules, nucleotides and/or divalent cations, and the like) onto the support so that the plurality of immobilized complexed polymerases on the support can be reacted with the solution of reagents in a massively parallel manner.

[0373] In some embodiments, the support comprises a planar or non-planar support. The support can be solid or semi-solid. In some embodiments, the support can be porous, semi-porous or non-porous. In some embodiments, the surface of the support can be coated with one or more compounds to produce a passivated layer on the support. In some embodiments, the passivated layer forms a porous or semi-porous layer. In some embodiments, the nucleic acid primer or template, or the polymerase, can be attached to the passivated layer to immobilize the primer, template and/or polymerase to the support. In some embodiments, the support comprises a low non-specific binding surface that enable improved nucleic acid hybridization and amplification performance on the support. In general, the support may comprise one or more layers of a covalently or non-covalently attached low-binding, chemical modification layers, e.g., silane layers, polymer films, and one or more covalently or non-covalently attached oligonucleotides that can be used for immobilizing a plurality of nucleic acid template molecules to the support. In some embodiments, the support can comprise a functionalized polymer coating layer covalently bound at least to a portion of the support via a chemical group on the support, a primer grafted to the functionalized polymer coating, and a water-soluble protective coating on the primer and the functionalized polymer coating. In some embodiments, the functionalized polymer coating comprises a poly(N-(5-azidoacet-amidylpentyl)acrylamide-co-acrylamide (PAZAM). In some embodiments, the support comprises a surface coating having at least one hydrophilic polymer coating layer and at least one layer of a plurality of oligonucleotides. The hydrophilic polymer coating layer can comprise polyethylene glycol (PEG). The hydrophilic polymer coating layer can comprise branched PEG having at least 4 branches. In some embodiments, the low non-specific binding coating has a degree of hydrophilicity which can be measured as a water contact angle, where the water contact angle is no more than 45 degrees.

[0374] In some embodiments, the composition comprises a plurality of complexed polymerases, having at least a first and second complexed polymerase, wherein: (a) the first complexed polymerases comprises a first mutant polymerase bound to a first nucleic acid duplex comprising a first nucleic acid template molecule which is hybridized to a first nucleic acid primer, (b) the second complexed polymerases comprises a second mutant polymerase bound to a second nucleic acid duplex comprising a second nucleic acid template molecule which is hybridized to a second nucleic acid primer. In some embodiments, the first and second nucleic acid template molecule comprise the same or different sequences. In some embodiments, the first and second nucleic acid template molecules are clonally-amplified. In some embodiments, the first and/or the second nucleic acid template molecule includes at least one uridine nucleotide or lacks a uridine nucleotide. In some embodiments, the first and second primers comprise extendible 3′ ends or non-extendible 3′ ends. In some embodiments, the first and second mutant polymerases comprise an amino acid sequence that is at least 80%, 85%, 90%, 95%, 99% identical, or a higher level sequence identity, to any of SEQ ID NOS: 1-2787 and 2789-2793. In some embodiments, the first and second mutant polymerases are recombinant polymerases.

[0375] In some embodiments, the plurality of complexed polymerases (including the first and second complexed polymerases) are immobilized to a support. In some embodiments, the density of the plurality of complexed polymerases comprises about 10²-10¹⁵ per mm² complexed polymerases that are immobilized to the support. In some embodiments, the first and second nucleic acid template molecules are immobilized to a different site on the support. In some embodiments, the support comprises a plurality of sites arranged in an array. In some embodiments, the sites on the support are arranged in one dimension in a row or a column, or arranged in two dimensions in rows and columns. In some embodiments, the plurality of sites is arranged on the support in a random or organized fashion, or a combination of both. In some embodiments, the plurality of sites is arranged in any pattern, including rectilinear or hexagonal patterns. In some embodiments, the support comprises about 10²-10¹⁵ sites per mm² or more that are immobilized with nucleic acid templates to form a nucleic acid template array. In some embodiments, the nucleic acid templates that are immobilized at a plurality of sites, for example the nucleic acid template molecules are immobilized at about 10²-10¹⁵ sites per mm² or more, where the immobilized nucleic acid templates are clonally-amplified to generate immobilized nucleic acid polonies at the plurality of sites. In some embodiment, the plurality of nucleic acid template molecules immobilized on the support are in fluid communication with each other to permit flowing a solution of a reagents (e.g., a plurality of enzymes (e.g., polymerases), a plurality of nucleotides and/or a plurality of multivalent molecules) onto the support so that the plurality of nucleic acid template molecules immobilized on the support can be reacted with the plurality of reagents in a massively parallel manner. In some embodiments, the fluid communication of the plurality of nucleic acid polonies immobilized on the support can be used to conduct nucleotide binding assays and/or conduct nucleotide incorporation assays (e.g., primer extension or sequencing) essentially simultaneously on the plurality of nucleic acid polonies. In some embodiments, the fluid communication of the plurality of nucleic acid polonies immobilized on the support can be used to conduct detection and imaging for massively parallel sequencing. In some embodiments, the term “immobilized” and related terms refer to nucleic acid molecules or enzymes that are attached directly to a support through covalent bond or non-covalent interaction, or attached to a coating on the support. In some embodiments, the low non-specific binding coating has a degree of hydrophilicity which can be measured as a water contact angle, where the water contact angle is no more than 45 degrees.

[0376] In some embodiments, a binding complex comprises a mutant polymerase, a nucleic acid template molecule duplexed with a primer, and a nucleotide reagent. In some embodiments, a binding complex comprises (i) a mutant polymerase, a nucleic acid template molecule duplexed with a primer, and a nucleotide, or the binding complex comprises (ii) a mutant polymerase, a nucleic acid template molecule duplexed with a primer, and a nucleotide unit of a multivalent molecule. In some embodiments, the mutant polymerase comprises an amino acid sequence that is at least 80%, 85%, 90%, 95%, 99% identical, or a higher level sequence identity, to any of SEQ ID NOS: 1-2787 and 2789-2793. In some embodiments, the binding complex has a persistence time of greater than about 0.1, 0.2, 0.3, 0.4, 0.5, 0.6, 0.7, 0.8, 0.9 or 1 second. In some embodiments, the binding complex has a persistence time of 1-30 seconds. The binding complex has a persistence time of greater than about 0.1-0.25 seconds, or about 0.25-0.5 seconds, or about 0.5-0.75 seconds, or about 0.75-1 second, or about 1-2 seconds, or about 2-3 seconds, or about 3-4 second, or about 4-5 seconds, or about 5-10 seconds, or about 10-30 seconds and/or wherein the method is or may be carried out at a temperature of at or above 15° C., at or above 20° C., at or above 25° C., at or above 35° C., at or above 37° C., at or above 42° C. at or above 55° C. at or above 60° C., or at or above 72° C., or at or above 80° C., or within a range defined by any of the foregoing. In some embodiments, the binding complexes may have a persistence time of greater than 1 s, greater than 2 s, greater than 3 s, greater than 5 s, greater than 10 s, greater than 15 s, greater than 20 s, greater than 30 s, greater than 60 s, greater than 120 s, greater than 360 s, greater than 3600 s, or more, or for a time lying within a range defined by any two or more of these values. The binding complex (e.g., ternary complex) remains stable until subjected to a condition that causes dissociation of interactions between any of the polymerase, template molecule, primer and/or the nucleotide unit or the nucleotide. For example, a dissociating condition comprises contacting the binding complex with any one or any combination of a detergent, EDTA and/or water. In some embodiments, the present disclosure provides said method wherein the binding complex is deposited on, attached to, or hybridized to, a surface showing a contrast to noise ratio in the detecting step of greater than 20. In some embodiments, the present disclosure provides said method wherein the contacting is performed under a condition that stabilizes the binding complex when the nucleotide or nucleotide unit is complementary to a next base of the template nucleic acid, and destabilizes the binding complex when the nucleotide or nucleotide unit is not complementary to the next base of the template nucleic acid.

[0377] The present disclosure provides a composition comprising a reaction mixture which comprises: (a) one or more mutant polymerases; (b) a nucleic acid template molecule; (c) a nucleic acid primer having a 3′ extendible end or a 3′ non-extendible end; and (d) a plurality of nucleotides or a plurality of multivalent molecules. In some embodiments, the one or more mutant polymerases are not bound to the nucleic acid template molecules. In some embodiments, the one or more mutant polymerases are not bound to the nucleic acid primers. In some embodiments, the one or more mutant polymerases are bound to nucleic acid duplexes comprising a nucleic acid template hybridized to a nucleic acid primer, thereby forming complexed polymerases. In some embodiments, the nucleic acid template molecules includes at least one uridine nucleotide or lacks a uridine nucleotide. In some embodiments, the plurality of nucleotides includes at least one uridine nucleotide or lacks a uridine nucleotide. In some embodiments, the mutant polymerases comprise an amino acid sequence that is at least 80%, 85%, 90%, 95%, 99% identical, or a higher level sequence identity, to any of SEQ ID NOS: 1-2787 and 2789-2793.

[0378] In some embodiments, the reaction mixture further comprises (e1) at least one non-catalytic divalent cation that permits binding at least one nucleotide to the complexed polymerase or that permits binding at least one multivalent molecule to the complexed polymerase, but the non-catalytic divalent cation inhibits polymerase-catalyzed incorporation. In some embodiments the non-catalytic divalent cation comprises strontium, barium and/or calcium.

[0379] In some embodiments, the reaction mixture further comprises (e2) at least one catalytic divalent cation that permits binding at least one nucleotide to the complexed polymerase or that permits binding at least one multivalent molecule to the complexed polymerase, and the catalytic divalent cation promotes polymerase-catalyzed incorporation. In some embodiments, the catalytic divalent cation comprises magnesium and/or manganese. In some embodiments, the nucleic acid template and nucleic acid primer are in solution. In some embodiments, the nucleic acid template and/or the nucleic acid primer is immobilized to a support or immobilized to a coating on a support.

[0380] In some embodiments, the reaction mixture is suitable for use in conducting a nucleotide binding reaction (or multivalent molecule binding reaction). In some embodiments, the reaction mixture is suitable for use in conducting a nucleotide incorporation reaction (or incorporation reaction of the nucleotide unit of the multivalent molecule). In some embodiments, the reaction mixture is suitable for use in conducting a primer extension reaction in which the nucleotide incorporates into the 3′ end of the extendible primer (or the nucleotide unit of the multivalent molecule incorporates into the 3′ end of the extendible primer).

### Kits

[0381] The present disclosure provides a kit comprising at least one mutant polymerase comprising an amino acid sequence that is at least 80%, 85%, 90%, 95%, 99% identical, or a higher level sequence identity, to any of SEQ ID NOS: 1-2787 and 2789-2793.

[0382] In some embodiments, the kit further comprises at least one cation. In some embodiment, the at least one cation is selected from the group consisting of strontium, barium, sodium, magnesium, potassium, manganese, calcium, lithium, nickel and cobalt.

[0383] In some embodiments, the kit further comprises a plurality of nucleic acid primers having an extendible 3′ terminal end or a non-extendible 3′ terminal end. In some embodiments, at least one of the primers can be immobilized to a support. In some embodiments, the immobilized primers (e.g., capture primers) can be used to hybridize to nucleic acid templates. In some embodiments, at least one of the primers comprise a sequencing primer that can hybridize to an adaptor sequence (e.g., universal adaptor sequence) appended to a template molecule.

[0384] In some embodiments, the kit further comprises a plurality of nucleotides. In some embodiments, at least one nucleotide in the plurality of nucleotides comprise a base, sugar and at least one phosphate group. In some embodiments, at least one nucleotide in the plurality comprises an aromatic base, a five carbon sugar (e.g., ribose or deoxyribose), and one or more phosphate groups (e.g., 1-10 phosphate groups). The plurality of nucleotides can comprise at least one type of nucleotide selected from a group consisting of dATP, dGTP, dCTP, dTTP and dUTP. The plurality of nucleotides can comprise at a mixture of any combination of two or more types of nucleotides selected from a group consisting of dATP, dGTP, dCTP, dTTP and/or dUTP.

[0385] In some embodiments, in the kit, at least one nucleotide in the plurality of nucleotides comprise a chain of one, two or three phosphorus atoms where the chain is typically attached to the 5′ carbon of the sugar moiety via an ester or phosphoramide linkage. In some embodiments, at least one nucleotide in the plurality is an analog having a phosphorus chain in which the phosphorus atoms are linked together with intervening O, S, NH, methylene or ethylene. In some embodiments, the phosphorus atoms in the chain include substituted side groups including O, S or BH₃. In some embodiments, the chain includes phosphate groups substituted with analogs including phosphoramidate, phosphorothioate, phosphordithioate, and O-methylphosphoroamidite groups.

[0386] In some embodiments, in the kit, at least one nucleotide in the plurality of nucleotides comprises a terminator nucleotide analog having a chain terminating moiety (e.g., blocking moiety) at the sugar 2′ position, at the sugar 3′ position, or at the sugar 2′ and 3′ position. In some embodiments, the chain terminating moiety can inhibit polymerase-catalyzed incorporation of a subsequent nucleotide unit or free nucleotide in a nascent strand during a primer extension reaction. In some embodiments, the chain terminating moiety is attached to the 3′ sugar hydroxyl position where the sugar comprises a ribose or deoxyribose sugar moiety. In some embodiments, the chain terminating moiety is removable/cleavable from the 3′ sugar hydroxyl position to generate a nucleotide having a 3′OH sugar group which is extendible with a subsequent nucleotide in a polymerase-catalyzed nucleotide incorporation reaction. In some embodiments, the chain terminating moiety comprises an alkyl group, alkenyl group, alkynyl group, allyl group, aryl group, benzyl group, azide group, amine group, amide group, keto group, isocyanate group, phosphate group, thio group, disulfide group, carbonate group, urea group, or silyl group. In some embodiments, the kit can also include a chemical agent that cleaves the chain terminating moieties. For example, the kit comprises any one or any combination of tetrakis(triphenylphosphine)palladium(0) (Pd(PPh₃)₄) with piperidine, or with 2,3-Dichloro-5,6-dicyano-1,4-benzo-quinone (DDQ), H2 Pd/C, or a phosphine or with a thiol group including beta-mercaptoethanol or dithiothritol (DTT). In some embodiments, the kit includes a chemical agent comprising potassium carbonate (K₂CO₃) in MeOH, with triethylamine in pyridine, or with Zn in acetic acid (AcOH). In some embodiments, the kit includes a chemical agent comprising tetrabutylammonium fluoride, pyridine-HF, with ammonium fluoride, or with triethylamine trihydrofluoride. In some embodiments, the kit includes a chemical agent comprising nitrous acid. In some embodiments, the kit includes a solution comprising nitrite, such as, for example, a combination of nitrite with an acid such as acetic acid, sulfuric acid, or nitric acid. In some further embodiments, said solution may comprise an organic acid such as for example, formic acid, acetic acid, propionic acid, butyric acid, isobutyric acid, or the like.

[0387] In some embodiments, in the kit, at least one nucleotide in the plurality of nucleotides comprises a terminator nucleotide analog having a chain terminating moiety (e.g., blocking moiety) at the sugar 2′ position, at the sugar 3′ position, or at the sugar 2′ and 3′ position. In some embodiments, the chain terminating moiety comprises an azide, azido or azidomethyl group. In some embodiments, the chain terminating moiety comprises a 3′-O-azido or 3′-O-azidomethyl group. In some embodiments, the kit can include a chemical agent that cleaves the chain terminating moieties. For example, the kit comprises any one or any combination of a phosphine compound, a phosphine compound comprises a derivatized tri-alkyl phosphine moiety or a derivatized tri-aryl phosphine moiety. In some embodiments, the phosphine compound comprises Tris(2-carboxyethyl)phosphine (TCEP) or bis-sulfo triphenyl phosphine (BS-TPP) or Tri(hydroxyproyl)phosphine (THPP). In some embodiments, the cleaving agent comprises 4-dimethylaminopyridine (4-DMAP).

[0388] In some embodiments, in the kit, the nucleotide analog comprise a chain terminating moiety which is selected from a group consisting of 3′-deoxy nucleotides, 2′,3′-dideoxynucleotides, 3′-methyl, 3′-azido, 3′-azidomethyl, 3′-O-azidoalkyl, 3′-O-ethynyl, 3′-O-aminoalkyl, 3′-O-fluoroalkyl, 3′-fluoromethyl, 3′-difluoromethyl, 3′-trifluoromethyl, 3′-sulfonyl, 3′-malonyl, 3′-amino, 3′-O-amino, 3′-sulfhydral, 3′-aminomethyl, 3′-ethyl, 3′butyl, 3′-tert butyl, 3′-Fluorenylmethyloxycarbonyl, 3′ tert-Butyloxycarbonyl, 3′-O-alkyl hydroxylamino group, 3′-phosphorothioate, and 3-O-benzyl, or derivatives thereof.

[0389] In some embodiments, in the kit, the plurality of nucleotides comprises a plurality of nucleotides labeled with detectable reporter moiety. The detectable reporter moiety comprises a fluorophore. In some embodiments, the fluorophore is attached to the nucleotide base. In some embodiments, the fluorophore is attached to the nucleotide base with a linker which is cleavable/removable from the base.

[0390] In some embodiments, in the kit, the cleavable linker on the base comprises a cleavable moiety comprising an alkyl group, alkenyl group, alkynyl group, allyl group, aryl group, benzyl group, azide group, amine group, amide group, keto group, isocyanate group, phosphate group, thio group, disulfide group, carbonate group, urea group, or silyl group. In some embodiments, the kit can also include a chemical agent that cleaves the cleavable linker on the base. For example, the kit comprises any one or any combination of tetrakis(triphenylphosphine)palladium(0) (Pd(PPh₃)₄) with piperidine, or with 2,3-Dichloro-5,6-dicyano-1,4-benzo-quinone (DDQ), H2 Pd/C, or a phosphine or with a thiol group including beta-mercaptoethanol or dithiothritol (DTT). In some embodiments, the kit includes a chemical agent comprising potassium carbonate (K₂CO₃) in MeOH, with triethylamine in pyridine, or with Zn in acetic acid (AcOH). In some embodiments, the kit includes a chemical agent comprising tetrabutylammonium fluoride, pyridine-HF, with ammonium fluoride, or with triethylamine trihydrofluoride.

[0391] In some embodiments, in the kit, the cleavable linker on the base comprises cleavable moiety including an azide, azido or azidomethyl group. In some embodiments, the kit can include a chemical agent that cleaves the cleavable linker on the base. For example, the kit comprises any one or any combination of a phosphine compound, a phosphine compound comprises a derivatized tri-alkyl phosphine moiety or a derivatized tri-aryl phosphine moiety. In some embodiments, the phosphine compound comprises Tris(2-carboxyethyl)phosphine (TCEP) or bis-sulfo triphenyl phosphine (BS-TPP) or Tri(hydroxyproyl)phosphine (THPP). In some embodiments, the cleaving agent comprises 4-dimethylaminopyridine (4-DMAP).

[0392] In some embodiments, in the kit, the chain terminating moiety (e.g., at the sugar 2′ and/or sugar 3′ position) and the cleavable linker on the base have the same or different cleavable moieties. In some embodiments, the chain terminating moiety (e.g., at the sugar 2′ and/or sugar 3′ position) and the detectable reporter moiety linked to the base are chemically cleavable/removable with the same chemical agent. In some embodiments, the chain terminating moiety (e.g., at the sugar 2′ and/or sugar 3′ position) and the detectable reporter moiety linked to the base are chemically cleavable/removable with different chemical agents.

[0393] The present disclosure provides a kit comprising at least one mutant polymerase comprising an amino acid sequence that is at least 80%, 85%, 90%, 95%, 99% identical, or a higher level sequence identity, to any of SEQ ID NOS: 1-2787 and 2789-2793, and the kit further comprises a plurality of multivalent molecules. In some embodiments, at least one multivalent molecule in the plurality of multivalent molecules comprises: (a) a core; and (b) a plurality of nucleotide arms which comprise (i) a core attachment moiety, (ii) a spacer (e.g., comprising a PEG moiety), (iii) a linker, and (iv) a nucleotide unit, wherein the core is attached to the plurality of nucleotide arms, wherein the spacer is attached to the linker, wherein the linker is attached to the nucleotide unit. Exemplary multivalent molecules are shown in FIGS. 2-5. An exemplary nucleotide arm is shown in FIG. 6. An exemplary spacer is shown in FIG. 7 (top). Various exemplary linkers are shown in FIG. 7 (bottom) and FIG. 8. Examples of various linkers joined/attached to nucleotide units are shown in FIGS. 9A-D, where the 5 position of a pyrimidine base or the 7 position of a purine base is attached to the linker via a propargyl amine attachment (see also FIG. 10). In some embodiments, the nucleotide unit comprises a base, sugar and at least one phosphate group, and the linker is attached to the nucleotide unit through the base. In some embodiments, the linker comprises an aliphatic chain or an oligo ethylene glycol chain where both linker chains having 2-6 subunits. In some embodiments, the linkers further include an aromatic moiety.

[0394] In some embodiments, in the kit, individual multivalent molecules in the plurality of multivalent molecules comprise a core attached to multiple nucleotide arms, and wherein the multiple nucleotide arms have the same type of nucleotide unit which is selected from a group consisting of dATP, dGTP, dCTP, dTTP and dUTP.

[0395] In some embodiments in the kit, the nucleotide unit of the at least one multivalent molecule comprises an aromatic base, a five carbon sugar (e.g., ribose or deoxyribose), and one or more phosphate groups (e.g., 1-10 phosphate groups). The plurality of multivalent molecules can comprise one type multivalent molecule having one type of nucleotide unit selected from a group consisting of dATP, dGTP, dCTP, dTTP and dUTP. The plurality of nucleotides can comprise at a mixture of any combination of two or more types of multivalent molecules, where individual multivalent molecules in the mixture comprise nucleotide units selected from a group consisting of dATP, dGTP, dCTP, dTTP and/or dUTP.

[0396] In some embodiments, in the kit, at least one multivalent molecule in the plurality of multivalent molecules comprise a nucleotide unit having a chain of one, two or three phosphorus atoms where the chain is typically attached to the 5′ carbon of the sugar moiety via an ester or phosphoramide linkage. In some embodiments, at least one nucleotide unit is a nucleotide analog having a phosphorus chain in which the phosphorus atoms are linked together with intervening O, S, NH, methylene or ethylene. In some embodiments, the phosphorus atoms in the chain include substituted side groups including O, S or BH₃. In some embodiments, the chain includes phosphate groups substituted with analogs including phosphoramidate, phosphorothioate, phosphordithioate, and O-methylphosphoroamidite groups.

[0397] In some embodiments, in the kit, individual multivalent molecules in the plurality of multivalent molecule comprise a core attached to multiple nucleotide arms, and wherein individual nucleotide arms comprise a nucleotide unit having a chain terminating moiety (e.g., blocking moiety) at the sugar 2′ position, at the sugar 3′ position, or at the sugar 2′ and 3′ position.

[0398] In some embodiments, in the kit, at least one multivalent molecule in the plurality of multivalent molecules comprises a nucleotide unit comprising a terminator nucleotide analog having a chain terminating moiety (e.g., blocking moiety) at the sugar 2′ position, at the sugar 3′ position, or at the sugar 2′ and 3′ position. In some embodiments, the chain terminating moiety can inhibit polymerase-catalyzed incorporation of a subsequent nucleotide unit or free nucleotide in a nascent strand during a primer extension reaction. In some embodiments, the chain terminating moiety is attached to the 3′ sugar hydroxyl position where the sugar comprises a ribose or deoxyribose sugar moiety. In some embodiments, the chain terminating moiety is removable/cleavable from the 3′ sugar hydroxyl position to generate a nucleotide having a 3′OH sugar group which is extendible with a subsequent nucleotide in a polymerase-catalyzed nucleotide incorporation reaction. In some embodiments, the chain terminating moiety comprises an alkyl group, alkenyl group, alkynyl group, allyl group, aryl group, benzyl group, azide group, amine group, amide group, keto group, isocyanate group, phosphate group, thio group, disulfide group, carbonate group, urea group, or silyl group. In some embodiments, the kit can also include a chemical agent that cleaves the chain terminating moieties of the nucleotide unit of the multivalent molecule. For example, the kit comprises any one or any combination of tetrakis(triphenylphosphine)palladium(0) (Pd(PPh₃)₄) with piperidine, or with 2,3-Dichloro-5,6-dicyano-1,4-benzo-quinone (DDQ), H2 Pd/C, or a phosphine or with a thiol group including beta-mercaptoethanol or dithiothritol (DTT). In some embodiments, the kit includes a chemical agent comprising potassium carbonate (K₂CO₃) in MeOH, with triethylamine in pyridine, or with Zn in acetic acid (AcOH). In some embodiments, the kit includes a chemical agent comprising tetrabutylammonium fluoride, pyridine-HF, with ammonium fluoride, or with triethylamine trihydrofluoride.

[0399] In some embodiments, in the kit, at least one multivalent molecule in the plurality of multivalent molecules comprises a nucleotide unit comprising a terminator nucleotide analog having a chain terminating moiety (e.g., blocking moiety) at the sugar 2′ position, at the sugar 3′ position, or at the sugar 2′ and 3′ position. In some embodiments, the chain terminating moiety comprises an azide, azido or azidomethyl group. In some embodiments, the chain terminating moiety comprises a 3′-O-azido or 3′-O-azidomethyl group. In some embodiments, the kit can include a chemical agent that cleaves the chain terminating moieties of the nucleotide unit of the multivalent molecule. For example, the kit comprises any one or any combination of a phosphine compound, a phosphine compound comprises a derivatized tri-alkyl phosphine moiety or a derivatized tri-aryl phosphine moiety. In some embodiments, the phosphine compound comprises Tris(2-carboxyethyl)phosphine (TCEP) or bis-sulfo triphenyl phosphine (BS-TPP) or Tri(hydroxyproyl)phosphine (THPP). In some embodiments, the cleaving agent comprises 4-dimethylaminopyridine (4-DMAP).

[0400] In some embodiments, in the kit, at least one multivalent molecule in the plurality of multivalent molecules comprises a nucleotide unit comprising a chain terminating moiety which is selected from a group consisting of 3′-deoxy nucleotides, 2′,3′-dideoxynucleotides, 3′-methyl, 3′-azido, 3′-azidomethyl, 3′-O-azidoalkyl, 3′-O-ethynyl, 3′-O-aminoalkyl, 3′-O-fluoroalkyl, 3′-fluoromethyl, 3′-difluoromethyl, 3′-trifluoromethyl, 3′-sulfonyl, 3′-malonyl, 3′-amino, 3′-O-amino, 3′-sulfhydral, 3′-aminomethyl, 3′-ethyl, 3′butyl, 3′-tert butyl, 3′-Fluorenylmethyloxycarbonyl, 3′ tert-Butyloxycarbonyl, 3′-O-alkyl hydroxylamino group, 3′-phosphorothioate, and 3-O-benzyl, or derivatives thereof.

[0401] In some embodiments, in the kit, at least one multivalent molecule in the plurality of multivalent molecules comprises a core attached to multiple nucleotide arms. In some embodiments, the core, at least one linker and/or at least one nucleotide unit is labeled with detectable reporter moiety. In some embodiments, the detectable reporter moiety comprises a fluorophore.

[0402] In some embodiments, in the kit, individual multivalent molecules comprise a core having an avidin-like moiety and the core attachment moiety comprises biotin. In some embodiments, the core comprises an streptavidin-type or avidin-type moiety which includes an avidin protein, as well as any derivatives, analogs and other non-native forms of avidin that can bind to at least one biotin moiety. Other forms of avidin moieties include native and recombinant avidin and streptavidin as well as derivatized molecules, e.g. non-glycosylated avidin and truncated streptavidins. For example, avidin moiety includes de-glycosylated forms of avidin, bacterial streptavidin produced by Streptomyces (e.g., Streptomyces avidinii), as well as derivatized forms, for example, N-acyl avidins, e.g., N-acetyl, N-phthalyl and N-succinyl avidin, and the commercially-available products ExtrAvidin™, Captavidin™, Neutravidin™, and Neutralite Avidin™.

[0403] In some embodiments, the kit comprises one or more containers that contain the at least one mutant polymerase, cations, primers, plurality of nucleotides and/or plurality of multivalent molecules. The mutant polymerase, cations, primers, and/or plurality of nucleotides can be combined in any combination and can be contained in a single container, or can be contained in separate container, or any combination thereof. The mutant polymerase, cations, primers, and/or plurality of multivalent molecules can be combined in any combination and can be contained in a single container, or can be contained in separate container, or any combination thereof.

[0404] The kit can include instructions for use of the kit for conducting a nucleotide binding reaction, a nucleotide incorporation reaction and/or a nucleic acid sequencing reaction using a plurality of nucleotides. The kit can include instructions for use of the kit for conducting a multivalent molecule binding reaction, a multivalent molecule incorporation reaction and/or a nucleic acid sequencing reaction using a plurality of multivalent molecules.

### Nucleic Acids Encoding Engineered Polymerases, Vectors and Host Cells

[0405] The present disclosure provides nucleic acids encoding any of the mutant polymerases described herein which comprise an amino acid sequence that is at least 80%, 85%, 90%, 95%, 99% identical, or a higher level sequence identity, to any of SEQ ID NOS: 1-2787 and 2789-2793.

[0406] The present disclosure provides a vector operably linked to at least one nucleic acid (e.g., a transgene) encoding any of the mutant polymerases described herein which comprise an amino acid sequence that is at least 80%, 85%, 90%, 95%, 99% identical, or a higher level sequence identity, to any of SEQ ID NOS: 1-2787 and 2789-2793. In some embodiments, the vector comprises at least one host cell regulatory sequence, including a promoter sequence, enhancer, transcription and/or translation initiation sequence, transcription and/or translation termination sequence, polypeptide secretion signal sequences, and the like. The promoter sequence can be a constitutive or inducible promoter sequence. In some embodiments, the promoter sequence in the vector can be operably linked to the at least one nucleic acid encoding the mutant polymerase to control expression of the mutant polymerase by the host cell. In some embodiments, the vector comprises an expression vector.

[0407] The present disclosure provides a host cell harboring the vector (e.g., expression vector) which is operably linked to at least one nucleic acid (e.g., a transgene) encoding any of the mutant polymerases described herein which comprise an amino acid sequence that is at least 80%, 85%, 90%, 95%, 99% identical, or a higher level sequence identity, to any of SEQ ID NOS: 1-2787 and 2789-2793. In some embodiments, the vector comprises a promoter sequence which is operably linked to the at least one nucleic acid encoding the mutant polymerase, where the promoter sequence controls expression of the mutant polymerase by the host cell.

[0408] The present disclosure provides a plurality of host cells, wherein individual host cells in the plurality of host cells harbor the vector (e.g., expression vector) which is operably linked to at least one nucleic acid (e.g., a transgene) encoding any of the mutant polymerases described herein which comprise an amino acid sequence that is at least 80%, 85%, 90%, 95%, 99% identical, or a higher level sequence identity, to any of SEQ ID NOS: 1-2787 and 2789-2793. In some embodiments, the vector comprises a promoter sequence which is operably linked to the at least one nucleic acid encoding the mutant polymerase, where the promoter sequence controls expression of the mutant polymerase by the host cell.

### Methods

[0409] The present disclosure provides methods for preparing a plurality of mutant polymerases, comprising: culturing the plurality of host cells of, wherein individual host cells in the plurality of host cells harbor the vector (e.g., expression vector) which is operably linked to at least one nucleic acid (e.g., a transgene) encoding any of the mutant polymerases described herein which comprise an amino acid sequence that is at least 80%, 85%, 90%, 95%, 99% identical, or a higher level sequence identity, to any of SEQ ID NOS: 1-2787 and 2789-2793. In some embodiments, the vector in the host cell comprises a promoter sequence which is operably linked to the at least one nucleic acid encoding the mutant polymerase, where the promoter sequence controls expression of the mutant polymerase by the host cell. In some embodiments, the plurality of host cells is cultured under conditions suitable for expressing a plurality of mutant polymerases by the plurality of host cells. In some embodiments, the method further comprises recovering (e.g., isolating/enriching) the plurality of mutant polymerases from the plurality of host cells.

[0410] In some embodiments, the plurality of host cells harbor the vector (e.g., expression vector) which is operably linked to at least one nucleic acid (e.g., a transgene) encoding any of the mutant polymerases described herein which comprise an amino acid sequence that is at least 80%, 85%, 90%, 95%, 99% identical, or a higher level sequence identity, to any of SEQ ID NOS: 1-2787 and 2789-2793, and wherein the transgene that encodes any of the mutant polymerases is operably linked to any one of the His-tags (e.g., SEQ ID NOS:2815-2832) or any one of the His-tags having a thrombin cleavage sequence (e.g., SEQ ID NOS:2833-2849).

[0411] The present disclosure provides methods for binding nucleotide analogs, methods for incorporating nucleotide analogs, and methods for binding nucleotide units of a multivalent molecule. The methods described herein can be used to conduct primer extension reactions and nucleic acid sequencing reactions. Polymerases variously comprise DNA polymerases, RNA polymerases, template-independent polymerases, reverse transcriptases, or other enzymes capable of nucleotide extension. Wild type DNA polymerases generally do not tolerate certain types of nucleotide modifications, such as modifications to the 3′ position of the sugar. This property requires that wild type DNA polymerases be significantly modified in order to facilitate reversible or irreversible terminator (removable chemical groups which prevent nucleic acid extension) incorporation for applications such as sequencing. Further provided herein are methods of sequencing employing mutant polymerases that incorporate modified nucleotides. Further, the use of engineered DNA polymerases allows the development of enzymes capable of incorporating modified nucleotides into an elongating nucleic acid chain without sacrificing the thermostability of the enzyme or the ability of the enzyme to function at higher temperatures. This property is especially enhanced when DNA polymerases are engineered based on archaeal polymerase backbones, and more especially backbones derived from the DNA polymerase sequences of thermophilic or thermotolerant archaea.

[0412] Engineered DNA polymerases that exhibit improved thermostability and/or improved ability to incorporation nucleotide analogs may be useful in isothermal sequencing or elongation techniques. Isothermal techniques include SDA, LAMP, SMAP, ICAN, SMART, among others, and may further include additional techniques as disclosed herein. In these techniques, the elongation reaction proceeds at a constant temperature, for example using strand displacement reactions, or in some additional exemplary embodiments, elongating from a primed, single stranded template, especially including a primed polyvalent template. In some embodiments, the engineered DNA polymerases have strand displacement capabilities. In amplification-dependent methods, isothermal amplification can be completed in a single step, by incubating the mixture of samples, primers, DNA polymerase with strand displacement activity, and substrates at a constant temperature. This reduces the number of steps required, eliminating thermal ramping steps and reducing the total cycle time for each sequencing or elongation cycle, while simultaneously decreasing the reaction time required for each cycle. In amplification-free methods, isothermal methods allow for the binding, detection, and elongation of a nascent nucleic acid strand during a sequencing cycle without lost time due to temperature ramping or additional thermal stress on key components or reagents.

### Sequencing Methods Using Engineered Polymerases

[0413] The present disclosure provides engineered polymerase that are useful for conducting any nucleic acid sequencing method that employs labeled or non-labeled chain terminating nucleotides, where the chain terminating nucleotides include a 3′-O-azido group (or 3′-O-methylazido group) or any other type of bulky blocking group at the sugar 3′ position. For example, the engineered polymerases can be used to conduct sequencing-by-avidity methods (SBA) using labeled multivalent molecules and non-labeled chain terminating nucleotides. Additionally, the engineered polymerases can be used for conducting sequencing-by-synthesis (SBS) methods which employ labeled chain-terminating nucleotides, and for conducting sequencing-by-binding methods (SBB) which employ non-labeled chain-terminating nucleotides. The engineered polymerases can be used for conducting phosphate-chain labeled nucleotide.

[0414] Sequencing-by-avidity (SBA) of DNA ideally requires (a) the detection of the n+1 base and requires 2 or more copies of target nucleic acid sequence, two or more primer nucleic acid molecules that are complementary to one or more regions of said target nucleic acid sequence and two more polymerases contacting said composition with a multivalent molecule (e.g., a polymer-nucleotide conjugate) under conditions sufficient to allow a multivalent binding complex to be formed between said polymer-nucleotide conjugate and said two or more copies of said target nucleic acid sequence in said composition of wherein the polymer-nucleotide conjugate comprises two or more nucleotide moieties; the detection substrates is subsequently washed away and (b) to ensure only a single incorporation occurs, a structural modification (‘blocking group’) of the an unlabeled nucleotides is required to ensure a single nucleotide incorporation but which then prevents any further nucleotide incorporation into the polynucleotide chain. The blocking group must then be removable, under reaction conditions which do not interfere with the integrity of the DNA being sequenced. The sequencing cycle can then continue with the N+1 detection of the next multivalent polymerase-conjugate-DNA complex and so on. In order to be of practical use, the avidity step requires both (a) a stable substrate to persist for long enough to image for >30 s and (b) a stepping step whereby the entire process should consist of high yielding, highly specific chemical and enzymatic steps to facilitate multiple cycles of sequencing.

### Sequencing-by-Synthesis

[0415] Sequencing-by-synthesis (SBS) of DNA ideally requires the controlled (i.e. one at a time) incorporation of the correct complementary nucleotide opposite the oligonucleotide being sequenced. This allows for accurate sequencing by adding nucleotides in multiple cycles as each nucleotide residue is sequenced one at a time, thus preventing an uncontrolled series of incorporations occurring. The incorporated nucleotide is read using an appropriate label attached thereto before removal of the label moiety and the subsequent next round of sequencing. In order to ensure only a single incorporation occurs, a structural modification (‘blocking group’) of the sequencing nucleotides is required to ensure a single nucleotide incorporation but which then prevents any further nucleotide incorporation into the polynucleotide chain. The blocking group must then be removable, under reaction conditions which do not interfere with the integrity of the DNA being sequenced. The sequencing cycle can then continue with the incorporation of the next blocked, labelled nucleotide. In order to be of practical use, the entire process should consist of high yielding, highly specific chemical and enzymatic steps to facilitate multiple cycles of sequencing.

### Sequencing-by-Binding

[0416] Sequencing-by-binding (SBB) requires method for sequencing a nucleic acid that includes the steps of (a) sequentially contacting a primed template nucleic acid with at least two separate mixtures under ternary complex stabilizing conditions, wherein the at least two separate mixtures each include a polymerase and a nucleotide, whereby the sequentially contacting results in the primed template nucleic acid being contacted, under the ternary complex stabilizing conditions, with nucleotide cognates for first, second and third base type base types in the template; (b) examining the at least two separate mixtures to determine whether a ternary complex formed; and (c) identifying the next correct nucleotide for the primed template nucleic acid molecule, wherein the next correct nucleotide is identified as a cognate of the first, second or third base type if ternary complex is detected in step (b), and wherein the next correct nucleotide is imputed to be a nucleotide cognate of a fourth base type based on the absence of a ternary complex in step (b); (d) adding a next correct nucleotide to the primer of the primed template nucleic acid after step (b), thereby producing an extended primer; and (e) repeating steps (a) through (d) at least once on the primed template nucleic acid that comprises the extended primer. Exemplary sequencing-by-binding methods are described in U.S. Pat. Nos. 10,246,744 and 10,731,141 (where the contents of both patents are hereby incorporated by reference in their entireties).

### Methods for Sequencing Using Phosphate-Chain Labeled Nucleotides

[0417] The present disclosure provides methods for sequencing using immobilized sequencing polymerases which bind non-immobilized template molecules, wherein the sequencing reactions are conducted with phosphate-chain labeled nucleotides. In some embodiments, the sequencing methods comprise step (a): providing a support having a plurality of sequencing polymerases immobilized thereon. In some embodiments, the sequencing polymerase comprises a processive DNA polymerase. In some embodiments, the sequencing polymerase comprises a wild type or mutant DNA polymerase, including for example a Phi29 DNA polymerase. In some embodiments, the support comprise a plurality of separate compartments and a sequencing polymerase is immobilized to the bottom of a compartment. In some embodiments, the separate compartments comprise a silica bottom through which light can penetrate. In some embodiments, the separate compartments comprise a silica bottom configured with a nanophotonic confinement structure comprising a hole in a metal cladding film (e.g., aluminum cladding film). In some embodiments, the hole in the metal cladding has a small aperture, for example, approximately 70 nm. In some embodiments, the height of the nanophotonic confinement structure is approximately 100 nm. In some embodiments, the nanophotonic confinement structure comprises a zero mode waveguide (ZMW). In some embodiments, the nanophotonic confinement structure contains a liquid.

[0418] In some embodiments, the sequencing method further comprises step (b): contacting the plurality of immobilized sequencing polymerases with a plurality of single stranded circular nucleic acid template molecules and a plurality of oligonucleotide sequencing primers, under a condition suitable for individual immobilized sequencing polymerases to bind a single stranded circular template molecule, and suitable for individual sequencing primers to hybridize to individual single stranded circular template molecules, thereby generating a plurality of polymerase/template/primer complexes. In some embodiments, the individual sequencing primers hybridize to a universal sequencing primer binding site on the single stranded circular template molecule.

[0419] In some embodiments, the sequencing method further comprises step (c): contacting the plurality of polymerase/template/primer complexes with a plurality of phosphate chain labeled nucleotides each comprising an aromatic base, a five carbon sugar (e.g., ribose or deoxyribose), and phosphate chain comprising 3-20 phosphate groups, where the terminal phosphate group is linked to a detectable reporter moiety (e.g., a fluorophore). The first, second and third phosphate groups can be referred to as alpha, beta and gamma phosphate groups. In some embodiments, a particular detectable reporter moiety which is attached to the terminal phosphate group corresponds to the nucleotide base (e.g., dATP, dGTP, dCTP, dTTP or dUTP) to permit detection and identification of the nucleo-base. In some embodiments, the plurality of polymerase/template/primer complexes are contacted with the plurality of phosphate chain labeled nucleotides under a condition suitable for polymerase-catalyzed nucleotide incorporation. In some embodiments, the sequencing polymerases are capable of binding a complementary phosphate chain labeled nucleotide and incorporating the complementary nucleotide opposite a nucleotide in a template molecule. In some embodiment, the polymerase-catalyzed nucleotide incorporation reaction cleaves between the alpha and beta phosphate groups thereby releasing a multi-phosphate chain linked to a fluorophore.

[0420] In some embodiments, the sequencing method further comprises step (d): detecting the fluorescent signal emitted by the phosphate chain labeled nucleotide that is bound by the sequencing polymerase, and incorporated into the terminal end of the sequencing primer. In some embodiments, step (d) further comprises identifying the phosphate chain labeled nucleotide that is bound by the sequencing polymerase, and incorporated into the terminal end of the sequencing primer.

[0421] In some embodiments, the sequencing method further comprises step (d): repeating steps (c)-(d) at least once. In some embodiments, sequencing methods that employ phosphate chain labeled nucleotides can be conducted according to the methods described in U.S. Pat. Nos. 7,170,050; 7,302,146; and/or 7,405,281.

[0422] DNA polymerases which may be used according to the methods and compositions of the present disclosure include viral, bacterial, archaeal and eukaryotic polymerases and homologs and orthologs thereof. In some embodiments, DNA polymerases include but are not limited to archaeal DNA polymerases such as Thermococcus, Thermoplasmata, Pyrococcus, Methanococcus, Hadesarchaea, Euryarchaeota, or Candidatus polymerases and homologs and orthologs thereof and engineered, mutated, and/or truncated variants thereof. Other DNA polymerases and homologous or orthologous polymerases are known in the art and are expressly contemplated within this disclosure.

[0423] Provided herein are methods that employ mutant polypeptides which have enhanced thermostability. In some embodiments, such mutant polypeptides possess polymerase activity (e.g., mutant nucleic acid polymerase). Thermostability in some embodiments includes increased Tm, resistance to degradation, and/or the ability to maintain functional activity (e.g., incorporation of nucleotides) at elevated temperatures relative to a nearest wild-type enzyme, such as a wild-type enzyme comprising a nearest wild-type enzyme sequence. Mutant polymerases in some embodiments comprise Tm that are increased about 1, 2, 5, 10, 15, 20, 25, or about 30 degrees C. relative to a nearest wild-type enzyme. Mutant polypeptides in some embodiments comprise a Tm that are increased at least 1, 2, 5, 10, 15, 20, 25, or at least 30 degrees C. relative to a nearest wild-type enzyme. Mutant polymerases often comprise a Tm value that are increased at least 1-10, 5-15, 4-20, 2-10, 4-15, 20-30, 10-60, or 25-35 degrees C. relative to a nearest wild-type enzyme. Polymerase activity, in some embodiments, comprises k_{cat}, k_{cat}/Kₘ, or yields of incorporated nucleotides for a given time period. In some embodiments, polymerase activity, in some embodiments, comprises k_{cat}, k_{cat}/Kₘ, or yields of incorporated modified nucleotides, such as 3′-O-azido or 3′-O-azidomethyl modified nucleotides, for a given time period. In some embodiments, mutant polymerases functioning at an elevated temperature maintain at least 99%, 98%, 95%, 90%, 85%, or at least 80% of the optimal activity of a nearest wild-type enzyme functioning at a lower temperature, utilizing unmodified nucleotides. For example, mutant polymerases functioning at about 37 degrees C. maintain at least 99%, 98%, 95%, 90%, 85%, or at least 80% of the optimal activity of a nearest wild-type enzyme utilizing unmodified nucleotides. In some embodiments, mutant polymerases functioning at about 42 degrees C. maintain at least 99%, 98%, 95%, 90%, 85%, or at least 80% of the optimal activity of a nearest wild-type enzyme utilizing unmodified nucleotides. In some embodiments, mutant polymerases functioning at about 55 degrees C. maintain at least 99%, 98%, 95%, 90%, 85%, or at least 80% of the optimal activity of a nearest wild-type enzyme utilizing unmodified nucleotides. In some embodiments, mutant polymerases functioning at about 60 degrees C. maintain at least 99%, 98%, 95%, 90%, 85%, or at least 80% of the optimal activity of a nearest wild-type enzyme utilizing unmodified nucleotides. In some embodiments, mutant polymerases functioning at least at 50 degrees C. maintain at least 99%, 98%, 95%, 90%, 85%, or at least 80% of the optimal activity of a nearest wild-type enzyme utilizing unmodified nucleotides. In some embodiments, mutant polymerases functioning at least at 60 degrees C. maintain at least 99%, 98%, 95%, 90%, 85%, or at least 80% of the optimal activity of a nearest wild-type enzyme utilizing unmodified nucleotides. In some embodiments, mutant polymerases functioning at 37-95 degrees C. maintain at least 99%, 98%, 95%, 90%, 85%, or at least 80% of the optimal activity of a nearest wild-type enzyme utilizing unmodified nucleotides. In some embodiments, mutant polymerases functioning at 37-95, 37-60, 37-55, 37-42, 40-60, 50-80, 42-55, 55-60, 55-95, 60-95, or 40-90 degrees C. maintain at least 99%, 98%, 95%, 90%, 85%, or at least 80% of the optimal activity of a nearest wild-type enzyme utilizing unmodified nucleotides. In some embodiments, mutant polymerases functioning at 42-95 degrees C. maintain at least 99%, 98%, 95%, 90%, 85%, or at least 80% of the optimal activity of a nearest wild-type enzyme utilizing unmodified nucleotides. In some embodiments, mutant polymerases functioning at 40-90 degrees C. maintain at least 99%, 98%, 95%, 90%, 85%, or at least 80% of the optimal activity of a nearest wild-type enzyme utilizing unmodified nucleotides. In some embodiments, mutant polymerases functioning at 37-55 degrees C. maintain at least 99%, 98%, 95%, 90%, 85%, or at least 80% of the optimal activity of a nearest wild-type enzyme utilizing unmodified nucleotides. In some embodiments, mutant polymerases functioning at 50-95 degrees C. maintain at least 99%, 98%, 95%, 90%, 85%, or at least 80% of the optimal activity of a nearest wild-type enzyme utilizing unmodified nucleotides. In some embodiments, Mutant polymerases functioning at 60-95 degrees C. maintain at least 99%, 98%, 95%, 90%, 85%, or at least 80% of the optimal activity of a nearest wild-type enzyme utilizing unmodified nucleotides. In some embodiments a mutant polymerase has an increased k_{cat} relative to a nearest related wild-type sequence functioning at a temperature of at least 37 degrees C. In some embodiments a mutant polymerase has an increased k_{cat} relative to a nearest related wild-type sequence functioning at a temperature of at least 42 degrees C. In some embodiments a mutant polymerase has an increased k_{cat} relative to a nearest related wild-type sequence functioning at a temperature of at least 55 degrees C. In some embodiments a mutant polymerase has an increased k_{cat} relative to a nearest related wild-type sequence functioning at a temperature of at least 60 degrees C. In some embodiments a mutant polymerase has an increased k_{cat} relative to a nearest related wild-type sequence functioning at a temperature of at least 80 degrees C. In some embodiments a mutant polymerase has an increased k_{cat} relative to a nearest related wild-type sequence functioning at a temperature of at least 90 degrees C. In some embodiments a mutant polymerase has an increased k_{cat} relative to a nearest related wild-type sequence functioning at a temperature of 37-95, 37-60, 37-55, 37-42, 40-60, 50-80, 42-55, 55-60, 55-95, 60-95, or 40-80 degrees C. In some embodiments a mutant polymerase has an increased k_{cat} relative to a nearest related wild-type sequence functioning at a temperature of 37-55 degrees C. In some embodiments a mutant polymerase has an increased k_{cat} relative to a nearest related wild-type sequence functioning at a temperature of 35-90 degrees C.

### Methods for Forming Complexed Polymerases

[0424] The present disclosure provides methods for forming a plurality of complexed polymerases, comprising step (a): contacting a plurality of mutant polymerases with (i) a plurality of nucleic acid template molecules and (ii) a plurality of nucleic acid primers, under a condition suitable to bind the plurality of mutant polymerases to the plurality of nucleic acid template molecules and the plurality of nucleic acid primers, thereby forming a plurality of complexed polymerases each comprising a mutant polymerase bound to a nucleic acid duplex wherein the nucleic acid duplex comprises a nucleic acid template molecule hybridized to a nucleic acid primer. In some embodiments, the plurality of mutant polymerases comprise a DNA polymerase. In some embodiments, the plurality of mutant polymerases comprise a plurality of recombinant mutant polymerases. In some embodiments, the mutant polymerases comprise an amino acid sequence that is at least 80%, 85%, 90%, 95%, 99% identical, or a higher level sequence identity, to any of SEQ ID NOS: 1-2787 and 2789-2793.

[0425] In some embodiments, in the methods for forming a plurality of complexed polymerases, the mutant polymerases include amino acid substitutions that confer exonuclease-minus activity. In some embodiments, the mutant polymerases exhibit desirable characteristics compared to a polymerase having a wild type amino acid backbone sequence. For example, the mutant polymerases exhibit increased thermal stability (Tm). In another example, the mutant polymerases exhibit increased incorporation rates of nucleotide analogs comprising a chain terminating moiety (e.g., blocking moiety) at the sugar 2′ position and/or at the 3′ sugar position. In yet another example, the mutant polymerases exhibit increased uracil-tolerance. In some embodiments, the mutant DNA polymerases exhibit improved binding to a nucleotide reagent. In some embodiments, the mutant DNA polymerases exhibit improved binding and incorporation of a nucleotide reagent. In some embodiments, the mutant DNA polymerases exhibit reduced sequence-specific sequencing errors. In some embodiments, the mutant DNA polymerases exhibit increased thermal stability at a temperature range of about 25-50° C. or about 45-75° C. compared to corresponding wild type polymerase comprising SEQ ID NO: 1-2787 and 2789-2793.

[0426] In some embodiments, in the methods for forming a plurality of complexed polymerases, the nucleotide reagents comprise any one or any combination of nucleotides and/or multivalent molecules. In some embodiments, the nucleotides comprise canonical nucleotides. In some embodiments, the nucleotides comprise non-labeled nucleotides. In some embodiments, the nucleotides comprise nucleotide analogs comprise detectably labeled nucleotides and/or nucleotides carrying a removable or non-removable chain terminating moiety. In some embodiments, individual multivalent molecules comprise a central core attached to multiple polymer arms each having a nucleotide unit at the end of the arms.

[0427] In some embodiments, in the methods for forming a plurality of complexed polymerases, the primer comprises a 3′ extendible end or a 3′ non-extendible end. In some embodiments, the plurality of nucleic acid template molecules comprise linear nucleic acid molecules or circular nucleic acid molecules. In some embodiments, the plurality of nucleic acid template molecules comprise amplified template molecules (e.g., clonally amplified template molecules). In some embodiments, the plurality of nucleic acid template molecules comprise one copy of a target sequence of interest. In some embodiments, the plurality of nucleic acid molecules comprise two or more tandem copies of a target sequence of interest (e.g., concatemers). In some embodiments, the nucleic acid template molecules in the plurality of nucleic acid template molecules comprise the same target sequence of interest or different target sequences of interest.

[0428] In some embodiments, in the methods for forming a plurality of complexed polymerases, the plurality of nucleic acid template molecules and/or the plurality of nucleic acid primers are in solution or are immobilized to a support. In some embodiments, when the plurality of nucleic acid template molecules and/or the plurality of nucleic acid primers are immobilized to a support, the binding with the recombinant mutant polymerase generates a plurality of immobilized complexed polymerases. In some embodiments, the plurality of nucleic acid template molecules and/or nucleic acid primers are immobilized to 10²-10¹⁵ different sites on a support. In some embodiments, the binding of the plurality of template molecules and nucleic acid primers with the plurality of recombinant mutant polymerases generates a plurality of complexed polymerases immobilized to 10²-10¹⁵ different sites on the support. In some embodiments, the plurality of immobilized complexed polymerases on the support are immobilized to pre-determined or to random sites on the support. In some embodiments, the plurality of immobilized complexed polymerases are in fluid communication with each other to permit flowing a solution of reagents (e.g., enzymes including polymerases, multivalent molecules, nucleotides, and/or divalent cations) onto the support so that the plurality of immobilized complexed polymerases on the support are reacted with the solution of reagents in a massively parallel manner.

Forming Complexed Polymerases with Multivalent Molecules

[0429] In some embodiments, the methods for forming a plurality of complexed polymerases generally comprise: (a) contacting a plurality of mutant polymerases with (i) a plurality of nucleic acid template molecules and (ii) a plurality of nucleic acid primers to form a plurality of complexed polymerases; (b1) contacting the plurality of complexed polymerases with a plurality of multivalent molecules to form a plurality of multivalent-complexed polymerases. In some embodiments, the method further comprises step (c1): detecting the multivalent molecules that are bound to the complexed polymerases. In some embodiments, the method further comprises step (d1): identifying the complementary nucleotide unit of the multivalent molecules that are bound to the complexed polymerases. In some embodiments, the mutant polymerases comprise an amino acid sequence that is at least 80%, 85%, 90%, 95%, 99% identical, or a higher level sequence identity, to any of SEQ ID NOS: 1-2787 and 2789-2793.

[0430] In some embodiments, the methods for forming a plurality of complexed polymerases further comprise step (b1): contacting the plurality of complexed polymerases with a plurality of multivalent molecules, wherein individual multivalent molecules in the plurality comprise a core attached to multiple nucleotide arms and each nucleotide arm is attached to a nucleotide (e.g., a nucleotide unit). In some embodiments, the binding of the complementary nucleotide unit of the multivalent molecules to the complexed polymerases forms a plurality of multivalent-complexed polymerases. In some embodiments, the contacting in step (b1) is conducted under a condition suitable for binding a complementary nucleotide unit of at least one of the multivalent molecules to at least one of the complexed polymerases. In some embodiments, the condition is suitable for inhibiting incorporation of the complementary nucleotide units into the primers of the plurality of multivalent-complexed polymerases. In some embodiments, the contacting in step (b1) is conducted under a condition suitable for binding a nucleotide of at least one of the multivalent molecules to at least one of the complexed polymerases but the bound nucleotide does not incorporate into the 3′ end of the nucleic acid primer.

[0431] In some embodiments, in the methods for forming a plurality of complexed polymerases, individual multivalent molecules in the plurality of multivalent molecules comprise: (a) a core; and (b) a plurality of nucleotide arms which comprise (i) a core attachment moiety, (ii) a spacer (e.g., comprising a PEG moiety), (iii) a linker, and (iv) a nucleotide, wherein the core is attached to the plurality of nucleotide arms via their core attachment moiety, wherein the spacer is attached to the linker, and wherein the linker is attached to the nucleotide. In some embodiments, the linker comprises an aliphatic chain having 2-6 subunits or an oligo ethylene glycol chain having 2-6 subunits. Exemplary multivalent molecules are shown in FIGS. 2-5. An exemplary nucleotide arm is shown in FIG. 6. An exemplary spacer is shown in FIG. 7 (top). Various exemplary linkers are shown in FIG. 7 (bottom) and FIG. 8. Examples of various linkers joined/attached to nucleotide units are shown in FIGS. 9A-D, where the 5 position of a pyrimidine base or the 7 position of a purine base is attached to the linker via a propargyl amine attachment (see also FIG. 10). In some embodiments, the plurality of nucleotide arms attached to a given core have the same type of nucleotide, and wherein the types of nucleotide comprise dATP, dGTP, dCTP, dTTP or dUTP. In some embodiments, the plurality of multivalent molecules comprise one type of a multivalent molecule wherein each multivalent molecule in the plurality has the same type of nucleotide unit selected from a group consisting of dATP, dGTP, dCTP, dTTP and dUTP. In some embodiments, the plurality of multivalent molecules comprise a mixture of any combination of two or more types of multivalent molecules each type having nucleotide units selected from a group consisting of dATP, dGTP, dCTP, dTTP and/or dUTP.

[0432] In some embodiments, in the methods for forming a plurality of complexed polymerases, the binding of the plurality of complexed polymerases with the plurality of multivalent molecules forms at least one avidity complex, the method comprising the steps: (a) binding a first nucleic acid primer, a first DNA polymerase, and a first multivalent molecule to a first portion of a concatemer template molecule thereby forming a first binding complex (e.g., FIGS. 44-46), wherein a first nucleotide unit of the first multivalent molecule binds to the first DNA polymerase; and (b) binding a second nucleic acid primer, a second DNA polymerase, and the first multivalent molecule to a second portion of the same concatemer template molecule thereby forming a second binding complex (e.g., FIGS. 44-46), wherein a second nucleotide unit of the first multivalent molecule binds to the second DNA polymerase, wherein the first and second binding complexes which include the same multivalent molecule forms an avidity complex (e.g., FIG. 47). In some embodiments, the first polymerase comprises any mutant polymerase described herein. In some embodiments, the second polymerase comprises any mutant polymerase described herein. The concatemer template molecule comprises tandem repeat sequences of a sequence of interest and at least one universal sequencing primer binding site. The first and second nucleic acid primers can bind to a sequencing primer binding site along the concatemer template molecule.

[0433] In some embodiments, in the methods for forming a plurality of complexed polymerases, the binding of the plurality of complexed polymerases with the plurality of multivalent molecules forms at least one avidity complex, the method comprising the steps: (a) binding a first nucleic acid primer, a first DNA polymerase, and a first multivalent molecule to a first template molecule thereby forming a first binding complex, wherein a first nucleotide unit of the first multivalent molecule binds to the first DNA polymerase; and (b) binding a second nucleic acid primer, a second DNA polymerase, and the first multivalent molecule to a second template molecule thereby forming a second binding complex, wherein a second nucleotide unit of the first multivalent molecule binds to the second DNA polymerase, wherein the first and second binding complexes which include the same multivalent molecule forms an avidity complex. In some embodiments, the first polymerase comprises any mutant polymerase described herein. In some embodiments, the second polymerase comprises any mutant polymerase described herein. In some embodiments, the first and second template molecules are clonally amplified template molecules. In some embodiments, the first and second template molecules are localized in close proximity to each other. For example, the clonally-amplified first and second template molecules comprise linear template molecules that are generated via bridge amplification and are immobilized to the same location or feature on a support. The first and second template molecules comprise a sequence of interest and at least one universal sequencing primer binding site. The first and second nucleic acid primers can bind to a sequencing primer binding site on the first and second template molecules, respectively.

[0434] In some embodiments, in the methods for forming a plurality of complexed polymerases, at least one of the multivalent molecules in the plurality of multivalent molecules is labeled with a detectable reporter moiety. In some embodiments, the detectable reporter moiety comprises a fluorophore. In some embodiments, the core of the multivalent molecule is labeled with a fluorophore, and wherein the fluorophore which is attached to a given core of the multivalent molecule corresponds to the nucleotide base (e.g., adenine, guanine, cytosine, thymine or uracil) of the nucleotide arm. In some embodiments, at least one of the nucleotide arms of the multivalent molecule comprises a linker and/or nucleotide base that is attached to a fluorophore, and wherein the fluorophore which is attached to a given nucleotide base corresponds to the nucleotide base (e.g., adenine, guanine, cytosine, thymine or uracil) of the nucleotide arm.

[0435] In some embodiments, in the methods for forming a plurality of complexed polymerases, the plurality of multivalent molecules comprise at least one multivalent molecule having multiple nucleotide arms each attached with a nucleotide analog (e.g., nucleotide analog unit), where the nucleotide analog includes a chain terminating moiety at the sugar 2′ and/or 3′ position. In some embodiments, the plurality of multivalent molecules comprises at least one multivalent molecule comprising multiple nucleotide arms each attached with a nucleotide unit that lacks a chain terminating moiety.

[0436] In some embodiments, in the methods for forming a plurality of complexed polymerases, the contacting of step (b1) is conducted in the presence of at least one cation selected from a group consisting of strontium, barium, sodium, magnesium, potassium, manganese, calcium, lithium, nickel and cobalt. In some embodiments, the contacting of step (b1) is conducted in the presence of strontium, barium and/or calcium.

[0437] In some embodiments, in the methods for forming a plurality of complexed polymerases, the contacting of step (a) is conducted at a constant temperature which is selected from a temperature range of about 25-90° C. In some embodiments, the contacting of step (b1) is conducted at a constant temperature which is selected from a temperature range of about 25-90° C. In some embodiments, the contacting of steps (a) and (b1) are conducted at a constant temperature which is selected from a temperature range of about 25-90° C. (e.g., isothermal temperature).

[0438] In some embodiments, the methods for forming a plurality of complexed polymerases further comprise step (c1): detecting the multivalent molecule which is bound to the complexed polymerase. In some embodiments, the detecting includes detecting the multivalent molecules that are bound to the complexed polymerases, where the complementary nucleotide units of the multivalent molecules are bound to the primers but incorporation of the complementary nucleotide units is inhibited. In some embodiments, the multivalent molecules are labeled with a detectable reporter moiety to permit detection. In some embodiments, the labeled multivalent molecules comprise a fluorophore attached to the core, linker and/or the base of the nucleotide unit of the multivalent molecules.

[0439] In some embodiments, the methods for forming a plurality of complexed polymerases further comprise step (d1): identifying the complementary nucleotide unit of the multivalent molecule which is bound to the complexed polymerase. In some embodiments, the identifying the complementary nucleotide unit of the multivalent molecule can be used to determine the sequence of the nucleic acid template. In some embodiments, the multivalent molecules are labeled with a detectable reporter moiety that corresponds to the particular nucleotide units attached to the nucleotide arms to permit identification of the complementary nucleotide units (e.g., nucleotide base adenine, guanine, cytosine, thymine or uracil) that are bound to the plurality of complexed polymerases. In some embodiments the detecting of step (c1) and the identifying of step (d1) can be used to determine the sequence of the nucleic acid template molecules.

[0440] In some embodiments, in the methods for forming a plurality of complexed polymerases, at least one multivalent molecule in the plurality of multivalent molecules of step (b1) comprises: (a) a core; and (b) a plurality of nucleotide arms which comprise (i) a core attachment moiety, (ii) a spacer (e.g., comprising a PEG moiety), (iii) a linker, and (iv) a nucleotide unit, wherein the core is attached to the plurality of nucleotide arms, wherein the spacer is attached to the linker, wherein the linker is attached to the nucleotide unit. Exemplary multivalent molecules are shown in FIGS. 2-5. An exemplary nucleotide arm is shown in FIG. 6. An exemplary spacer is shown in FIG. 7 (top). Various exemplary linkers are shown in FIG. 7 (bottom) and FIG. 8. Examples of various linkers joined/attached to nucleotide units are shown in FIGS. 9A-D, where the 5 position of a pyrimidine base or the 7 position of a purine base is attached to the linker via a propargyl amine attachment (see also FIG. 10). In some embodiments, the nucleotide unit comprises a base, sugar and at least one phosphate group, and the linker is attached to the nucleotide unit through the base. In some embodiments, the linker comprises an aliphatic chain or an oligo ethylene glycol chain where both linker chains having 2-6 subunits. In some embodiments, the linker also includes an aromatic moiety.

[0441] In some embodiments, in the methods for forming a plurality of complexed polymerases, individual multivalent molecules in the plurality of multivalent molecules of step (b1) comprise a core attached to multiple nucleotide arms, and wherein the multiple nucleotide arms have the same type of nucleotide unit which is selected from a group consisting of dATP, dGTP, dCTP, dTTP and dUTP.

[0442] In some embodiments, in the methods for forming a plurality of complexed polymerases, the nucleotide unit of the at least one multivalent molecule of step (b1) comprises an aromatic base, a five carbon sugar (e.g., ribose or deoxyribose), and one or more phosphate groups (e.g., 1-10 phosphate groups). The plurality of multivalent molecules can comprise one type multivalent molecule having one type of nucleotide unit selected from a group consisting of dATP, dGTP, dCTP, dTTP and dUTP. The plurality of multivalent molecules can comprise at a mixture of any combination of two or more types of multivalent molecules, where individual multivalent molecules in the mixture comprise nucleotide units selected from a group consisting of dATP, dGTP, dCTP, dTTP and/or dUTP.

[0443] In some embodiments, in the methods for forming a plurality of complexed polymerases, at least one multivalent molecule in the plurality of multivalent molecules of step (b1) comprise a nucleotide unit having a chain of one, two or three phosphorus atoms where the chain is typically attached to the 5′ carbon of the sugar moiety via an ester or phosphoramide linkage. In some embodiments, at least one nucleotide unit is a nucleotide analog having a phosphorus chain in which the phosphorus atoms are linked together with intervening O, S, NH, methylene or ethylene. In some embodiments, the phosphorus atoms in the chain include substituted side groups including O, S or BH₃. In some embodiments, the chain includes phosphate groups substituted with analogs including phosphoramidate, phosphorothioate, phosphordithioate, and O-methylphosphoroamidite groups.

[0444] In some embodiments, in the methods for forming a plurality of complexed polymerases, individual multivalent molecules in the plurality of multivalent molecule of step (b1) comprise a core attached to multiple nucleotide arms, and wherein individual nucleotide arms comprise a nucleotide unit having a chain terminating moiety (e.g., blocking moiety) at the sugar 2′ position, at the sugar 3′ position, or at the sugar 2′ and 3′ position.

[0445] In some embodiments, in the methods for forming a plurality of complexed polymerases, at least one multivalent molecule in the plurality of multivalent molecules of step (b1) comprises a nucleotide unit comprising a terminator nucleotide analog having a chain terminating moiety (e.g., blocking moiety) at the sugar 2′ position, at the sugar 3′ position, or at the sugar 2′ and 3′ position. In some embodiments, the chain terminating moiety can inhibit polymerase-catalyzed incorporation of a subsequent nucleotide unit or free nucleotide in a nascent strand during a primer extension reaction. In some embodiments, the chain terminating moiety is attached to the 3′ sugar hydroxyl position where the sugar comprises a ribose or deoxyribose sugar moiety. In some embodiments, the chain terminating moiety is removable/cleavable from the 3′ sugar hydroxyl position to generate a nucleotide having a 3′OH sugar group which is extendible with a subsequent nucleotide in a polymerase-catalyzed nucleotide incorporation reaction. In some embodiments, the chain terminating moiety comprises an alkyl group, alkenyl group, alkynyl group, allyl group, aryl group, benzyl group, azide group, amine group, amide group, keto group, isocyanate group, phosphate group, thio group, disulfide group, carbonate group, urea group, or silyl group. In some embodiments, the chain terminating moiety is cleavable/removable from the nucleotide unit, for example by reacting the chain terminating moiety with a chemical agent, pH change, light or heat. In some embodiments, the chain terminating moieties alkyl, alkenyl, alkynyl and allyl are cleavable with tetrakis(triphenylphosphine)palladium(0) (Pd(PPh₃)₄) with piperidine, or with 2,3-Dichloro-5,6-dicyano-1,4-benzo-quinone (DDQ). In some embodiments, the chain terminating moieties aryl and benzyl are cleavable with H2 Pd/C. In some embodiments, the chain terminating moieties amine, amide, keto, isocyanate, phosphate, thio, disulfide are cleavable with phosphine or with a thiol group including beta-mercaptoethanol or dithiothritol (DTT). In some embodiments, the chain terminating moiety carbonate is cleavable with potassium carbonate (K₂CO₃) in MeOH, with triethylamine in pyridine, or with Zn in acetic acid (AcOH). In some embodiments, the chain terminating moieties urea and silyl are cleavable with tetrabutylammonium fluoride, pyridine-HF, with ammonium fluoride, or with triethylamine trihydrofluoride.

[0446] In some embodiments, in the methods for forming a plurality of complexed polymerases, at least one multivalent molecule in the plurality of multivalent molecules of step (b1) comprises a nucleotide unit comprising a terminator nucleotide analog having a chain terminating moiety (e.g., blocking moiety) at the sugar 2′ position, at the sugar 3′ position, or at the sugar 2′ and 3′ position. In some embodiments, the chain terminating moiety comprises an azide, azido or azidomethyl group. In some embodiments, the chain terminating moiety comprises a 3′-O-azido or 3′-O-azidomethyl group. In some embodiments, the chain terminating moieties azide, azido and azidomethyl group are cleavable/removable with a phosphine compound. In some embodiments, the phosphine compound comprises a derivatized tri-alkyl phosphine moiety or a derivatized tri-aryl phosphine moiety. In some embodiments, the phosphine compound comprises Tris(2-carboxyethyl)phosphine (TCEP) or bis-sulfo triphenyl phosphine (BS-TPP) or Tri(hydroxyproyl)phosphine (THPP). In some embodiments, the cleaving agent comprises 4-dimethylaminopyridine (4-DMAP).

[0447] In some embodiments, in the methods for forming a plurality of complexed polymerases, at least one multivalent molecule in the plurality of multivalent molecules of step (b1) comprises a nucleotide unit comprising a chain terminating moiety which is selected from a group consisting of 3′-deoxy nucleotides, 2′,3′-dideoxynucleotides, 3′-methyl, 3′-azido, 3′-azidomethyl, 3′-O-azidoalkyl, 3′-O-ethynyl, 3′-O-aminoalkyl, 3′-O-fluoroalkyl, 3′-fluoromethyl, 3′-difluoromethyl, 3′-trifluoromethyl, 3′-sulfonyl, 3′-malonyl, 3′-amino, 3′-O-amino, 3′-sulfhydral, 3′-aminomethyl, 3′-ethyl, 3′butyl, 3′-tert butyl, 3′-Fluorenylmethyloxycarbonyl, 3′ tert-Butyloxycarbonyl, 3′-O-alkyl hydroxylamino group, 3′-phosphorothioate, and 3-O-benzyl, or derivatives thereof.

[0448] In some embodiments, in the methods for forming a plurality of complexed polymerases, at least one multivalent molecule in the plurality of multivalent molecules of step (b1) comprises a core attached to multiple nucleotide arms, wherein the core, linker and/or nucleotide unit is labeled with detectable reporter moiety. In some embodiments, the detectable reporter moiety comprises a fluorophore. In some embodiments, a particular detectable reporter moiety (e.g., fluorophore) that is attached to the multivalent molecule can correspond to the base (e.g., dATP, dGTP, dCTP, dTTP or dUTP) of the nucleotide unit to permit detection and identification of the nucleotide base.

[0449] In some embodiments, in the methods for forming a plurality of complexed polymerases, at least one nucleotide arm of a multivalent molecule in the plurality of multivalent molecules of step (b1) has a nucleotide unit that is attached to a detectable reporter moiety. In some embodiments, the detectable reporter moiety is attached to the nucleotide base. In some embodiments, the detectable reporter moiety comprises a fluorophore. In some embodiments, a particular detectable reporter moiety (e.g., fluorophore) that is attached to the multivalent molecule can correspond to the base (e.g., dATP, dGTP, dCTP, dTTP or dUTP) of the nucleotide unit to permit detection and identification of the nucleotide base.

[0450] In some embodiments, in the methods for forming a plurality of complexed polymerases, the core of a multivalent molecule of step (b1) comprises an avidin-like moiety and the core attachment moiety comprises biotin. In some embodiments, the core comprises an streptavidin-type or avidin-type moiety which includes an avidin protein, as well as any derivatives, analogs and other non-native forms of avidin that can bind to at least one biotin moiety. Other forms of avidin moieties include native and recombinant avidin and streptavidin as well as derivatized molecules, e.g. non-glycosylated avidin and truncated streptavidins. For example, avidin moiety includes de-glycosylated forms of avidin, bacterial streptavidin produced by Streptomyces (e.g., Streptomyces avidinii), as well as derivatized forms, for example, N-acyl avidins, e.g., N-acetyl, N-phthalyl and N-succinyl avidin, and the commercially-available products ExtrAvidin™, Captavidin™, Neutravidin™, and Neutralite Avidin™

Forming Complexed Polymerases with Nucleotides

[0451] In some embodiments, the methods for forming a plurality of complexed polymerases generally comprise: (a) contacting a plurality of mutant polymerases with (i) a plurality of nucleic acid template molecules and (ii) a plurality of nucleic acid primers to form a plurality of complexed polymerases; (b2) contacting the plurality of complexed polymerases with a plurality of nucleotides to form a plurality of nucleotide-complexed polymerases. In some embodiments, the method further comprises step (c2): detecting the complementary nucleotides which are incorporated into the primers of the nucleotide-complexed polymerases. In some embodiments, the method further comprises step (d2): identifying the bases of the complementary nucleotides which are incorporated into the primers of the nucleotide-complexed polymerases. In some embodiments, the mutant polymerases comprise an amino acid sequence that is at least 80%, 85%, 90%, 95%, 99% identical, or a higher level sequence identity, to any of SEQ ID NOS: 1-2787 and 2789-2793.

[0452] In some embodiments, the methods for forming a plurality of complexed polymerases further comprise step (b2): contacting the plurality of complexed polymerases of step (a) with a plurality of nucleotides under a condition suitable for binding a complementary nucleotide from the plurality of nucleotides to a complexed polymerase from the plurality of complexed polymerases thereby forming a nucleotide-complexed polymerase. In some embodiments, the contacting of step (b2) is conducted under a condition that is suitable for promoting incorporation of the bound complementary nucleotides into the primers of the nucleotide-complexed polymerases thereby forming a plurality of nucleotide-complexed polymerases. In some embodiments, the incorporating the nucleotide into the 3′ end of the primer in step (b2) comprises a primer extension reaction. In some embodiments, the contacting of step (b2) is conducted in the presence of at least one cation selected from a group consisting of strontium, barium, sodium, magnesium, potassium, manganese, calcium, lithium, nickel and cobalt. In some embodiments, the contacting of step (b2) is conducted in the presence of magnesium and/or manganese. In some embodiments, individual nucleotides in the plurality comprise an aromatic base, a five carbon sugar, and 1-10 phosphate groups. In some embodiments, the plurality of nucleotides comprises one type of nucleotide selected from a group consisting of dATP, dGTP, dCTP, dTTP and dUTP, or comprise a mixture of any combination of two or more types of nucleotides selected from a group consisting of dATP, dGTP, dCTP, dTTP and/or dUTP. In some embodiments, the plurality of nucleotides comprise native nucleotides (e.g., non-analog nucleotides) or nucleotide analogs. In some embodiments, individual nucleotides in the plurality of nucleotides comprise a chain terminating moiety attached to the 2′ and/or 3′ sugar position. In some embodiments, the plurality of nucleotides comprise a 2′ and/or 3′ chain terminating moiety which is removable or is not removable. In some embodiments, the chain terminating moiety comprises an azide, azido or azidomethyl group. In some embodiments, the azide, azido or azidomethyl group is removable from the nucleotide with a phosphine compound. One skilled in the art will recognize that other removable chain terminating moieties are possible. In some embodiments, the plurality of nucleotides comprises a plurality of nucleotides labeled with detectable reporter moiety. The detectable reporter moiety comprises a fluorophore. In some embodiments, the fluorophore is attached to the nucleotide base. In some embodiments, the fluorophore is attached to the nucleotide base with a linker which is cleavable/removable from the base or is not removable from the base. In some embodiments, at least one of the nucleotides in the plurality is not labeled with a detectable reporter moiety. In some embodiments, a particular detectable reporter moiety (e.g., fluorophore) that is attached to the nucleotide can correspond to the nucleotide base (e.g., dATP, dGTP, dCTP, dTTP or dUTP) to permit detection and identification of the nucleotide base. In some embodiments, the plurality of nucleotides in step (b2) comprise non-labeled nucleotides.

[0453] In some embodiments, in the methods for forming a plurality of complexed polymerases, the contacting of step (a) is conducted at a constant temperature which is selected from a temperature range of about 25-90° C. In some embodiments, the contacting of step (b2) is conducted at a constant temperature which is selected from a temperature range of about 25-90° C. In some embodiments, the contacting of steps (a) and (b2) are conducted at a constant temperature which is selected from a temperature range of about 25-90° C. (e.g., isothermal temperature).

[0454] In some embodiments, the methods for forming a plurality of complexed polymerases further comprise step (c2): detecting the complementary nucleotides which are incorporated into the primers of the nucleotide-complexed polymerases. In some embodiments, the plurality of nucleotides are labeled with a detectable reporter moiety to permit detection.

[0455] In some embodiments, the methods for forming a plurality of complexed polymerases further comprises the (d2): identifying the bases of the complementary nucleotides which are incorporated into the 3′ end of the primers of the nucleotide-complexed polymerases. In some embodiments the detecting of step (c2) and the identifying of step (d2) can be used to determine the sequence of the nucleic acid template molecules.

[0456] In some embodiments, in the methods for forming a plurality of complexed polymerases, at least one nucleotide in the plurality of nucleotides of step (b2) comprise a base, sugar and at least one phosphate group. In some embodiments, at least one nucleotide in the plurality comprises an aromatic base, a five carbon sugar (e.g., ribose or deoxyribose), and one or more phosphate groups (e.g., 1-10 phosphate groups). The plurality of nucleotides can comprise at least one type of nucleotide selected from a group consisting of dATP, dGTP, dCTP, dTTP and dUTP. The plurality of nucleotides can comprise at a mixture of any combination of two or more types of nucleotides selected from a group consisting of dATP, dGTP, dCTP, dTTP and/or dUTP. In some embodiments, at least one nucleotide in the plurality is not a nucleotide analog. In some embodiments, at least one nucleotide in the plurality comprises a nucleotide analog.

[0457] In some embodiments, in the methods for forming a plurality of complexed polymerases, at least one nucleotide in the plurality of nucleotides of step (b2) comprise a chain of one, two or three phosphorus atoms where the chain is typically attached to the 5′ carbon of the sugar moiety via an ester or phosphoramide linkage. In some embodiments, at least one nucleotide in the plurality is an analog having a phosphorus chain in which the phosphorus atoms are linked together with intervening O, S, NH, methylene or ethylene. In some embodiments, the phosphorus atoms in the chain include substituted side groups including O, S or BH₃. In some embodiments, the chain includes phosphate groups substituted with analogs including phosphoramidate, phosphorothioate, phosphordithioate, and O-methylphosphoroamidite groups.

[0458] In some embodiments, in the methods for forming a plurality of complexed polymerases, at least one nucleotide in the plurality of nucleotides of step (b2) comprises a terminator nucleotide analog having a chain terminating moiety (e.g., blocking moiety) at the sugar 2′ position, at the sugar 3′ position, or at the sugar 2′ and 3′ position. In some embodiments, the chain terminating moiety can inhibit polymerase-catalyzed incorporation of a subsequent nucleotide unit or free nucleotide in a nascent strand during a primer extension reaction. In some embodiments, the chain terminating moiety is attached to the 3′ sugar hydroxyl position where the sugar comprises a ribose or deoxyribose sugar moiety. In some embodiments, the chain terminating moiety is removable/cleavable from the 3′ sugar hydroxyl position to generate a nucleotide having a 3′OH sugar group which is extendible with a subsequent nucleotide in a polymerase-catalyzed nucleotide incorporation reaction. In some embodiments, the chain terminating moiety comprises an alkyl group, alkenyl group, alkynyl group, allyl group, aryl group, benzyl group, azide group, amine group, amide group, keto group, isocyanate group, phosphate group, thio group, disulfide group, carbonate group, urea group, silyl group or acetal group. In some embodiments, the chain terminating moiety is cleavable/removable from the nucleotide, for example by reacting the chain terminating moiety with a chemical agent, pH change, light or heat. In some embodiments, the chain terminating moieties alkyl, alkenyl, alkynyl and allyl are cleavable with tetrakis(triphenylphosphine)palladium(0) (Pd(PPh₃)₄) with piperidine, or with 2,3-Dichloro-5,6-dicyano-1,4-benzo-quinone (DDQ). In some embodiments, the chain terminating moieties aryl and benzyl are cleavable with H2 Pd/C. In some embodiments, the chain terminating moieties amine, amide, keto, isocyanate, phosphate, thio, disulfide are cleavable with phosphine or with a thiol group including beta-mercaptoethanol or dithiothritol (DTT). In some embodiments, the chain terminating moiety carbonate is cleavable with potassium carbonate (K₂CO₃) in MeOH, with triethylamine in pyridine, or with Zn in acetic acid (AcOH). In some embodiments, the chain terminating moieties urea and silyl are cleavable with tetrabutylammonium fluoride, pyridine-HF, with ammonium fluoride, or with triethylamine trihydrofluoride. In some embodiments, the chain terminating moiety may be cleavable/removable with nitrous acid. In some embodiments, a chain terminating moiety may be cleavable/removable using a solution comprising nitrite, such as, for example, a combination of nitrite with an acid such as acetic acid, sulfuric acid, or nitric acid. In some further embodiments, said solution may comprise an organic acid.

[0459] In some embodiments, in the methods for forming a plurality of complexed polymerases, at least one nucleotide in the plurality of nucleotides of step (b2) comprises a terminator nucleotide analog having a chain terminating moiety (e.g., blocking moiety) at the sugar 2′ position, at the sugar 3′ position, or at the sugar 2′ and 3′ position. In some embodiments, the chain terminating moiety comprises an azide, azido or azidomethyl group. In some embodiments, the chain terminating moiety comprises a 3′-O-azido or 3′-O-azidomethyl group. In some embodiments, the chain terminating moieties azide, azido and azidomethyl group are cleavable/removable with a phosphine compound. In some embodiments, the phosphine compound comprises a derivatized tri-alkyl phosphine moiety or a derivatized tri-aryl phosphine moiety. In some embodiments, the phosphine compound comprises Tris(2-carboxyethyl)phosphine (TCEP) or bis-sulfo triphenyl phosphine (BS-TPP) or Tri(hydroxyproyl)phosphine (THPP). In some embodiments, the cleaving agent comprises 4-dimethylaminopyridine (4-DMAP). In some embodiments, the chain terminating moiety comprising one or more of a 3′-O-amino group, a 3′-O-aminomethyl group, a 3′-O-methylamino group, or derivatives thereof may be cleaved with nitrous acid, through a mechanism utilizing nitrous acid, or using a solution comprising nitrous acid. In some embodiments, the chain terminating moiety comprising one or more of a 3′-O-amino group, a 3′-O-aminomethyl group, a 3′-O-methylamino group, or derivatives thereof may be cleaved using a solution comprising nitrite. In some embodiments, for example, nitrite may be combined with or contacted with an acid such as acetic acid, sulfuric acid, or nitric acid. In some embodiments, the chain terminating moiety comprises a 3′-acetal moiety which can be cleaved with a palladium deblocking reagent (e.g., Pd(0)). In some further embodiments, for example, nitrite may be combined with or contacted with an organic acid such as, for example, formic acid, acetic acid, propionic acid, butyric acid, isobutyric acid, or the like.

[0460] In some embodiments, in the methods for forming a plurality of complexed polymerases, at least one nucleotide in the plurality of nucleotides of step (b2) comprises a chain terminating moiety which is selected from a group consisting of 3′-deoxy nucleotides, 2′,3′-dideoxynucleotides, 3′-methyl, 3′-azido, 3′-azidomethyl, 3′-O-azidoalkyl, 3′-O-ethynyl, 3′-O-aminoalkyl, 3′-O-fluoroalkyl, 3′-fluoromethyl, 3′-difluoromethyl, 3′-trifluoromethyl, 3′-sulfonyl, 3′-malonyl, 3′-amino, 3′-O-amino, 3′-sulfhydral, 3′-aminomethyl, 3′-ethyl, 3′butyl, 3′-tert butyl, 3′-Fluorenylmethyloxycarbonyl, 3′ tert-Butyloxycarbonyl, 3′-O-alkyl hydroxylamino group, 3′-phosphorothioate, 3′-O-benzyl, and 3′-acetal moiety, or derivatives thereof.

[0461] In some embodiments, in the methods for forming a plurality of complexed polymerases, at least one nucleotide in the plurality of nucleotides of step (b2) comprises a detectable reporter moiety. In some embodiments, at least one nucleotide in the plurality of nucleotides of step (b2) comprises a labeled nucleotide. In some embodiments, the detectable reporter moiety comprises a fluorophore. In some embodiments, the fluorophore is attached to the nucleotide base. In some embodiments, the fluorophore is attached to the nucleotide base with a linker which is cleavable/removable from the base. In some embodiments, at least one of the nucleotides in the plurality is not labeled with a detectable reporter moiety. In some embodiments, a particular detectable reporter moiety (e.g., fluorophore) that is attached to the nucleotide can correspond to the nucleotide base (e.g., dATP, dGTP, dCTP, dTTP or dUTP) to permit detection and identification of the nucleotide base. In some embodiments, the plurality of nucleotides of step (b2) comprise non-labeled nucleotides.

[0462] In some embodiments, in the methods for forming a plurality of complexed polymerases, at least one nucleotide in the plurality of nucleotides of step (b2) comprises a cleavable linker on the base which comprises a cleavable (e.g., removable) moiety comprising an alkyl group, alkenyl group, alkynyl group, allyl group, aryl group, benzyl group, azide group, amine group, amide group, keto group, isocyanate group, phosphate group, thio group, disulfide group, carbonate group, urea group, silyl or acetal group. In some embodiments, the cleavable linker on the base is cleavable/removable from the base by reacting the cleavable moiety with a chemical agent, pH change, light or heat. In some embodiments, the cleavable moieties alkyl, alkenyl, alkynyl and allyl are cleavable with tetrakis(triphenylphosphine)palladium(0) (Pd(PPh₃)₄) with piperidine, or with 2,3-Dichloro-5,6-dicyano-1,4-benzo-quinone (DDQ). In some embodiments, the cleavable moieties aryl and benzyl are cleavable with H2 Pd/C. In some embodiments, the cleavable moieties amine, amide, keto, isocyanate, phosphate, thio, disulfide are cleavable with phosphine or with a thiol group including beta-mercaptoethanol or dithiothritol (DTT). In some embodiments, the cleavable moiety carbonate is cleavable with potassium carbonate (K₂CO₃) in MeOH, with triethylamine in pyridine, or with Zn in acetic acid (AcOH). In some embodiments, the cleavable moieties urea and silyl are cleavable with tetrabutylammonium fluoride, pyridine-HF, with ammonium fluoride, or with triethylamine trihydrofluoride.

[0463] In some embodiments, in the methods for forming a plurality of complexed polymerases, at least one nucleotide in the plurality of nucleotides of step (b2) comprises a cleavable linker on the base which comprises a cleavable moiety including an azide, azido or azidomethyl group. In some embodiments, the cleavable moieties azide, azido and azidomethyl group are cleavable/removable with a phosphine compound. In some embodiments, the phosphine compound comprises a derivatized tri-alkyl phosphine moiety or a derivatized tri-aryl phosphine moiety. In some embodiments, the phosphine compound comprises Tris(2-carboxyethyl)phosphine (TCEP) or bis-sulfo triphenyl phosphine (BS-TPP) or Tri(hydroxyproyl)phosphine (THPP). In some embodiments, the cleaving agent comprises 4-dimethylaminopyridine (4-DMAP).

[0464] In some embodiments, in the methods for forming a plurality of complexed polymerases, at least one nucleotide in the plurality of nucleotides of step (b2) comprises a chain terminating moiety at the sugar 2′ and/or the sugar 3′ position, and a cleavable linker on the base, wherein the chain terminating moiety on the sugar and the cleavable linker on the base have the same or different cleavable moieties. In some embodiments, the chain terminating moiety (e.g., at the sugar 2′ and/or sugar 3′ position) and the detectable reporter moiety linked to the base are chemically cleavable/removable with the same chemical agent. In some embodiments, the chain terminating moiety (e.g., at the sugar 2′ and/or sugar 3′ position) and the detectable reporter moiety linked to the base are chemically cleavable/removable with different chemical agents.

[0465] The present disclosure provides methods for binding a mutant polymerase to a nucleotide, comprising: (a) contacting a mutant polymerase to (i) a nucleic acid template molecule and (ii) a nucleic acid primer, wherein the contacting is conducted under a condition suitable to bind the mutant polymerase to the nucleic acid template molecule which is hybridized to the nucleic acid primer, wherein the nucleic acid template molecule hybridized to the nucleic acid primer forms the nucleic acid duplex. In some embodiments, the mutant polymerase comprises a recombinant mutant polymerase. In some embodiments, the primer comprises a 3′ extendible end or a 3′ non-extendible end. In some embodiments, the mutant polymerase comprises an amino acid sequence that is at least 80%, 85%, 90%, 95%, 99% identical, or a higher level sequence identity, to any of SEQ ID NOS: 1-2787 and 2789-2793. In some embodiments, the mutant polymerases include amino acid substitutions that confer exonuclease-minus activity. In some embodiments, the mutant polymerase exhibits increased incorporation rate of nucleotide analogs compared to a corresponding wild type polymerase, where the nucleotide analogs comprise a chain terminating moiety (e.g., blocking moiety) at the sugar 2′ position and/or at the 3′ sugar position.

[0466] In some embodiments, the methods for binding a mutant polymerase to a nucleotide further comprise (b) contacting the mutant polymerase with a plurality of nucleotides under a condition suitable for binding at least one nucleotide to the mutant polymerase which is bound to the nucleic acid duplex. In some embodiments, the mutant polymerase is contacted with the plurality of nucleotides in the presence of at least one cation selected from a group consisting of strontium, barium, sodium, magnesium, potassium, manganese, calcium, lithium, nickel and cobalt. In some embodiments, the contacting of step (b) is conducted in the presence of strontium, barium and/or calcium. In some embodiments, the at least one nucleotide binds the mutant polymerase does not incorporate into the 3′ end of the extendible or non-extendible primer. In some embodiments, the plurality of nucleotides comprises at least one nucleotide analog having a chain terminating moiety at the sugar 2′ or 3′ position. In some embodiments, the plurality of nucleotides comprises at least one nucleotide that lacks a chain terminating moiety. In some embodiments, the method further comprises (c) detecting the at least one nucleotide that is bound to the polymerase but has not incorporated into the 3′ end of the primer. In some embodiments, the method further comprises (d) identifying the at least one nucleotide that is bound to the polymerase but has not incorporated into the 3′ end of the primer.

[0467] Alternatively, the methods for binding a polymerase to a nucleotide, comprising forming a complexed polymerase: (al) contacting a mutant polymerase to (i) a nucleic acid template molecule and (ii) a nucleic acid primer, wherein the contacting is conducted under a condition suitable to bind the mutant polymerase to the nucleic acid template molecule which is hybridized to the nucleic acid primer, wherein the nucleic acid template molecule hybridized to the nucleic acid primer forms the nucleic acid duplex. In some embodiments, the mutant polymerase comprises a recombinant mutant polymerase. In some embodiments, the primer comprises a 3′ extendible end or a 3′ non-extendible end. In some embodiments, the mutant polymerase comprises an amino acid sequence that is at least 80%, 85%, 90%, 95%, 99% identical, or a higher level sequence identity, to any of SEQ ID NOS: 1-2787 and 2789-2793. In some embodiments, the mutant polymerases include amino acid substitutions that confer exonuclease-minus activity. In some embodiments, the mutant polymerase exhibits increased incorporation rate of nucleotide analogs compared to a corresponding wild type polymerase, where the nucleotide analogs comprise a chain terminating moiety (e.g., blocking moiety) at the sugar 2′ position and/or at the 3′ sugar position.

[0468] The alternative method further comprises step (b1): contacting the plurality of complexed polymerases of step (al) with a plurality of nucleotides under a condition suitable for binding a complementary nucleotide from the plurality of nucleotides to a complexed polymerase from the plurality of complexed polymerases thereby forming a nucleotide-complexed polymerase. In some embodiments, the contacting of step (b1) is conducted under a condition that is suitable for promoting nucleotide binding but inhibiting incorporation of the bound complementary nucleotides to the 3′ end of the primers of the nucleotide-complexed polymerases. In some embodiments, the contacting of step (b1) is conducted in the presence of at least one cation selected from a group consisting of strontium, barium, sodium, magnesium, potassium, manganese, calcium, lithium, nickel and cobalt. The plurality of complexed polymerases can be contacted sequentially with at least two separate mixtures where each mixture comprises an engineered polymerase and a nucleotide. The contacting is conducted under conditions suitable for forming stable ternary complexes with cognates for first, second and third base type base types in the template. The method further comprises step (c1) examining the at least two separate mixtures to determine if a ternary complex formed. The method further comprises step (d1) identifying the next correct nucleotide for the primed template nucleic acid molecule, wherein the next correct nucleotide is identified as a cognate of the first, second or third base type if ternary complex is detected in step (c1), and wherein the next correct nucleotide is imputed to be a nucleotide cognate of a fourth base type based on the absence of a ternary complex in step (c1). The method further comprises step (e1) adding a next correct nucleotide to the primer of the primed template nucleic acid after step (c3), thereby producing an extended primer; and step (f1) repeating steps (a) through (e1) for the primed template nucleic acid that comprises the extended primer.

[0469] The present disclosure provides methods for incorporating a nucleotide, comprising: (a) contacting a mutant polymerase to (i) a nucleic acid template molecule and (ii) a nucleic acid primer, wherein the contacting is conducted under a condition suitable to bind the mutant polymerase to the nucleic acid template molecule which is hybridized to the nucleic acid primer, wherein the nucleic acid template molecule hybridized to the nucleic acid primer forms the nucleic acid duplex. In some embodiments, the mutant polymerase comprises a recombinant mutant polymerase. In some embodiments, the primer comprises a 3′ extendible end. In some embodiments, the mutant polymerase comprises an amino acid sequence that is at least 80%, 85%, 90%, 95%, 99% identical, or a higher level sequence identity, to any of SEQ ID NOS: 1-2787 and 2789-2793. In some embodiments, the mutant polymerases include amino acid substitutions that confer exonuclease-minus activity. In some embodiments, the mutant polymerase exhibits increased incorporation rate of nucleotide analogs compared to a corresponding wild type polymerase, where the nucleotide analogs comprise a chain terminating moiety (e.g., blocking moiety) at the sugar 2′ position and/or at the 3′ sugar position.

[0470] In some embodiments, the methods for incorporating a nucleotide further comprise (b) contacting the mutant polymerase with a plurality of nucleotides under a condition suitable for binding at least one nucleotide to the mutant polymerase which is bound to the nucleic acid duplex. In some embodiments, the mutant polymerase is contacted with the plurality of nucleotides in the presence of at least one cation selected from a group consisting of strontium, barium, sodium, magnesium, potassium, manganese, calcium, lithium, nickel and cobalt. In some embodiments, the contacting of step (b) is conducted in the presence of strontium, barium and/or calcium. In some embodiments, the plurality of nucleotides comprises at least one nucleotide analog having a chain terminating moiety at the sugar 2′ or 3′ position. In some embodiments, the plurality of nucleotides comprises at least one nucleotide that lacks a chain terminating moiety. In some embodiments, the plurality of nucleotides comprise labeled nucleotides. In some embodiments, the plurality of nucleotides comprise non-labeled nucleotides. In some embodiments, the method further comprises (c) incorporating at least one nucleotide into the 3′ end of the extendible primer under a condition suitable for incorporating the at least one nucleotide. In some embodiments, the suitable conditions for nucleotide binding the mutant polymerase and for incorporation the nucleotide can be the same or different. In some embodiments, conditions suitable for incorporating the nucleotide comprise inclusion of at least one cation selected from a group consisting of strontium, barium, sodium, magnesium, potassium, manganese, calcium, lithium, nickel and cobalt. In some embodiments, the at least one nucleotide binds the mutant polymerase and incorporates into the 3′ end of the extendible primer. In some embodiments, the incorporating the nucleotide into the 3′ end of the primer in step (c) comprises a primer extension reaction. In some embodiments, the method further comprises (d) repeating the incorporating at least one nucleotide into the 3′ end of the extendible primer of step (c) at least once. In some embodiments, the method further comprises detecting the at least one incorporated nucleotide at step (c) and/or (d). In some embodiments, the method further comprises identifying the at least one incorporated nucleotide at step (c) and/or (d). In some embodiments, the sequence of the nucleic acid template molecule can be determined by detecting and identifying the nucleotide that binds the mutant polymerase. In some embodiments, the sequence of the nucleic acid template molecule can be determined by detecting and identifying the nucleotide that incorporates into the 3′ end of the primer.

[0471] The present disclosure provides methods for determining the sequence of a nucleic acid template molecule, comprising: (a) contacting a mutant polymerase to (i) a nucleic acid template molecule and (ii) a nucleic acid primer, wherein the contacting is conducted under a condition suitable to bind the mutant polymerase to the nucleic acid template molecule which is hybridized to the nucleic acid primer, wherein the nucleic acid template molecule hybridized to the nucleic acid primer forms the nucleic acid duplex. In some embodiments, the mutant polymerase comprises a recombinant mutant polymerase. In some embodiments, the primer comprises a 3′ extendible end. In some embodiments, the mutant polymerase comprises an amino acid sequence that is at least 80%, 85%, 90%, 95%, 99% identical, or a higher level sequence identity, to any of SEQ ID NOS: 1-2787 and 2789-2793. In some embodiments, the mutant polymerases include amino acid substitutions that confer exonuclease-minus activity. In some embodiments, the mutant polymerase exhibits increased incorporation rate of nucleotide analogs compared to a corresponding wild type polymerase, where the nucleotide analogs comprise a chain terminating moiety (e.g., blocking moiety) at the sugar 2′ position and/or at the 3′ sugar position.

[0472] In some embodiments, the methods for determining the sequence of a nucleic acid template molecule further comprise contacting the (b) contacting the mutant polymerase with a plurality of nucleotides under a condition suitable for binding at least one nucleotide to the mutant polymerase which is bound to the nucleic acid duplex. In some embodiments, the mutant polymerase is contacted with the plurality of nucleotides in the presence of at least one cation selected from a group consisting of strontium, barium, sodium, magnesium, potassium, manganese, calcium, lithium, nickel and cobalt. In some embodiments, the contacting of step (b) is conducted in the presence of strontium, barium and/or calcium. In some embodiments, the plurality of nucleotides comprises at least one nucleotide analog having a chain terminating moiety at the sugar 2′ or 3′ position. In some embodiments, the plurality of nucleotides comprises at least one nucleotide that lacks a chain terminating moiety. In some embodiments, the plurality of nucleotides comprise labeled nucleotides. In some embodiments, the plurality of nucleotides comprise non-labeled nucleotides. In some embodiments, the method further comprises (c) incorporating at least one nucleotide into the 3′ end of the extendible primer under a condition suitable for incorporating the at least one nucleotide. In some embodiments, the suitable conditions for nucleotide binding the mutant polymerase and for incorporation the nucleotide can be the same or different. In some embodiments, conditions suitable for incorporating the nucleotide comprise inclusion of at least one cation selected from a group consisting of strontium, barium, sodium, magnesium, potassium, manganese, calcium, lithium, nickel and cobalt. In some embodiments, the at least one nucleotide binds the mutant polymerase and incorporates into the 3′ end of the extendible primer. In some embodiments, the incorporating the nucleotide into the 3′ end of the primer in step (c) comprises a primer extension reaction. In some embodiments, the method further comprises (d) repeating the incorporating at least one nucleotide into the 3′ end of the extendible primer of step (c) at least once. In some embodiments, the plurality of nucleotides comprises a plurality of nucleotides labeled with detectable reporter moiety. The detectable reporter moiety comprises a fluorophore. In some embodiments, the fluorophore is attached to the nucleotide base. In some embodiments, the fluorophore is attached to the nucleotide base with a linker which is cleavable/removable from the base. In some embodiments, at least one of the nucleotides in the plurality is not labeled with a detectable reporter moiety. In some embodiments, a particular detectable reporter moiety (e.g., fluorophore) that is attached to the nucleotide can correspond to the nucleotide base (e.g., dATP, dGTP, dCTP, dTTP or dUTP) to permit detection and identification of the nucleotide base. In some embodiments, the method further comprises detecting the at least one incorporated nucleotide at step (c) and/or (d). In some embodiments, the method further comprises identifying the at least one incorporated nucleotide at step (c) and/or (d). In some embodiments, the sequence of the nucleic acid template molecule can be determined by detecting and identifying the nucleotide that binds the mutant polymerase, thereby determining the sequence of the nucleic acid template. In some embodiments, the sequence of the nucleic acid template molecule can be determined by detecting and identifying the nucleotide that incorporates into the 3′ end of the primer, thereby determining the sequence of the nucleic acid template.

[0473] In some embodiments, in the methods for determining the sequence of a nucleic acid template, the plurality of polymerases that are bound to the nucleic acid duplexes comprise a plurality of complexed polymerases, having at least a first and second complexed polymerase, wherein (a) the first complexed polymerases comprises a first polymerase bound to a first nucleic acid duplex comprising a first nucleic acid template which is hybridized to a first nucleic acid primer, (b) the second complexed polymerases comprises a second polymerase bound to a second nucleic acid duplex comprising a second nucleic acid template which is hybridized to a second nucleic acid primer, (c) the first and second nucleic acid templates comprise different sequences, (d) the first and second nucleic acid templates are clonally-amplified, (e) the first and second primers comprise extendible 3′ ends or non-extendible 3′ ends, and (f) the plurality of complexed polymerases are immobilized to a support. In some embodiments, the density of the plurality of complexed polymerases is about 10²-10¹⁵ complexed polymerases per mm² that are immobilized to the support.

[0474] In some embodiments, in the method for binding a nucleotide and in the method for incorporating a nucleotide and in the method for sequencing the nucleic acid template using nucleotides, at least one nucleotide in the plurality of nucleotides comprise a base, sugar and at least one phosphate group. In some embodiments, at least one nucleotide in the plurality comprises an aromatic base, a five carbon sugar (e.g., ribose or deoxyribose), and one or more phosphate groups (e.g., 1-10 phosphate groups). The plurality of nucleotides can comprise at least one type of nucleotide selected from a group consisting of dATP, dGTP, dCTP, dTTP and dUTP. The plurality of nucleotides can comprise at a mixture of any combination of two or more types of nucleotides selected from a group consisting of dATP, dGTP, dCTP, dTTP and/or dUTP. In some embodiments, at least one nucleotide in the plurality is not a nucleotide analog. In some embodiments, at least one nucleotide in the plurality comprises a nucleotide analog.

[0475] In some embodiments, in the method for binding a nucleotide and in the method for incorporating a nucleotide and in the method for sequencing the nucleic acid template, at least one nucleotide in the plurality of nucleotides comprise a chain of one, two or three phosphorus atoms where the chain is typically attached to the 5′ carbon of the sugar moiety via an ester or phosphoramide linkage. In some embodiments, at least one nucleotide in the plurality is an analog having a phosphorus chain in which the phosphorus atoms are linked together with intervening O, S, NH, methylene or ethylene. In some embodiments, the phosphorus atoms in the chain include substituted side groups including O, S or BH₃. In some embodiments, the chain includes phosphate groups substituted with analogs including phosphoramidate, phosphorothioate, phosphordithioate, and O-methylphosphoroamidite groups.

[0476] In some embodiments, in the method for binding a nucleotide and in the method for incorporating a nucleotide and in the method for sequencing the nucleic acid template, at least one nucleotide in the plurality of nucleotides comprises a terminator nucleotide analog having a chain terminating moiety (e.g., blocking moiety) at the sugar 2′ position, at the sugar 3′ position, or at the sugar 2′ and 3′ position. In some embodiments, the chain terminating moiety can inhibit polymerase-catalyzed incorporation of a subsequent nucleotide unit or free nucleotide in a nascent strand during a primer extension reaction. In some embodiments, the chain terminating moiety is attached to the 3′ sugar hydroxyl position where the sugar comprises a ribose or deoxyribose sugar moiety. In some embodiments, the chain terminating moiety is removable/cleavable from the 3′ sugar hydroxyl position to generate a nucleotide having a 3′OH sugar group which is extendible with a subsequent nucleotide in a polymerase-catalyzed nucleotide incorporation reaction. In some embodiments, the chain terminating moiety comprises an alkyl group, alkenyl group, alkynyl group, allyl group, aryl group, benzyl group, azide group, amine group, amide group, keto group, isocyanate group, phosphate group, thio group, disulfide group, carbonate group, urea group, or silyl group. In some embodiments, the chain terminating moiety is cleavable/removable from the nucleotide, for example by reacting the chain terminating moiety with a chemical agent, pH change, light or heat. In some embodiments, the chain terminating moieties alkyl, alkenyl, alkynyl and allyl are cleavable with tetrakis(triphenylphosphine)palladium(0) (Pd(PPh₃)₄) with piperidine, or with 2,3-Dichloro-5,6-dicyano-1,4-benzo-quinone (DDQ). In some embodiments, the chain terminating moieties aryl and benzyl are cleavable with H2 Pd/C. In some embodiments, the chain terminating moieties amine, amide, keto, isocyanate, phosphate, thio, disulfide are cleavable with phosphine or with a thiol group including beta-mercaptoethanol or dithiothritol (DTT). In some embodiments, the chain terminating moiety carbonate is cleavable with potassium carbonate (K₂CO₃) in MeOH, with triethylamine in pyridine, or with Zn in acetic acid (AcOH). In some embodiments, the chain terminating moieties urea and silyl are cleavable with tetrabutylammonium fluoride, pyridine-HF, with ammonium fluoride, or with triethylamine trihydrofluoride. In some embodiments, the chain terminating moiety may be cleavable/removable with nitrous acid. In some embodiments, a chain terminating moiety may be cleavable/removable using a solution comprising nitrite, such as, for example, a combination of nitrite with an acid such as acetic acid, sulfuric acid, or nitric acid. In some further embodiments, said solution may comprise an organic acid.

[0477] In some embodiments, in the method for binding a nucleotide and in the method for incorporating a nucleotide and in the method for sequencing the nucleic acid template, at least one nucleotide in the plurality of nucleotides comprises a terminator nucleotide analog having a chain terminating moiety (e.g., blocking moiety) at the sugar 2′ position, at the sugar 3′ position, or at the sugar 2′ and 3′ position. In some embodiments, the chain terminating moiety comprises an azide, azido or azidomethyl group. In some embodiments, the chain terminating moiety comprises a 3′-O-azido or 3′-O-azidomethyl group. In some embodiments, the chain terminating moieties azide, azido and azidomethyl group are cleavable/removable with a phosphine compound. In some embodiments, the phosphine compound comprises a derivatized tri-alkyl phosphine moiety or a derivatized tri-aryl phosphine moiety. In some embodiments, the phosphine compound comprises Tris(2-carboxyethyl)phosphine (TCEP) or bis-sulfo triphenyl phosphine (BS-TPP) or Tri(hydroxyproyl)phosphine (THPP). In some embodiments, the cleaving agent comprises 4-dimethylaminopyridine (4-DMAP). In some embodiments, the chain terminating moiety comprising one or more of a 3′-O-amino group, a 3′-O-aminomethyl group, a 3′-O-methylamino group, or derivatives thereof may be cleaved with nitrous acid, through a mechanism utilizing nitrous acid, or using a solution comprising nitrous acid. In some embodiments, the chain terminating moiety comprising one or more of a 3′-O-amino group, a 3′-O-aminomethyl group, a 3′-O-methylamino group, or derivatives thereof may be cleaved using a solution comprising nitrite. In some embodiments, for example, nitrite may be combined with or contacted with an acid such as acetic acid, sulfuric acid, or nitric acid. In some further embodiments, for example, nitrite may be combined with or contacted with an organic acid such as, for example, formic acid, acetic acid, propionic acid, butyric acid, isobutyric acid, or the like.

[0478] In some embodiments, in the method for binding a nucleotide and in the method for incorporating a nucleotide and in the method for sequencing the nucleic acid template, the nucleotide comprises a chain terminating moiety which is selected from a group consisting of 3′-deoxy nucleotides, 2′,3′-dideoxynucleotides, 3′-methyl, 3′-azido, 3′-azidomethyl, 3′-O-azidoalkyl, 3′-O-ethynyl, 3′-O-aminoalkyl, 3′-O-fluoroalkyl, 3′-fluoromethyl, 3′-difluoromethyl, 3′-trifluoromethyl, 3′-sulfonyl, 3′-malonyl, 3′-amino, 3′-O-amino, 3′-sulfhydral, 3′-aminomethyl, 3′-ethyl, 3′butyl, 3′-tert butyl, 3′-Fluorenylmethyloxycarbonyl, 3′ tert-Butyloxycarbonyl, 3′-O-alkyl hydroxylamino group, 3′-phosphorothioate, 3′-O-benzyl, and 3′-acetal moiety, or derivatives thereof.

[0479] In some embodiments, in the method for binding a nucleotide and in the method for incorporating a nucleotide and in the method for sequencing the nucleic acid template, the plurality of nucleotides comprises a plurality of nucleotides labeled with detectable reporter moiety. The detectable reporter moiety comprises a fluorophore. In some embodiments, the fluorophore is attached to the nucleotide base. In some embodiments, the fluorophore is attached to the nucleotide base with a linker which is cleavable/removable from the base. In some embodiments, in the method for incorporating a nucleotide and in the method for sequencing the nucleic acid template using nucleotides comprising a fluorophore attached to the nucleotide base, cleavage of the linker to remove the fluorophore generates an extended strand having at least a portion of the linker remaining which creates a scar. In some embodiments, at least one of the nucleotides in the plurality is not labeled with a detectable reporter moiety. In some embodiments, a particular detectable reporter moiety (e.g., fluorophore) that is attached to the nucleotide can correspond to the nucleotide base (e.g., dATP, dGTP, dCTP, dTTP or dUTP) to permit detection and identification of the nucleotide base. In some embodiments, the plurality of nucleotides comprise non-labeled nucleotides.

[0480] In some embodiments, in the method for binding a nucleotide and in the method for incorporating a nucleotide and in the method for sequencing the nucleic acid template, the cleavable linker on the base comprises a cleavable moiety comprising an alkyl group, alkenyl group, alkynyl group, allyl group, aryl group, benzyl group, azide group, amine group, amide group, keto group, isocyanate group, phosphate group, thio group, disulfide group, carbonate group, urea group, or silyl group. In some embodiments, the cleavable linker on the base is cleavable/removable from the base by reacting the cleavable moiety with a chemical agent, pH change, light or heat. In some embodiments, the cleavable moieties alkyl, alkenyl, alkynyl and allyl are cleavable with tetrakis(triphenylphosphine)palladium(0) (Pd(PPh₃)₄) with piperidine, or with 2,3-Dichloro-5,6-dicyano-1,4-benzo-quinone (DDQ). In some embodiments, the cleavable moieties aryl and benzyl are cleavable with H2 Pd/C. In some embodiments, the cleavable moieties amine, amide, keto, isocyanate, phosphate, thio, disulfide are cleavable with phosphine or with a thiol group including beta-mercaptoethanol or dithiothritol (DTT). In some embodiments, the cleavable moiety carbonate is cleavable with potassium carbonate (K₂CO₃) in MeOH, with triethylamine in pyridine, or with Zn in acetic acid (AcOH). In some embodiments, the cleavable moieties urea and silyl are cleavable with tetrabutylammonium fluoride, pyridine-HF, with ammonium fluoride, or with triethylamine trihydrofluoride. In some embodiments, the chain terminating moiety comprises a 3′-acetal moiety which can be cleaved with a palladium deblocking reagent (e.g., Pd(0)).

[0481] In some embodiments, in the method for binding a nucleotide and in the method for incorporating a nucleotide and in the method for sequencing the nucleic acid template, the cleavable linker on the base comprises cleavable moiety including an azide, azido or azidomethyl group. In some embodiments, the cleavable moieties azide, azido and azidomethyl group are cleavable/removable with a phosphine compound. In some embodiments, the phosphine compound comprises a derivatized tri-alkyl phosphine moiety or a derivatized tri-aryl phosphine moiety. In some embodiments, the phosphine compound comprises Tris(2-carboxyethyl)phosphine (TCEP) or bis-sulfo triphenyl phosphine (BS-TPP) or Tri(hydroxyproyl)phosphine (THPP). In some embodiments, the cleaving agent comprises 4-dimethylaminopyridine (4-DMAP).

[0482] In some embodiments, in the method for binding a nucleotide and in the method for incorporating a nucleotide and in the method for sequencing the nucleic acid template, the chain terminating moiety (e.g., at the sugar 2′ and/or sugar 3′ position) and the cleavable linker on the base have the same or different cleavable moieties. In some embodiments, the chain terminating moiety (e.g., at the sugar 2′ and/or sugar 3′ position) and the detectable reporter moiety linked to the base are chemically cleavable/removable with the same chemical agent. In some embodiments, the chain terminating moiety (e.g., at the sugar 2′ and/or sugar 3′ position) and the detectable reporter moiety linked to the base are chemically cleavable/removable with different chemical agents.

[0483] In some embodiments, in the methods for sequencing, the binding complex comprises a mutant polymerase, a nucleic acid template molecule duplexed with a primer, and a nucleotide reagent. In some embodiments, in the methods for forming a binding complex which comprises (i) a mutant polymerase, a nucleic acid template molecule duplexed with a primer, and a nucleotide, or the binding complex comprises (ii) a mutant polymerase, a nucleic acid template molecule duplexed with a primer, and a nucleotide unit of a multivalent molecule. In some embodiments, the mutant polymerase comprises an amino acid sequence that is at least 80%, 85%, 90%, 95%, 99% identical, or a higher level sequence identity, to any of SEQ ID NOS: 1-2787 and 2789-2793. In some embodiments, the binding complex has a persistence time of greater than about 0.1, 0.2, 0.3, 0.4, 0.5, 0.6, 0.7, 0.8, 0.9 or 1 second. The binding complex has a persistence time of greater than about 0.1-0.25 seconds, or about 0.25-0.5 seconds, or about 0.5-0.75 seconds, or about 0.75-1 second, or about 1-2 seconds, or about 2-3 seconds, or about 3-4 second, or about 4-5 seconds, or about 5-10 seconds and/or wherein the method is or may be carried out at a temperature of at or above 15° C., at or above 20° C., at or above 25° C., at or above 35° C., at or above 37° C., at or above 42° C. at or above 55° C. at or above 60° C., or at or above 72° C., or at or above 80° C., or within a range defined by any of the foregoing. The binding complex (e.g., ternary complex) remains stable until subjected to a condition that causes dissociation of interactions between any of the polymerase, template molecule, primer and/or the nucleotide unit or the nucleotide. For example, a dissociating condition comprises contacting the binding complex with any one or any combination of a detergent, EDTA and/or water. In some embodiments, the present disclosure provides said method wherein the binding complex is deposited on, attached to, or hybridized to, a surface showing a contrast to noise ratio in the detecting step of greater than 20. In some embodiments, the present disclosure provides said method wherein the contacting is performed under a condition that stabilizes the binding complex when the nucleotide or nucleotide unit is complementary to a next base of the template nucleic acid, and destabilizes the binding complex when the nucleotide or nucleotide unit is not complementary to the next base of the template nucleic acid.

[0484] In some embodiments, in the methods for forming a plurality of complexed polymerases, including methods that employ multivalent molecules and/or nucleotides, the support comprises a planar or non-planar support. The support can be solid or semi-solid. In some embodiments, the support can be porous, semi-porous or non-porous. In some embodiments, the surface of the support can be coated with one or more compounds to produce a passivated layer on the support. In some embodiments, the passivated layer forms a porous or semi-porous layer. In some embodiments, the nucleic acid primer, template and/or polymerase, can be attached to the passivated layer to immobilize the primer, template and/or polymerase to the support. In some embodiments, the support comprises a low non-specific binding surface that enable improved nucleic acid hybridization and amplification performance on the support. In general, the support may comprise one or more layers of a covalently or non-covalently attached low-binding, chemical modification layers, e.g., silane layers, polymer films, and one or more covalently or non-covalently attached oligonucleotides that can be used for immobilizing a plurality of nucleic acid template molecules to the support (e.g., FIG. 1). In some embodiments, the support can comprise a functionalized polymer coating layer covalently bound at least to a portion of the support via a chemical group on the support, a primer grafted to the functionalized polymer coating, and a water-soluble protective coating on the primer and the functionalized polymer coating. In some embodiments, the functionalized polymer coating comprises a poly(N-(5-azidoacetamidylpentyl)acrylamide-co-acrylamide (PAZAM). In some embodiments, the support comprises a surface coating having at least one hydrophilic polymer coating layer and at least one layer of a plurality of oligonucleotides. The hydrophilic polymer coating layer can comprise polyethylene glycol (PEG). The hydrophilic polymer coating layer can comprise branched PEG having at least 4 branches. In some embodiments, the low non-specific binding coating has a degree of hydrophilicity which can be measured as a water contact angle, where the water contact angle is no more than 45 degrees. In some embodiments, the density of the plurality of complexed polymerases immobilized to the support or immobilized to the coating on the support is about 10²-10⁶ per mm², or about 10⁶-10⁹ per mm², or about 10⁹-10¹² per mm², or about 10¹²-10¹⁵ per mm² In some embodiments, the plurality of complexed polymerases is immobilized to the support or immobilized to the coating on the support at pre-determined sites on the support (or the coating on the support), or immobilized to the coating on the support at random sites on the support (or the coating on the support).

### Methods for Nucleic Acid Sequencing

[0485] The present disclosure provides methods for determining the sequence of one or more nucleic acid template molecules, comprising: (a) contacting a plurality of a first mutant polymerase to (i) a plurality of nucleic acid template molecules and (ii) a plurality of nucleic acid primers, wherein the contacting is conducted under a condition suitable to bind the plurality of first mutant DNA polymerases to the plurality of nucleic acid template molecules and the plurality of nucleic acid primers thereby forming a plurality of first complexed polymerases each comprising a first mutant DNA polymerase bound to a nucleic acid duplex wherein the nucleic acid duplex comprises a nucleic acid template molecule hybridized to a nucleic acid primer. In some embodiments, the plurality of first mutant polymerases comprise a recombinant mutant polymerase. In some embodiments, the plurality of first mutant polymerases comprise a DNA polymerase. In some embodiments, the first mutant polymerases comprise an amino acid sequence that is at least 80%, 85%, 90%, 95%, 99% identical, or a higher level sequence identity, to any of SEQ ID NOS: 1-2787 and 2789-2793. In some embodiments, the first mutant polymerases are recombinant polymerases. In some embodiments, the first mutant polymerases include amino acid substitutions that confer exonuclease-minus activity. In some embodiments, the first mutant polymerases exhibit desirable characteristics compared to a polymerase having a corresponding wild type amino acid backbone sequence (e.g., any of SEQ ID NOS: 1, 2, 1714 or 2789-2793). For example, the first mutant polymerases exhibit increased thermal stability (Tm). In another example, the first mutant polymerases exhibit increased incorporation rates of nucleotide analogs comprising a chain terminating moiety (e.g., blocking moiety) at the sugar 2′ position and/or at the 3′ sugar position. In yet another example, the first mutant polymerases exhibit increased uracil-tolerance. In some embodiments, the mutant DNA polymerases exhibit improved binding to a nucleotide reagent. In some embodiments, the mutant DNA polymerases exhibit improved binding and incorporation of a nucleotide reagent. In some embodiments, the mutant DNA polymerases exhibit reduced sequence-specific sequencing errors.

[0486] In some embodiments, in the methods for determining the sequence of one or more nucleic acid template molecules, the nucleotide reagents comprise any one or any combination of nucleotides and/or multivalent molecules. In some embodiments, the nucleotides comprise canonical nucleotides. In some embodiments, the nucleotides comprise non-labeled nucleotides. In some embodiments, the nucleotides comprise nucleotide analogs comprise detectably labeled nucleotides and/or nucleotides carrying a removable or non-removable chain terminating moiety. In some embodiments, individual multivalent molecules comprise a central core attached to multiple polymer arms each having a nucleotide unit at the end of the arms.

[0487] In some embodiments, in the methods for determining the sequence of one or more nucleic acid template molecules, the primer comprises a 3′ extendible end or a 3′ non-extendible end. In some embodiments, the plurality of nucleic acid template molecules comprise amplified template molecules (e.g., clonally amplified template molecules). In some embodiments, the plurality of nucleic acid template molecules comprise one copy of a target sequence of interest. In some embodiments, the plurality of nucleic acid molecules comprise two or more tandem copies of a target sequence of interest (e.g., concatemers). In some embodiments, the nucleic acid template molecules in the plurality of nucleic acid template molecules comprise the same target sequence of interest or different target sequences of interest. In some embodiments, the plurality of nucleic acid template molecules and/or the plurality of nucleic acid primers are in solution or are immobilized to a support. In some embodiments, when the plurality of nucleic acid template molecules and/or the plurality of nucleic acid primers are immobilized to a support, the binding with the first recombinant mutant polymerase generates a plurality of immobilized first complexed polymerases. In some embodiments, the plurality of nucleic acid template molecules and/or nucleic acid primers are immobilized to 10²-10¹⁵ different sites on a support. In some embodiments, the binding of the plurality of template molecules and nucleic acid primers with the plurality of first recombinant mutant polymerases generates a plurality of first complexed polymerases immobilized to 10²-10¹⁵ different sites on the support. In some embodiments, the plurality of immobilized first complexed polymerases on the support are immobilized to pre-determined or to random sites on the support. In some embodiments, the plurality of immobilized first complexed polymerases are in fluid communication with each other to permit flowing a solution of reagents (e.g., enzymes including polymerases, multivalent molecules, nucleotides, and/or divalent cations) onto the support so that the plurality of immobilized complexed polymerases on the support are reacted with the solution of reagents in a massively parallel manner.

[0488] In some embodiments, the methods for determining the sequence of one or more nucleic acid template molecules further comprises step (b): contacting the plurality of first complexed polymerases with a plurality of multivalent molecules to form a plurality of multivalent-complexed polymerases. In some embodiments, individual multivalent molecules in the plurality of multivalent molecules comprise a core attached to multiple nucleotide arms and each nucleotide arm is attached to a nucleotide (e.g., nucleotide unit). In some embodiments, the contacting of step (b) is conducted under a condition suitable for binding complementary nucleotide units of the multivalent molecules to at least two of the plurality of first complexed polymerases thereby forming a plurality of multivalent-complexed polymerases. In some embodiments, the condition is suitable for inhibiting incorporation of the complementary nucleotide units into the primers of the plurality of multivalent-complexed polymerases. In some embodiments, the plurality of multivalent molecules comprise at least one multivalent molecule having multiple nucleotide arms each attached with a nucleotide analog (e.g., nucleotide analog unit), where the nucleotide analog includes a chain terminating moiety at the sugar 2′ and/or 3′ position. In some embodiments, the plurality of multivalent molecules comprises at least one multivalent molecule comprising multiple nucleotide arms each attached with a nucleotide unit that lacks a chain terminating moiety. In some embodiments, at least one of the multivalent molecules in the plurality of multivalent molecules is labeled with a detectable reporter moiety. In some embodiments, the detectable reporter moiety comprises a fluorophore. In some embodiments, the contacting of step (b) is conducted in the presence of at least one cation selected from a group consisting of strontium, barium, sodium, magnesium, potassium, manganese, calcium, lithium, nickel and cobalt. In some embodiments, the contacting of step (b) is conducted in the presence of strontium, barium and/or calcium.

[0489] In some embodiments, the methods for determining the sequence of one or more nucleic acid template molecules further comprises step (c): detecting the plurality of multivalent-complexed polymerases. In some embodiments, the detecting includes detecting the multivalent molecules that are bound to the complexed polymerases, where the complementary nucleotide units of the multivalent molecules are bound to the primers but incorporation of the complementary nucleotide units is inhibited. In some embodiments, the multivalent molecules are labeled with a detectable reporter moiety to permit detection. In some embodiments, the labeled multivalent molecules comprise a fluorophore attached to the core, linker and/or nucleotide unit of the multivalent molecules.

[0490] In some embodiments, the methods for determining the sequence of one or more nucleic acid template molecules further comprises step (d): identifying the base of the complementary nucleotide units that are bound to the plurality of first complexed polymerases, thereby determining the sequence of the nucleic acid template. In some embodiments, the multivalent molecules are labeled with a detectable reporter moiety that corresponds to the particular nucleotide units attached to the nucleotide arms to permit identification of the complementary nucleotide units (e.g., nucleotide base adenine, guanine, cytosine, thymine or uracil) that are bound to the plurality of first complexed polymerases.

[0491] In some embodiments, in the methods for determining the sequence of one or more nucleic acid template molecules, the binding of the plurality of first complexed polymerases with the plurality of multivalent molecules forms at least one avidity complex, the method comprising the steps: (a) binding a first nucleic acid primer, a first DNA polymerase, and a first multivalent molecule to a first portion of a concatemer template molecule thereby forming a first binding complex (e.g., FIGS. 44-46), wherein a first nucleotide unit of the first multivalent molecule binds to the first DNA polymerase; and (b) binding a second nucleic acid primer, a second DNA polymerase, and the first multivalent molecule to a second portion of the same concatemer template molecule thereby forming a second binding complex (e.g., FIGS. 44-46), wherein a second nucleotide unit of the first multivalent molecule binds to the second DNA polymerase, wherein the first and second binding complexes which include the same multivalent molecule forms an avidity complex (e.g., FIG. 47). In some embodiments, the first polymerase comprises any mutant polymerase described herein. In some embodiments, the second polymerase comprises any mutant polymerase described herein. The concatemer template molecule comprises tandem repeat sequences of a sequence of interest and at least one universal sequencing primer binding site. The first and second nucleic acid primers can bind to a sequencing primer binding site along the concatemer template molecule.

[0492] In some embodiments, in the methods for determining the sequence of one or more nucleic acid template molecules, the method includes binding the plurality of first complexed polymerases with the plurality of multivalent molecules to form at least one avidity complex, the method comprising the steps: (a) contacting the plurality of DNA polymerases and the plurality of nucleic acid primers with different portions of a concatemer nucleic acid template molecule to form at least first and second complexed polymerases on the same concatemer template molecule (e.g., FIGS. 44-45); (b) contacting a plurality of multivalent molecules to the at least first and second complexed polymerases on the same concatemer template molecule, under conditions suitable to bind a single multivalent molecule from the plurality to the first and second complexed polymerases, wherein at least a first nucleotide unit of the single multivalent molecule is bound to the first complexed polymerase which includes a first primer hybridized to a first portion of the concatemer template molecule thereby forming a first binding complex (e.g., first ternary complex) (e.g., FIGS. 44-46), and wherein at least a second nucleotide unit of the single multivalent molecule is bound to the second complexed polymerase which includes a second primer hybridized to a second portion of the concatemer template molecule thereby forming a second binding complex (e.g., second ternary complex) (e.g., FIGS. 44-46), wherein the contacting is conducted under a condition suitable to inhibit polymerase-catalyzed incorporation of the bound first and second nucleotide units in the first and second binding complexes, and wherein the first and second binding complexes which are bound to the same multivalent molecule forms an avidity complex (e.g., FIG. 47); and (c) detecting the first and second binding complexes on the same concatemer template molecule, and (d) identifying the first nucleotide unit in the first binding complex thereby determining the sequence of the first portion of the concatemer template molecule, and identifying the second nucleotide unit in the second binding complex thereby determining the sequence of the second portion of the concatemer template molecule. In some embodiments, the plurality of DNA polymerases comprise any mutant polymerase described herein. The concatemer template molecule comprises tandem repeat sequences of a sequence of interest and at least one universal sequencing primer binding site. The plurality of nucleic acid primers can bind to a sequencing primer binding site along the concatemer template molecule.

[0493] In some embodiments, in the methods for determining the sequence of one or more nucleic acid template molecules, the binding of the plurality of first complexed polymerases with the plurality of multivalent molecules forms at least one avidity complex, the method comprising the steps: (a) binding a first nucleic acid primer, a first DNA polymerase, and a first multivalent molecule to a first template molecule thereby forming a first binding complex, wherein a first nucleotide unit of the first multivalent molecule binds to the first DNA polymerase; and (b) binding a second nucleic acid primer, a second DNA polymerase, and the first multivalent molecule to a second template molecule thereby forming a second binding complex, wherein a second nucleotide unit of the first multivalent molecule binds to the second DNA polymerase, wherein the first and second binding complexes which include the same multivalent molecule forms an avidity complex. In some embodiments, the first polymerase comprises any wild type or mutant polymerase described herein. In some embodiments, the second polymerase comprises any wild type or mutant polymerase described herein. In some embodiments, the first and second template molecules are clonally amplified template molecules. In some embodiments, the first and second template molecules are localized in close proximity to each other. For example, the clonally-amplified first and second template molecules comprise linear template molecules that are generated via bridge amplification and are immobilized to the same location or feature on a support. The first and second template molecules comprise a sequence of interest and at least one universal sequencing primer binding site. The first and second nucleic acid primers can bind to a sequencing primer binding site on the first and second template molecules, respectively.

[0494] In some embodiments, in the methods for determining the sequence of one or more nucleic acid template molecules, the method includes binding the plurality of first complexed polymerases with the plurality of multivalent molecules to form at least one avidity complex, the method comprising the steps: (a) contacting the plurality of DNA polymerases and the plurality of nucleic acid primers (which includes a first and second primer) with a first and second template molecule to form at least first and second complexed polymerases on the first and second template molecule, respectively; (b) contacting a plurality of multivalent molecules to the at least first and second complexed polymerases, under conditions suitable to bind a single multivalent molecule from the plurality to the first and second complexed polymerases, wherein at least a first nucleotide unit of the single multivalent molecule is bound to the first complexed polymerase which includes a first primer hybridized to the first template molecule thereby forming a first binding complex (e.g., first ternary complex), and wherein at least a second nucleotide unit of the single multivalent molecule is bound to the second complexed polymerase which includes a second primer hybridized to a second template molecule thereby forming a second binding complex (e.g., second ternary complex), wherein the contacting is conducted under a condition suitable to inhibit polymerase-catalyzed incorporation of the bound first and second nucleotide units in the first and second binding complexes, and wherein the first and second binding complexes which are bound to the same multivalent molecule forms an avidity complex; and (c) detecting the first and second binding complexes on the first and second template molecules, respectively, and (d) identifying the first nucleotide unit in the first binding complex thereby determining the sequence of the first template molecule, and identifying the second nucleotide unit in the second binding complex thereby determining the sequence of the second template molecule. In some embodiments, the plurality of DNA polymerases comprise any wild type or mutant polymerase described herein. The first and second template molecules are clonally amplified template molecules. In some embodiments, the first and second template molecules are localized in close proximity to each other. For example, the clonally-amplified first and second template molecules comprise linear template molecules that are generated via bridge amplification and are immobilized to the same location or feature on a support. The first and second template molecules comprise a sequence of interest and at least one universal sequencing primer binding site. The first and second nucleic acid primers can bind to a sequencing primer binding site on the first and second template molecules, respectively.

[0495] In some embodiments, the methods for determining the sequence of one or more nucleic acid template molecules further comprises step (e): dissociating the plurality of multivalent-complexed polymerases and removing the plurality of first mutant DNA polymerases and their bound multivalent molecules, and retaining the plurality of nucleic acid duplexes.

[0496] In some embodiments, the methods for determining the sequence of one or more nucleic acid template molecules further comprises step (f): contacting the plurality of the retained nucleic acid duplexes of step (e) with a plurality of second recombinant mutant DNA polymerases, wherein the contacting is conducted under a condition suitable for binding the plurality of second mutant DNA polymerases to the plurality of the retained nucleic acid duplexes, thereby forming a plurality of second complexed polymerases each comprising a second mutant DNA polymerase bound to a nucleic acid duplex. In some embodiments, the second mutant polymerases comprise an amino acid sequence that is at least 80%, 85%, 90%, 95%, 99% identical, or a higher level sequence identity, to any of SEQ ID NOS: 1-2787 and 2789-2793. In some embodiments, the second mutant polymerases are recombinant polymerases. In some embodiments, the second mutant polymerases include amino acid substitutions that confer exonuclease-minus activity. In some embodiments, the second mutant polymerases exhibit desirable characteristics compared to a polymerase having a corresponding wild type amino acid backbone sequence (e.g., any of SEQ ID NOS:1, 2, 1714 or 2789-2793). For example, the second mutant polymerases exhibit increased thermal stability (Tm). In another example, the second mutant polymerases exhibit increased incorporation rates of nucleotide analogs comprising a chain terminating moiety (e.g., blocking moiety) at the sugar 2′ position and/or at the 3′ sugar position. In yet another example, the second mutant polymerases exhibit increased uracil-tolerance.

[0497] In some embodiments, the plurality of first mutant polymerases of step (a) have an amino acid sequence that is 100% identical to the amino acid sequence as the plurality of the second mutant polymerases of step (f). In some embodiments, the plurality of first mutant polymerases of step (a) have an amino acid sequence that differs from the amino acid sequence of the plurality of the second mutant polymerases of step (f).

[0498] In some embodiments, the methods for determining the sequence of one or more nucleic acid template molecules further comprises step (g): contacting the plurality of second complexed polymerases with a plurality of nucleotides, wherein the contacting is conducted under a condition suitable for binding complementary nucleotides from the plurality of nucleotides to at least two of the second complexed polymerases thereby forming a plurality of nucleotide-complexed polymerases. In some embodiments, the contacting of step (g) is conducted under a condition that is suitable for promoting incorporation of the bound complementary nucleotides into the primers of the nucleotide-complexed polymerases thereby forming a plurality of nucleotide-complexed polymerases. In some embodiments, the incorporating the nucleotide into the 3′ end of the primer in step (g) comprises a primer extension reaction. In some embodiments, the contacting of step (g) is conducted in the presence of at least one cation selected from a group consisting of strontium, barium, sodium, magnesium, potassium, manganese, calcium, lithium, nickel and cobalt. In some embodiments, the contacting of step (g) is conducted in the presence of magnesium and/or manganese. In some embodiments, the plurality of nucleotides comprise native nucleotides (e.g., non-analog nucleotides) or nucleotide analogs. In some embodiments, the plurality of nucleotides comprise a 2′ and/or 3′ chain terminating moiety which is removable or is not removable. In some embodiments, the plurality of nucleotides comprises a plurality of nucleotides labeled with detectable reporter moiety. The detectable reporter moiety comprises a fluorophore. In some embodiments, the fluorophore is attached to the nucleotide base. In some embodiments, the fluorophore is attached to the nucleotide base with a linker which is cleavable/removable from the base or is not removable from the base. In some embodiments, at least one of the nucleotides in the plurality is not labeled with a detectable reporter moiety. In some embodiments, the plurality of nucleotides are non-labeled. In some embodiments, a particular detectable reporter moiety (e.g., fluorophore) that is attached to the nucleotide can correspond to the nucleotide base (e.g., dATP, dGTP, dCTP, dTTP or dUTP) to permit detection and identification of the nucleotide base. In some embodiments, individual labeled nucleotides comprise a fluorophore attached to one of the leaving phosphate groups in the phosphate chain, or the fluorophore can be attached to the nucleotide base with a linker which is cleavable/removable from the base. In some embodiments, when a fluorophore is attached to the nucleotide base, after incorporation of the labeled nucleotides, cleavage of the linker to remove the fluorophore generates an extended strand having at least a portion of the linker remaining which creates a scar. In some embodiments, when the plurality of nucleotides comprise non-labeled nucleotides, incorporation of the non-labeled nucleotides generates an extended strand lacking a scar.

[0499] In some embodiments, the methods for determining the sequence of one or more nucleic acid template molecules further comprise step (h): detecting the complementary nucleotides which are incorporated into the primers of the nucleotide-complexed polymerases. In some embodiments, the plurality of nucleotides are labeled with a detectable reporter moiety to permit detection. In some embodiments, in the methods for determining the sequence of one or more nucleic acid template molecules, the detecting step is omitted.

[0500] In some embodiments, the methods for determining the sequence of one or more nucleic acid template molecules further comprises step (i): identifying the bases of the complementary nucleotides which are incorporated into the primers of the nucleotide-complexed polymerases. In some embodiments, the identification of the incorporated complementary nucleotides in step (i) can be used to confirm the identity of the complementary nucleotides of the multivalent molecules that are bound to the plurality of first complexed polymerases in step (d). In some embodiments, the identifying of step (i) can be used to determine the sequence of the nucleic acid template molecules. In some embodiments, in the methods for determining the sequence of one or more nucleic acid template molecules, the identifying step is omitted.

[0501] In some embodiments, the methods for determining the sequence of one or more nucleic acid template molecules further comprises step (j): removing the chain terminating moiety from the incorporated nucleotide when step (g) is conducted by contacting the plurality of second complexed polymerases with a plurality of nucleotides that comprise at least one nucleotide having a 2′ and/or 3′ chain terminating moiety.

[0502] In some embodiments, the methods for determining the sequence of one or more nucleic acid template molecules further comprises step (k): repeating steps (a)-(j) at least once. In some embodiments, the sequence of the nucleic acid template molecules can be determined by detecting and identifying the multivalent molecules that bind the mutant polymerases but do not incorporate into the 3′ end of the primer at steps (c) and (d). In some embodiments, the sequence of the nucleic acid template molecule can be determined (or confirmed) by detecting and identifying the nucleotide that incorporates into the 3′ end of the primer at steps (h) and (i).

[0503] In some embodiments, in the methods for determining the sequence of one or more nucleic acid template molecules, at least one multivalent molecule in the plurality of multivalent molecules of step (b) comprises: (1) a core; and (2) a plurality of nucleotide arms which comprise (i) a core attachment moiety, (ii) a spacer (e.g., comprising a PEG moiety), (iii) a linker, and (iv) a nucleotide unit, wherein the core is attached to the plurality of nucleotide arms, wherein the spacer is attached to the linker, wherein the linker is attached to the nucleotide unit. In some embodiments, the nucleotide unit comprises a base, sugar and at least one phosphate group, and the linker is attached to the nucleotide unit through the base. In some embodiments, the linker comprises an aliphatic chain or an oligo ethylene glycol chain where both linker chains having 2-6 subunits. In some embodiments, the linker also includes an aromatic moiety.

[0504] In some embodiments, in the methods for determining the sequence of one or more nucleic acid template molecules, individual multivalent molecules in the plurality of multivalent molecules of step (b) comprise a core attached to multiple nucleotide arms, and wherein the multiple nucleotide arms have the same type of nucleotide unit which is selected from a group consisting of dATP, dGTP, dCTP, dTTP and dUTP.

[0505] In some embodiments, in the methods for determining the sequence of one or more nucleic acid template molecules, the nucleotide unit of the at least one multivalent molecule of step (b) comprises an aromatic base, a five carbon sugar (e.g., ribose or deoxyribose), and one or more phosphate groups (e.g., 1-10 phosphate groups). The plurality of multivalent molecules can comprise one type multivalent molecule having one type of nucleotide unit selected from a group consisting of dATP, dGTP, dCTP, dTTP and dUTP. The plurality of multivalent molecules can comprise at a mixture of any combination of two or more types of multivalent molecules, where individual multivalent molecules in the mixture comprise nucleotide units selected from a group consisting of dATP, dGTP, dCTP, dTTP and/or dUTP.

[0506] In some embodiments, in the methods for determining the sequence of one or more nucleic acid template molecules, at least one multivalent molecule in the plurality of multivalent molecules of step (b) comprise a nucleotide unit having a chain of one, two or three phosphorus atoms where the chain is typically attached to the 5′ carbon of the sugar moiety via an ester or phosphoramide linkage. In some embodiments, at least one nucleotide unit is a nucleotide analog having a phosphorus chain in which the phosphorus atoms are linked together with intervening O, S, NH, methylene or ethylene. In some embodiments, the phosphorus atoms in the chain include substituted side groups including O, S or BH₃. In some embodiments, the chain includes phosphate groups substituted with analogs including phosphoramidate, phosphorothioate, phosphordithioate, and O-methylphosphoroamidite groups.

[0507] In some embodiments, in the methods for determining the sequence of one or more nucleic acid template molecules, individual multivalent molecules in the plurality of multivalent molecule of step (b) comprise a core attached to multiple nucleotide arms, and wherein individual nucleotide arms comprise a nucleotide unit having a chain terminating moiety (e.g., blocking moiety) at the sugar 2′ position, at the sugar 3′ position, or at the sugar 2′ and 3′ position.

[0508] In some embodiments, in the methods for determining the sequence of one or more nucleic acid template molecules, at least one multivalent molecule in the plurality of multivalent molecules of step (b) comprises a nucleotide unit comprising a terminator nucleotide analog having a chain terminating moiety (e.g., blocking moiety) at the sugar 2′ position, at the sugar 3′ position, or at the sugar 2′ and 3′ position. In some embodiments, the chain terminating moiety can inhibit polymerase-catalyzed incorporation of a subsequent nucleotide unit or free nucleotide in a nascent strand during a primer extension reaction. In some embodiments, the chain terminating moiety is attached to the 3′ sugar hydroxyl position where the sugar comprises a ribose or deoxyribose sugar moiety. In some embodiments, the chain terminating moiety is removable/cleavable from the 3′ sugar hydroxyl position to generate a nucleotide having a 3′OH sugar group which is extendible with a subsequent nucleotide in a polymerase-catalyzed nucleotide incorporation reaction. In some embodiments, the chain terminating moiety comprises an alkyl group, alkenyl group, alkynyl group, allyl group, aryl group, benzyl group, azide group, amine group, amide group, keto group, isocyanate group, phosphate group, thio group, disulfide group, carbonate group, urea group, or silyl group. In some embodiments, the chain terminating moiety is cleavable/removable from the nucleotide unit, for example by reacting the chain terminating moiety with a chemical agent, pH change, light or heat. In some embodiments, the chain terminating moieties alkyl, alkenyl, alkynyl and allyl are cleavable with tetrakis(triphenylphosphine)palladium(0) (Pd(PPh₃)₄) with piperidine, or with 2,3-Dichloro-5,6-dicyano-1,4-benzo-quinone (DDQ). In some embodiments, the chain terminating moieties aryl and benzyl are cleavable with H2 Pd/C. In some embodiments, the chain terminating moieties amine, amide, keto, isocyanate, phosphate, thio, disulfide are cleavable with phosphine or with a thiol group including beta-mercaptoethanol or dithiothritol (DTT). In some embodiments, the chain terminating moiety carbonate is cleavable with potassium carbonate (K₂CO₃) in MeOH, with triethylamine in pyridine, or with Zn in acetic acid (AcOH). In some embodiments, the chain terminating moieties urea and silyl are cleavable with tetrabutylammonium fluoride, pyridine-HF, with ammonium fluoride, or with triethylamine trihydrofluoride. In some embodiments, the chain terminating moiety may be cleavable/removable with nitrous acid. In some embodiments, a chain terminating moiety may be cleavable/removable using a solution comprising nitrite, such as, for example, a combination of nitrite with an acid such as acetic acid, sulfuric acid, or nitric acid. In some further embodiments, said solution may comprise an organic acid.

[0509] In some embodiments, in the methods for determining the sequence of one or more nucleic acid template molecules, at least one multivalent molecule in the plurality of multivalent molecules of step (b) comprises a nucleotide unit comprising a terminator nucleotide analog having a chain terminating moiety (e.g., blocking moiety) at the sugar 2′ position, at the sugar 3′ position, or at the sugar 2′ and 3′ position. In some embodiments, the chain terminating moiety comprises an azide, azido or azidomethyl group. In some embodiments, the chain terminating moiety comprises a 3′-O-azido or 3′-O-azidomethyl group. In some embodiments, the chain terminating moieties azide, azido and azidomethyl group are cleavable/removable with a phosphine compound. In some embodiments, the phosphine compound comprises a derivatized tri-alkyl phosphine moiety or a derivatized tri-aryl phosphine moiety. In some embodiments, the phosphine compound comprises Tris(2-carboxyethyl)phosphine (TCEP) or bis-sulfo triphenyl phosphine (BS-TPP) or Tri(hydroxyproyl)phosphine (THPP). In some embodiments, the cleaving agent comprises 4-dimethylaminopyridine (4-DMAP). In some embodiments, the chain terminating moiety comprising one or more of a 3′-O-amino group, a 3′-O-aminomethyl group, a 3′-O-methylamino group, or derivatives thereof may be cleaved with nitrous acid, through a mechanism utilizing nitrous acid, or using a solution comprising nitrous acid. In some embodiments, the chain terminating moiety comprising one or more of a 3′-O-amino group, a 3′-O-aminomethyl group, a 3′-O-methylamino group, or derivatives thereof may be cleaved using a solution comprising nitrite. In some embodiments, for example, nitrite may be combined with or contacted with an acid such as acetic acid, sulfuric acid, or nitric acid. In some further embodiments, for example, nitrite may be combined with or contacted with an organic acid such as, for example, formic acid, acetic acid, propionic acid, butyric acid, isobutyric acid, or the like. In some embodiments, the chain terminating moiety comprises a 3′-acetal moiety which can be cleaved with a palladium deblocking reagent (e.g., Pd(0)).

[0510] In some embodiments, in the methods for determining the sequence of one or more nucleic acid template molecules, at least one multivalent molecule in the plurality of multivalent molecules of step (b) comprises a nucleotide unit comprising a chain terminating moiety which is selected from a group consisting of 3′-deoxy nucleotides, 2′,3′-dideoxynucleotides, 3′-methyl, 3′-azido, 3′-azidomethyl, 3′-O-azidoalkyl, 3′-O-ethynyl, 3′-O-aminoalkyl, 3′-O-fluoroalkyl, 3′-fluoromethyl, 3′-difluoromethyl, 3′-trifluoromethyl, 3′-sulfonyl, 3′-malonyl, 3′-amino, 3′-O-amino, 3′-sulfhydral, 3′-aminomethyl, 3′-ethyl, 3′butyl, 3′-tert butyl, 3′-Fluorenylmethyloxycarbonyl, 3′ tert-Butyloxycarbonyl, 3′-O-alkyl hydroxylamino group, 3′-phosphorothioate, 3′-O-benzyl, and 3′-acetal moiety, or derivatives thereof.

[0511] In some embodiments, in the methods for determining the sequence of one or more nucleic acid template molecules, at least one multivalent molecule in the plurality of multivalent molecules of step (b) comprises a core attached to multiple nucleotide arms, wherein the nucleotide arms comprise a spacer, linker and nucleotide unit, and wherein the core, linker and/or nucleotide unit is labeled with detectable reporter moiety. In some embodiments, the detectable reporter moiety comprises a fluorophore. In some embodiments, a particular detectable reporter moiety (e.g., fluorophore) that is attached to the multivalent molecule can correspond to the base (e.g., dATP, dGTP, dCTP, dTTP or dUTP) of the nucleotide unit to permit detection and identification of the nucleotide base.

[0512] In some embodiments, in the methods for determining the sequence of one or more nucleic acid template molecules, at least one nucleotide arm of a multivalent molecule in the plurality of multivalent molecules of step (b) has a nucleotide unit that is attached to a detectable reporter moiety. In some embodiments, the detectable reporter moiety is attached to the nucleotide base. In some embodiments, the detectable reporter moiety comprises a fluorophore. In some embodiments, a particular detectable reporter moiety (e.g., fluorophore) that is attached to the multivalent molecule can correspond to the base (e.g., dATP, dGTP, dCTP, dTTP or dUTP) of the nucleotide unit to permit detection and identification of the nucleotide base.

[0513] In some embodiments, in the methods for determining the sequence of one or more nucleic acid template molecules, the core of a multivalent molecule of step (b) comprises an avidin-like moiety and the core attachment moiety comprises biotin. In some embodiments, the core comprises an streptavidin-type or avidin-type moiety which includes an avidin protein, as well as any derivatives, analogs and other non-native forms of avidin that can bind to at least one biotin moiety. Other forms of avidin moieties include native and recombinant avidin and streptavidin as well as derivatized molecules, e.g. non-glycosylated avidin and truncated streptavidins. For example, avidin moiety includes de-glycosylated forms of avidin, bacterial streptavidin produced by Streptomyces (e.g., Streptomyces avidinii), as well as derivatized forms, for example, N-acyl avidins, e.g., N-acetyl, N-phthalyl and N-succinyl avidin, and the commercially-available products ExtrAvidin™, Captavidin™, Neutravidin™, and Neutralite Avidin™.

[0514] In some embodiments, in the methods for determining the sequence of one or more nucleic acid template molecules, the each of the steps (a)-(j) are conducted at a temperature which is selected from a temperature range of about 25-90° C. In some embodiments, the contacting of steps (a) and (b) are conducted at a constant temperature which is selected from a temperature range of about 25-90° C. (e.g., isothermal temperature). In some embodiments, the detecting and identifying of steps (c) and (d) are conducted at a constant temperature which is selected from a temperature range of about 25-90° C. (e.g., isothermal temperature). In some embodiments, the dissociating of step (e) is conducted at a constant temperature which is selected from a temperature range of about 25-90° C. (e.g., isothermal temperature). In some embodiments, the contacting of steps (f) and (g) are conducted at a constant temperature which is selected from a temperature range of about 25-90° C. (e.g., isothermal temperature). In some embodiments, the detecting and identifying of steps (h) and (i) are conducted at a constant temperature which is selected from a temperature range of about 25-90° C. (e.g., isothermal temperature). In some embodiments, the removing of step U) is conducted at a constant temperature which is selected from a temperature range of about 25-90° C. (e.g., isothermal temperature). In some embodiments, the steps (a)-(j) are conducted at a constant temperature which is selected from a temperature range of about 25-90° C. (e.g., isothermal temperature).

[0515] In some embodiments, a sequencing reaction or a binding assay can be conducted by binding a plurality of fluorescently-labeled multivalent molecules to a mutant polymerase, and the resulting binding complexes can exhibit reduced error rate, reduced phasing and/or improved signal intensity compared to conducting the same sequencing reaction or assay with a corresponding wild type polymerase or a reference polymerase.

[0516] In some embodiments, the mutant polymerases used to conduct the sequencing reaction or assay comprise an amino acid sequence that is at least 99%, at least 98%, at least 97%, at least 95%, at least 90% at least 85%, at least 80%, at least 75%, at least 70% identical to any of SEQ ID NOS: 1-1713 (e.g., RLF 89458.1 or RLF 78286.1 backbone sequences).

[0517] In some embodiments, the mutant polymerases used to conduct the sequencing reaction or assay comprise an amino acid sequence that is at least 99%, at least 98%, at least 97%, at least 95%, at least 90% at least 85%, at least 80%, at least 75%, at least 70% identical to any of SEQ ID NOS: 1714-2787 (e.g., NOZ 58130 backbone sequence).

[0518] In some embodiments, the mutant polymerases used to conduct the sequencing reaction or assay comprise an amino acid sequence that is at least 99%, at least 98%, at least 97%, at least 95%, at least 90% at least 85%, at least 80%, at least 75%, at least 70% identical to SEQ ID NO: 2789 (e.g., RMF 90817 backbone sequence).

[0519] In some embodiments, the mutant polymerases used to conduct the sequencing reaction or assay comprise an amino acid sequence that is at least 99%, at least 98%, at least 97%, at least 95%, at least 90% at least 85%, at least 80%, at least 75%, at least 70% identical to SEQ ID NO: 2790 (e.g., MBC 7218772 backbone sequence).

[0520] In some embodiments, the mutant polymerases used to conduct the sequencing reaction or assay comprise an amino acid sequence that is at least 99%, at least 98%, at least 97%, at least 95%, at least 90% at least 85%, at least 80%, at least 75%, at least 70% identical to SEQ ID NO: 2791 (e.g., WP 175059460 backbone sequence).

[0521] In some embodiments, the mutant polymerases used to conduct the sequencing reaction or assay comprise an amino acid sequence that is at least 99%, at least 98%, at least 97%, at least 95%, at least 90% at least 85%, at least 80%, at least 75%, at least 70% identical to SEQ ID NO: 2792 (e.g., KUO 42443 backbone sequence).

[0522] In some embodiments, the mutant polymerases used to conduct the sequencing reaction or assay comprise an amino acid sequence that is at least 99%, at least 98%, at least 97%, at least 95%, at least 90% at least 85%, at least 80%, at least 75%, at least 70% identical to SEQ ID NO: 2793 (e.g., NOZ 77387 backbone sequence).

[0523] In some embodiments, in the methods for determining the sequence of one or more nucleic acid template molecules, at least one nucleotide in the plurality of nucleotides of step (g) comprise a base, sugar and at least one phosphate group. In some embodiments, at least one nucleotide in the plurality comprises an aromatic base, a five carbon sugar (e.g., ribose or deoxyribose), and one or more phosphate groups (e.g., 1-10 phosphate groups). The plurality of nucleotides can comprise at least one type of nucleotide selected from a group consisting of dATP, dGTP, dCTP, dTTP and dUTP. The plurality of nucleotides can comprise at a mixture of any combination of two or more types of nucleotides selected from a group consisting of dATP, dGTP, dCTP, dTTP and/or dUTP. In some embodiments, at least one nucleotide in the plurality is not a nucleotide analog. In some embodiments, at least one nucleotide in the plurality comprises a nucleotide analog.

[0524] In some embodiments, in the methods for determining the sequence of one or more nucleic acid template molecules, at least one nucleotide in the plurality of nucleotides of step (g) comprise a chain of one, two or three phosphorus atoms where the chain is typically attached to the 5′ carbon of the sugar moiety via an ester or phosphoramide linkage. In some embodiments, at least one nucleotide in the plurality is an analog having a phosphorus chain in which the phosphorus atoms are linked together with intervening O, S, NH, methylene or ethylene. In some embodiments, the phosphorus atoms in the chain include substituted side groups including O, S or BH₃. In some embodiments, the chain includes phosphate groups substituted with analogs including phosphoramidate, phosphorothioate, phosphordithioate, and O-methylphosphoroamidite groups.

[0525] In some embodiments, in the methods for determining the sequence of one or more nucleic acid template molecules, at least one nucleotide in the plurality of nucleotides of step (g) comprises a terminator nucleotide analog having a chain terminating moiety (e.g., blocking moiety) at the sugar 2′ position, at the sugar 3′ position, or at the sugar 2′ and 3′ position. In some embodiments, the chain terminating moiety can inhibit polymerase-catalyzed incorporation of a subsequent nucleotide unit or free nucleotide in a nascent strand during a primer extension reaction. In some embodiments, the chain terminating moiety is attached to the 3′ sugar hydroxyl position where the sugar comprises a ribose or deoxyribose sugar moiety. In some embodiments, the chain terminating moiety is removable/cleavable from the 3′ sugar hydroxyl position to generate a nucleotide having a 3′OH sugar group which is extendible with a subsequent nucleotide in a polymerase-catalyzed nucleotide incorporation reaction. In some embodiments, the chain terminating moiety comprises an alkyl group, alkenyl group, alkynyl group, allyl group, aryl group, benzyl group, azide group, amine group, amide group, keto group, isocyanate group, phosphate group, thio group, disulfide group, carbonate group, urea group, silyl or acetal group. In some embodiments, the chain terminating moiety is cleavable/removable from the nucleotide, for example by reacting the chain terminating moiety with a chemical agent, pH change, light or heat. In some embodiments, the chain terminating moieties alkyl, alkenyl, alkynyl and allyl are cleavable with tetrakis(triphenylphosphine)palladium(0) (Pd(PPh₃)₄) with piperidine, or with 2,3-Dichloro-5,6-dicyano-1,4-benzo-quinone (DDQ). In some embodiments, the chain terminating moieties aryl and benzyl are cleavable with H2 Pd/C. In some embodiments, the chain terminating moieties amine, amide, keto, isocyanate, phosphate, thio, disulfide are cleavable with phosphine or with a thiol group including beta-mercaptoethanol or dithiothritol (DTT). In some embodiments, the chain terminating moiety carbonate is cleavable with potassium carbonate (K₂CO₃) in MeOH, with triethylamine in pyridine, or with Zn in acetic acid (AcOH). In some embodiments, the chain terminating moieties urea and silyl are cleavable with tetrabutylammonium fluoride, pyridine-HF, with ammonium fluoride, or with triethylamine trihydrofluoride. In some embodiments, the chain terminating moiety may be cleavable/removable with nitrous acid. In some embodiments, a chain terminating moiety may be cleavable/removable using a solution comprising nitrite, such as, for example, a combination of nitrite with an acid such as acetic acid, sulfuric acid, or nitric acid. In some further embodiments, said solution may comprise an organic acid.

[0526] In some embodiments, in the methods for determining the sequence of one or more nucleic acid template molecules, at least one nucleotide in the plurality of nucleotides of step (g) comprises a terminator nucleotide analog having a chain terminating moiety (e.g., blocking moiety) at the sugar 2′ position, at the sugar 3′ position, or at the sugar 2′ and 3′ position. In some embodiments, the chain terminating moiety comprises an azide, azido or azidomethyl group. In some embodiments, the chain terminating moiety comprises a 3′-O-azido or 3′-O-azidomethyl group. In some embodiments, the chain terminating moieties azide, azido and azidomethyl group are cleavable/removable with a phosphine compound. In some embodiments, the phosphine compound comprises a derivatized tri-alkyl phosphine moiety or a derivatized tri-aryl phosphine moiety. In some embodiments, the phosphine compound comprises Tris(2-carboxyethyl)phosphine (TCEP) or bis-sulfo triphenyl phosphine (BS-TPP) or Tri(hydroxyproyl)phosphine (THPP). In some embodiments, the cleaving agent comprises 4-dimethylaminopyridine (4-DMAP). In some embodiments, the chain terminating moiety comprising one or more of a 3′-O-amino group, a 3′-O-aminomethyl group, a 3′-O-methylamino group, or derivatives thereof may be cleaved with nitrous acid, through a mechanism utilizing nitrous acid, or using a solution comprising nitrous acid. In some embodiments, the chain terminating moiety comprising one or more of a 3′-O-amino group, a 3′-O-aminomethyl group, a 3′-O-methylamino group, or derivatives thereof may be cleaved using a solution comprising nitrite. In some embodiments, for example, nitrite may be combined with or contacted with an acid such as acetic acid, sulfuric acid, or nitric acid. In some embodiments, the chain terminating moiety comprises a 3′-acetal moiety which can be cleaved with a palladium deblocking reagent (e.g., Pd(0)). In some further embodiments, for example, nitrite may be combined with or contacted with an organic acid such as, for example, formic acid, acetic acid, propionic acid, butyric acid, isobutyric acid, or the like.

[0527] In some embodiments, in the methods for determining the sequence of one or more nucleic acid template molecules, at least one nucleotide in the plurality of nucleotides of step (g) comprises a chain terminating moiety which is selected from a group consisting of 3′-deoxy nucleotides, 2′,3′-dideoxynucleotides, 3′-methyl, 3′-azido, 3′-azidomethyl, 3′-O-azidoalkyl, 3′-O-ethynyl, 3′-O-aminoalkyl, 3′-O-fluoroalkyl, 3′-fluoromethyl, 3′-difluoromethyl, 3′-trifluoromethyl, 3′-sulfonyl, 3′-malonyl, 3′-amino, 3′-O-amino, 3′-sulfhydral, 3′-aminomethyl, 3′-ethyl, 3′butyl, 3′-tert butyl, 3′-Fluorenylmethyloxycarbonyl, 3′ tert-Butyloxycarbonyl, 3′-O-alkyl hydroxylamino group, 3′-phosphorothioate, 3′-O-benzyl, and 3′-acetal moiety, or derivatives thereof.

[0528] In some embodiments, in the methods for determining the sequence of one or more nucleic acid template molecules, at least one nucleotide in the plurality of nucleotides of step (g) comprises detectable reporter moiety (e.g., at least one labeled nucleotide). The detectable reporter moiety comprises a fluorophore. In some embodiments, the fluorophore is attached to the nucleotide base. In some embodiments, the fluorophore is attached to the nucleotide base with a linker which is cleavable/removable from the base. In some embodiments, at least one of the nucleotides in the plurality is not labeled with a detectable reporter moiety. In some embodiments, a particular detectable reporter moiety (e.g., fluorophore) that is attached to the nucleotide can correspond to the nucleotide base (e.g., dATP, dGTP, dCTP, dTTP or dUTP) to permit detection and identification of the nucleotide base.

[0529] In some embodiments, in the methods for determining the sequence of one or more nucleic acid template molecules, at least one nucleotide in the plurality of nucleotides of step (g) comprises a cleavable linker on the base which comprises a cleavable (e.g., removable) moiety comprising an alkyl group, alkenyl group, alkynyl group, allyl group, aryl group, benzyl group, azide group, amine group, amide group, keto group, isocyanate group, phosphate group, thio group, disulfide group, carbonate group, urea group, or silyl group. In some embodiments, the cleavable linker on the base is cleavable/removable from the base by reacting the cleavable moiety with a chemical agent, pH change, light or heat. In some embodiments, the cleavable moieties alkyl, alkenyl, alkynyl and allyl are cleavable with tetrakis(triphenylphosphine)palladium(0) (Pd(PPh₃)₄) with piperidine, or with 2,3-Dichloro-5,6-dicyano-1,4-benzo-quinone (DDQ). In some embodiments, the cleavable moieties aryl and benzyl are cleavable with H2 Pd/C. In some embodiments, the cleavable moieties amine, amide, keto, isocyanate, phosphate, thio, disulfide are cleavable with phosphine or with a thiol group including beta-mercaptoethanol or dithiothritol (DTT). In some embodiments, the cleavable moiety carbonate is cleavable with potassium carbonate (K₂CO₃) in MeOH, with triethylamine in pyridine, or with Zn in acetic acid (AcOH). In some embodiments, the cleavable moieties urea and silyl are cleavable with tetrabutylammonium fluoride, pyridine-HF, with ammonium fluoride, or with triethylamine trihydrofluoride.

[0530] In some embodiments, in the methods for determining the sequence of one or more nucleic acid template molecules, at least one nucleotide in the plurality of nucleotides of step (g) comprises a cleavable linker on the base which comprises cleavable moiety including an azide, azido or azidomethyl group. In some embodiments, the cleavable moieties azide, azido and azidomethyl group are cleavable/removable with a phosphine compound. In some embodiments, the phosphine compound comprises a derivatized tri-alkyl phosphine moiety or a derivatized tri-aryl phosphine moiety. In some embodiments, the phosphine compound comprises Tris(2-carboxyethyl)phosphine (TCEP) or bis-sulfo triphenyl phosphine (BS-TPP) or Tri(hydroxyproyl)phosphine (THPP). In some embodiments, the cleaving agent comprises 4-dimethylaminopyridine (4-DMAP).

[0531] In some embodiments, in the methods for determining the sequence of one or more nucleic acid template molecules, at least one nucleotide in the plurality of nucleotides of step (g) comprises a chain terminating moiety on the sugar 2′ and/or sugar 3′ position. In some embodiments, the chain terminating moiety on the sugar and the cleavable linker on the base have the same or different cleavable moieties. In some embodiments, the chain terminating moiety (e.g., at the sugar 2′ and/or sugar 3′ position) and the detectable reporter moiety linked to the base are chemically cleavable/removable with the same chemical agent. In some embodiments, the chain terminating moiety (e.g., at the sugar 2′ and/or sugar 3′ position) and the detectable reporter moiety linked to the base are chemically cleavable/removable with different chemical agents.

[0532] In some embodiments, in the methods for sequencing, the binding complex comprises a mutant polymerase, a nucleic acid template molecule duplexed with a primer, and a nucleotide reagent. In some embodiments, in the methods for sequencing which comprises forming a binding complex, where the binding complex comprises (i) a mutant polymerase, a nucleic acid template molecule duplexed with a primer, and a nucleotide, or the binding complex comprises (ii) a mutant polymerase, a nucleic acid template molecule duplexed with a primer, and a nucleotide unit of a multivalent molecule. In some embodiments, the mutant polymerase comprises an amino acid sequence that is at least 80%, 85%, 90%, 95%, 99% identical, or a higher level sequence identity, to any of SEQ ID NOS: 1-2787 and 2789-2793. In some embodiments, the binding complex has a persistence time of greater than about 0.1, 0.2, 0.3, 0.4, 0.5, 0.6, 0.7, 0.8, 0.9 or 1 second. In some embodiments, the binding complex has a persistence time of 1-30 seconds. The binding complex has a persistence time of greater than about 0.1-0.25 seconds, or about 0.25-0.5 seconds, or about 0.5-0.75 seconds, or about 0.75-1 second, or about 1-2 seconds, or about 2-3 seconds, or about 3-4 second, or about 4-5 seconds, or about 5-10 seconds, or about 10-30 seconds and/or wherein the method is or may be carried out at a temperature of at or above 15° C., at or above 20° C., at or above 25° C., at or above 35° C., at or above 37° C., at or above 42° C. at or above 55° C. at or above 60° C., or at or above 72° C., or at or above 80° C., or within a range defined by any of the foregoing. In some embodiments, the binding complexes may have a persistence time of greater than Is, greater than 2 s, greater than 3 s, greater than 5 s, greater than 10 s, greater than 15 s, greater than 20 s, greater than 30 s, greater than 60 s, greater than 120 s, greater than 360 s, greater than 3600 s, or more, or for a time lying within a range defined by any two or more of these values. The binding complex (e.g., ternary complex) remains stable until subjected to a condition that causes dissociation of interactions between any of the polymerase, template molecule, primer and/or the nucleotide unit or the nucleotide. For example, a dissociating condition comprises contacting the binding complex with any one or any combination of a detergent, EDTA and/or water. In some embodiments, the present disclosure provides said method wherein the binding complex is deposited on, attached to, or hybridized to, a surface showing a contrast to noise ratio in the detecting step of greater than 20. In some embodiments, the present disclosure provides said method wherein the contacting is performed under a condition that stabilizes the binding complex when the nucleotide or nucleotide unit is complementary to a next base of the template nucleic acid, and destabilizes the binding complex when the nucleotide or nucleotide unit is not complementary to the next base of the template nucleic acid.

[0533] In some embodiments, in any of the methods for determining the sequence of one or more nucleic acid template molecules, the support comprises a planar or non-planar support. The support can be solid or semi-solid. In some embodiments, the support can be porous, semi-porous or non-porous. In some embodiments, the surface of the support can be coated with one or more compounds to produce a passivated layer on the support. In some embodiments, the passivated layer forms a porous or semi-porous layer. In some embodiments, the nucleic acid primer, template and/or polymerase, can be attached to the passivated layer to immobilize the primer, template and/or polymerase to the support. In some embodiments, the support comprises a low non-specific binding surface that enable improved nucleic acid hybridization and amplification performance on the support. In general, the support may comprise one or more layers of a covalently or non-covalently attached low-binding, chemical modification layers, e.g., silane layers, polymer films, and one or more covalently or non-covalently attached oligonucleotides that can be used for immobilizing a plurality of nucleic acid template molecules to the support (e.g., FIG. 1). In some embodiments, the support can comprise a functionalized polymer coating layer covalently bound at least to a portion of the support via a chemical group on the support, a primer grafted to the functionalized polymer coating, and a water-soluble protective coating on the primer and the functionalized polymer coating. In some embodiments, the functionalized polymer coating comprises a poly(N-(5-azidoacetamidylpentyl)acrylamide-co-acrylamide (PAZAM). In some embodiments, the support comprises a surface coating having at least one hydrophilic polymer coating layer and at least one layer of a plurality of oligonucleotides. The hydrophilic polymer coating layer can comprise polyethylene glycol (PEG). The hydrophilic polymer coating layer can comprise branched PEG having at least 4 branches. In some embodiments, the low non-specific binding coating has a degree of hydrophilicity which can be measured as a water contact angle, where the water contact angle is no more than 45 degrees. In some embodiments, the density of the plurality of first complexed polymerases immobilized to the support or immobilized to the coating on the support is about 10²-10⁶ per mm², or about 10⁶-10⁹ per mm², or about 10⁹-10¹² per mm². In some embodiments, the plurality of first complexed polymerases is immobilized to the support or immobilized to the coating on the support at pre-determined sites on the support (or the coating on the support), or immobilized to the coating on the support at random sites on the support (or the coating on the support).

[0534] In some embodiments, the support is passivated with a low non-specific binding coating. The surface coatings described herein exhibit very low non-specific binding to reagents typically used for nucleic acid capture, amplification and sequencing workflows, such as dyes, nucleotides, enzymes, and nucleic acid primers. The surface coatings exhibit low background fluorescence signals or high contrast-to-noise (CNR) ratios compared to conventional surface coatings.

[0535] The low non-specific binding coating comprises one layer or multiple layers. In some embodiments, the plurality of surface primers are immobilized to the low non-specific binding coating. In some embodiments, at least one surface primer is embedded within the low non-specific binding coating. The low non-specific binding coating enables improved nucleic acid hybridization and amplification performance. In general, the supports comprise a substrate (or support structure), one or more layers of a covalently or non-covalently attached low-binding, chemical modification layers, e.g., silane layers, polymer films, and one or more covalently or non-covalently attached surface primers that can be used for tethering single-stranded nucleic acid library molecules to the support (e.g., FIG. 1). In some embodiments, the formulation of the coating, e.g., the chemical composition of one or more layers, the coupling chemistry used to cross-link the one or more layers to the support and/or to each other, and the total number of layers, may be varied such that non-specific binding of proteins, nucleic acid molecules, and other hybridization and amplification reaction components to the coating is minimized or reduced relative to a comparable monolayer. The formulation of the coating described herein may be varied such that non-specific hybridization on the coating is minimized or reduced relative to a comparable monolayer. The formulation of the coating may be varied such that non-specific amplification on the coating is minimized or reduced relative to a comparable monolayer. The formulation of the coating may be varied such that specific amplification rates and/or yields on the coating are maximized. Amplification levels suitable for detection are achieved in no more than 2, 3, 4, 5, 6, 7, 8, 9, 10, 15, 20, 25, 30, or more than 30 amplification cycles in some cases disclosed herein.

[0536] The support structure that comprises the one or more chemically-modified layers, e.g., layers of a low non-specific binding polymer, may be independent or integrated into another structure or assembly. For example, in some embodiments, the support structure may comprise one or more surfaces within an integrated or assembled microfluidic flow cell. The support structure may comprise one or more surfaces within a microplate format, e.g., the bottom surface of the wells in a microplate. In some embodiments, the support structure comprises the interior surface (such as the lumen surface) of a capillary. In some embodiments, the support structure comprises the interior surface (such as the lumen surface) of a capillary etched into a planar chip.

[0537] The attachment chemistry used to graft a first chemically-modified layer to the surface of the support will generally be dependent on both the material from which the surface is fabricated and the chemical nature of the layer. In some embodiments, the first layer may be covalently attached to the surface. In some embodiments, the first layer may be non-covalently attached, e.g., adsorbed to the support through non-covalent interactions such as electrostatic interactions, hydrogen bonding, or van der Waals interactions between the support and the molecular components of the first layer. In either case, the support may be treated prior to attachment or deposition of the first layer. Any of a variety of surface preparation techniques known to those of skill in the art may be used to clean or treat the surface. For example, glass or silicon surfaces may be acid-washed using a Piranha solution (a mixture of sulfuric acid (H₂SO₄) and hydrogen peroxide (H₂O₂)), base treatment in KOH and NaOH, and/or cleaned using an oxygen plasma treatment method.

[0538] Silane chemistries constitute non-limiting approaches for covalently modifying the silanol groups on glass or silicon surfaces to attach more reactive functional groups (e.g., amines or carboxyl groups), which may then be used in coupling linker molecules (e.g., linear hydrocarbon molecules of various lengths, such as C6, C12, C18 hydrocarbons, or linear polyethylene glycol (PEG) molecules) or layer molecules (e.g., branched PEG molecules or other polymers) to the surface. Examples of suitable silanes that may be used in creating any of the disclosed low binding coatings include, but are not limited to, (3-Aminopropyl) trimethoxysilane (APTMS), (3-Aminopropyl) triethoxysilane (APTES), any of a variety of PEG-silanes (e.g., comprising molecular weights of 1K, 2K, 5K, 10K, 20K, etc.), amino-PEG silane (i.e., comprising a free amino functional group), maleimide-PEG silane, biotin-PEG silane, and the like.

[0539] Any of a variety of molecules known to those of skill in the art including, but not limited to, amino acids, peptides, nucleotides, oligonucleotides, other monomers or polymers, or combinations thereof may be used in creating the one or more chemically-modified layers on the support, where the choice of components used may be varied to alter one or more properties of the layers, e.g., the surface density of functional groups and/or tethered oligonucleotide primers, the hydrophilicity/hydrophobicity of the layers, or the three three-dimensional nature (i.e., “thickness”) of the layer. Examples of polymers that may be used to create one or more layers of low non-specific binding material in any of the disclosed coatings include, but are not limited to, polyethylene glycol (PEG) of various molecular weights and branching structures, streptavidin, polyacrylamide, polyester, dextran, poly-lysine, and poly-lysine copolymers, or any combination thereof. Examples of conjugation chemistries that may be used to graft one or more layers of material (e.g. polymer layers) to the surface and/or to cross-link the layers to each other include, but are not limited to, biotin-streptavidin interactions (or variations thereof), his tag-Ni/NTA conjugation chemistries, methoxy ether conjugation chemistries, carboxylate conjugation chemistries, amine conjugation chemistries, NHS esters, maleimides, thiol, epoxy, azide, hydrazide, alkyne, isocyanate, and silane.

[0540] The low non-specific binding surface coating may be applied uniformly across the support. Alternatively, the surface coating may be patterned, such that the chemical modification layers are confined to one or more discrete regions of the support. For example, the coating may be patterned using photolithographic techniques to create an ordered array or random pattern of chemically-modified regions on the support. Alternately or in combination, the coating may be patterned using, e.g., contact printing and/or ink-jet printing techniques. In some embodiments, an ordered array or random pattern of chemically-modified regions may comprise at least 1, 5, 10, 20, 30, 40, 50, 60, 70, 80, 90, 100, 200, 300, 400, 500, 600, 700, 800, 900, 1000, 2000, 3000, 4000, 5000, 6000, 7000, 8000, 9000, or 10,000 or more discrete regions.

[0541] In some embodiments, the low nonspecific binding coatings comprise hydrophilic polymers that are non-specifically adsorbed or covalently grafted to the support. Typically, passivation is performed utilizing poly(ethylene glycol) (PEG, also known as polyethylene oxide (PEO) or polyoxyethylene) or other hydrophilic polymers with different molecular weights and end groups that are linked to a support using, for example, silane chemistry. The end groups distal from the surface can include, but are not limited to, biotin, methoxy ether, carboxylate, amine, NHS ester, maleimide, and bis-silane. In some embodiments, two or more layers of a hydrophilic polymer, e.g., a linear polymer, branched polymer, or multi-branched polymer, may be deposited on the surface. In some embodiments, two or more layers may be covalently coupled to each other or internally cross-linked to improve the stability of the resulting coating. In some embodiments, surface primers with different nucleotide sequences and/or base modifications (or other biomolecules, e.g., enzymes or antibodies) may be tethered to the resulting layer at various surface densities. In some embodiments, for example, both surface functional group density and surface primer concentration may be varied to attain a desired surface primer density range. Additionally, surface primer density can be controlled by diluting the surface primers with other molecules that carry the same functional group. For example, amine-labeled surface primers can be diluted with amine-labeled polyethylene glycol in a reaction with an NHS-ester coated surface to reduce the final primer density. Surface primers with different lengths of linker between the hybridization region and the surface attachment functional group can also be applied to control surface density. Example of suitable linkers include poly-T and poly-A strands at the 5′ end of the primer (e.g., 0 to 20 bases), PEG linkers (e.g., 3 to 20 monomer units), and carbon-chain (e.g., C6, C12, C18, etc.). To measure the primer density, fluorescently-labeled primers may be tethered to the surface and a fluorescence reading then compared with that for a dye solution of known concentration.

[0542] In some embodiments, the low nonspecific binding coatings comprise a functionalized polymer coating layer covalently bound at least to a portion of the support via a chemical group on the support, a primer grafted to the functionalized polymer coating, and a water-soluble protective coating on the primer and the functionalized polymer coating. In some embodiments, the functionalized polymer coating comprises a poly(N-(5-azidoacetamidylpentyl)acrylamide-co-acrylamide (PAZAM).

[0543] In order to scale primer surface density and add additional dimensionality to hydrophilic or amphoteric coatings, supports comprising multi-layer coatings of PEG and other hydrophilic polymers have been developed. By using hydrophilic and amphoteric surface layering approaches that include, but are not limited to, the polymer/co-polymer materials described below, it is possible to increase primer loading density on the support significantly. Traditional PEG coating approaches use monolayer primer deposition, which have been generally reported for single molecule applications, but do not yield high copy numbers for nucleic acid amplification applications. As described herein “layering” can be accomplished using traditional crosslinking approaches with any compatible polymer or monomer subunits such that a surface comprising two or more highly crosslinked layers can be built sequentially. Examples of suitable polymers include, but are not limited to, streptavidin, poly acrylamide, polyester, dextran, poly-lysine, and copolymers of poly-lysine and PEG. In some embodiments, the different layers may be attached to each other through any of a variety of conjugation reactions including, but not limited to, biotin-streptavidin binding, azide-alkyne click reaction, amine-NHS ester reaction, thiol-maleimide reaction, and ionic interactions between positively charged polymer and negatively charged polymer. In some embodiments, high primer density materials may be constructed in solution and subsequently layered onto the surface in multiple steps.

[0544] Examples of materials from which the support structure may be fabricated include, but are not limited to, glass, fused-silica, silicon, a polymer (e.g., polystyrene (PS), macroporous polystyrene (MPPS), polymethylmethacrylate (PMMA), polycarbonate (PC), polypropylene (PP), polyethylene (PE), high density polyethylene (HDPE), cyclic olefin polymers (COP), cyclic olefin copolymers (COC), polyethylene terephthalate (PET)), or any combination thereof. Various compositions of both glass and plastic support structures are contemplated.

[0545] The support structure may be rendered in any of a variety of geometries and dimensions known to those of skill in the art, and may comprise any of a variety of materials known to those of skill in the art. For example, the support structure may be locally planar (e.g., comprising a microscope slide or the surface of a microscope slide). Globally, the support structure may be cylindrical (e.g., comprising a capillary or the interior surface of a capillary), spherical (e.g., comprising the outer surface of a non-porous bead), or irregular (e.g., comprising the outer surface of an irregularly-shaped, non-porous bead or particle). In some embodiments, the surface of the support structure used for nucleic acid hybridization and amplification may be a solid, non-porous surface. In some embodiments, the surface of the support structure used for nucleic acid hybridization and amplification may be porous, such that the coatings described herein penetrate the porous surface, and nucleic acid hybridization and amplification reactions performed thereon may occur within the pores.

[0546] The support structure that comprises the one or more chemically-modified layers, e.g., layers of a low non-specific binding polymer, may be independent or integrated into another structure or assembly. For example, the support structure may comprise one or more surfaces within an integrated or assembled microfluidic flow cell. The support structure may comprise one or more surfaces within a microplate format, e.g., the bottom surface of the wells in a microplate. In some embodiments, the support structure comprises the interior surface (such as the lumen surface) of a capillary. In some embodiments the support structure comprises the interior surface (such as the lumen surface) of a capillary etched into a planar chip.

[0547] As noted, the low non-specific binding supports of the present disclosure exhibit reduced non-specific binding of proteins, nucleic acids, and other components of the hybridization and/or amplification formulation used for solid-phase nucleic acid amplification. The degree of non-specific binding exhibited by a given support surface may be assessed either qualitatively or quantitatively. For example, exposure of the surface to fluorescent dyes (e.g., cyanins such as Cy3, or Cy5, etc., fluoresceins, coumarins, rhodamines, etc. or other dyes disclosed herein), fluorescently-labeled nucleotides, fluorescently-labeled oligonucleotides, and/or fluorescently-labeled proteins (e.g. polymerases) under a standardized set of conditions, followed by a specified rinse protocol and fluorescence imaging may be used as a qualitative tool for comparison of non-specific binding on supports comprising different surface formulations. In some embodiments, exposure of the surface to fluorescent dyes, fluorescently-labeled nucleotides, fluorescently-labeled oligonucleotides, and/or fluorescently-labeled proteins (e.g. polymerases) under a standardized set of conditions, followed by a specified rinse protocol and fluorescence imaging may be used as a quantitative tool for comparison of non-specific binding on supports comprising different surface formulations-provided that care has been taken to ensure that the fluorescence imaging is performed under conditions where fluorescence signal is linearly related (or related in a predictable manner) to the number of fluorophores on the support surface (e.g., under conditions where signal saturation and/or self-quenching of the fluorophore is not an issue) and suitable calibration standards are used. In some embodiments, other techniques known to those of skill in the art, for example, radioisotope labeling and counting methods may be used for quantitative assessment of the degree to which non-specific binding is exhibited by the different support surface formulations of the present disclosure.

[0548] Some surfaces disclosed herein exhibit a ratio of specific to nonspecific binding of a fluorophore such as Cy3 of at least 2, 3, 4, 5, 6, 7, 8, 9, 10, 11, 12, 13, 14, 15, 16, 17, 18, 19, 20, 25, 30, 35, 40, 50, 75, 100, or greater than 100, or any intermediate value spanned by the range herein. Some surfaces disclosed herein exhibit a ratio of specific to nonspecific fluorescence of a fluorophore such as Cy3 of at least 2, 3, 4, 5, 6, 7, 8, 9, 10, 11, 12, 13, 14, 15, 16, 17, 18, 19, 20, 25, 30, 35, 40, 50, 75, 100, or greater than 100, or any intermediate value spanned by the range herein.

[0549] The degree of non-specific binding exhibited by the disclosed low-binding supports may be assessed using a standardized protocol for contacting the surface with a labeled protein (e.g., bovine serum albumin (BSA), streptavidin, a DNA polymerase, a reverse transcriptase, a helicase, a single-stranded binding protein (SSB), etc., or any combination thereof), a labeled nucleotide, a labeled oligonucleotide, etc., under a standardized set of incubation and rinse conditions, followed be detection of the amount of label remaining on the surface and comparison of the signal resulting therefrom to an appropriate calibration standard. In some embodiments, the label may comprise a fluorescent label. In some embodiments, the label may comprise a radioisotope. In some embodiments, the label may comprise any other detectable label known to one of skill in the art. In some embodiments, the degree of non-specific binding exhibited by a given support surface formulation may thus be assessed in terms of the number of non-specifically bound protein molecules (or nucleic acid molecules or other molecules) per unit area. In some embodiments, the low-binding supports of the present disclosure may exhibit non-specific protein binding (or non-specific binding of other specified molecules, (e.g., cyanins such as Cy3, or Cy5, etc., fluoresceins, coumarins, rhodamines, etc. or other dyes disclosed herein)) of less than 0.001 molecule per μm², less than 0.01 molecule per μm², less than 0.1 molecule per μm², less than 0.25 molecule per μm², less than 0.5 molecule per μm², less than 1 molecule per μm², less than 10 molecules per μm², less than 100 molecules per μm², or less than 1,000 molecules per μm². Those of skill in the art will realize that a given support surface of the present disclosure may exhibit non-specific binding falling anywhere within this range, for example, of less than 86 molecules per μm². For example, some modified surfaces disclosed herein exhibit nonspecific protein binding of less than 0.5 molecule/μm² following contact with a 1 μM solution of Cy3 labeled streptavidin (GE Amersham) in phosphate buffered saline (PBS) buffer for 15 minutes, followed by 3 rinses with deionized water. Some modified surfaces disclosed herein exhibit nonspecific binding of Cy3 dye molecules of less than 0.25 molecules per μm². In independent nonspecific binding assays, 1 μM labeled Cy3 SA (ThermoFisher), 1 μM Cy5 SA dye (ThermoFisher), 10 μM Aminoallyl-dUTP-ATTO-647N (Jena Biosciences), 10 μM Aminoallyl-dUTP-ATTO-Rhol 1 (Jena Biosciences), 10 μM Aminoallyl-dUTP-ATTO-Rhol 1 (Jena Biosciences), 10 μM 7-Propargylamino-7-deaza-dGTP-Cy5 (Jena Biosciences, and 10 μM 7-Propargylamino-7-deaza-dGTP-Cy3 (Jena Biosciences) were incubated on the low binding coated supports at 37° C. for 15 minutes in a 384 well plate format. Each well was rinsed 2-3× with 50 ul deionized RNase/DNase Free water and 2-3× with 25 mM ACES buffer pH 7.4. The 384 well plates were imaged on a GE Typhoon instrument using the Cy3, AF555, or Cy5 filter sets (according to dye test performed) as specified by the manufacturer at a PMT gain setting of 800 and resolution of 50-100 am. For higher resolution imaging, images were collected on an Olympus IX83 microscope (e.g., inverted fluorescence microscope) (Olympus Corp., Center Valley, Pa.) with a total internal reflectance fluorescence (TIRF) objective (100×, 1.5 NA, Olympus), a CCD camera (e.g., an Olympus EM-CCD monochrome camera, Olympus XM-10 monochrome camera, or an Olympus DP80 color and monochrome camera), an illumination source (e.g., an Olympus 100 W Hg lamp, an Olympus 75 W Xe lamp, or an Olympus U-HGLGPS fluorescence light source), and excitation wavelengths of 532 nm or 635 nm. Dichroic mirrors were purchased from Semrock (IDEX Health & Science, LLC, Rochester, N.Y.), e.g., 405, 488, 532, or 633 nm dichroic reflectors/beamsplitters, and band pass filters were chosen as 532 LP or 645 LP concordant with the appropriate excitation wavelength. Some modified surfaces disclosed herein exhibit nonspecific binding of dye molecules of less than 0.25 molecules per μm². In some embodiments, the coated support was immersed in a buffer (e.g., 25 mM ACES, pH 7.4) while the image was acquired.

[0550] In some embodiments, the surfaces disclosed herein exhibit a ratio of specific to nonspecific binding of a fluorophore such as Cy3 of at least 2, 3, 4, 5, 6, 7, 8, 9, 10, 11, 12, 13, 14, 15, 16, 17, 18, 19, 20, 25, 30, 35, 40, 50, 75, 100, or greater than 100, or any intermediate value spanned by the range herein. In some embodiments, the surfaces disclosed herein exhibit a ratio of specific to nonspecific fluorescence signals for a fluorophore such as Cy3 of at least 2, 3, 4, 5, 6, 7, 8, 9, 10, 11, 12, 13, 14, 15, 16, 17, 18, 19, 20, 25, 30, 35, 40, 50, 75, 100, or greater than 100, or any intermediate value spanned by the range herein.

[0551] The low-background surfaces consistent with the disclosure herein may exhibit specific dye attachment (e.g., Cy3 attachment) to non-specific dye adsorption (e.g., Cy3 dye adsorption) ratios of at least 4:1, 5:1, 6:1, 7:1, 8:1, 9:1, 10:1, 15:1, 20:1, 30:1, 40:1, 50:1, or more than 50 specific dye molecules attached per molecule nonspecifically adsorbed. Similarly, when subjected to an excitation energy, low-background surfaces consistent with the disclosure herein to which fluorophores, e.g., Cy3, have been attached may exhibit ratios of specific fluorescence signal (e.g., arising from Cy3-labeled oligonucleotides attached to the surface) to non-specific adsorbed dye fluorescence signals of at least 4:1, 5:1, 6:1, 7:1, 8:1, 9:1, 10:1, 15:1, 20:1, 30:1, 40:1, 50:1, or more than 50:1.

[0552] In some embodiments, the degree of hydrophilicity (or “wettability” with aqueous solutions) of the disclosed support surfaces may be assessed, for example, through the measurement of water contact angles in which a small droplet of water is placed on the surface and its angle of contact with the surface is measured using, e.g., an optical tensiometer. In some embodiments, a static contact angle may be determined. In some embodiments, an advancing or receding contact angle may be determined. In some embodiments, the water contact angle for the hydrophilic, low-binding support surfaced disclosed herein may range from about 0 degrees to about 30 degrees. In some embodiments, the water contact angle for the hydrophilic, low-binding support surfaced disclosed herein may no more than 50 degrees, 40 degrees, 30 degrees, 25 degrees, 20 degrees, 18 degrees, 16 degrees, 14 degrees, 12 degrees, 10 degrees, 8 degrees, 6 degrees, 4 degrees, 2 degrees, or 1 degree. In many cases the contact angle is no more than 40 degrees. Those of skill in the art will realize that a given hydrophilic, low-binding support surface of the present disclosure may exhibit a water contact angle having a value of anywhere within this range.

[0553] In some embodiments, the hydrophilic surfaces disclosed herein facilitate reduced wash times for bioassays, often due to reduced nonspecific binding of biomolecules to the low-binding surfaces. In some embodiments, adequate wash steps may be performed in less than 60, 50, 40, 30, 20, 15, 10, or less than 10 seconds. For example, adequate wash steps may be performed in less than 30 seconds.

[0554] Some low-binding surfaces of the present disclosure exhibit significant improvement in stability or durability to prolonged exposure to solvents and elevated temperatures, or to repeated cycles of solvent exposure or changes in temperature. For example, the stability of the disclosed surfaces may be tested by fluorescently labeling a functional group on the surface, or a tethered biomolecule (e.g., an oligonucleotide primer) on the surface, and monitoring fluorescence signal before, during, and after prolonged exposure to solvents and elevated temperatures, or to repeated cycles of solvent exposure or changes in temperature. In some embodiments, the degree of change in the fluorescence used to assess the quality of the surface may be less than 1%, 2%, 3%, 4%, 5%, 10%, 15%, 20%, or 25% over a time period of 1 minute, 2 minutes, 3 minutes, 4 minutes, 5 minutes, 10 minutes, 20 minutes, 30 minutes, 40 minutes, 50 minutes, 60 minutes, 2 hours, 3 hours, 4 hours, 5 hours, 6 hours, 7 hours, 8 hours, 9 hours, 10 hours, 15 hours, 20 hours, 25 hours, 30 hours, 35 hours, 40 hours, 45 hours, 50 hours, or 100 hours of exposure to solvents and/or elevated temperatures (or any combination of these percentages as measured over these time periods). In some embodiments, the degree of change in the fluorescence used to assess the quality of the surface may be less than 1%, 2%, 3%, 4%, 5%, 10%, 15%, 20%, or 25% over 5 cycles, 10 cycles, 20 cycles, 30 cycles, 40 cycles, 50 cycles, 60 cycles, 70 cycles, 80 cycles, 90 cycles, 100 cycles, 200 cycles, 300 cycles, 400 cycles, 500 cycles, 600 cycles, 700 cycles, 800 cycles, 900 cycles, or 1,000 cycles of repeated exposure to solvent changes and/or changes in temperature (or any combination of these percentages as measured over this range of cycles).

[0555] In some embodiments, the surfaces disclosed herein may exhibit a high ratio of specific signal to nonspecific signal or other background. For example, when used for nucleic acid amplification, some surfaces may exhibit an amplification signal that is at least 4, 5, 6, 7, 8, 9, 10, 15, 20, 30, 40, 50, 75, 100, or greater than 100 fold greater than a signal of an adjacent unpopulated region of the surface. Similarly, some surfaces exhibit an amplification signal that is at least 4, 5, 6, 7, 8, 9, 10, 15, 20, 30, 40, 50, 75, 100, or greater than 100 fold greater than a signal of an adjacent amplified nucleic acid population region of the surface.

[0556] In some embodiments, fluorescence images of the disclosed low background surfaces when used in nucleic acid hybridization or amplification applications to create polonies of hybridized or clonally-amplified nucleic acid molecules (e.g., that have been directly or indirectly labeled with a fluorophore) exhibit contrast-to-noise ratios (CNRs) of at least 10, 20, 30, 40, 50, 60, 70, 80, 90, 100, 110, 120, 130, 140, 150, 160, 170, 180, 190, 20, 210, 220, 230, 240, 250, or greater than 250.

[0557] One or more types of primer may be attached or tethered to the support surface. In some embodiments, the one or more types of adapters or primers may comprise spacer sequences, adapter sequences for hybridization to adapter-ligated target library nucleic acid sequences, forward amplification primers, reverse amplification primers, sequencing primers, and/or molecular barcoding sequences, or any combination thereof. In some embodiments, 1 primer or adapter sequence may be tethered to at least one layer of the surface. In some embodiments, at least 2, 3, 4, 5, 6, 7, 8, 9, 10, or more than 10 different primer or adapter sequences may be tethered to at least one layer of the surface.

[0558] In some embodiments, the tethered adapter and/or primer sequences may range in length from about 10 nucleotides to about 100 nucleotides. In some embodiments, the tethered adapter and/or primer sequences may be at least 10, at least 20, at least 30, at least 40, at least 50, at least 60, at least 70, at least 80, at least 90, or at least 100 nucleotides in length. In some embodiments, the tethered adapter and/or primer sequences may be at most 100, at most 90, at most 80, at most 70, at most 60, at most 50, at most 40, at most 30, at most 20, or at most 10 nucleotides in length. Any of the lower and upper values described in this paragraph may be combined to form a range included within the present disclosure, for example, in some embodiments the length of the tethered adapter and/or primer sequences may range from about 20 nucleotides to about 80 nucleotides. Those of skill in the art will recognize that the length of the tethered adapter and/or primer sequences may have any value within this range, e.g., about 24 nucleotides.

[0559] In some embodiments, the resultant surface density of primers (e.g., capture primers) on the low binding support surfaces of the present disclosure may range from about 100 primer molecules per μm² to about 100,000 primer molecules per μm². In some embodiments, the resultant surface density of primers on the low binding support surfaces of the present disclosure may range from about 1,000 primer molecules per μm² to about 1,000,000 primer molecules per μm². In some embodiments, the surface density of primers may be at least 1,000, at least 10,000, at least 100,000, or at least 1,000,000 molecules per μm². In some embodiments, the surface density of primers may be at most 1,000,000, at most 100,000, at most 10,000, or at most 1,000 molecules per μm². Any of the lower and upper values described in this paragraph may be combined to form a range included within the present disclosure, for example, in some embodiments the surface density of primers may range from about 10,000 molecules per μm² to about 100,000 molecules per μm². Those of skill in the art will recognize that the surface density of primer molecules may have any value within this range, e.g., about 455,000 molecules per μm². In some embodiments, the surface density of target library nucleic acid sequences initially hybridized to adapter or primer sequences on the support surface may be less than or equal to that indicated for the surface density of tethered primers. In some embodiments, the surface density of clonally-amplified target library nucleic acid sequences hybridized to adapter or primer sequences on the support surface may span the same range as that indicated for the surface density of tethered primers.

[0560] Local densities as listed above do not preclude variation in density across a surface, such that a surface may comprise a region having an oligo density of, for example, 500,000/m², while also comprising at least a second region having a substantially different local density.

[0561] In some embodiments, the performance of nucleic acid hybridization and/or amplification reactions using the disclosed reaction formulations and low-binding supports may be assessed using fluorescence imaging techniques, where the contrast-to-noise ratio (CNR) of the images provides a key metric in assessing amplification specificity and non-specific binding on the support. CNR is commonly defined as: CNR=(Signal-Background)/Noise. The background term is commonly taken to be the signal measured for the interstitial regions surrounding a particular feature (diffraction limited spot, DLS) in a specified region of interest (ROI). While signal-to-noise ratio (SNR) is often considered to be a benchmark of overall signal quality, it can be shown that improved CNR can provide a significant advantage over SNR as a benchmark for signal quality in applications that require rapid image capture (e.g., sequencing applications for which cycle times must be minimized), as shown in the example below. At high CNR the imaging time required to reach accurate discrimination (and thus accurate base-calling in the case of sequencing applications) can be drastically reduced even with moderate improvements in CNR. Improved CNR in imaging data on the imaging integration time provides a method for more accurately detecting features such as clonally-amplified nucleic acid colonies on the support surface.

[0562] In most ensemble-based sequencing approaches, the background term is typically measured as the signal associated with ‘interstitial’ regions. In addition to “interstitial” background (Bᵢₙₜₑᵣ), “intrastitial” background (Bᵢₙₜᵣₐ) exists within the region occupied by an amplified DNA colony. The combination of these two background signals dictates the achievable CNR, and subsequently directly impacts the optical instrument requirements, architecture costs, reagent costs, run-times, cost/genome, and ultimately the accuracy and data quality for cyclic array-based sequencing applications. The Bᵢₙₜₑᵣ background signal arises from a variety of sources; a few examples include auto-fluorescence from consumable flow cells, non-specific adsorption of detection molecules that yield spurious fluorescence signals that may obscure the signal from the ROI, the presence of non-specific DNA amplification products (e.g., those arising from primer dimers). In typical next generation sequencing (NGS) applications, this background signal in the current field-of-view (FOV) is averaged over time and subtracted. The signal arising from individual DNA colonies (i.e., (Signal)-B(interstial) in the FOV) yields a discernable feature that can be classified. In some embodiments, the intrastitial background (B(intrastitial)) can contribute a confounding fluorescence signal that is not specific to the target of interest, but is present in the same ROI thus making it far more difficult to average and subtract.

[0563] Nucleic acid amplification on the low-binding coated supports described herein may decrease the B(interstitial) background signal by reducing non-specific binding, may lead to improvements in specific nucleic acid amplification, and may lead to a decrease in non-specific amplification that can impact the background signal arising from both the interstitial and intrastitial regions. In some embodiments, the disclosed low-binding coated supports, optionally used in combination with the disclosed hybridization and/or amplification reaction formulations, may lead to improvements in CNR by a factor of 2, 5, 10, 100, 250, 500 or 1000-fold over those achieved using conventional supports and hybridization, amplification, and/or sequencing protocols. Although described here in the context of using fluorescence imaging as the read-out or detection mode, the same principles apply to the use of the disclosed low-binding coated supports and nucleic acid hybridization and amplification formulations for other detection modes as well, including both optical and non-optical detection modes.

[0564] The present disclosure provides methods for determining the sequence of a nucleic acid template molecule, where the multivalent molecules are labeled with fluorophores and the detecting and/or identifying steps comprise use of fluorescence imaging. In some embodiments, the fluorescence imaging comprises dual wavelength excitation/four wavelength emission fluorescence imaging. In some embodiments, four different types of multivalent molecules are employed, each comprising a different nucleotide unit (or nucleotide unit analog). For example, a first type of multivalent molecules comprise dATP nucleotide units, a second type of multivalent molecules comprise dGTP nucleotide units, a third type of multivalent molecules comprise dCTP nucleotide units, and a fourth type of multivalent molecules comprise dTTP nucleotide units. In some embodiments, the four different types of multivalent molecules are labeled with a different fluorophore that corresponds to the nucleotide units attached to a given multivalent molecule to permit identification of the nucleotide units. In some embodiments, the detecting step comprises simultaneous or single excitation at a wavelength sufficient to excite all four fluorophores and imaging of fluorescence emission at wavelengths sufficient to detect each respective fluorophore. In some embodiments, the four labeled multivalent molecules are used to determine the identity of a terminal nucleotide in the nucleic acid template molecule. In some embodiments, the four types of multivalent molecules are labeled with different fluorophores, including for example fluorophores that emit different visible colors such as blue, green, yellow, orange or red. In some embodiments, the four types of multivalent molecules are labeled with different fluorophores, including for example Cy2 or a dye or fluorophore similar in excitation or emission properties, Cy3 or a dye or fluorophore similar in excitation or emission properties, Cy3.5 or a dye or fluorophore similar in excitation or emission properties, Cy5 or a dye or fluorophore similar in excitation or emission properties, Cy5.5 or a dye or fluorophore similar in excitation or emission properties, and Cy7 or a dye or fluorophore similar in excitation or emission properties. In some embodiments, the detecting step comprises simultaneous excitation at any two of 532 nm, 568 nm and 633 nm, and imaging of fluorescence emission at about 570 nm, 592 nm, 670 nm, and 702 nm, respectively. In some embodiments, the fluorescence imaging comprises dual wavelength excitation/dual wavelength emission fluorescence imaging. In some embodiments, the four different types of multivalent molecules are labeled with distinguishable fluorophores (or a set of fluorophores), and the detecting step comprises simultaneous or single excitation at a wavelength sufficient to excite one, two, three, or four fluorophores or sets of fluorophores, and imaging of fluorescence emission at wavelengths is sufficient to detect each respective fluorophore.

[0565] In some embodiments, the sequencing methods can be conducted with three different types of labeled multivalent molecules and one type of unlabeled multivalent molecule (e.g., a “dark” multivalent molecule), where the labeled multivalent molecules are labeled with a different fluorophore that corresponds to the nucleotide units attached to a given multivalent molecule to permit identification of the nucleotide units. In some embodiments, the detecting step comprises simultaneous excitation at a wavelength sufficient to excite the three types of fluorophores and imaging of fluorescence emission at wavelengths is sufficient to detect each respective fluorophore, and detection of the fourth type of multivalent molecule is determined or determinable with reference to the location of “dark” or unlabeled spots.

[0566] In some embodiments, the fluorophores comprise a FRET donor and accepter pair, such that multiple detections and identifications can be performed under a single excitation and imaging step. In some embodiments, a sequencing cycle comprises forming a plurality of complexed polymerases, contacting the complexed polymerases with a plurality of different types of fluorescently-labeled multivalent molecules, and detecting the fluorescently-labeled multivalent molecules that are bound to the complexed polymerases. In some embodiments, a sequencing cycle can be conducted in less than 30 minutes, in less than 20 minutes, or in less than 10 minutes. In some embodiments, conducting sequencing reactions with labeled multivalent molecules gives an average Q-score for base calling accuracy over a sequencing run which is greater than or equal to 30, and/or greater than or equal to 40. In some embodiments, at least 50%, at least 60%, at least 70%, at least 80%, or at least 90% of the base calls have a Q-score of greater than 30 and/or greater than or equal to 40. In some embodiments, the present disclosure provides the method, herein at least 95% of the base calls have a Q-score of greater than 30.

### EXAMPLES

[0567] The following examples are meant to be illustrative and can be used to further understand embodiments of the present disclosure and should not be construed as limiting the scope of the present teachings in any way.

### Example 1: Clarified Lysate Preparation of Mutant Polymerases

[0568] Mutant polymerases were prepared using site directed mutagenesis. The mutated sites of the mutant polymerases are listed in Table 1 (FIG. 31) and Table 2 (FIG. 32).

[0569] Host cells harboring an expression vector operably linked to a nucleic acid encoding a wild type polymerase or one of the mutant polymerases were prepared. The host cells were cultured under conditions suitable for expressing the wild type or mutant polymerase. The host cells were grown in plate format and centrifuged after expression. Cell pellets were lysed by treatment with lysozyme in buffer (20 mM Tris-HCl (pH 8.8), 10 mM KCl, 10 mM (NH₄)₂SO₄)) and centrifuged again. The supernatants were transferred to PCR plates and heat shocked at 65° C. for 60 minutes. The heat shocked lysates were then clarified by centrifuge and the supernatants transferred to a new plate for the nucleotide incorporation assay.

[0570] Clarified lysates were mixed with a 4×SDS loading day and run on a 4-12% NuPAGE Bis-Tris SDS polyacrylamide gel. After running the gel, it was stained with Coomassie blue staining buffer and de-stained overnight to resolve the target bands. The protein yield and presence of stable enzyme or heat shock aggregation could be assessed by visual inspection of the de-stained gels. Alternatively, the protein yield and concentration from the lysates was determined using an automated microfluidic chip which was configured in high throughput mode to stain, de-stain and electrophoretically separate the protein (e.g., LABCHIP GXII TOUCH).

### Example 2: Nucleotide Incorporation Assay

[0571] Atto dye-labeled DNA templates were used to prepare the DNA duplexes. The labeled DNA templates were annealed with primers in a reaction buffer (Tris-HCl (pH 7.5), NaCl, EDTA). The duplexes were mixed with the clarified lysates (described in Example 1) and allowed to equilibrate to 42° C. The nucleotide incorporation reaction was started with the addition of a 3′ methylazido nucleotide corresponding to the next base on the template (e.g., dCTP-N3 or dATP-N3). The reaction was allowed to proceed under different temperature and time conditions, for example 42° C. for 150 seconds, or 56° C. for as little as 2 seconds, and quenched with EDTA and formamide. The analysis of the n+1 vs n was performed by capillary electrophoresis.

[0572] The incorporation activity data listed in Table 2 (FIG. 32) represent the relative activity of mutant polymerases in incorporation of 3′methylazido nucleotides at the N+1 position of an extending polynucleotide chain at 42° C.

[0573] Numerous mutant polymerases were expressed by recombinant host cells as described in Example 1. Lysates from the expression host cells, which contained mutant polymerases, were subjected to heat shock at 65° C. for 60 minutes. The mutant polymerases in the heat shocked lysates were screened for their ability to incorporate a 3′ methylazido nucleotide as described in Example 2. Analysis of the incorporation reactions were conducted via capillary electrophoresis as described in Example 2. The incorporation activities of the mutant polymerases were assigned a grade of 0 if they exhibited zero or negligible incorporation activity, or assigned a grade of + or ++ if they exhibited moderate or high incorporation activity respectively. It was predicted that approximately 50-60% or more of the mutant polymerases would exhibit incorporation activity having a grade of + or higher.

### Example 3: Thermal Melt Assays

[0574] Purified wild type and mutant polymerases in a heparin elution buffer was mixed with 1× SYPRO Orange Protein Gel Stain and run on a CFX384 thermocycler. The thermal melt data was analyzed using a CFX Maestro software (from Bio-Rad). Thermal melt data including (Tm1) and (Tm2) are listed in Tables 1 and 2. The thermal melt data was used to generate melt peaks and melt curves.

### Example 4: Thermal Aggregation Assays

[0575] The temperature of aggregation onset (T(agg)) was measured using quartz cuvettes containing polymerases at 1 mg/mL in a buffer. The cuvettes were placed in an UNCLE instrument (from Unchained Labs, Pleasanton, California) and exposed to a temperature ramp of 25° C. to 95° C., at a rate of 0.5° C. per second. The aggregation temperature was measured using static light scattering and was determined as the temperature where the 266 nm signal increased beyond 10% of the average baseline read. The thermal aggregation T(agg) temperatures were determined from the thermal melt data and melt curves were generated.

### Example 5: Uracil Incorporation Assays

[0576] Primed DNA template molecules in a reaction buffer was mixed with a purified mutant polymerase and allowed to equilibrate to 42° C. The reaction was started by adding a 3′ methylazido nucleotide corresponding to the next base on the template molecule. The reaction was allowed to proceed at 42° C. and quenched with EDTA and formamide at incremental time points. Analysis of the n+1 versus n was performed by capillary electrophoresis. The incorporation rates of dATP nucleotide analog into a template having a thymine as the next base in the template molecule was assayed. The incorporation rates of dATP nucleotide analog into a template having an adenine as the next base in the template molecule was assayed. The incorporation rates of dATP nucleotide analog into a template having a uracil as the next base in the template molecule was assayed. Some of the mutant polymerases exhibited increased capability for incorporating a dATP nucleotide analog into a uracil-containing template molecule.

### Example 6: Assay for Binding Labeled Multivalent Molecules

[0577] DNA concatemers were prepared and immobilized to flowcells. A solution of fluorescently-labeled multivalent molecules (e.g., see FIG. 5) and engineered polymerase enzyme was flowed onto the flowcells. Each solution contained multivalent molecules carrying nucleotide units of dATP, dGTP, dCTP or dTTP. The core of the multivalent molecules were labeled with different fluorophores that correspond to the nucleotide units of dATP, dGTP, dCTP or dTTP. The concatemers were reacted with the solution for 10 seconds, then removed using air. The multivalent molecules and polymerase enzyme was removed with a wash buffer. An imaging solution was flowed onto the flowcell and the fluorescent intensity of the multivalent molecules bound to the concatemers was measured. The purity of the bound nucleotide unit was calculated by dividing the fluorescent intensity of the dominant nucleotide unit (e.g., the correct nucleotide unit) by the sum of the intensities of all four nucleotide units.

[0578] In a separate assay, complexed engineered polymerases were reacted with fluorescently labeled multivalent molecules carrying nucleotide units of dATP, dGTP, dCTP or dUTP, under different temperature and time conditions. For example, the temperature tested included 25-56° C., and the time during included 1-90 seconds. Images and intensities of multivalent molecules binding the complexed polymerases were acquired.

[0579] The intensity exhibited by the mutant polymerases were assigned a grade of 0 if they exhibited zero or negligible activity, or assigned a grade of + or ++ if they exhibited moderate or high activity respectively. It was predicted that approximately 50-60% or more of the mutant polymerases would exhibit intensity having a grade of + or higher. Mutant polymerases with a grade of + or ++ were suitable for forming in sequencing.

### Example 7: Binding Activity—Labeled Nucleotide Arms

[0580] Labeled nucleotide arms were prepared (e.g., FIG. 6) each carrying a fluorophore, a nucleotide unit, linker, spacer and core attachment moiety. Cell lysates containing mutant polymerases were prepared from different host cells expressing different mutant polymerases. DNA template/primer duplexes were prepared, where the template molecules were fluorescently labeled. The cell lysate, template/primer duplex and the labeled nucleotide arms were mixed together with a non-catalytic cation in the wells of a multi-well plate, under a condition suitable for forming complexed polymerases and under a condition suitable to bind a nucleotide arm to a complexed polymerase. The plates were positioned on a plate read and spectral scanning was conducted at the appropriated excitation wavelength. Emission measurements were obtained. The multivalent binding activity data of the mutant polymerases are listed in Table 1 (FIG. 31).

### Example 8: Mass Spectrometry and Modeling

[0581] Wild type polymerases were prepared. The wild type polymerases comprised a backbone sequence of RLF 89458.1 (SEQ ID NO:1) or NOZ 58130.1 (SEQ ID NO:992), and having a His-tag at their N-terminal ends. The His-tag on the RLF 89458.1 polymerase comprised the sequence MGSSHHHHHHSSGLVPRGS (SEQ ID NO:2838) and the His-tag on the NOZ 58130.1 polymerase comprised the sequence MGSSHHHHHHSSGLVPRGSH (SEQ ID NO:2837).

[0582] The His-tagged polymerases were solubilized in a reagent comprising Tris (50 mM, pH 7.5) and NaCl (50 mM), using a 30 kDa cut-off spin filter. The polymerase solutions were concentration to approximately 0.5-1 mg/mL as determined using a Bradford assay. 20-50 uL of the polymerase solution was diluted to a final volume of 100 uL using 0.2% Rapigest (e.g., 0.2% Rapigest in 50 mM ammonium bicarbonate). 2.5 uL of DTT (e.g., 200 mM DTT in 50 mM ammonium bicarbonate) was added to the diluted polymerase and vortexed. The polymerase solutions were incubated in a 60° C. oven for 30 minutes to reduce. After reduction, the polymerase solution was equilibrated to room temperature. 7.5 uL of iodoacetamide (IAA) (e.g., 200 mM iodoacetamide in 50 mM ammonium bicarbonate) was added to the reduced polymerase solution. The polymerase solution was vortexed for 30 minutes at room temperature in the dark. Trypsin (e.g., 0.1 ug/uL trypsin in 50 mM ammonium bicarbonate) was added to the polymerase solution at a ratio of 1:30 trypsin-to-polymerase concentration. The polymerase was digested for at least 4 hours (e.g., overnight) at 37° C. After digestion, the polymerase solution (e.g., now peptides) was adjusted to about pH 2 with addition of HCl and kept at 37° C. for 30 minutes. The polymerase solution was vortexed and placed at 4° C. for at least 2 hours. The polymerase solution was centrifuged for 15 minutes and the supernatant was used for mass spectrometry analysis.

[0583] Electrospray ionization was used to conduct the mass spectrometry (MS/MS) analysis. The peptides were analyzed by nano-flow LC tandem mass spectrometry in data-dependent scanning mode using an ion trap mass spectrometer (Thermo Scientific Q Exactive Plus mass spectrometer). The MS/MS data was searched against the predicted fragment ions from theoretical digests of the known protein sequences using Mascot software (Matrix Science Limited). The mass spectrometry data was used generate a predicted three-dimensional ribbon model and to identify sites of post-translational modifications including oxidation and acetylation sites (e.g., FIGS. 41 and 42). The acetylation sites were identified as sites that had undergone N-phosphogluconoylation or N-gluconoylation. The ribbon model in FIG. 41 also shows the predicted structure of the His-tag MGSSHHHHHHSSGLVPRGS (SEQ ID NO:2838), where G-17, S-16, S-15, H-12, and H-11 are the amino acid residues from the His-tag. The ribbon model in FIG. 42 also shows the predicted structure of the His-tag MGSSHHHHHHSSGLVPRGSH (SEQ ID NO:2837), where G-17, H-8, H-7, S-4 and S-3 are the amino acid residues from the His-tag.

[0584] Modeling of the wild type polymerases, RLF 89458.1 and NOZ 58130.1, were conducted using Rosetta software with the standard workflow inputs, including (1) a sequence alignment was generated using ClustalX, and (2) the coordinates of the template structure available from RCSB protein structure database, Protein Data Bank. The alignment and template were input into Rosetta and commanded to thread the target sequence onto the template. Fragments were generated for missing portions. Approximately 10,000-15,000 comparative models were generated and the lowest energy models were selected.

### Example 9: Accelerated Aging Studies for Engineered Polymerases

[0585] Accelerated aging studies were conducted to determine the estimated shelf-life of various purified engineered polymerases, including polymerases comprising RLF89458 (e.g., SEQ ID NOS: 1-1713) or NOZ 58130 (e.g., SEQ ID NOS: 1714-2787) backbone sequences. Engineered polymerases were aged in a sequencing storage buffer lacking nucleotide analogs and multivalent molecules. The accelerated aging studies were conducted at four temperatures including −20° C., 4° C., 25° C. or 37° C.

[0586] The theoretical shelf-life was estimated using the following equation:

$$Accelerated Aging Time ( ATT ) = \frac{Desired Real Time ( RT )}{Q 10 [ ( {T}_{AA} - {T}_{RT} ) / 10 ]}$$

wherein Q10 is the reaction rate coefficient, T_{AA} is the oven aging temperature, and T_{RT} is the ambient temperature (e.g., room temperature). The reaction rate coefficient Q10 corresponds to the rate of spoilage when the temperature is raised to 10° C. Typically, the value for Q10 is set at 2, where the rate of spoilage is doubled for every 10° C. increase in temperature. For example, when applying the accelerated aging time equation, an engineered polymerase stored at 25° C. for 16 days corresponds to 362 days at −20° C.

[0587] When the engineered polymerases were aged for the desired time, their level of activity was tested by conducting a nucleotide incorporation assay.

[0588] The nucleotide incorporation assay was conducted in a manner similar to the incorporation assay described in Example 2. Dye-labeled DNA templates were annealed with primers in a reaction buffer. The duplexes were mixed with purified engineered polymerase and allowed to equilibrate to 50° C. The nucleotide incorporation reaction was started with the addition of a 3′ methylazido nucleotide corresponding to the next base on the template. The reaction was allowed to proceed 50° C., and quenched with EDTA and formamide at incremental times. The analysis of the n+1 vs n was performed by capillary electrophoresis.

### Example 10: Sequencing Using Multivalent Molecules and Nucleotides

[0589] A two-stage sequencing reaction was conducted on a flow cell having a plurality of concatemer template molecules immobilized thereon (e.g., immobilized polonies).

[0590] The first-stage sequencing reaction was conducted by hybridizing a plurality of a soluble sequencing primers to concatemer template molecules that were immobilized to a flow cells to form immobilized primer-concatemer duplexes. A plurality of a first sequencing polymerase was flowed onto the flow cell (e.g., contacting the immobilized primer-concatemer duplexes) and incubated under a condition suitable to bind the sequencing polymerase to the duplexes to form complexed polymerases. Exemplary first sequencing polymerases comprise an amino acid backbone sequence of any one of SEQ ID NOS:1, 2 or 1714. In some embodiments, the mutant polymerase comprises an amino acid sequence that is at least 80%, 85%, 90%, 95%, 99% identical, or a higher level sequence identity, to any of SEQ ID NOS: 1-1713 or 1714-2787. A mixture of fluorescently labeled multivalent molecules (e.g., at different concentrations of about 20-100 nM) was flowed onto the flow cell in the presence of a buffer that included a non-catalytic cation (e.g., strontium, barium and/or calcium) and incubated under conditions suitable to bind complementary nucleotide units of the multivalent molecules to the complexed polymerases to form avidity complexes without polymerase-catalyzed incorporation of the nucleotide units. Various temperature and time conditions were tested, for example 25-56° C. for 5-90 seconds. The fluorescently labeled multivalent molecules were labeled at their cores. The complexed polymerases were washed. An image was obtained of the fluorescently labeled multivalent molecules that remained bound to the complexed polymerases. The first sequencing polymerases and multivalent molecules were removed, while retaining the sequencing primers hybridized to the immobilized concatemers (retained duplexes), by washing with a buffer comprising a detergent.

[0591] The first stage sequencing reaction was suitable for forming a plurality of avidity complexes on the concatemer template molecules (e.g., polonies). For example, the first stage sequencing reaction comprised: (a) binding a first nucleic acid primer, a first polymerase, and a first multivalent molecule to a first portion of a concatemer template molecule thereby forming a first binding complex, wherein a first nucleotide unit of the first multivalent molecule was bound to the first polymerase; and (b) binding a second nucleic acid primer, a second polymerase, and the first multivalent molecule to a second portion of the same concatemer template molecule thereby forming a second binding complex, wherein a second nucleotide unit of the first multivalent molecule was bound to the second polymerase, wherein the first and second binding complexes which included the same multivalent molecule formed a first avidity complex.

[0592] The second-stage sequencing reaction was conducted by contacting the retained duplexes with a plurality of second sequencing polymerases to form complexed polymerases. Exemplary second sequencing polymerases comprise an amino acid backbone sequence of any one of SEQ ID NOS:1, 2 or 1714. In some embodiments, the mutant polymerase comprises an amino acid sequence that is at least 80%, 85%, 90%, 95%, 99% identical, or a higher level sequence identity, to any of SEQ ID NOS: 1-1713 or 1714-2787. A mixture of non-labeled nucleotide analogs (e.g., 3′O-methylazido nucleotides) (e.g., at different concentrations of about 1-5 uM) was added to the complexed polymerases in the presence of a buffer that included a catalytic cation (e.g., magnesium and/or manganese) and incubated under conditions suitable to bind complementary nucleotides to the complexed polymerases and promote polymerase-catalyzed incorporation of the nucleotides to generate a nascent extended sequencing primer. Various temperature and time conditions were tested, for example 25-56° C. for 5-180 seconds. The complexed polymerases were washed. No image was obtained. The incorporated non-labeled nucleotide analogs were reacted with a cleaving reagent that removes the 3′ O-methylazido group and generates an extendible 3′OH group.

[0593] In an alternative second stage sequencing reaction, a mixture of fluorescently labeled nucleotide analogs (e.g., 3′O-methylazido nucleotides) (e.g., about 1-5 uM) was added to the complexed polymerases in the presence of a buffer that included a catalytic cation (e.g., magnesium and/or manganese) and incubated under conditions suitable to bind complementary nucleotides to the complexed polymerases and promote polymerase-catalyzed incorporation of the nucleotides to generate a nascent extended sequencing primer. The complexed polymerases were washed. An image was obtained of the incorporated fluorescently labeled nucleotide analogs as a part of the complexed polymerases. The incorporated fluorescently labeled nucleotide analogs were reacted with a cleaving reagent that removes the 3′ O-methylazido group and generates an extendible 3′OH group.

[0594] The second sequencing polymerases were removed, while retaining the nascent extended sequencing primers hybridized to the concatemers (retained duplexes), by washing with a buffer comprising a detergent. Recurring sequencing reactions were conducted by performing multiple cycles of first-stage and second-stage sequencing reactions to generate extended forward sequencing primer strands. FIG. 43 shows a 150 cycle sequencing run of immobilized concatemers generated from a nucleic library prepared from E. coli DNA. The X-axis indicates the sequencing cycle number and the Y-axis indicates the % error.

What is claimed:

1. A composition comprising a plurality of recombinant DNA polymerases and a plurality of multivalent molecule:
wherein individual recombinant DNA polymerases in the plurality comprise an amino acid sequence that is at least 85% identical to SEQ ID NO:1 and having amino acid substitution mutations (i) aspartic acid at position 141 substituted with alanine (D141A), (ii) glutamic acid at position 143 substituted with alanine (E143A), and (iii) lysine at position 74 substituted with asparagine (K74N), arginine (K74R), glutamic acid (K74E) or glutamine (K74Q),
wherein the plurality of recombinant DNA polymerases exhibit polymerase activity, exhibit deficiency in 3′ to 5′ exonuclease activity, and
wherein individual multivalent molecules in the plurality comprise (1) a core; and (2) a plurality of nucleotide arms which comprise (a) a core attachment moiety, (b) a spacer, (c) a linker, and (d) a nucleotide unit, wherein the core is attached to the plurality of nucleotide arms via their core attachment moiety, and wherein the spacer is attached to the linker, and wherein the linker is attached to the nucleotide unit.

2. The composition of claim 1, wherein the nucleotide unit of individual multivalent molecules in the plurality comprise an aromatic base, a five carbon sugar and 1-10 phosphate groups.

3. The composition of claim 1, wherein the plurality of nucleotide arms attached to a given core of an individual multivalent molecule have the same type of nucleotide unit, and wherein the types of nucleotide units comprise dATP, dGTP, dCTP, dTTP or dUTP.

4. The composition of claim 1, wherein the plurality of multivalent molecules comprise one type of a multivalent molecule wherein each multivalent molecule in the plurality has the same type of nucleotide unit selected from a group consisting of dATP, dGTP, dCTP, dTTP and dUTP.

5. The composition of claim 1, wherein the plurality of multivalent molecules comprise a mixture of any combination of two or more types of multivalent molecules each type having nucleotide units selected from a group consisting of dATP, dGTP, dCTP, dTTP and/or dUTP.

6. The composition of claim 1, wherein at least one multivalent molecule in the plurality of multivalent molecules comprises a core that is labeled with a fluorophore.

7. The composition of claim 1, wherein at least one multivalent molecule in the plurality of multivalent molecules comprises one or more nucleotide units that are labeled with a fluorophore.

8. The composition of claim 1, further comprising a plurality of clonally amplified nucleic acid template molecules and a plurality of oligonucleotide primers.

9. The composition of claim 8, wherein at least one of the clonally amplified nucleic acid template molecules comprise a plurality of uracil.

10. The composition of claim 8, wherein the plurality of clonally amplified nucleic acid template molecules lack uracil.

11. The composition of claim 8, wherein the plurality of clonally amplified nucleic acid template molecules are immobilized to a hydrophilic polymer coating on a support.

12. The composition of claim 11, wherein the plurality of clonally amplified nucleic acid template molecules are immobilized to the hydrophilic polymer coating at a density of 10²-10¹¹ per mm².

13. The composition of claim 11, wherein the plurality of clonally amplified nucleic acid template molecules are immobilized to the hydrophilic polymer coating at random sites.

14. The composition of claim 11, wherein the plurality of clonally amplified nucleic acid template molecules are immobilized to the hydrophilic polymer coating at pre-determined sites arranged in an organized pattern.

15. The composition of claim 11, wherein the hydrophilic polymer coating comprises branched polyethylene glycol (PEG) having at least 4 branches.

16. The composition of claim 11, wherein the hydrophilic polymer coating comprises unbranched polyethylene glycol (PEG).

17. The composition of claim 11, wherein the hydrophilic polymer coating has a water contact angle of no more than 45 degrees.

18. The composition of claim 1, wherein the plurality of recombinant DNA polymerases comprise fluorophore-labeled recombinant DNA polymerases.

The application's sequence listing, which the Patent Office published only in electronic form, follows.

SEQUENCE LISTING (2851 sequences)

SEQ ID NO: 1 - protein, 773 aa, unidentified
  source 1..773: note = Thermococci archaeon
  REGION 1..773: note = Description of Unknown: Synthetic polypeptide
MILDTDYITENGKPVIRIFKKEKGEFKIEYDRNFEPYIYALLEDDESIEDIKKITGERHGKKVRIIRVEKVKKKFLGEPIEVWKLVFEHPQDVPAIRDAIRSHPAVREIFEYDIPFAKRYLIDKGLVPMEGGEELKLLAFDIETFYHEGDEFAEGEILMISYADESGAKVITWKKIDLPYVEVVSTEREAIKRFLQVLREKDPDVLLTYNGDNFDFAYIKKRCEKLGLKFTIGRDGSEPKIQRMGDRFAVEVKGRIHLDLYPVVRHTIRLPTYTLEAVYEAVFGKKKEKVYAEEIAEAWKSEEGLKRVAQYSMEDARATYELGREFFPMEVELAKLIGQSVWDVSRSSTGNLVEWYLLRVAYERNELAPNKPGGEEYQRRMRSSYIGGYVKEPEKGLWESIAYLDFRSLYPSIIVTHNVSPDTLEKECKNYDVAPIVGYRFCKDFKGFIPSILEDLIETRQKVKRKMKATIDPIEKKMLDYRQRALKILANSYYGYQGYPKARWYSKECAESVTAWGRHYIETTIKEAEKFGFKVLYADTDGFFATIPNEKPETIKSKAKKFLKHINEKLPGMLELEYEGFYLRGFFVTKKKYALIDEDGHITTRGLEVVRRDWSEIAKETQAKVLEVILREGSIEKAAGIVKKVVEDLANYRVPVEKLIIHEQITRELKDYKATGPHVAIAKRLQARGIKVKPGTIISYVVLKGSKKISDRVILFDEYDSSRHKYDPDYYIHNQVLPAVLRILEAFGYKEKDLEYQRMKQTGLGAWLKMGKK

SEQ ID NO: 2 - protein, 773 aa, unidentified
  source 1..773: note = Euryarchaeota archaeon
  REGION 1..773: note = Description of Unknown: Synthetic polypeptide
MILDTDYITENGKPVIRIFKKEKGEFKIEYDRNFEPYIYALLEDDESIEDIKKITGERHGKKVRIIRVEKVKKKFLGEPIEVWKLVFEHPQDVPAIRDAIRSHPAVREIFEYDIPFAKRYLIDKGLVPMEGGEELKLLAFDIETFYHEGDEFAEGEILMISYADESGAKVITWKKIDLPYVEVVSTEREAIKRFLQVLREKDPDVLLTYNGDNFDFAYIKKRCEKLGLKFTIGREGSEPKIQRMGDRFAVEVKGRIHLDLYPVVRHTIRLPTYTLEAVYEAVFGKKKEKVYAEEIAEAWKSEEGLKRVAQYSMEDARATYELGREFFPMEVELAKLIGQSVWDVSRSSTGNLVEWYLLRVAYERNELAPNKPGGEEYQRRMRSSYIGGYVKEPEKGLWESIAYLDFRSLYPSIIVTHNVSPDTLEKECKNYDVAPIVGYRFCKDFKGFIPSILEDLIETRQKVKRKMKATIDPIEKKMLDYRQRALKILANSYYGYQGYPKARWYSKECAESVTAWGRHYIETTIKEAEKFGFKVLYADTDGFFATIPNEKPETIKSKAKKFLKHINEKLPGMLELEYEGFYLRGFFVTKKKYALIDEDGHITTRGLEVVRRDWSEIAKETQAKVLEVILREGSIEKAAGIVKKVVEDLANYRVPVEKLIIHEQITRELKDYKATGPHVAIAKRLQARGIKVKPGTIISYVVLKGSKKISDRVILFDEYDSSRHKYDPDYYIHNQVLPAVLRILEAFGYKEKDLEYQRMKQTGLGAWLKMGKK

SEQ ID NO: 3 - protein, 773 aa, unidentified
  REGION 1..773: note = Description of Unknown: Synthetic polypeptide
MILDTDYITENGKPVIRIFKKEKGEFKIEYDRNFEPYIYALLEDDESIEDIKKITGERHGKKVRIIRVEKVKKKFLGEPIEVWKLVFEHPQDYPAIRDAIRSHPAVREIFEYDIPFAKRYLIDKGLVPMEGGEELKLLAFAIATFYHEGDEFAEGEILMISYADESGAKVITWKKIDLPYVEVVSTEREAIKRFLQVLREKDPDVLLTYNGDNFDFAYIKKRCEKLGLKFTIGRDGSEPKIQRMGDRFAVEVKGRIHLDLAPVVRHTIRLPTYTLEAVYEAVFGKKKEKVYAEEIAEAYKSEEGLKRVAQYSMEDARATYELGREFFPMEVELAKLIGQSVWDVSRSSTGNLVEWYLLRVAYERNELAPNKPGGEEYQRRMRSSYIGGYVKEPEKGLWESIAYLDFRSSAGSIIVTHNVSPDTLEKECKNYDVAPIVGYRFCKDFKGFIPSILEDLIETRQKVKRKMKATIDPIEKKMLDYRQRALKILANSYYGYQGYPKARWYSKECAESVTAWGRHYIETTIKEAEKFGFKVLYADTDGFFATIPNEKPETIKSKAKKFLKHINEKLPGMLELEYEGFYLRGFFVTKKKYALIDEDGHITTRGLEVVRRDWSEIAKETQAKVLEVILREGSIEKAAGIVKKVVEDLANYRVPVEKLIIHEQITRELKRYKATGPHVAIAKRLQARGIKVKPGTIISYVVLKGSKKISDRVILFDEYDSSRHKYDPDYYIHNQVLPAVLRILEAFGYKEKDLEYQRMKQTGLGAWLKMGKK

SEQ ID NO: 4 - protein, 773 aa, unidentified
  REGION 1..773: note = Description of Unknown: Synthetic polypeptide
MILDTDYITENGKPVIRIFKKEKGEFKIEYDRNFEPYIYALLEDDESIEDIKKITGERHGKKVRIIRVEKVKKKFLGEPIEVWKLVFEHPQDYPAIRDAIRSHPAVREIFEYDIPFAKRYLIDKGLVPMEGGEELKLLAFAIATFYHEGDEFAEGEILMISYADESGAKVITWKKIDLPYVEVVSTEREAIKRFLQVLREKDPDVLLTYNGDNFDFAYIKKRCEKLGLKFTIGRDGSEPKIQRMGDRFAVEVKGRIHLDLAPVVRHTIRLPTYTLEAVYEAVFGKKKEKVFAEEIAEAWKSEEGLKRVAQYSMEDARATYELGREFFPMEVELAKLIGQSVWDVSRSSTGNLVEWYLLRVAYERNELAPNKPGGEEYQRRMRSSYIGGYVKEPEKGLWESIAYLDFRSSAGSIIVTHNVSPDTLEKECKNYDVAPIVGYRFCKDFKGFIPSILEDLIETRQKVKRKMKATIDPIEKKMLDYRQRALKILANSYYGYQGYPKARWYSKECAESVTAWGRHYIETTIKEAEKFGFKVLYADTDGFFATIPNEKPETIKSKAKKFLKHINEKLPGMLELEYEGFYLRGFFVTKKKYALIDEDGHITTRGLEVVRRDWSEIAKETQAKVLEVILREGSIEKAAGIVKKVVEDLANYRVPVEKLIIHEQITRELKRYKATGPHVAIAKRLQARGIKVKPGTIISYVVLKGSKKISDRVILFDEYDSSRHKYDPDYYIHNQVLPAVLRILEAFGYKEKDLEYQRMKQTGLGAWLKMGKK

SEQ ID NO: 5 - protein, 757 aa, unidentified
  REGION 1..757: note = Description of Unknown: Synthetic polypeptide
MILDTDYITENGKPVIRIFKKEKGEFKIEYDRNFEPYIYALLEDDESIEDIKKITGERHGKKVRIIRVEKVKKKFLGEPIEVWKLVFEHPQDVPAIRDAIRSHPAVREIFEYDIPFAKRYLIDKGLVPMEGGEELKLLAFAIATFYHEGDEFAEGEILMISYADESGAKVITWKKIDLPYVEVVSTEREAIKRFLQVLREKDPDVLLTYNGDNFDFAYIKKRAEKLGLKFTIGRDGSEPKIQRMGDRFAVEVKGRIHLDLAPVVRHTIRLPTYTLEAVYEAVFGKKKEKVYAEEIAEAWKSEEGLKRVAQYSMEDARATYELGREFFPMEVELAKLIGQSVWDVSRSSTGNLVEWYLLRVAYERNELAPNKPGGEEYQRRMRSSYIGGYVKEPEKGLWESIAYLDFRSSAGSIIVTHNVSPDTLEKECKNYDVAPIVGYRFCKDFKGFIPSILEDLIETRQKVKRKMKATIDPIEKKMLDYRQRALKILANSYYGYQGYPKARWYSKEAAESVTAWGRHYIETTIKEAEKFGFKVLYADTDGFFATIPNEKPETIKSKAKKFLKHINEKLPGMLELEYEGFYLRGFFVTKKKYALIDEDGHITTRGLEVVRRDWSEIAKETQAKVLEVILREGSIEKAAGIVKKVVEDLANYRVPVEKLIIHEQITRKLKDYKATGPHVAIAKRLQARGIKVKPGTIISYVVLKGSKKISDRVILFDEYDSSRHKYDPDYYIHNQVLPAVLRILEAFGYKEKDLEYQ

SEQ ID NO: 6 - protein, 773 aa, unidentified
  REGION 1..773: note = Description of Unknown: Synthetic polypeptide
MILDTDYITENGKPVIRIFKKEKGEFKIEYDRNFEPYIYALLEDDESIEDIKKITGERHGKKVRIIRVEKVKKKFLGEPIEVWKLVFEHPQDVPAIRDAIRSHPAVREIFEYDIPFAKRYLIDKGLVPMEGGEELKLLAFAIATFYHEGDEFAEGEILMISYADESGAKVITWKKIDLPYVEVVSTEREAIKRFLQVLREKDPDVLLTYNGDNFDFAYIKKRCEKLGLKFTIGRDGSEPKIQRMGDRFAVEVKGRIHLDLAPVVRHTIRLPTYTLEAVYEAVFGKKKEKVYAEEIAEAWKSEEGLKRVAQYSMEDARATYELGREFFPMEVELAKLIGQSVWDVSRSSTGNLVEWYLLRVAYERNELAPNKPGGEEYQRRMRSSYIGGYVKEPEKGLWESIAYLDFRSSAGSIIVTHNVSPDTLEKECKNYDVAPIVGYRFCKDFKGFIPSILEDLIETRQKVKRKMKATIDPIEKKMLDYRQRALKILANSYYGYQGYPKARWYSKECAESVTAWGRHYIETTIKEAEKFGFKVLYADTDGFFATIPNEKPETIKSKAKKFLKHINEKLPGMLELEYEGFYLRGFFVTKKKYALIDEDGHITTRGLEVVRRDWSEIAKETQAKVLEVILREGSIEKAAGIVKKVVEDLANYRVPVEKLIIHEIITRELKRYKATGPHVAIAKRLQARGIKVKPGTIISYVVLKGSKKISDRVILFDEYDSSRHKYDPDYYIHNQVLPAVLRILEAFGYKEKDLEYQRMKQTGLGAWLKMGKK

SEQ ID NO: 7 - protein, 773 aa, unidentified
  REGION 1..773: note = Description of Unknown: Synthetic polypeptide
MILDTDYITENGKPVIRIFKKEKGEFKIEYDRNFEPYIYALLEDDESIEDIKKITGERHGKKVRIIRVEKVKKKFLGEPIEVWKLVFEHPQDYPAIRDAIRSHPAVREIFEYDIPFAKRYLIDKGLVPMEGGEELKLLAFAIATFYHEGDEFAEGEILMISYADESGAKVITWKKIDLPYVEVVSTEREAIKRFLQVLREKDPDVLLTYNGDNFDFAYIKKRCEKLGLKFTIGRDGSEPKIQRMGDRFAVEVKGRIHLDLAPVVRHTIRLPTYTLEAVYEAVFGKKKEKVYAEEIAEAWKSEEGLKRVAQYSMEDARATYELGREFFPMEVELAKLIGQSVWDVSRSSTGNLVEWYLLRVAYERNELAPNKPGGEEYQRRMRSSYIGGYVKEPEKGLWESIAYLDFRSSAGSIIVTHNVSPDTLEKECKNYDVAPIVGYRFCKDFKGFIPSILEDLIETRQKVKRKMKATIDPIEKKMLDYRQRALKILANSYYGYQGYPKARWYSKECAESVTAWGRHYIETTIKEAEKFGFKVLYADTDGFFATIPNEKPETIKSKAKKFLKHINEKLPGMLELEYEGFYLRGFFVTKKKYALIDEDGHITTRGLEVVRRDWSEIAKETQAKVLEVILREGSIEKAAGIVKKVVEDLANYRVPVEKLIIHEQITRELKRYKATGPHVAIAKRLQARGIKVKPGTIISYVVLKGSKKISDRVILFDEYDSSRHKYDPDYYIHNQVLPAVLRILEAFGYKEKDLEYQRMKQTGLIAWLKMGKK

SEQ ID NO: 8 - protein, 773 aa, unidentified
  REGION 1..773: note = Description of Unknown: Synthetic polypeptide
MILDTDYITENGKPVIRIFKKEKGEFKIEYDRNFEPYIYALLEDDESIEDIKKITGERHGKKVRIIRVEKVKKKFLGEPIEVWKLVFEHPQDYPAIRDAIRSHPAVREIFEYDIPFAKRYLIDKGLVPMEGGEELKLLAFAIATFYHEGDEFAEGEILMISYADESGAKVITWKKIDLPYVEVVSTEREAIKRFLQVLREKDPDVLLTYNGDNFDFAYIKKRCEKLGLKFTIGRDGSEPKIQRMGDRFAVEVKGRIHLDLAPVVRHTIRLPTYTLEAVYEAVFGKKKEKVYAEEIAEAWKSEEGLKRVAQYSMEDARATYELGREFFPREVELAKLIGQSVWDVSRSSTGNLVEWYLLRVAYERNELAPNKPGGEEYQRRMRSSYIGGYVKEPEKGLWESIAYLDFRSSAGSIIVTHNVSPDTLEKECKNYDVAPIVGYRFCKDFKGFIPSILEDLIETRQKVKRKMKATIDPIEKKMLDYRQRALKILANSYYGYQGYPKARWYSKECAESVTAWGRHYIETTIKEAEKFGFKVLYADTDGFFATIPNEKPETIKSKAKKFLKHINEKLPGMLELEYEGFYLRGFFVTKKKYALIDEDGHITTRGLEVVRRDWSEIAKETQAKVLEVILREGSIEKAAGIVKKVVEDLANYRVPVEKLIIHEQITRELKRYKATGPHVAIAKRLQARGIKVKPGTIISYVVLKGSKKISDRVILFDEYDSSRHKYDPDYYIHNQVLPAVLRILEAFGYKEKDLEYQRMKQTGLGAWLKMGKK

SEQ ID NO: 9 - protein, 757 aa, unidentified
  REGION 1..757: note = Description of Unknown: Synthetic polypeptide
MILDTDYITENGKPVIRIFKKEKGEFKIEYDRNFEPYIYALLEDDESIEDIKKITGERHGKKVRIIRVEKVKKKFLGEPIEVWKLVFEHPQDVPAIRDAIRSHPAVREIFEYDIPFAKRYLIDKGLVPMEGGEELKLLAFAIATFYHEGDEFAEGEILMISYADESGAKVITWKKIDLPYVEVVSTEREAIKRFLQVLREKDPDVLLTYNGDNFDFAYIKKRCEKLGLKFTIGRDGSEPKIQRMGDRFAVEVKGRIHLDLAPVVRHTIRLPTYTLEAVYEAVFGKKKEKVYAEEIAEAWKSEEGLKRVAQYSMEDARATYELGREFFPMEVELAKLIGQSVWDVSRSSTGNLVEWYLLRVAYERNELAPNKPGGEEYQRRMRSSYIGGYVKEPEKGLWESIAYLDFRSSAGSIIVTHNVSPDTLEKECKNYDVAPIVGYRFCKDFKGFIPSILEDLIETRQKVKRKMKATIDPIEKKMLDYRQRALKILANSYYGYQGYPKARWYSKECAESVTAWGRHYIETTIKEAEKFGFKVLYADTDGFFATIPNEKPETIKSKAKKFLKHINEKLPGMLELEYEGFYLRGFFVTKKKYALIDEDGHITTRGLEVVRRDWSEIAKETQAKVLEVILREGSIEKAAGIVKKVVEDLANYRVPVEKLIIHEQITRKLKDYKATGPHVAIAKRLQARGIKVQPGTIISYVVLKGSKKISDRVILFDEYDSSRHKYDPDYYIHNQVLPAVLRILEAFGYKEKDLEYQ

SEQ ID NO: 10 - protein, 773 aa, unidentified
  REGION 1..773: note = Description of Unknown: Synthetic polypeptide
MILDTDYITENGKPVIRIFKKEKGEFKIEYDRNFEPYIYALLEDDESIEDIKKITGERHGKKVRIIRVEKVKKKFLGEPIEVWKLVFEHPQDYPAIRDAIRSHPAVREIFEYDIPFAKRYLIDKGLVPMEGGEELKLLAFAIATFYHEGDEFAEGEILMISYADESGAKVITWKKIDLPYVEVVSTEREAIKRFLQVLREKDPDVLLTYNGDNFDFAYIKKRCEKLGLKFTIGRDGSEPKIQRMGDRFAVEVKGRIHLDLAPVVRHTIRLPTYTLEAVYEAVFGKKKEKVYAEEIAEAWKSEEGLKRVAQYSMEDARATYELGREFFPMEVELAKLIGQSVWDVSRSSTGNLVEWYLLRVAYERNELAPNKPGGEEYQRRMRSSYIGGYVKEPEKGLWESIAYLDFRSSAGSIIVTHNISPDTLEKECKNYDVAPIVGYRFCKDFKGFIPSILEDLIETRQKVKRKMKATIDPIEKKMLDYRQRALKILANSYYGYQGYPKARWYSKECAESVTAWGRHYIETTIKEAEKFGFKVLYADTDGFFATIPNEKPETIKSKAKKFLKHINEKLPGMLELEYEGFYLRGFFVTKKKYALIDEDGHITTRGLEVVRRDWSEIAKETQAKVLEVILREGSIEKAAGIVKKVVEDLANYRVPVEKLIIHEQITRELKRYKATGPHVAIAKRLQARGIKVKPGTIISYVVLKGSKKISDRVILFDEYDSSRHKYDPDYYIHNQVLPAVLRILEAFGYKEKDLEYQRMKQTGLGAWLKMGKK

SEQ ID NO: 11 - protein, 773 aa, unidentified
  REGION 1..773: note = Description of Unknown: Synthetic polypeptide
MILDTDYITENGKPVIRIFKKEKGEFKIEYDRNFEPYIYALLEDDESIEDIKKITGERHGKKVRIIRVEKVKKKFLGEPIEVWKLVFEHPQDYPAIRDAIRSHPAVREIFEYDIPFAKRYLIDKGLVPMEGGEELKLLAFAIATFYHEGDEFAEGEILMISYADESGAKVITWKKIDLPYVEVVSTEREAIKRFLQVLREKDPDVLLTYNGDNFDFQYIKKRCEKLGLKFTIGRDGSEPKIQRMGDRFAVEVKGRIHLDLAPVVRHTIRLPTYTLEAVYEAVFGKKKEKVYAEEIAEAWKSEEGLKRVAQYSMEDARATYELGREFFPMEVELAKLIGQSVWDVSRSSTGNLVEWYLLRVAYERNELAPNKPGGEEYQRRMRSSYIGGYVKEPEKGLWESIAYLDFRSSAGSIIVTHNVSPDTLEKECKNYDVAPIVGYRFCKDFKGFIPSILEDLIETRQKVKRKMKATIDPIEKKMLDYRQRALKILANSYYGYQGYPKARWYSKECAESVTAWGRHYIETTIKEAEKFGFKVLYADTDGFFATIPNEKPETIKSKAKKFLKHINEKLPGMLELEYEGFYLRGFFVTKKKYALIDEDGHITTRGLEVVRRDWSEIAKETQAKVLEVILREGSIEKAAGIVKKVVEDLANYRVPVEKLIIHEQITRELKRYKATGPHVAIAKRLQARGIKVKPGTIISYVVLKGSKKISDRVILFDEYDSSRHKYDPDYYIHNQVLPAVLRILEAFGYKEKDLEYQRMKQTGLGAWLKMGKK

SEQ ID NO: 12 - protein, 757 aa, unidentified
  REGION 1..757: note = Description of Unknown: Synthetic polypeptide
MILDTDYITENGKPVIRIFKKEKGEFKIEYDRNFEPYIYALLEDDESIEDIKKITGERHGKKVRIIRVEKVKKKFLGEPIEVWKLVFEHPQDVPAIRDAIRSHPAVREIFEYDIPFAKRYLIDKGLVPMEGGEELKLLAFAIATFYHEGDEFAEGEILMISYADESGAKVITWKKIDLPYVEVVSTEREAIKRFLQVLREKDPDVLLTYNGDNFDFAYIKKRCEKLGLKFTIGRDGSEPKIQRMGDRFAVEVKGRIHLDLAPVVRHTIRLPTYTLEAVYEAVFGKKKEKVYAEEIAEAWKSEEGLKRVAQYSMEDARATYELGREFFPMEVELAKLIGQSVWDVSRSSTGNLVEWYLLRVAYERNELAPNKPGGEEYQRRMRSSYIGGYVKEPEKGLWESIAYLDFRSSAGSIIVTHNVSPDTLEKECKNYDVAPIVGYRFCKDFKGFIPSILEDLIETRQKVKRKMKATIDPIEKKMLDYRQRALKILANSYYGYQGYPKARWYSKECAESVTAWGRHYIETTIKEAEKFGFKVLYADTDGFFATIPNEKPETIKSKAKKFLKHINEKLPGMLELEYEGFYLRGFFVTKKKYALIDEDGHITTRGLEVVRRDWSEIAKETQAKVLEVILREGSIEKAAGIVKKVVEDLANYRVPVEKLIIHELITRELKRYKATGPHVAIAKRLQARGIKVKPGTIISYVVLKGSKKISDRVILFDEYDSSRHKYDPDYYIHNQVLPAVLRILEAFGYKEKDLEYQ

SEQ ID NO: 13 - protein, 773 aa, unidentified
  REGION 1..773: note = Description of Unknown: Synthetic polypeptide
MILDTDYITENGKPVIRIFKKEKGEFKIEYDRNFEPYIYALLEDDESIEDIKKITGERHGKKVRIIRVEKVKKKFLGEPIEVWKLVFEHPQDVPAIRDAIRSHPAVREIFEYDIPFAKRYLIDKGLVPMEGGEELKLLAFRIATFYHEGDEFAEGEILMISYADESGAKVITWKKIDLPYVEVVSTEREAIKRFLQVLREKDPDVLLTYNGDNFDFAYIKKRCEKLGLKFTIGRDGSEPKIQRMGDRFAVEVKGRIHLDLAPVVRHTIRLPTYTLEAVYEAVFGKKKEKVYAEEIAEAWKSEEGLKRVAQYSMEDARATYELGREFFPMEVELAKLIGQSVWDVSRSSTGNLVEWYLLRVAYERNELAPNKPGGEEYQRRMRSSYIGGYVKEPEKGLWESIAYLDFRSSAGSIIVTHNVSPDTLEKECKNYDVAPIVGYRFCKDFKGFIPSILEDLIETRQKVKRKMKATIDPIEKKMLDYRQRALKILANSYYGYQGYPKARWYSKECAESVTAWGRHYIETTIKEAEKFGFKVLYADTDGFFATIPNEKPETIKSKAKKFLKHINEKLPGMLELEYEGFYLRGFFVTKKKYALIDEDGHITTRGLEVVRRDWSEIAKETQAKVLEVILREGSIEKAAGIVKKVVEDLANYRVPVEKLIIHEQITRELKDYKATGPHVAIAKRLQARGIKVKPGTIISYVVLKGSKKISDRVILFDEYDSSRHKYDPDYYIHNQVLPAVLRILEAFGYKEKDLEYQRMKQTGLGAWLKMGKK

SEQ ID NO: 14 - protein, 773 aa, unidentified
  REGION 1..773: note = Description of Unknown: Synthetic polypeptide
MILDTDYITENGKPVIRIFKKEKGEFKIEYDRNFEPYIYALLEDDESIEDIKKITGERHGKKVRIIRVEKVKKKFLGEPIEVWKLVFEHPQDYPAIRDAIRSHPAVREIFEYDIPFAKRYLIDKGLVPMEGGEELKLLAFAIATFYHEGDEFAEGEILMISYADESGAKVITWKKIDLPYVEVVSTEREAIKRFLQVLREKDPDVLLTYNGDNFDFAYIKKRCEKLGLKFTIGRDGSEPKIQRMGDRFAVEVKGRIHLDLAPVVRHTIRLPTYTLEAVYEAVFGKKKEKVYAEEIAEAWKSEEGLKRVAQYSMEDARATYELGREFFPMEVELAKLIGQSVWDVSRSSTGNLVEWYLLRVANERNELAPNKPGGEEYQRRMRSSYIGGYVKEPEKGLWESIAYLDFRSSAGSIIVTHNVSPDTLEKECKNYDVAPIVGYRFCKDFKGFIPSILEDLIETRQKVKRKMKATIDPIEKKMLDYRQRALKILANSYYGYQGYPKARWYSKECAESVTAWGRHYIETTIKEAEKFGFKVLYADTDGFFATIPNEKPETIKSKAKKFLKHINEKLPGMLELEYEGFYLRGFFVTKKKYALIDEDGHITTRGLEVVRRDWSEIAKETQAKVLEVILREGSIEKAAGIVKKVVEDLANYRVPVEKLIIHEQITRELKRYKATGPHVAIAKRLQARGIKVKPGTIISYVVLKGSKKISDRVILFDEYDSSRHKYDPDYYIHNQVLPAVLRILEAFGYKEKDLEYQRMKQTGLGAWLKMGKK

SEQ ID NO: 15 - protein, 773 aa, unidentified
  REGION 1..773: note = Description of Unknown: Synthetic polypeptide
MILDTDYITENGKPVIRIFKKEKGEFKIEYDRNFEPYIYALLEDDESIEDIKKITGERHGKKVRIIRVEKVKKKFLGEPIEVWKLVFEHPQDYPAIRDAIRSHPAVREIFEYDIPFAKRYLIDKGLVPMEGGEELKLLAFAIATFYHEGDEFAEGEILMISYADESGAKVITWNKIDLPYVEVVSTEREAIKRFLQVLREKDPDVLLTYNGDNFDFAYIKKRCEKLGLKFTIGRDGSEPKIQRMGDRFAVEVKGRIHLDLAPVVRHTIRLPTYTLEAVYEAVFGKKKEKVYAEEIAEAWKSEEGLKRVAQYSMEDARATYELGREFFPMEVELAKLIGQSVWDVSRSSTGNLVEWYLLRVAYERNELAPNKPGGEEYQRRMRSSYIGGYVKEPEKGLWESIAYLDFRSSAGSIIVTHNVSPDTLEKECKNYDVAPIVGYRFCKDFKGFIPSILEDLIETRQKVKRKMKATIDPIEKKMLDYRQRALKILANSYYGYQGYPKARWYSKECAESVTAWGRHYIETTIKEAEKFGFKVLYADTDGFFATIPNEKPETIKSKAKKFLKHINEKLPGMLELEYEGFYLRGFFVTKKKYALIDEDGHITTRGLEVVRRDWSEIAKETQAKVLEVILREGSIEKAAGIVKKVVEDLANYRVPVEKLIIHEQITRELKRYKATGPHVAIAKRLQARGIKVKPGTIISYVVLKGSKKISDRVILFDEYDSSRHKYDPDYYIHNQVLPAVLRILEAFGYKEKDLEYQRMKQTGLGAWLKMGKK

SEQ ID NO: 16 - protein, 773 aa, unidentified
  REGION 1..773: note = Description of Unknown: Synthetic polypeptide
MILDTDYITENGKPVIRIFKKEKGEFKIEYDRNFEPYIYALLEDDESIEDIKKITGERHGKKVRIIRVEKVKKKFLGEPIEVWKLVFEHPKDVPAIRDAIRSHPAVREIFEYDIPFAKRYLIDKGLVPMEGGEELKLLAFNIATFYHEGDEFAEGEILMISYADESGAKVITWKKIDLPYVEVVSTEREAIKRFLQVLREKDPDVLLTYNGDNFDFAYIKKRCEKLGLKFTIGRDGSEPKIQRMGDRFAVEVKGRIHLDLAPVVRHTIRLPTYTLEAVYEAVFGKKKEKVYAEEIAEAWKSEEGLKRVAQYSMEDARATYELGREFFPLEVELAKLIGQSVWDVSRSSTGNLVEWYLLRVAYERNELAPNKPGGEEYQRRMRSSYIGGYVKEPEKGLWESIAYLDFRSSAGSIIVTHNVSPDTLEKECKNYDVAPIVGYRFCKDFKGFIPSILEDLIETRQKVKRKMKATIDPIEKKMLDYRQRALKILANSYYGYQGYPKARWYSKECAESVTAWGRHYIETTIKEAEKFGFKVLYADTDGFFATIPNEKPETIKSKAKKFLKHINEKLPGMLELEYEGFYLRGFFVTKKKYALIDEDGHITTRGLEVVRRDWSEIAKETQAKVLEVILREGSIEKAAGIVKKVVEDLANYRVPVEKLIIHEQITRELKRYKATGPHVAIAKRLQARGIKVKPGTIISYVVLKGSKKISDRVILFDEYDSSRHKYDPDYYIHNQVLPAVLRILEAFGYKEKDLEYQRMKQTGLGAWLKMGKK

SEQ ID NO: 17 - protein, 773 aa, unidentified
  REGION 1..773: note = Description of Unknown: Synthetic polypeptide
IILDTDYITENGKPVIRIFKKEKGEFKIEYDRNFEPYIYALLEDDESIEDIKKITGERHGKKVRIIRVEKVKKKFLGEPIEVWKLVFEHPQDYPAIRDAIRSHPAVREIFEYDIPFAKRYLIDKGLVPVEGGEELKLLAFAIATFYHEGDEFAEGEILMISYADESGAKVITWKKIDLPYVEVVSTEREAIKRFLQVLREKDPDVLLTYNGDNFDFAYIKKRCEKLGLKFTIGRDGSEPKIQRMGDRFAVEVKGRIHLDLAPVVRHTIRLPTYTLEAVYEAVFGKKKEKVYAEEIAEAWKSEEGLKRVAQYSMEDARATYELGREFFPMEVELAKLIGQSVWDVSRSSTGNLVEWYLLRVAYERNELAPNKPGGEEYQRRMRSSYIGGYVKEPEKGLWESIAYLDFRSSAGSIIVTHNVSPDTLEKECKNYDVAPIVGYRFCKDFKGFIPSILEDLIETRQKVKRKMKATIDPIEKKMLDYRQRALKILANSYYGYQGYPKARWYSKECAESVTAWGRHYIETTIKEAEKFGFKVLYADTDGFFATIPNEKPETIKSKAKKFLKHINEKLPGMLELEYEGFYLRGFFVTKKKYALIDEDGHITTRGLEVVRRDWSEIAKETQAKVLEVILREGSIEKAAGIVKKVVEDLANYRVPVEKLIIHEQITRELKRYKATGPHVAIAKRLQARGIKVKPGTIISYVVLKGSKKISDRVILFDEYDSSRHKYDPDYYIHNQVLPAVLRILEAFGYKEKDLEYQRMKQTGLGAWLKMGKK

SEQ ID NO: 18 - protein, 757 aa, unidentified
  REGION 1..757: note = Description of Unknown: Synthetic polypeptide
MILDTDYITENGKPVIRIFKKEKGEFKIEYDRNFEPYIYALLEDDESIEDIKKITGERHGKKVRIIRVEKVKKKFLGEPIEVWKLVFEHPQDVPAIRDAIRSHPAVREIFEYDIPFAKRYLIDKGLVPMEGGEELKLLAFAIATFYHEGDEFAEGEILMISYADESGAKVITWKKIDLPYVEVVSTEREAIKRFLQVLREKDPDVLLTYNGDNFDFAYIKKRCEKLGLKFTIGRDGSEPKIQRMGDRFAVEVKGRIHLDLAPVVRHTIRLPTYTLEAVYEAVFGKKKEKVYAEEIAEAWKSEEGLKRVAQYSMEDARATYELGREFFPLEVELAKLIGQSVWDVSRSSTGNLVEWYLLRVAYERNELAPNKPGGEEYQRRMRSSYIGGYVKEPEKGLWESIAYLDFRSSAGSIIVTHNVSPDTLEKECKNYDVAPIVGYRFCKDFKGFIPSILEDLIETRQKVKRKMKATIDPIEKKMLDYRQRALKILANSYYGYQGYPKARWYSKECAESVTAWGRHYIETTIKEAEKFGFKVLYADTDGFFATIPNEKPETIKSKAKKFLKHINEKLPGMLELEYEGFYLRGFFVTKKKYALIDEDGHITTRGLEVVRRFWSEIAKETQAKVLEVILREGSIEKAAGIVKKVVEDLANYRVPVEKLIIHEQITRELKRYKATGPHVAIAKRLQARGIKVKPGTIISYVVLKGSKKISDRVILFDEYDSSRHKYDPDYYIHNQVLPAVLRILEAFGYKEKDLEYQ

SEQ ID NO: 19 - protein, 773 aa, unidentified
  REGION 1..773: note = Description of Unknown: Synthetic polypeptide
MILDTDFITENGKPVIRIFKKEKGEFKIEYDRNFEPYIYALLEDDESIEDIKKITGERHGKKVRIIRVEKVKKKFLGEPIEVWKLVFEHPQDFPAIRDAIRSHPAVREIFEYDIPFAKRYLIDKGLVPMEGGEELKLLAFNIATFYHEGDEFAEGEILMISYADESGAKVITWKKIDLPYVEVVSTEREAIKRFLQVLREKDPDVLLTYNGDNFDFAYIKKRCEKLGLKFTIGRDGSEPKIQRMGDRFAVEVKGRIHLDLAPVVRHTIRLPTYTLEAVYEAVFGKKKEKVYAEEIAEAWKSEEGLKRVAQYSMEDARATYELGREFFPLEVELAKLIGQSVWDVSRSSTGNLVEWYLLRVAYERNELAPNKPGGEEYQRRMRSSYIGGYVKEPEKGLWESIAYLDFRSSAGSIIVTHNVSPDTLEKECKNYDVAPIVGYRFCKDFKGFIPSILEDLIETRQKVKRKMKATIDPIEKKMLDYRQRALKILANSYYGYQGYPKARWYSKECAESVTAWGRHYIETTIKEAEKFGFKVLYADTDGFFATIPNEKPETIKSKAKKFLKHINEKLPGMLELEYEGFYLRGFFVTKKKYALIDEDGHITTRGLEVVRRDWSEIAKETQAKVLEVILREGSIEKAAGIVKKVVEDLANYRVPVEKLIIHEQITRELKRYKATGPHVAIAKRLQARGIKVKPGTIISYVVLKGSKKISDRVILFDEYDSSRHKYDPDYYIHNQVLPAVLRILEAFGYKEKDLEYQRMKQTGLGAWLKMGKK

SEQ ID NO: 20 - protein, 773 aa, unidentified
  REGION 1..773: note = Description of Unknown: Synthetic polypeptide
MILDTDYITENGKPVIRIFKKEKGEFKIEYDRNFEPYIYALLEDDESIEDIKKITGERHGKKVRIIRVEKVKKKFLGEPIEVWKLVFEHPQDVPAIRDAIRSHPAVREIFEYDIPFAKRYLIDKGLVPMEGGEELKLLAFNIATFYHEGDEFAEGEILMISYADESGAKVITWKKIDLPYVEVVSTEREAIKRFLQVLREKDPDVLLTYNGDNFDFAYIKKRCEKLGLKFTIGRDGSEPAIQRMGDRFAVEVKGRIHLDLAPVVRHTIRLPTYTLEAVYEAVFGKKKEKVYAEEIAEAWKSEEGLARVAQYSMEDARATYELGREFFPLEVELAKLIGQSVWDVSRSSTGNLVEWYLLRVAYERNELAPNKPGGEEYQRRMRSSYIGGYVKEPEKGLWESIAYLDFRSSAGSIIVTHNVSPDTLEKECKNYDVAPIVGYRFCKDFKGFIPSILEDLIETRQKVKRKMRATIDPIEKKMLDYRQRALKILANSYYGYQGYPKARWYSKECAESVTAWGRHYIETTIKEAEKFGFKVLYADTDGFFATIPNEKPETIKSKAKKFLKHINEKLPGMLELEYEGFYLRGFFVTKKKYALIDEDGHITTRGLEVVRRDWSEIAKETQAKVLEVILREGSIEKAAGIVKKVVEDLANYRVPVEKLIIHEQITRELKRYKATGPHVAIAKRLQARGIKVKPGTIISYVVLKGSKKISDRVILFDEYDSSRHKYDPDYYIHNQVLPAVLRILEAFGYKEKDLEYQRMKQTGLGAWLKMGKK

SEQ ID NO: 21 - protein, 773 aa, unidentified
  REGION 1..773: note = Description of Unknown: Synthetic polypeptide
MILDTDYITENGKPVIRIFKKEKGEFKIEYDRNFEPYIYALLEDDESIEDIKKITGERHGKKVRIIRVEKVKKKFLGEPIEVWKLVFEHPQDYPAIRDAIRSHPAVREIFEYDIPFAKRYLIDKGLVPMEGGEELKLLAFAIATFYHEGDEFAEGEILMISYADESGAKVITWKKIDLPYVEVVSTEREAIKRFLQVLREKDPDVLLTYNGDNFDFAYIKKRCEKLGLKFTIGRDGSEPKIQRMGDRFAVEVKGRIHLDLAPVVRHTIRLPTYRLEAVYEAVFGKKKEKVYAEEIAEAWKSEEGLKRVAQYSMEDARATYELGREFFPMEVELAKLIGQSVWDVSRSSTGNLVEWYLLRVAYERNELAPNKPGGEEYQRRMRSSYIGGYVKEPEKGLWESIAYLDFRSSAGSIIVTHNVSPDTLEKECKNYDVAPIVGYRFCKDFKGFIPSILEDLIETRQKVKRKMKATIDPIEKKMLDYRQRALKILANSYYGYQGYPKARWYSKECAESVTAWGRHYIETTIKEAEKFGFKVLYADTDGFFATIPNEKPETIKSKAKKFLKHINEKLPGMLELEYEGFYLRGFFVTKKKYALIDEDGHITTRGLEVVRRDWSEIAKETQAKVLEVILREGSIEKAAGIVKKVVEDLANYRVPVEKLIIHEQITRELKRYKATGPHVAIAKRLQARGIKVKPGTIISYVVLKGSKKISDRVILFDEYDSSRHKYDPDYYIHNQVLPAVLRILEAFGYKEKDLEYQRMKQTGLGAWLKMGKK

SEQ ID NO: 22 - protein, 773 aa, unidentified
  REGION 1..773: note = Description of Unknown: Synthetic polypeptide
MILDTDYITENGKPVIRIFKKEKGEFKIEYDRNFEPYIYALLEDDESIEDIKKITGERHGKKVRIIRVEKVKKKFLGEPIEVWKLVFEHPQDYPAIRDAIRSHPAVREIFEYDIPFAKRYLIDKGLVPMEGGEELKLLAFAIATFYHEGDEFAEGEILMISYADESGAKVITWKKIDLPYVEVVSTEREAIKRFLQVLREKDPDVLLTYNGDNFDFAYIKKRCEKLGLKFTIGRDGSEPKIQRMGDRFAVEVKGRIHLDLAPVVRHTIRLPTYTLEAVYEAVFGKKKEKVYAEEIAEAWKSEEGLKRVAQYSMEDARATYELGREFFPMEVELAKLIGQSVWDVSRSSTGNLVEWYLLRVAYERNELAPNKPGGEEYQRRMRSSYIGGYVKEPEKGLWESIAYLDFRSSAGSIIVTHNVSPDTLEKECKNYDVAPIVGYRFCKDFKGFIPSILEDLIETRQKVKRKMKATIDPIEKKMLDYRQRALKILANSYYGYQGYPKARWYSKECAESVTAWGRHYIETTIKEAEKFGFKVLYADTDGFFATIPNEKPETIKSKAKKFLKHINEKLPGMLELEYEGFYLRGFFVTKKKYALIDEDGHITTRGLEVVRRDWSEIAKETQAKVLEVILREGSIEKAAGIVKKVVEDLANYRVPVEKLIIHEQITRELKRYKATGPHVAIAKRLQARGIDVKPGTIISYVVLKGSKKISDRVILFDEYDSSRHKYDPDYYIHNQVLPAVLRILEAFGYKEKDLEYQRMKQTGLGAWLKMGKK

SEQ ID NO: 23 - protein, 773 aa, unidentified
  REGION 1..773: note = Description of Unknown: Synthetic polypeptide
MILDTDYITENGKPVIRIFKKEKGEFKIEYDRNFEPYIYALLEDDESIEDIKKITGERHGKKVRIIRVEKVKKKFLGEPIEVWKLVFEHPQDYPAIRDAIRSHPAVREIFEYDIPFAKRYLIDKGLVPMEGGEELKLLAFAIATFYHEGDEFAEGEILMISYADESGAKVITWKKIDLPYVEVVSTEREAIKRFLQVLREKDPDVLLTYNGDNFDFAYIKKRCEKLGLKFTIGRDGSEPKIQRMGDRFAVEVKGRIHLDLAPVVRHTIRLPTYTLEAVYEAVFGKKKEKVYAEEIAEAWKSEEGLKRVAQYSMEDARATYELGREFFPMEVELAKLIGQSVWDVSRSSTGNLVEWYLLRVAYERNELAPNKPGGEEYQRRMRSSYIGGYVKEPEKGLWESIAYLDFRSSAGSIIVTHNVSPDTLEKECKNYDVAPIVGYRFCKDFKGFIPSILEDLIETRQKVKRKMKATIDPIEKKMLDYRQRALKILANSYYGYQGYPKARWYSKECAESVTAWGRHYIETTIKEAEKFGFKVLYADTDGFFATIPNEKPEVIKSKAKKFLKHINEKLPGMLELEYEGFYLRGFFVTKKKYALIDEDGHITTRGLEVVRRDWSEIAKETQAKVLEVILREGSIEKAAGIVKKVVEDLANYRVPVEKLIIHEQITRELKRYKATGPHVAIAKRLQARGIKVKPGTIISYVVLKGSKKISDRVILFDEYDSSRHKYDPDYYIHNQVLPAVLRILEAFGYKEKDLEYQRMKQTGLGAWLKMGKK

SEQ ID NO: 24 - protein, 773 aa, unidentified
  REGION 1..773: note = Description of Unknown: Synthetic polypeptide
MILDTDYITENGKPVIRIFKKEKGEFKIEYDRNFEPYIYALLEDDESIEDIKKITGERHGKKVRIIRVEKVKKKFLGEPIEVWKLVFEHPQDVPAIRDAIRSHPAVREIFEYDIPFAKRYLIDKGLVPMEGGEELKLLAFNIATFYHEGDEFAEGEILMISYADESGAKVITWKKIDLPYVEVVSTEREAIKRFLQVLREKDPDVLLTYNGDNFDFAYIKKRCEKLGLKFTIGRDGSEPKIQRMGDRFAVEVKGRIHLDLAPVVRHTIRLPTYTLEAVYEAVFGKKKEKVYAEEIAEAWKSEEGLKRVAQYSMEDARATYELGREFFPLEVELAKLIGQSVWDVSRSSTGNLVEWYLLRVAYERNELAPNKPGGEEYQRRMRSSYIGGYVKEPEKGLWESIAYLDFRSSAGSIIVTHNVSPDTLEKECKNYDVAPIVGYRFCKDFKGFIPSILEDLIETRQKVKRKMKATIDPIEKKMLDYRQRALKILANSYYGYQGYPKARWYSKECAESVTAWGRHYIETTIKEAEKFGFKVLYADTDGFFATIPNEKPETIKSKAKKFLKHINEKLPGMLELEYEGFYLRGFFVTKKNYALIDEDGHITTRGLEVVRRDWSEIAKETQAKVLEVILREGSIEKAAGIVKKVVEDLANYRVPVEKLIIHEQITRELKRYKATGPHVAIAKRLQARGIKVKPGTIISYVVLKGSKKISDRVILFDEYDSSRHKYDPDYYIHNQVLPAVLRILEAFGYKEKDLEYQRMKQTGLGAWLKMGKK

SEQ ID NO: 25 - protein, 773 aa, unidentified
  REGION 1..773: note = Description of Unknown: Synthetic polypeptide
MILDTDYITENGKPVIRIFKKEKGEFKIEYDRNFEPYIYALLEDDESIEDIKKITGERHGKKVRIIRVEKVKKKFLGEPIEVWKLVFEHPQDVPAIRDAIRSHPAVREIFEYDIPFAKRYLIDKGLVPMEGGEELKLLAFNIATFYHEGDEFAEGEILMISYADESGAKVITWKKIDLPYVEVVSTEREAIKRFLQVLREKDPDVLLTYNGDNFDFAYIKKRCEKLGLKFTIGRDGSEPKIQRMGDRFAVEVKGRIHLDLAPVVRHTIRLPTYTLEAVYEAVFGKKKEKVYAEEIAEAWKSEEGLKRVAQYSMEDARATYELGREFFPLEVELAKLIGQSVWDVSRSSTGNLVEWYLLRVAYERNELAPNQPGGEEYQRRMRSSYIGGYVKEPEKGLWESIAYLDFRSSAGSIIVTHNVSPDTLEKECKNYDVAPIVGYRFCKDFKGFIPSILEDLIETRQKVKRKMKATIDPIEKKMLDYRQRALKILANSYYGYQGYPKARWYSKECAESVTAWGRHYIETTIKEAEKFGFKVLYADTDGFFATIPNEKPETIKSKAKKFLKHINEKLPGMLELEYEGFYLRGFFVTKKKYALIDEDGHITTRGLEVVRRDWSEIAKETQAKVLEVILREGSIEKAAGIVKKVVEDLANYRVPVEKLIIHEQITRELKRYKATGPHVAIAKRLQARGIKVKPGTIISYVVLKGSKKISDRVILFDEYDSSRHKYDPDYYIHNQVLPAVLRILEAFGYKEKDLEYQRDKQTGLGAWLKMGKK

SEQ ID NO: 26 - protein, 773 aa, unidentified
  REGION 1..773: note = Description of Unknown: Synthetic polypeptide
MILDTDYITENGKPVIRIFKKEKGEFKIEYDRNFEPYIYALLEDDESIEDIKKITGERHGKKVRIIRVEKVKKKFLGEPIEVWKLVFEHPQDYPAIRDAIRSHPAVREIFEYDIPFAKRYLIDKGLVPMEGGEELKLLAFAIATFYHEGDEFAEGEILMISYADESGAKVITWKKIDLPYVEVVSTEREAIKRFLQVLREKDPDVLLTYNGDNFDFAYIKKRCEKLGLKFTIGRDGSEPKIQRMGDRFAVEVKGRIHLDLAPVVRHTIRLPTYTLEAVYEAVFGKKKEKVYAEEIAEAWKSEEGLKRVAQYSMEDARATYELGREFFPMEVELAKLIGQSVWDVSRSSTGNLVEWYLLRVAYERNELAPNKPGGEEYQRRMRSSYIGGYVKEPEKGLWESIAYLDFRSSAGSIIVTHNVSPDTLEKECKNYDVAPIVGYRFCKDFKGFIPSILEDLIETRQKVKRKMKATIDPIEKKMLDYRQRALKILANSYYGYQGYPKARWYSKECAESVTAWGRHYIETTIKEAEKFGFKVLYADTDGFFATIPNEKPETIKSKAKKFLKHINEKLPGMLELEYEGFYLRGFFVTKKKYALIDEDGTITTRGLEVVRRDWSEIAKETQAKVLEVILREGSIEKAAGIVKKVVEDLANYRVPVEKLIIHEQITRELKRYKATGPHVAIAKRLQARGIKVKPGTIISYVVLKGSKKISDRVILFDEYDSSRHKYDPDYYIHNQVLPAVLRILEAFGYKEKDLEYQRMKQTGLGAWLKMGKK

SEQ ID NO: 27 - protein, 773 aa, unidentified
  REGION 1..773: note = Description of Unknown: Synthetic polypeptide
MILDTDYITENGKPVIRIFKKEKGEFKIEYDRNFEPYIYALLEDDESIEDIKKITGERHGKKVRIIRVEKVKKKFLGEPIEVWKLVFEHPQDYPAIRDAIRSHPAVREIFEYDIPFAKRYLIDKGLVPMEGGEELKLLAFAIATFYHEGDEFAEGEILMISYADESGAKVITWKKIDLPYVEVVSTEREAIKRFLQVLREKDPDVLLTYNGDNFDFAYIKKRCEKLGLKFTIGRDGSEPKIQRMGDRFAVEVKGRIHLDLAPVVRHTIRLPTYTLEAVYEAVFGKKKEKVYAEEIAEAWKSEEGLKRVAQYSREDARATYELGREFFPMEVELAKLIGQSVWDVSRSSTGNLVEWYLLRVAYERNELAPNKPGGEEYQRRMRSSYIGGYVKEPEKGLWESIAYLDFRSSAGSIIVTHNVSPDTLEKECKNYDVAPIVGYRFCKDFKGFIPSILEDLIETRQKVKRKMKATIDPIEKKMLDYRQRALKILANSYYGYQGYPKARWYSKECAESVTAWGRHYIETTIKEAEKFGFKVLYADTDGFFATIPNEKPETIKSKAKKFLKHINEKLPGMLELEYEGFYLRGFFVTKKKYALIDEDGHITTRGLEVVRRDWSEIAKETQAKVLEVILREGSIEKAAGIVKKVVEDLANYRVPVEKLIIHEQITRELKRYKATGPHVAIAKRLQARGIKVKPGTIISYVVLKGSKKISDRVILFDEYDSSRHKYDPDYYIHNQVLPAVLRILEAFGYKEKDLEYQRMKQTGLGAWLKMGKK

SEQ ID NO: 28 - protein, 773 aa, unidentified
  REGION 1..773: note = Description of Unknown: Synthetic polypeptide
MILDTDYITENGKPVIRIFKKEKGEFKIEYDRNFEPYIYALLEDDESIEDIKKITGERHGKKVRIIRVEKVKKKFLGEPIEVWKLVFEHPQDYPAIRDAIRSHPAVREIFEYDIPFAKRYLIDKGLVPMEGGEELKLLAFAIATFYHEGDEFAEGEILMISYADESGAKVITWKKIDLPYVEVVSTEREAIKRFLQVLREKDPDVLLTYNGDNFDFAYIKKRCEKLGLKFTIGRDGSEPKIQRMGDRFAVEVKGRIHLDLAPVVRHTIRLPTYTLEAVYEAVFGKKKEKVYAEEIAEAWKSEEGLKRVAQYSMEDARATYELGREFFPMEVELAKLIGQSVWDVSRSSTGNLVEWYLLRVAYERNELAPNKPGGEEYQRRMRSSYIGGYVKEPEKGLWESIAYLDFRSSAGSIIVTHNVSPDTLEKECKNYDVAPIVGYRFCKDFKGFIPSILEDLIETRQKVKRKMKATIDPIEKKMLDYRQRALKILANSYYGYQGYPKARWYSKECAESVTAWGRHYIETTIKEAEKFGFKVLYADTDGFFATIPNEKPETIKSKAKKFLKHINEKLPGMLELEYEGFYLRGFFVTKKKYALIDEDGHITTRGLEVVRRDWSEIAKETQAKVLEVILREGSIEKAAGIVKKVVEDLANYRVPVEKLIIHEQITRELKRYKATGPHVAIAKRLQARGIKVKPGTIISYVVLKGSKKISDRVILFDEYDSSRHKYDPDYYIHNQVLKAVLRILEAFGYKEKDLEYQRMKQTGLGAWLKMGKK

SEQ ID NO: 29 - protein, 773 aa, unidentified
  REGION 1..773: note = Description of Unknown: Synthetic polypeptide
MILDTDYITENGKPVIRIFKKEKGEFKIEYDRNFEPYIYALLEDDESIEDIKKITGERHGKKVRIIRVEKVKKKFLGEPIEVWKLVFEHPQDYPAIRDAIRSHPAVREIFEYDIPFAKRYLIDKGLVPMEGGEELKLLAFAIATFYHEGDEFAEGEILMISYADESGAKVITWKKIDLPYVEVVSTEREAIKRFLQVLREKDPDVLLTYNGDNFDFAYIKKRCEKLGLKFTIGRDGSEPKIQRMGDRFAVEVKGRIHLDLAPVVRHTIRLPTYTLEAVYEAVFGKKKEKVYAEEIAEAWKSEEGLKRVAQYSMEDARATYELGREFFPMEVELAKLIGQSVWDVSRSSTGNLVEWYLLRVAYERNELAPNKPGGEEYQRRMRSSYIGGYVKEPEKGLWESIAYLDFRSSAGSIIVTHNVSPDTLEKECKNYDVAPIVGYRFCKDFKGFIPSILEDLIETRQKVKRKMKATIDPIEKKMLDYRQRALKILANSYYGYQGYPKARWYSKECAESVTAWGRHYIETTIKEAEKFGFKVLYADTDGFFATIPNEKPETIKSKAKKFLKHINEKLPGMLELEYEGFYLRGFFVTKKKYALIDEDGHITTRGLEVVRRDWSEIAKETQAKVLEVILREGSIEKAAGIVKKVVEDLANYRVPVEKLIIHEQITRELKRYKATGPKVAIAKRLQARGIKVKPGTIISYVVLKGSKKISDRVILFDEYDSSRHKYDPDYYIHNQVLPAVLRILEAFGYKEKDLEYQRMKQTGLGAWLKMGKK

SEQ ID NO: 30 - protein, 773 aa, unidentified
  REGION 1..773: note = Description of Unknown: Synthetic polypeptide
MILDTDYITENGKPVIRIFKKEKGEFKIEYDRNFEPYIYALLEDDESIEDIKKITGERHGKKVRIIRVEKVKKKFLGEPIEVWKLVFEHPQDVPAIRDAIRSHPAVREIFEYDIPFAKRYLIDKGLVPMEGGEELKLLAFNIATFYHEGDEFAEGEILMISYADESGAKVITWKKIDLPYVEVVSTEREAIKRFLQVLREKDPDVLLTYNGDNFDFAYIKKRCEKLGLKFTIGRDGSEPKIQRMGDRFAVEVKGRIHLDLAPVVRHTIRLPTYTLEAVYEAVFGKKKEKVYAEEIAEAWKSEEGLKRVAQYSMEDARATYELGREFFPIEVELAKLIGQSVWDVSRSSTGNLVEWYLLRVAYERNELAPNKPGGEEYQRRMRSSYIGGYVKEPEKGLWESIAYLDFRSSAGSIIVTHNVSPDTLEKECKNYDVAPIVGYRFCKDFKGFIPSILEDLIETRQKVKRKMKATIDPIEKKMLDYRQRALKILANSYYGYQGYPKARWYSKECAESVTAWGRHYIETTIKEAEKFGFKVLYADTDGFFATIPNEKPETIKSKAKKFLKHINEKLPGMLELEYEGFYLRGFFVTKKKYALIDEDGHITTRGLEVVRRDWSEIAKETQAKVLEVILREGSIEKAAGIVKKVVEDLANYRVPVEKLIIHEQITRELKRYKATGPHVAIAKRLQARGIKVKPGTIISYVVLKGSKKISDRVILFDEYDSSRHKYDPDYYIHNQVLPAVLRILEAFGYKEKDLEYQRMKQTGLGAWLKMGKK

SEQ ID NO: 31 - protein, 757 aa, unidentified
  REGION 1..757: note = Description of Unknown: Synthetic polypeptide
MILDTDYITENGKPVIRIFKKEKGEFKIEYDRNFEPYIYALLEDDESIEDIKKITGERHGKKVRIIRVEKVKKKFLGEPIEVWKLVFEHPQDVPAIRDAIRSHPAVREIFEYDIPFAKRYLIDKGLVPMEGGEELKLLAFAIATFYHEGDEFAEGEILMISYADESGAKVITWKKIDLPYVEVVSTEREAIKRFLQVLREKDPDVLLTYNGDNFDFAYIKKRCEKLGLKFTIGRDGSEPKIQRMGDRFAVEVKGRIHLDLAPVVRHTIRLPTYTLEAVYEAVFGKKKEIVYAEEIAEAWKSEEGLKRVAQYSMEDARATYELGREFFPMEVELAKLIGQSVWDVSRSSTGNLVEWYLLRVAYERNELAPNKPGGEEYQRRMRSSYIGGYVKEPEKGLWESIAYLDFRSSAGSIIVTHNVSPDTLEKECKNYDVAPIVGYRFCKDFKGFIPSILEDLIETRQKVKRKMKATIDPIEKKMLDYRQRALKILANSYYGYQGYPKARWYSKECAESVTAWGRHYIETTIKEAEKFGFKVLYADTDGFFATIPNEKPETIKSKAKKFLKHINEKLPGMLELEYEGFYLRGFFVTKKKYALIDEDGHITTRGLEVVRRDWSEIAKETQAKVLEVILREGSIEKAAGIVKKVVEDLANYRVPVEKLIIHEQITRELKRYKATGPHVAIAKRLQARGIKVKPGTIISYVVLKGSKKISDRVILFDEYDSSRHKYDPDYYIHNQVLPAVLRILEAFGYKEKDLEYQ

SEQ ID NO: 32 - protein, 773 aa, unidentified
  REGION 1..773: note = Description of Unknown: Synthetic polypeptide
MILDTDYITENGKPVIRIFKKEKGEFKIEYDRNFEPYIYALLEDDESIEDIKKITGERHGKKVRIIRVEKVKKKFLGEPIEVWKLVFEVPQDFPAIRDAIRSHPAVREIFEYDIPFAKRYLIDKGLVPMEGGEELKLLAFNIATFYHEGDEFAEGEILMISYADESGAKVITWKKIDLPYVEVVSTEREAIKRFLQVLREKDPDVLLTYNGDNFDFAYIKKRCEKLGLKFTIGRDGSEPKIQRMGDRFAVEVKGRIHLDLAPVVRHTIRLPTYTLEAVYEAVFGKKKEKVYAEEIAEAWKSEEGLKRVAQYSMEDARATYELGREFFPLEVELAKLIGQSVWDVSRSSTGNLVEWYLLRVAYERNELAPNKPGGEEYQRRMRSSYIGGYVKEPEKGLWESIAYLDFRSSAGSIIVTHNVSPDTLEKECKNYDVAPIVGYRFCKDFKGFIPSILEDLIETRQKVKRKMKATIDPIEKKMLDYRQRALKILANSYYGYQGYPKARWYSKECAESVTAWGRHYIETTIKEAEKFGFKVLYADTDGFFATIPNEKPETIKSKAKKFLKHINEKLPGMLELEYEGFYLRGFFVTKKKYALIDEDGHITTRGLEVVRRDWSEIAKETQAKVLEVILREGSIEKAAGIVKKVVEDLANYRVPVEKLIIHEQITRELKRYKATGPHVAIAKRLQARGIKVKPGTIISYVVLKGSKKISDRVILFDEYDSSRHKYDPDYYIHNQVLPAVLRILEAFGYKEKDLEYQRMKQTGLGAWLKMGKK

SEQ ID NO: 33 - protein, 773 aa, unidentified
  REGION 1..773: note = Description of Unknown: Synthetic polypeptide
MILDTDYITENGKPVIRIFKKEKGEFKIEYDRNFEPYIYALLEDDESIEDIKKITGERHGKKVRIIRVEKVKKKFLGEPIEVWKLVFEHPQDVPAIRDAIRSHPAVREIFEYDIPFAKRYLIDKGLVPMEGGEELKLLAFAIATFYHEGDEFAEGEILMISYADESGAKVITWKKIDLPYVEVVSTEREAIKRFLQVLREKDPDVLLTYNGDNFDFAYIKKRCEKLGLKFTIGRDGSEPKIQRMGDRFAVEVKGRIHLDLAPVVRHTIRLPTYTLEAVYEAVFGKKKEKVYAEEIAEAWKSEEGLKRVAQYSMEDARATYELGREFFPMEVELAKLIGQSVWDVSRSSTGNLVEWYLLRVAYERNELAPNKPGGEEYQRRMRSSYIGGYVKEPEKGLWESIAYLDFRSSAGSIIVTHNVSPDTLEKECKNYDVAPIVGYRFCKDFKGFIPSILEDLIETRQKVKRKMKATIDPIEKKMLDYRQRALKILANSYYGYQGYPKARWYSKENAEFVTAWGRHYIETTIKEAEKFGFKVLYADTDGFFATIPNEKPETIKSKAKKFLKHINEKLPGMLELEYEGFYLRGFFVTKKKYALIDEDGHITTRGLEVVRRDWSEIAKETQAKVLEVILREGSIEKAAGIVKKVVEDLANYRVPVEKLIIHEQITRELKDYKATGPHVAIAKRLQARGIKVKPGTIISYVVLKGSKKISDRVILFDEYDSSRHKYDPDYYIHNQVLPAVLRILEAFGYKEKDLEYQRMKQTGLGAWLKMGKK

SEQ ID NO: 34 - protein, 773 aa, unidentified
  REGION 1..773: note = Description of Unknown: Synthetic polypeptide
MILDTDYITENGKPVIRIFKKEKGEFKIEYDRNFEPYIYALLEDDESIEDIKKITGERHGKKVRIIRVEKVKKKFLGEPIEVWKLVFEHPQDVPAIRDAIRSHPAVREIFEYDIPFAKRYLIDKGLVPMEGGEELKLLAFNIATFYHEGDEFAEGEILMISYADESGAKVITWKKIDLPYVEVVSTEREAIKRFLQVLREKDPDVLLTYNGDNFDFAYIKKRCEKLGLKFTIGRDGSEPAIQRMGDRFAVEVKGRIHLDLAPVVRHTIRLPTYTLEAVYEAVFGKKKEKVYAEEIAEAWKSEEGLKRVAQYSMEDARATYELGREFFPLEVELAKLIGQSVWDVSRSSTGNLVEWYLLRVAYERNELAPNKPGGEEYQRRMRSSYIGGYVKEPEKGLWESIAYLDFRSSAGSIIVTHNVSPDTLEKECKNYDVAPIVGYRFCKDFKGFIPSILEDLIETRQKVKRKMKATIDPIEKKMLDYRQRALKILANSYYGYQGYPKARWYSKECAESVTAWGRHYIETTIKEAEKFGFKVLYADTDGFFATIPNEKPETIKSKAKKFLKHINEKLPGMLELEYEGFYLRGFFVTKKKYALIDEDGHITTRGLEVVRRDWSEIAKETQAKVLEVILREGSIEKAAGIVKKVVEDLANYRVPVEKLIIHEQITRELKRYKATGPHVAIAKRLQARGIKVKPGTIISYVVLKGSKKISDRVILFDEYDSSRHKYDPDYYIHNQVLPAVLRILEAFGYKEKDLEYQRMKQTGLGAWLKMGKK

SEQ ID NO: 35 - protein, 773 aa, unidentified
  REGION 1..773: note = Description of Unknown: Synthetic polypeptide
MILDTDYITENGKPVIRIFKKEKGEFKIEYDRNFEPYIYALLEDDESIEDIKKITGERHGKKVRIIRVEKVKKKFLGEPIEVWKLVFEHPQDYPAIRDAIRSHPAVREIFEYDIPFAKRYLIDKGLVPMEGGEELKLLAFAIATFYHEGDEFAEGEILMISYADESGAKVITWKKIDLPYVEVVSTEREAIKRFLQVLREKDPDVLLTYNGDNFDFAYIKKRCEKLGLKFTIGRDGSEPKIQRMGDRFAVEVKGRIHLDLAPVVRHTIRLPTYTLEAVYEAVFGKKKEQVYAEEIAEAWKSEEGLKRVAQYSMEDARATYELGREFFPMEVELAKLIGQSVWDVSRSSTGNLVEWYLLRVAYERNELAPNKPGGEEYQRRMRSSYIGGYVKEPEKGLWESIAYLDFRSSAGSIIVTHNVSPDTLEKECKNYDVAPIVGYRFCKDFKGFIPSILEDLIETRQKVKRKMKATIDPIEKKMLDYRQRALKILANSYYGYQGYPKARWYSKEDAERVTAWGRHYIETTIKEAEKFGFKVLYADTDGFFATIPNEKPETIKSKAKKFLKHINEKLPGMLELEYEGFYLRGFFVTKKKYALIDEDGHITTRGLEVVRRDWSEIAKETQAKVLEVILREGSIEKAAGIVKKVVEDLANYRVPVEKLIIHEQITRELKRYKATGPHVAIAKRLQARGIKVKPGTIISYVVLKGSKKISDRVILFDEYDSSRHKYDPDYYIHNQVLPAVLRILEAFGYKEKDLEYQRMKQTGLGAWLKMGKK

SEQ ID NO: 36 - protein, 773 aa, unidentified
  REGION 1..773: note = Description of Unknown: Synthetic polypeptide
MILDTDYITENGKPVIRIFKKEKGEFKIEYDRNFEPYIYALLEDDESIEDIKKITGERHGKKVRIIRVEKVKKKFLGEPIEVWKLVFEHPQDYPAIRDAIRSHPAVREIFEYDIPFAKRYLIDKGLVPMEGGEELKLLAFAIATFYHEGDEFAEGEILMISYADESGAKVITWKKIDLPYVEVVSTEREAIKRFLQVLREKDPDVLLTYNGDNFDFAYIKKRCEKLGLKFTIGRDGSEPQIQRMGDRFAVEVKGRIHLDLAPVVRHTIRLPTYTLEAVYEAVFGKKKEKVYAEEIAEAWKSEEGLKRVAQYSVEDARATYELGREFFPMEVELAKLIGQSVWDVSRSSTGNLVEWYLLRVAYERNELAPNKPGGEEYQRRMRSSYIGGYVKEPEKGLWESIAYLDFRSSAGSIIVTHNVSPDTLEKECKNYDVAPIVGYRFCKDFKGFIPSILEDLIETRQKVKRKMKATIDPIEKKMLDYRQRALKILANSYYGYQGYPKARWYSKECAESVTAWGRHYIETTIKEAEKFGFKVLYADTDGFFATIPNEKPETIKSKAKKFLKHINEKLPGMLELEYEGFYLRGFFVTKKKYALIDEDGHITTRGLEVVRRDWSEIAKETQAKVLEVILREGSIEKAAGIVKKVVEDLANYRVPVEKLIIHEQITRELKRYKATGPHVAIAKRLQARGIKVKPGTIISYVVLKGSKKISDRVILFDEYDSSRHKYDPDYYIHNQVLPAVLRILEAFGYKEKDLEYQRMKQTGLGAWLKMGKK

SEQ ID NO: 37 - protein, 773 aa, unidentified
  REGION 1..773: note = Description of Unknown: Synthetic polypeptide
MILDTDYITENGKPVIRIFKKEKGEFKIEYDRNFEPYIYALLEDDESIEDIKKITGERHGKKVRIIRVEKVKKKFLGEPIEVWKLVFEHPQDYPAIRDAIRSHPAVREIFEYDIPFAKRYLIDKGLVPMEGGEELKLLAFAIATFYHEGDEFAEGEILMISYADESGAKVITWKKIDLPYVEVVSTEREAIKRFLQVLREKDPDVLLTYNGDNFDFAYIKKRCEKLGLKFTIGRDGSEPKIQRMGDRFAVEVKGRIHLDLAPVVRHTIRLPTYTLEAVYEAVFGKKKEKVYAEEIAEAWKSEEGLKRVAQYSMEDARATYELGREFFPMEVELAKLIGQSVWDVSRSSTGNLVEWYLLRVAYERNELAPNKPGGEEYQRRMRSSYIGGYVKEPEKGLWESIAYLDFRSSAGSIIVTHNVSPDTLEKECKNYDVAPIVGYRFCKDFKGFIPSILEDLIETRQKVKRKMKATIDPIERKMLDYRQRALKILANSYYGYQGYPKARWYSKECAESVTAWGRHYIETTIKEAEKFGFKVLYADTDGFFATIPNEKPETIKSKAKKFLKHINEKLPGMLELEYEGFYLRGFFVTKKKYALIDEDGHITTRGLEVVRRDWSEIAKETQAKVLEVILREGSIEKAAGIVKKVVEDLANYRVPVEKLIIHEQITRELKRYKATGPHVAIAKRLQARGIKVKPGTIISYVVLKGSKKISDRVILFDEYDSSRHKYDPDYYIHNQVLPAVLRILEAFGYKEKDLEYQRMKQTGLGAWLKMGKK

SEQ ID NO: 38 - protein, 773 aa, unidentified
  REGION 1..773: note = Description of Unknown: Synthetic polypeptide
AILDTDYITENGKPVIRIFKKEKGEFKIEYDRNFEPYIYALLEDDESIEDIKKITGERHGKKVRIIRVEKVKKKFLGEPIEVWKLVFEHPQDVPAIRDAIRSHPAVREIFEYDIPFAKRYLIDKGLVPMEGGEELKLLAFNIATFYHEGDEFAEGEILMISYADESGAKVITWKKIDLPYVEVVSTEREAIKRFLQVLREKDPDVLLTYNGDNFDFAYIKKRCEKLGLKFTIGRDGSEPKIQRMGDRFAVEVKGRIHLDLAPVVRHTIRLPTYTLEAVYEAVFGKKKEKVYAEEIAEAWKSEEGLKRVAQYSMEDARATYELGREFFPLEVELAKLIGQSVWDVSRSSTGNLVEWYLLRVAYERNELAPNKPGGEEYQRRMRSSYIGGYVKEPEKGLWESIAYLDFRSSAGSIIVTHNVSPDTLEKECKNYDVAPIVGYRFCKDFKGFIPSILEDLIETRQKVKRKMKATIDPIEKKMLDYRQRALKILANSYYGYQGYPKARWYSKECAESVTAWGRHYIETTIKEAEKFGFKVLYADTDGFFATIPNEKPETIKSKAKKFLKHINEKLPGMLELEYEGFYLRGFFVTKKKYALIDEDGHITTRGLEVVRRDWSEIAKETQAKVLEVILREGSIEKAAGIVKKVVEDLANYRVPVEKLIIHEQITRELKRYKATGPHVAIAKRLQARGIKVKPGTIISYVVLKGSKKISDRVILFDEYDSSRHKYDPDYYIHNQVLPAVLRILEAFGYKEKDLEYQRMKQTGLGAWLKMGKK

SEQ ID NO: 39 - protein, 773 aa, unidentified
  REGION 1..773: note = Description of Unknown: Synthetic polypeptide
MILDTDYITENGKPVIRIFKKEKGEFKIEYDRNFEPYIYALLEDDESIEDIKKITGERHGKKVRIIRVEKVKKKFLGEPIEVWKLVFEHPQDYPAIRDAIRSHPAVREIFEYDIPFAKRYLIDKGLVPMEGGEELKLLAFAIATFYHEGDEFAEGEILMISYADESGAKVITWKKIDLPYVEVVSTEREAIKRFLQVLREKDPDVLLTYNGDNFDFAYIKKRCEKLGLKFTIGRDGSEPKIQRMGDRFAVEVKGRIHLDLAPVVRHTIRLPTYTLEAVYEAVFGKKKEKVYAEEIAEAWKSEEGLKRVAQYSMEDARATYELGREFFPMEVELAKLIGQSVWDVSRSSTGNLVEWYLLRVAYERNELAPNKPGGEEYQRRMRSSYIGGYVKEPEKGLWESIAYLDFRSSAGSIIVTHNVSPDTLEKECKNYDVAPQVGYRFCKDFKGFIPSILEDLIETRQKVKRKMKATIDPIEKKMLDYRQRALKILANSYYGYQGYPKARWYSKECAESVTAWGRHYIETTIKEAEKFGFKVLYADTDGFFATIPNEKPETIKSKAKKFLKHINEKLPGMLELEYEGFYLRGFFVTKKKYALIDEDGHITTRGLEVVRRDWSEIAKETQAKVLEVILREGSIEKAAGIVKKVVEDLANYRVPVEKLIIHEQITRELKRYKATGPHVAIAKRLQARGIKVKPGTIISYVVLKGSKKISDRVILFDEYDSSRHKYDPDYYIHNQVLPAVLRILEAFGYKEKDLEYQRMKQTGLGAWLKMGKK

SEQ ID NO: 40 - protein, 773 aa, unidentified
  REGION 1..773: note = Description of Unknown: Synthetic polypeptide
MILDTDYITENGKPVIRIFKKEKGEFKIEYDRNFEPYIYALLEDDESIEDIKKITGERHGKKVRIIRVEKVKKKFLGEPIEVWKLVFEHPQDVPAIRDAIRSHPAVREIFEYDIPFAKRYLIDKGLVPMEGGEELKLLAFTIATFYHEGDEFAEGEILMISYADESGAKVITWKKIDLPYVEVVSTEREAIKRFLQVLREKDPDVLLTYNGDNFDFAYIKKRCEKLGLKFTIGRDGSEPKIQRMGDRFAVEVKGRIHLDLAPVVRHTIRLPTYTLEAVYEAVFGKKKEKVYAEEIAEAWKSEEGLKRVAQYSMEDARATYELGREFFPLEVELAKLIGQSVWDVSRSSTGNLVEWYLLRVAYERNELAPNKPGGEEYQRRMRSSYIGGYVKEPEKGLWESIAYLDFRSSAGSIIVTHNVSPDTLEKECKNYDVAPIVGYRFCKDFKGFIPSILEDLIETRQKVKRKMKATIDPIEKKMLDYRQRALKILANSYYGYMGYPKARWYSKECAESVTAWGRHYIETTIKEAEKFGFKVLYADTDGFFATIPNEKPETIKSKAKKFLKHINEKLPGMLELEYEGFYLRGFFVTKKKYALIDEDGHITTRGLEVVRRDWSEIAKETQAKVLEVILREGSIEKAAGIVKKVVEDLANYRVPVEKLIIHEQITRELKRYKATGPHVAIAKRLQARGIKVKPGTIISYVVLKGSKKISDRVILFDEYDSSRHKYDPDYYIHNQVLPAVLRILEAFGYKEKDLEYQRMKQTGLGAWLKMGKK

SEQ ID NO: 41 - protein, 773 aa, unidentified
  REGION 1..773: note = Description of Unknown: Synthetic polypeptide
MILDTDAITENGKPVIRIFKKEKGEFKIEYDRNFEPYIYALLEDDESIEDIKKITGERHGKKVRIIRVEKVKKKFLGEPIEVWKLVFEHPQDVPAIRDAIRSHPAVREIFEYDIPFAKRYLIDKGLVPMEGGEELKLLAFNIATFYHEGDEFAEGEILMISYADESGAKVITWKKIDLPYVEVVSTEREAIKRFLQVLREKDPDVLLTYNGDNFDFAYIKKRCEKLGLKFTIGRDGSEPKIQRMGDRFAVEVKGRIHLDLAPVVRHTIRLPTYTLEAVYEAVFGKKKEKVYAEEIAEAWKSEEGLKRVAQYSMEDARATYELGREFFPLEVELAKLIGQSVWDVSRSSTGNLVEWYLLRVAYERNELAPNKPGGEEYQRRMRSSYIGGYVKEPEKGLWESIAYLDFRSSAGSIIVTHNVSPDTLEKECKNYDVAPIVGYRFCKDFKGFIPSILEDLIETRQKVKRKMKATIDPIEKKMLDYRQRALKILANSYYGYQGYPKARWYSKECAESVTAWGRHYIETTIKEAEKFGFKVLYADTDGFFATIPNEKPETIKSKAKKFLKHINEKLPGMLELEYEGFYLRGFFVTKKKYALIDEDGHITTRGLEVVRRDWSEIAKETQAKVLEVILREGSIEKAAGIVKKVVEDLANYRVPVEKLIIHEQITRELKRYKATGPHVAIAKRLQARGIKVKPGTIISYVVLKGSKKISDRVILFDEYDSSRHKYDPDYYIHNQVLPAVLRILEAFGYKEKDLEYQRMKQTGLGAWLKMGKK

SEQ ID NO: 42 - protein, 757 aa, unidentified
  REGION 1..757: note = Description of Unknown: Synthetic polypeptide
MILDTDYITENGKPVIRIFKKEKGEFKIEYDRNFEPYIYALLEDDESIEDIKKITGERHGKKVRIIRVEKVKKKFLGEPIEVWKLVFEHPQDVPAIRDAIRSHPAVREIFEYDIPFAKRYLIDKGLVPMEGGEELKLLAFAIATFYHEGDEFAEGEILMISYADESGAKVITWKKIDLPYVEVVSTEREAIKRFLQVLREKDPDVLLTYNGDNFDFAYIKKRCEKLGLKFTIGRDGSEPKIQRMGDRFAVEVKGRIHLDLAPVVRHTIRLPTYTLEAVYEAVFGKKKEKVYAEEIAEAWKSEEGLKRVAQYSMEDARATYELGREFFPMEVELAKLIGQSVWDVSRSSTGNLVEWYLLRVAYERNELAPNKPGGEEYQRRMRSSYIGGYVKEPEKGLWESIAYLDFRSSAGSIIVTHNVSPDTLEKECKNYDVAPIVGYRFCKDFKGFIPSILEDLIETRQKVKRKMKATIDPIEKKMLDYRQRALKILANSYYGYQGYPKARWYSKECAESVTAWGRHYIETTIKEAEKFGFKVLYADTDGFFATIPNEKPETIKSKAKKFLKHINEKLPGMLELEYEGFYLRGFFVTKKKYALIDEDGHITTRGLEVVRRDWSEIAKETQAKVLEVILREGSIEKAAGIVKKVVEDLANYRVPVEKLIIHEQITRKLKDYKATGPHVAIAKRLQARGIDVKPGTIISYVVLKGSKKISDRVILFDEYDSSRHKYDPDYYIHNQVLPAVLRILEAFGYKEKDLEYQ

SEQ ID NO: 43 - protein, 773 aa, unidentified
  REGION 1..773: note = Description of Unknown: Synthetic polypeptide
MILDTDYITENGKPVIRIFKKEKGEFKIEYDRNFEPYIYALLEDDESIEDIKKITGERHGKKVRIIRVEKVKKKFLGEPIEVWKLVFEHPQDVPAIRDAIRSHPAVREIFEYDIPFAKRYLIDKGLVPMEGGEELKLLAFNIATFYHEGDEFAEGEILMISYADESGAKVITWKKIDLPYVEVVSTEREAIKRFLQVLREKDPDVLLTYNGDNFDFAYIKKRCEKLGLKFTIGRDGSEPKIQRMGDRFAVEVKGRIHLDLAPVVRHTIRLPTYTLEAVYEAVFGKKKEKVYAEEIAEAWKSEEGLKRVAQYSVEDARATYELGREFFPLEVELAKLIGQSVWDVSRSSTGNLVEWYLLRVAYERNELAPNKPGGEEYQRRMRSSYIGGYVKEPEKGLWESIAYLDFRSSAGSIIVTHNVSPDTLEKECKNYDVAPIVGYRFCKDFKGFIPSILEDLIETRQKVKRKMRATIDPIEKKMLDYRQRALKILANSYYGYQGYPKARWYSKECAESVTAWGRHYIETTIKEAEKFGFKVLYADTDGFFATIPNEKPETIKSKAKKFLKHINEKLPGMLELEYEGFYLRGFFVTKKKYALIDEDGLITTRGLEVVRRDWSEIAKETQAKVLEVILREGSIEKAAGIVKKVVEDLANYRVPVEKLIIHEQITRELKRYKATGPHVAIAKRLQARGIKVKPGTIISYVVLKGSKKISDRVILFDEYDSSRHKYDPDYYIHNQVLPAVLRILEAFGYKEKDLEYQRMKQTGLGAWLKMGKK

SEQ ID NO: 44 - protein, 773 aa, unidentified
  REGION 1..773: note = Description of Unknown: Synthetic polypeptide
MILDTDYINENGKPVIRIFKKEKGEFKIEYDRNFEPYIYALLEDDESIEDIKKITGERHGKKVRIIRVEKVKKKFLGEPIEVWKLVFEHPQDVPAIRDAIRSHPAVREIFEYDIPFAKRYLIDKGLVPMEGGEELKLLAFNIATFYHEGDEFAEGEILMISYADESGAKVITWKKIDLPYVEVVSTEREAIKRFLQVLREKDPDVLLTYNGDNFDFAYIKKRCEKLGLKFTIGRDGSEPKIQRMGDRFAVEVKGRIHLDLAPVVRHTIRLPTYTLEAVYEAVFGKKKEKVYAEEIAEAWKSEEGLKRVAQYSMEDARATYELGREFFPLEVELAKLIGQSVWDVSRSSTGNLVEWYLLRVAYERNELAPNKPGGEEYQRRMRSSYIGGYVKEPEKGLWESIAYLDFRSSAGSIIVTHNVSPDTLEKECKNYDVAPIVGYRFCKDFKGFIPSILEDLIETRQKVKRKMKATIDPIEKKMLDYRQRALKILANSYYGYQGYPKARWYSKECAESVTAWGRHYIETTIKEAEKFGFKVLYADTDGFFATIPNEKPETIKSKAKKFLKHINEKLPGMLELEYEGFYLRGFFVTKKKYALIDEDGHITTRGLEVVRRDWSEIAKETQAKVLEVILREGSIEKAAGIVKKVVEDLANYRVPVEKLIIHEQITRELKRYKATGPHVAIAKRLQARGIKVKPGTIISYVVLKGSKKISDRVILFDEYDSSRHKYDPDYYIHNQVLPAVLRILEAFGYKEKDLEYQRMKQTGLGAWLKMGKK

SEQ ID NO: 45 - protein, 773 aa, unidentified
  REGION 1..773: note = Description of Unknown: Synthetic polypeptide
MILDTDYITENGKPVIRIFKKEKGEFKIEYDRNFEPYIYALLEDDESIEDIKKITGERHGKKVRIIRVEKVKKKFLGEPIEVWKLVFEHPQDVPAIRDAIRSHPAVREIFEYDIPFAKRYLIDKGLVPMEGGEELKLLAFNIATFYHEGDEFAEGEILMISYADESGAKVITWKKIDLPYVEVVSTEREAIKRFLQVLREKDPDVLLTYNGDNFDFAYIKKRCEKLGLKFTIGRDGSEPKIQRMGDRFAVEVKGRIHLDLAPVVRHTIRLPTYTLEAVYEAVFGKKKEKVYAEEIAEAWKSEEGLKRVAQYSMEDARATYELGREFFPLEVELAKLIGQSVWDVSRSSTGNLVEWYLLRVAYERNELAPNKPGGEEYQRRMRSSYIGGYVKEPEKGLWESIAYLDFRSSAGSIIVTHNVSPDTLEKECKNYDVAPIVGYRFCKDFKGFIPSILEDLIETRQKVKRKMKATIDPIEKKMLDYRQRALKILANSYYGYQGYPKARWYSKECAESVTAWGRHYIETTIKEAEKFGFKVLYADTDGFFATIPNEKPETIKSKAKKFLKHINEKLPGMLELEYEGFYLRGFFVTKKKYALIDEDGHITTRGLEVVRRDWSEIAKETQAKVLEVILREGSIEKAAGIVKKVVEDLANYRVPVEKLIIHEQITRELKRYKATGRHVAIAKRLQARGIKVKPGTIISYVVLKGSKKISDRVILFDEYDSSRHKYDPDYYIHNQVLPAVLRILEAFGYKEKDLEYQRMKQTGLGAWLKMGKK

SEQ ID NO: 46 - protein, 773 aa, unidentified
  REGION 1..773: note = Description of Unknown: Synthetic polypeptide
MILDTDYITENGKPVIRIFKKEKGEFKIEYDRNFEPYIYALLEDDESIEDIKKITGERHGKKVRIIRVEKVKKKFLGEPIEVWKLVFEHPYDFPAIRDAIRSHPAVREIFEYDIPFAKRYLIDKGLVPMEGGEELKLLAFNIATFYHEGDEFAEGEILMISYADESGAKVITWKKIDLPYVEVVSTEREAIKRFLQVLREKDPDVLLTYNGDNFDFAYIKKRCEKLGLKFTIGRDGSEPKIQRMGDRFAVEVKGRIHLDLAPVVRHTIRLPTYTLEAVYEAVFGKKKEKVYAEEIAEAWKSEEGLKRVAQYSMEDARATYELGREFFPLEVELAKLIGQSVWDVSRSSTGNLVEWYLLRVAYERNELAPNKPGGEEYQRRMRSSYIGGYVKEPEKGLWESIAYLDFRSSAGSIIVTHNVSPDTLEKECKNYDVAPIVGYRFCKDFKGFIPSILEDLIETRQKVKRKMKATIDPIEKKMLDYRQRALKILANSYYGYQGYPKARWYSKECAESVTAWGRHYIETTIKEAEKFGFKVLYADTDGFFATIPNEKPETIKSKAKKFLKHINEKLPGMLELEYEGFYLRGFFVTKKKYALIDEDGHITTRGLEVVRRDWSEIAKETQAKVLEVILREGSIEKAAGIVKKVVEDLANYRVPVEKLIIHEQITRELKRYKATGPHVAIAKRLQARGIKVKPGTIISYVVLKGSKKISDRVILFDEYDSSRHKYDPDYYIHNQVLPAVLRILEAFGYKEKDLEYQRMKQTGLGAWLKMGKK

SEQ ID NO: 47 - protein, 773 aa, unidentified
  REGION 1..773: note = Description of Unknown: Synthetic polypeptide
MILDTDYITENGKPVIRIFKKEKGEFKIEYDRNFEPYIYALLEDDESIEDIKKITGERHGKKVRIIRVEKVKKKFLGEPIEVWKLVFEHPQDVPAIRDAIRSHPAVREIFEYDIPFAKRYLIDKGLVPMEGGEELKLLAFYIATFYHEGDEFAEGEILMISYADESGAKVITWKKIDLPYVEVVSTEREAIKRFLQVLREKDPDVLLTYNGDNFDFAYIKKRCEKLGLKFTIGRDGSEPKIQRMGDRFAVEVKGRIHLDLAPVVRHTIRLPTYTLEAVYEAVFGKKKEKVYAEEIAEAWKSEEGLKRVAQYSMEWARATYELGREFFPMEVELAKLIGQSVWDVSRSSTGNLVEWYLLRVAYERNELAPNKPGGEEYQRRMRSSYIGGYVKEPEKGLWESIAYLDFRSSAGSIIVTHNVSPDTLEKECKNYDVAPIVGYRFCKDFKGFIPSILEDLIETRQKVKRKMKATIDPIEKKMLDYRQRALKILANSYYGYQGYPKARWYSKECAESVTAWGRHYIETTIKEAEKFGFKVLYADTDGFFATIPNEKPETIKSKAKKFLKHINEKLPGMLELEYEGFYLRGFFVTKKKYALIDEDGHITTRGLEVVRRDWSEIAKETQAKVLEVILREGSIEKAAGIVKKVVEDLANYRVPVEKLIIHEQITRELKDYKATGPHVAIAKRLQARGIKVKPGTIISYVVLKGSKKISDRVILFDEYDSSRHKYDPDYYIHNQVLPAVLRILEAFGYKEKDLEYQRMKQTGLGAWLKMGKK

SEQ ID NO: 48 - protein, 773 aa, unidentified
  REGION 1..773: note = Description of Unknown: Synthetic polypeptide
MILDTDYITENGKPVIRIFKKEKGEFKIEYDRNFEPYIYALLEDDESIEDIKKITGERHGKKVRIIRVEKVKKKFLGEPIEVWKLVFEHPQDYPAIRDAIRSHPAVREIFEYDIPFAKRYLIDKGLVPMEGGEELKLLAFAIATFYHEGDEFAEGEILMISYADESGAKVITWKKIDLPYVEVVSTEREAIKRFLQVLREKDPDVLLTYNGDNFDFAYIKKRCEKLGLKFTIGRDGSEPKIQRMGDRFAVEVKGRIHLDLAPVVRHTIRLPTYTLEAVYEAVFGKKKEKVYAEEIAEAWKSEEGLKRVAQYSMEDARATYELGREFFPMEVELAKLIGQSVWDVSRSSTGNLVEWYLLRVAYERNELAPNKPGGEEYQRRMRSSYIGGYVKEPEKGLWESIAYLDFRSSAGSIIVTHNVSPDTLEKECKNYDVAPIVGYRFCKDFKGFIPSILEDLIETRQKVKRKMKATIDPIEKKMLDYRQRALKVLANSYYGYQGYPKARWYSKECAESVTAWGRHYIETTIKEAEKFGFKVLYADTDGFFATIPNEKPETIKSKAKKFLKHINEKLPGMLELEYEGFYLRGFFVTKKKYALIDEDGHITTRGLEVVRRDWSEIAKETQAKVLEVILREGSIEKAAGIVKKVVEDLANYRVPVEKLIIHEQITRELKRYKATGPHVAIAKRLQARGIKVKPGTIISYVVLKGSKKISDRVILFDEYDSSRHKYDPDYYIHNQVLPAVLRILEAFGYKEKDLEYQRMKQTGLGAWLKMGKK

SEQ ID NO: 49 - protein, 773 aa, unidentified
  REGION 1..773: note = Description of Unknown: Synthetic polypeptide
MILDTDYITENGKPVIRIFKKEKGEFKIEYDRNFEPYIYALLEDDESIEDIKKITGERHGKKVRIIRVEKVKKKFLGEPIEVWKLVFEHPQDYPAIRDAIRSHPAVREIFEYDIPFAKRYLIDKGLVPMEGGEELKLLAFAIATFYHEGDEFAEGEILMISYADESGAKVITWKKIDLPYVEVVSTEREAIKRFLQVLREKDPDVLLTYNGDNFDFAYIKKRCEKLGLKFTIGRDGSEPKIQRMGDRFAVEVKGRIHLDLAPVVRHTIRLPTYTLEAVYEAVFGKKKEKVYAEEIAEAWKSEEGLKRVAQYSMEDARATYELGREFFPMEVELAKLIGQSVWDVSRSSTGNLVEWYLLRVAYERNELAPNKPGGEEYQRRMRSSYIGGYVKEPEKGLWESIAYLDFRSSAGSIIVTHNVSPDTLEKECKNYDVAPIVGYRFCKDFKGFIPSILEDLIETRQKVKRKMKATIDPIEKKMLDYRQRALKILANSYYGYQGYPKARWYSKECAESVTAWGRHYIETTIKEAEKFGFKVLYADTDGFFATIPNEKPETIKSKAKKFLKHINEKLPGMLELEYEGFYLRGFFVTKKKYALIDEDGHITTRGLEVVRRDWSEIAKETQAKVLEVILREGSIEKAAGIVKKVVEDLANYRVPVEKLIIHEQITRELKRYKATGPHVAIAKRLQARGIKVKPGTIISYVVLKGSKKISDRVILFDEYDSSRHKYDPDYYIHNQVLPAVLRILEAFGYKEKDLEYQRMKQTGLGAWLKMGKK

SEQ ID NO: 50 - protein, 773 aa, unidentified
  REGION 1..773: note = Description of Unknown: Synthetic polypeptide
MILDTDFITENGKPVIRIFKKEKGEFKIEYDRNFEPYIYALLEDDESIEDIKKITGERHGKKVRIIRVEKVKKKFLGEPIEVWKLVFEHPQDVPAIRDAIRSHPAVREIFEYDIPFAKRYLIDKGLVPMEGGEELKLLAFNIATFYHEGDEFAEGEILMISYADESGAKVITWKKIDLPYVEVVSTEREAIKRFLQVLREKDPDVLLTYNGDNFDFAYIKKRCEKLGLKFTIGRDGSEPKIQRMGDRFAVEVKGRIHLDLAPVVRHTIRLPTYTLEAVYEAVFGKKKEKVYAEEIAEAWKSEEGLKRVAQYSMEDARATYELGREFFPLEVELAKLIGQSVWDVSRSSTGNLVEWYLLRVAYERNELAPNKPGGEEYQRRMRSSYIGGYVKEPEKGLWESIAYLDFRSSAGSIIVTHNVSPDTLEKECKNYDVAPIVGYRFCKDFKGFIPSILEDLIETRQKVKRKMKATIDPIEKKMLDYRQRALKILANSYYGYQGYPKARWYSKECAESVTAWGRHYIETTIKEAEKFGFKVLYADTDGFFATIPNEKPETIKSKAKKFLKHINEKLPGMLELEYEGFYLRGFFVTKKKYALIDEDGHITTRGLEVVRRDWSEIAKETQAKVLEVILREGSIEKAAGIVKKVVEDLANYRVPVEKLIIHEQITRELKRYKATGPHVAIAKRLQARGIKVKPGTIISYVVLKGSKKISDRVILFDEYDSSRHKYDPDYYIHNQVLPAVLRILEAFGYKEKDLEYQRMKQTGLGAWLKMGKK

SEQ ID NO: 51 - protein, 773 aa, unidentified
  REGION 1..773: note = Description of Unknown: Synthetic polypeptide
MILDTDYITENGKPVIRIFKKEKGEFKIEYDRNFEPYIYALLEDDESIEDIKKITGERHGKKVRIIRVEKVKKKFLGEPIEVWKLVFEFPQDFPAIRDAIRSHPAVREIFEYDIPFAKRYLIDKGLVPMEGGEELKLLAFNIATFYHEGDEFAEGEILMISYADESGAKVITWKKIDLPYVEVVSTEREAIKRFLQVLREKDPDVLLTYNGDNFDFAYIKKRCEKLGLKFTIGRDGSEPKIQRMGDRFAVEVKGRIHLDLAPVVRHTIRLPTYTLEAVYEAVFGKKKEKVYAEEIAEAWKSEEGLKRVAQYSMEDARATYELGREFFPLEVELAKLIGQSVWDVSRSSTGNLVEWYLLRVAYERNELAPNKPGGEEYQRRMRSSYIGGYVKEPEKGLWESIAYLDFRSSAGSIIVTHNVSPDTLEKECKNYDVAPIVGYRFCKDFKGFIPSILEDLIETRQKVKRKMKATIDPIEKKMLDYRQRALKILANSYYGYQGYPKARWYSKECAESVTAWGRHYIETTIKEAEKFGFKVLYADTDGFFATIPNEKPETIKSKAKKFLKHINEKLPGMLELEYEGFYLRGFFVTKKKYALIDEDGHITTRGLEVVRRDWSEIAKETQAKVLEVILREGSIEKAAGIVKKVVEDLANYRVPVEKLIIHEQITRELKRYKATGPHVAIAKRLQARGIKVKPGTIISYVVLKGSKKISDRVILFDEYDSSRHKYDPDYYIHNQVLPAVLRILEAFGYKEKDLEYQRMKQTGLGAWLKMGKK

SEQ ID NO: 52 - protein, 773 aa, unidentified
  REGION 1..773: note = Description of Unknown: Synthetic polypeptide
MILDTDYITENGKPVIRIFKKEKGEFKIEYDRNFEPYIYALLEDDESIEDIKKITGERHGKKVRIIRVEKVKKKFLGEPIEVWKLVFEHPQDYPAIRDAIRSHPAVREIFEYDIPFAKRYLIDKGLVPMEGGEELKLLAFAIATFYHEGDEFAEGEILMISYADESGAKVITWKKIDLPYVEVVSTEREAIKRFLQVLREKDPDVLLTYNGDNFDFAYIKKRCEKLGLKFTIGRDGSEPKIQRMGDRFAVEVKGRIHLDLAPVVRHTIRLPTYTLEAVYEAVFGKKKEKVYAEEIAEAWKSEEGLKRVAQYSMEDARATYELGREFFPMEVELAKLIGQSVWDVSRSSTGNLVEWYLLRVAYERNELAPNKPGGEEYQRRMRSSYIGGYVKEPEKGLWESIAYLDFRSSAGSIIVTHNVSPDTLEKECKNYDVAPIVGYRFCKDFKGFIPSILEDLIETRQKVKRKMKATIDPIEKKMLDYRQRALKILANSYYGYQGYPKARWYSKECAESVTAWGRHYIETTIKEAEKFGFKVLYADTDGFFATIPNEKPETIKSKAKKFLKHINEKLPGMLELEYEGFYLRGFFVTKKKYALIDEDGHITTRRLEVVRRDWSEIAKETQAKVLEVILREGSIEKAAGIVKKVVEDLANYRVPVEKLIIHEQITRELKRYKATGPHVAIAKRLQARGIKVKPGTIISYVVLKGSKKISDRVILFDEYDSSRHKYDPDYYIHNQVLPAVLRILEAFGYKEKDLEYQRMKQTGLGAWLKMGKK

SEQ ID NO: 53 - protein, 773 aa, unidentified
  REGION 1..773: note = Description of Unknown: Synthetic polypeptide
MILDTDYITENGKPVIRIFKKEKGEFKIEYDRNFEPYIYALLEDDESIEDIKKITGERHGKKVRIIRVEKVKKKFLGEPIEVWKLVFEHPQDYPAIRDAIRSHPAVREIFEYDIPFAKRYLIDKGLVPMEGGEELKLLAFAIATFYHEGDEFAEGEILMISYADESGAKVITWKKIDLPYVEVVSTEREAIKRFLQVLREKDPDVLLTYNGDNFDFAYIKKRCEKLGLKFTIGRDGSEPKIQRMGDRFAVEVKGRIHLDLAPVVRHTIRLPTYTLEAVYEAVFGKKKEKVYAEEIAEAWKSEEGLKRVAQYSMEDARATYELGREFFPMEVELAKLIGQSVWDVSRSSTGNLVEWYLLRVAYERNELAPNKPGGEEYQRRMRSSYIGGYVKEPEKGLWESIAYLDFRSSAGSIIVTHNISPDTLEKECKNYDVAPIVGYRFCKDFKGFIPSILEDLIETRQKVKRKMKATIDPIEKKMLDYRQRALKILANSYYGYFGYPKARWYVKEIAESVTAWGRHYIETTIKEAEKFGFKVLYADTDGFFATIPNEKPETIKSKAKKFLKHINEKLPGMLELEYEGFYLRGFFVTKKKYALIDEDGHITTRGLEVVRRDWSEIAKETQAKVLEVILREGSIEKAAGIVKKVVEDLANYRVPVEKLIIHEQITRELKRYKATGPHVAIAKRLQARGIKVKPGTIISYVVLKGSKKISDRVILFDEYDSSRHKYDPDYYIHNQVLPAVLRILEAFGYKEKDLEYQRMKQTGLGAWLKMGKK

SEQ ID NO: 54 - protein, 773 aa, unidentified
  REGION 1..773: note = Description of Unknown: Synthetic polypeptide
MILDTDYITENGKPVIRIFKKEKGEFKIEYDRNFEPYIYALLEDDESIEDIKKITGERHGKKVRIIRVEKVKKKFLGEPIEVWKLVFEHPQDYPAIRDAIRSHPAVREIFEYDIPFAKRYLIDKGLVPMEGGEELKLLAFAIATFYHEGDEFAEGEILMISYADESGAKVITWKKIDLPYVEVVSTEREAIKRFLQVLREKDPDVLLTYNGDNFDFAYIKKRCEKLGLKFTIGRDGSEPKIQRMGDRFAVEVKGRIHLDLAPVVRHTIRLPTYTLEAVYEAVFGKKKEKVYAEEIAEAWKSEEGLKRVAQYSMEDARATYELGREFFPMEVELAKLIGQSVWDVSRSSTGNLVEWYLLRVAYERNELAPNKPGGEEYQRRMRSSYIGGYVKEPEKGLWESIAYLDFRSSAGSIIVTHNISPDTLEKECKNYDVAPIVGYRFCKDFKGFIPSILEDLIETRQKVKRKMKATIDPIEKKMLDYRQRALKILANSYYGYNGYPKARWYSKESAESVTAWGRHYIETTIKEAEKFGFKVLYADTDGFFATIPNEKPETIKSKAKKFLKHINEKLPGMLELEYEGFYLRGFFVTKKKYALIDEDGHITTRGLEVVRRDWSEIAKETQAKVLEVILREGSIEKAAGIVKKVVEDLANYRVPVEKLIIHEQITRELKRYKATGPHVAIAKRLQARGIKVKPGTIISYVVLKGSKKISDRVILFDEYDSSRHKYDPDYYIHNQVLPAVLRILEAFGYKEKDLEYQRMKQTGLGAWLKMGKK

SEQ ID NO: 55 - protein, 773 aa, unidentified
  REGION 1..773: note = Description of Unknown: Synthetic polypeptide
MILDTDYITENGKPVIRIFKKEKGEFKIEYDRNFEPYIYALLEDDESIEDIKKITGERHGKKVRIIRVEKVKKKFLGEPIEVWKLVFEHPQDYPAIRDAIRSHPAVREIFEYDIPFAKRYLIDKGLVPMEGGEELKLLAFAIATFYHEGDEFAEGEILMISYADESGAKVITWKKIDLPYVEVVSTEREAIKRFLQVLREKDPDVLLTYNGDNFDFAYIKKRCEKLGLKFTIGRDGSEPKIQRMGDRFAVEVKGRIHLDLAPVVRHTIRLPTYTLEAVYEAVFGKKKEKVYAEEIAEAWKSEEGLKRVAQYSMEDARATYELGREFFPMEVELAKLIGQSVWDVSRSSTGNLVEWYLLRVAYERNELAPNKPGGEEYQRRMRSSYIGGYVKEPEKGLWESIAYLDFRSSAGSIIVTHNVSPDTLEKECKNYDVAPIVGYRFCKDFKGFIPSILEDLIETRQKVKRKMKATIDPIEKKMLDYRQRALKILANSYYGYFGYPKARWYVKEIAESVTAWGRHYIETTIKEAEKFGFKVLYADTDGFFATIPNEKPETIKSKAKKFLKHINEKLPGMLELEYEGFYLRGFFVTKKKYALIDEDGHITTRGLEVVRRDWSEIAKETQAKVLEVILREGSIEKAAGIVKKVVEDLANYRVPVEKLIIHEQITRELKRYKATGPHVAIAKRLQARGIKVKPGTIISYVVLKGSKKISDRVILFDEYDSSRHKYDPDYYIHNQVLPAVLRILEAFGYKEKDLEYQRMKQTGLGAWLKMGKK

SEQ ID NO: 56 - protein, 773 aa, unidentified
  REGION 1..773: note = Description of Unknown: Synthetic polypeptide
MILDTDYITENGKPVIRIFKKEKGEFKIEYDRNFEPYIYALLEDDESIEDIKKITGERHGKKVRIIRVEKVKKKFLGEPIEVWKLVFEHPQDVPAIRDAIRSHPAVREIFEYDIPFAKRYLIDKGLVPMEGGEELKLLAFNIATFYHEGDEFAEGEILMISYADESGAKVITWKKIDLPYVEVVSTEREAIKRFLQVLREKDPDVLLTYNGDNFDFAYIKKRCEKLGLKFTIGRDGSEPKIQRMGDRFAVEVKGRIHLDLAPVVRHTIRLPTYTLEAVYEAVFGKKKEKVYAEEIAEAWKSEEGLKRVAQYSMEDARATYELGREFFPLEVELAKLIGQSVWDVSRSSTGNLVEWYLLRVAYERNELAPNKPGGEEYQRRMRSSYIGGYVKEPEKGLWESIAYLDFRSSAGSIIVTHNVSPDTLEKECKNYDVAPIVGYRFCKDFKGFIPSILEDLIETRQKVKRKMKATIDPIEKKMLDYRQRALKILANSYYGYQGYPKARWYSKECAESVTAWGRHYIETTIKEAEKFGFKVLYADTDGFFATIPNEKPETIKSKAKKFLKHINEKLPGMLELEYEGFYLRGFFVTKKKYALIDEDGHITTRGLEVVRRDWSEIAKETQAKVLEVILREGSIEKAAGIVKKVVEDLANYRVPVEKLIIHEQITRELKRYKATGPHVAIAKRLQARGIKVKPGTIISYVVLKGSKKISDRVILFDEYDSSRHKYDPDYYIHNQVLPAVLRILEAFGYKEKDLEYQRMKQTGLGASLKMGKK

SEQ ID NO: 57 - protein, 773 aa, unidentified
  REGION 1..773: note = Description of Unknown: Synthetic polypeptide
MILDTDYITENGKPVIRIFKKEKGEFKIEYDRNFEPYIYALLEDDESIEDIKKITGERHGKKVRIIRVEKVKKKFLGEPIEVWKLVFEHPQDYPAIRDAIRSHPAVREIFEYDIPFAKRYLIDKGLVPMEGGEELKLLAFAIATFYHEGDEFAEGEILMISYADESGAKVITWKKIDLPYVEVVSTEREAIKRFLQVLREKDPDVLLTYNGDNFDFAYIKKRAEKLGIKFTIGRDGSEPKIQRMGDRFAVEVKGRIHLDLAPVVRHTIRLPTYTLEAVYEAVFGKKKEKVYAEEIAEAWKSEEGLKRVAQYSMEDARATYELGREFFPMEVELAKLIGQSVWDVSRSSTGNLVEWYLLRVAYERNELAPNKPGGEEYQRRMRSSYIGGYVKEPEKGLWESIAYLDFRSSAGSIIVTHNVSPDTLEKECKNYDVAPIVGYRFCKDFKGFIPSILEDLIETRQKVKRKMKATIDPIEKKMLDYRQRALKILANSYYGYQGYPKARWYSKECAESVTAWGRHYIETTIKEAEKFGFKVLYADTDGFFATIPNEKPETIKSKAKKFLKHINEKLPGMLELEYEGFYLRGFFVTKKKYALIDEDGHITTRGLEVVRRDWSEIAKETQAKVLEVILREGSIEKAAGIVKKVVEDLANYRVPVEKLIIHEQITRELKRYKATGPHVAIAKRLQARGIKVKPGTIISYVVLKGSKKISDRVILFDEYDSSRHKYDPDYYIHNQVLPAVLRILEAFGYKEKDLEYQRMKQTGLGAWLKMGKK

SEQ ID NO: 58 - protein, 773 aa, unidentified
  REGION 1..773: note = Description of Unknown: Synthetic polypeptide
MILDTDYITENGKPVIRIFKKEKGEFKIEYDRNFEPYIYALLEDDESIEDIKKITGERHGKKVRIIRVEKVKKKFLGEPIEVWKLVFEHPQDVPAIRDAIRSHPAVREIFEYDIPFAKRYLIDKGLVPMEGGEELKLLAFNIATFYHEGDEFAEGEILMISYADESGAKVITWKKIDLPYVEVVSTEREAIKRFLQVLREKDPDVLLTYNGDNFDFAYIKKRCEKLGLKFTIGRDGSEPKIQRMGDRFAVEVKGRIHLDLAPVVRHTIRLPTYALEAVYEAVFGKKKEKVYAEEIAEAWKSEEGLKRVAQYSMEDARATYELGREFFPLEVELAKLIGQSVWDVSRSSTGNLVEWYLLRVAYERNELAPNKPGGEEYQRRMRSSYIGGYVKEPEKGLWESIAYLDFRSSAGSIIVTHNVSPDTLEKECKNYDVAPIVGYRFCKDFKGFIPSILEDLIETRQKVKRKMKATIDPIEKKMLDYRQRALKILANSYYGYQGYPKARWYSKECAESVTAWGRHYIETTIKEAEKFGFKVLYADTDGFFATIPNEKPETIKSKAKKFLKHINEKLPGMLELEYEGFYLRGFFVTKKKYALIDEDGHITTRGLEVVRRDWSEIAKETQAKVLEVILREGSIEKAAGIVKKVVEDLANYRVPVEKLIIHEQITRELKRYKATGPHVAIAKRLQARGIKVKPGTIISYVVLKGSKKISDRVILFDEYDSSRHKYDPDYYIHNQVLPAVLRILEAFGYKEKDLEYQRMKQTGLGAWLKMGKK

SEQ ID NO: 59 - protein, 773 aa, unidentified
  REGION 1..773: note = Description of Unknown: Synthetic polypeptide
MILDTDYITENGKPVIRIFKKEKGEFKIEYDRNFEPYIYALLEDDESIEDIKKITGERHGKKVRIIRVEKVKKKFLGEPIEVWKLVFEHPQDYPAIRDAIRSHPAVREIFEYDIPFAKRYLIDKGLVPMEGGEELKLLAFAIATFYHEGDEFAEGEILMISYADESGAKVITWKKIDLPYVEVVSTEREAIKRFLQVLREKDPDVLLTYNGDNFDFAYIKKRCEKLGLKFTIGRDGSEPKIQRMGDRFAVEVKGRIHLDLAPVVRHTIRLPTYTLEAVYEAVFGKKKEKVYAEEIAEAWKSEEGLKRVAQYSMEDARATYELGREFFPMEVELAKLIGQSVWDVSRSSTGNLVEWYLLRVAYERNELAPNKPGGEEYQRRMRSSYIGGYVKEPEKGLWESIAYLDFRSSAGSIIVTHNVSPDTLEKECKNYDVAPEVGYRFCKDFKGFIPSILEDLIETRQKVKRKMKATIDPIEKKMLDYRQRALKILANSYYGYQGYPKARWYSKECAESVTAWGRHYIETTIKEAEKFGFKVLYADTDGFFATIPNEKPETIKSKAKKFLKHINEKLPGMLELEYEGFYLRGFFVTKKKYALIDEDGHITTRGLEVVRRDWSEIAKETQAKVLEVILREGSIEKAAGIVKKVVEDLANYRVPVEKLIIHEQITRELKRYKATGPHVAIAKRLQARGIKVKPGTIISYVVLKGSKKISDRVILFDEYDSSRHKYDPDYYIHNQVLPAVLRILEAFGYKEKDLEYQRMKQTGLGAWLKMGKK

SEQ ID NO: 60 - protein, 773 aa, unidentified
  REGION 1..773: note = Description of Unknown: Synthetic polypeptide
MILDTDYITENGKPVIRIFKKEKGEFKIEYDRNFEPYIYALLEDDESIEDIKKITGERHGKKVRIIRVEKVKKKFLGEPIEVWKLVFEHPQDVPAIRDAIRSHPAVREIFEYDIPFAKRYLIDKGLVPMEGGEELKLLAFTIATFYHEGDEFAEGEILMISYADESGAKVITWKKIDLPYVEVVSTEREAIKRFLQVLREKDPDVLLTYNGDNFDFAYIKKRCEKLGLKFTIGRDGSEPKIQRMGDRFAVEVKGRIHLDLAPVVRHTIRLPTYTLEAVYEAVFGKKKEKVYAEEIAEAWKSEEGLKRVAQYSMEDARATYELGREFFPMEVELAKLIGQSVWDVSRSSTGNLVEWYLLRVAYERNELAPNKPGGEEYQRRMRSSYIGGYVKEPEKGLWESIAYLDFRSSAGSIIVTHNVSPDTLEKECKNYDVAPIVGYRFCKDFKGFIPSILEDLIETRQKVKRKMKATIDPIEKKMLDYRQRALKILANSYYGYQGYPKARWYSKECAESVTAWGRHYIETTIKEAEKFGFKVLYADTDGFFATIPNEKPETIKSKAKKFLKHINEKLPGMLELEYEGFYLRGFFVTKKKYALIDEDGHITTRGLEVVRRDWSEIAKETQAKVLEVILREGSIEKAAGIVKKVVEDLANYRVPVEKLIIHEQITRELKDYKATGPHVAIAKRLQARGIKVKPGTIISYVVLKGSKKISDRVILFDEYDSSRHKYDPDYYIHNQVLPAVLRILEAFGYKEKDLEYQRMKQTGLGAWLKMGKK

SEQ ID NO: 61 - protein, 773 aa, unidentified
  REGION 1..773: note = Description of Unknown: Synthetic polypeptide
MILDTDYITENGKPVIRIFKKEKGEFKIEYDRNFEPYIYALLEDDESIEDIKKITGERHGKKVRIIRVEKVKKKFLGEPIEVWKLVFEHPQDVPAIRDAIRSHPAVREIFEYDIPFAKRYLIDKGLVPMEGGEELKLLAFNIATFYHEGDEFAEGEILMISYADESGAKVITWKKIDLPYVEVVSTEREAIKRFLQVLREKDPDVLLTYNGDNFDFAYIKKRCEKLGLKFTIGRDGSEPKIQRMGDRFAVEVKGRIHLDLAPVVRHTIRLPTYTLEAVYEAVFGKKKEKVYAEEIAEAWKSEEGLKRVAQYSMEDARATYELGREFFPLEVELAKLIGQSVWDVSRSSTGNLVEWYLLRVAYERNELAPNKPGGEEYQRRMRSSYIGGYVKEPEKGLWESIAYLDFRSSAGSIIVTHNVSPDTLEKECKNYDVAPIVGYRFCKDFKGFIPSILEDLIETRQKVKRKMKATIDPIEKKMLDYRQRALKILANSYYGYQGYPKARWYSKECAESVTAWGRHYIETTIKEAEKFGFKVLYADTDGFFATIPNEKPETIKSKAKKFLKHINEKLPGMLELEYEGFYLRGFFVTKKKYALIDEDGHITTRGLEVVRRDWSEIAKETQAKVLEVILREGSIEKAAGIVKKVVEDLANYRVPVEKLIIHEQITRELKRYKATGPKVAIAKRLQARGIKVKPGTIISYVVLKGSKKISDRVILFDEYDSSRHKYDPDYYIHNQVLPAVLRILEAFGYKEKDLEYQRMKQTGLGAWLKMGKK

SEQ ID NO: 62 - protein, 773 aa, unidentified
  REGION 1..773: note = Description of Unknown: Synthetic polypeptide
MILDTDYITENGKPVIRIFKKEKGEFKIEYDRNFEPYIYALLEDDESIEDIKKITGERHGKKVRIIRVEKVKKKFLGEPIEVWKLVFEHPQDYPAIRDAIRSHPAVREIFEYDIPFAKRYLIDKGLVPMEGGEELKLLAFAIATFYHEGDEFAEGEILMISYADESGAKVITWKKIDLPYVEVVSTEREAIKRFLQVLREKDPDVLLTYNGDNFDFAYIKKRCEKLGLKFTIGRDGSEPKIQRMGDRFAVEVKGRIHLDLAPVVRHTIRLPTYTLEAVYEAVFGKKKEKVYAEEIAEAWKSEEGLKRVAQYSMEDARATYELGREFFPMEVELAKLIGQSVWDVSRSSTGNLVEWYLLRVAYERNELAPNKPGGEEYQRRMRSSYIGGYVKEPEKGLWESIAYLDFRSSAGSIIVTHNISPDTLEKECKNYDVAPIVGYRFCKDFKGFIPSILEDLIETRQKVKRKMKATIDPIEKKMLDYRQRALKILANSYYGYFGYPKARWYSKEAAESVTAWGRHYIETTIKEAEKFGFKVLYADTDGFFATIPNEKPETIKSKAKKFLKHINEKLPGMLELEYEGFYLRGFFVTKKKYALIDEDGHITTRGLEVVRRDWSEIAKETQAKVLEVILREGSIEKAAGIVKKVVEDLANYRVPVEKLIIHEQITRELKRYKATGPHVAIAKRLQARGIKVKPGTIISYVVLKGSKKISDRVILFDEYDSSRHKYDPDYYIHNQVLPAVLRILEAFGYKEKDLEYQRMKQTGLGAWLKMGKK

SEQ ID NO: 63 - protein, 773 aa, unidentified
  REGION 1..773: note = Description of Unknown: Synthetic polypeptide
MILDTDYITENGKPVIRIFKKEKGEFKIEYDRNFEPYIYALLEDDESIEDIKKITGERHGKKVRIIRVEKVKKKFLGEPIEVWKLVFEHPQDVPAIRDAIRSHPAVREIFEYDIPFAKRYLIDKGLVPMEGGEELKLLAFNIATFYHEGDEFAEGEILMISYADESGAKVITWKKIDLPYVEVVSTEREAIKRFLQVLREKDPDVLLTYNGDNFDFAYIKKRCEKLGLKFTIGRDGSEPKIQRMGDRFAVEVKGRIHLDLYPVVRHTIRLPTYTLEAVYEAVFGKKKEKVYAEEIAEAWKSEEGLKRVAQYSMEDARATYELGREFFPLEVELAKLIGQSVWDVSRSSTGNLVEWYLLRVAYERNELAPNKPGGEEYQRRMRSSYIGGYVKEPEKGLWESIAYLDFRSSAGSIIVTHNVSPDTLEKECKNYDVAPIVGYRFCKDFKGFIPSILEDLIETRQKVKRKMKATIDPIEKKMLDYRQRALKILANSYYGYQGYPKARWYSKECAESVTAWGRHYIETTIKEAEKFGFKVLYADTDGFFATIPNEKPETIKSKAKKFLKHINEKLPGMLELEYEGFYLRGFFVTKKKYALIDEDGHITTRGLEVVRRDWSEIAKETQAKVLEVILREGSIEKAAGIVKKVVEDLANYRVPVEKLIIHEQITRELKRYKATGPHVAIAKRLQARGIKVKPGTIISYVVLKGSKKISDRVILFDEYDSSRHKYDPDYYIHNQVLPAVLRILEAFGYKEKDLEYQRMKQTGLGAWLKMGKK

SEQ ID NO: 64 - protein, 757 aa, unidentified
  REGION 1..757: note = Description of Unknown: Synthetic polypeptide
MILDTDYITENGKPVIRIFKKEKGEFKIEYDRNFEPYIYALLEDDESIEDIKKITGERHGKKVRIIRVEKVKKKFLGEPIEVWKLVFEHPQDVPAIRDAIRSHPAVREIFEYDIPFAKRYLIDKGLVPMEGGEELKLLAFAIATFYHEGDEFAEGEILMISYADESGAKVITWKKIDLPYVEVVSTEREAIKRFLQVLREKDPDVLLTYNGDNFDFAYIKKRCEKLGLKFTIGRDGSEPKIQRMGDRFAVEVKGRIHLDLAPVVRHTIRLPTYTLEAVYEAVFGKKKENVYAEEIAEAWKSEEGLKRVAQYSMEDARATYELGREFFPMEVELAKLIGQSVWDVSRSSTGNLVEWYLLRVAYERNELAPNKPGGEEYQRRMRSSYIGGYVKEPEKGLWESIAYLDFRSSAGSIIVTHNVSPDTLEKECKNYDVAPIVGYRFCKDFKGFIPSILEDLIETRQKVKRKMKATIDPIEKKMLDYRQRALKILANSYYGYQGYPKARWYSKECAESVTAWGRHYIETTIKEAEKFGFKVLYADTDGFFATIPNEKPETIKSKAKKFLKHINEKLPGMLELEYEGFYLRGFFVTKKKYALIDEDGHITTRGLEVVRRDWSEIAKETQAKVLEVILREGSIEKAAGIVKKVVEDLANYRVPVEKLIIHEQITRKLKDYKATGPHVAIAKRLQARGIKVKPGTIISYVVLKGSKKISDRVILFDEYDSSRHKYDPDYYIHNQVLPAVLRILEAFGYKEKDLEYQ

SEQ ID NO: 65 - protein, 773 aa, unidentified
  REGION 1..773: note = Description of Unknown: Synthetic polypeptide
MILDTDYITENGKPVIRIFKKEKGEFKIEYDRNFEPYIYALLEDDESIEDIKKITGERHGKKVRIIRVEKVKKKFLGEPIEVWKLVFEHPQDVPAIRDAIRSHPAVREIFEYDIPFAKRYLIDKGLVPMEGGEELKLLAFAIATFYHEGDEFAEGEILMISYADESGAKVITWKKIDLPYVEVVSTEREAIKRFLQVLREKDPDVLLTYNGDNFDFAYIKKRCEKLGLKFTIGRDGSEPKIQRMGDRFAVEVKGRIHLDLAPVVRHTIRLPTYTLEAVYEAVFGKKKEKVYAEEIAEAWKSEEGLKRVAQYSMEDARATYELGREFFPMEVELAKLIGQSVWDVSRSSTGNLVEWYLLRVAYERNELAPNKPGGEEYQRRMRSSYIGGYVKEPEKGLWESIAYLDFRSSAGSIIVTHNVSPDTLEKECKNYDVAPIVGYRFCKDFKGFIPSILEDLIETRQKVKRKMKATIDPIEKKMLDYRQRALKILANSYYGYQGYPKARWYSKEQAEHVTAWGRHYIETTIKEAEKFGFKVLYADTDGFFATIPNEKPETIKSKAKKFLKHINEKLPGMLELEYEGFYLRGFFVTKKKYALIDEDGHITTRGLEVVRRDWSEIAKETQAKVLEVILREGSIEKAAGIVKKVVEDLANYRVPVEKLIIHEQITRELKDYKATGPHVAIAKRLQARGIKVKPGTIISYVVLKGSKKISDRVILFDEYDSSRHKYDPDYYIHNQVLPAVLRILEAFGYKEKDLEYQRMKQTGLGAWLKMGKK

SEQ ID NO: 66 - protein, 773 aa, unidentified
  REGION 1..773: note = Description of Unknown: Synthetic polypeptide
MILDTDYITENGKPVIRIFKKEKGEFKIEYDRNFEPYIYALLEDDESIEDIKKITGERHGKKVRIIRVEKVKKKFLGEPIEVWKLVFEHPQDVPAIRDAIRSHPAVREIFEYDIPFAKRYLIDKGLVPMEGGEELKLLAFNIATFYHEGDEFAEGEILMISYADESGAKVITWKKIDLPYVEVVSTEREAIKRFLQVLREKDPDVLLTYNGDNFDFAYIKKRCEKLGLKFTIGRDGSEPKIQRMGDRFAVEVKGRIHLDLAPVVRHTIRLPTYTLEAVYEAVFGKKKEKVYAEEIAEAWKSEEGLKRVAQYSMEDARATYELGREFFPLEVELAKLIGQSVWDVSRSSTGNLVEWYLLRVAYERNELAPNKPGGEEYQRRMRSSYIGGYVKEPEKGLWESIAYLDFRSSAGSIIVTHNVSPDTLEKECKNYDVAPIVGYRFCKDFKGFIPSILEDLIETRQKVKRKMKATIDPIEKKMLDYRQRALKILANSYYGYQGYPKARWYSKECAESVTAWGRHYIETTIKEAEKFGFKVLYADTDGFFATIPNEKPETIKSKAKKFLKHINEKLPGMLELEYEGFYLRIFFVTKKKYALIDEDGHITTRGLEVVRRDWSEIAKETQAKVLEVILREGSIEKAAGIVKKVVEDLANYRVPVEKLIIHEQITRELKRYKATGPHVAIAKRLQARGIKVKPGTIISYVVLKGSKKISDRVILFDEYDSSRHKYDPDYYIHNQVLPAVLRILEAFGYKEKDLEYQRMKQTGLGAWLKMGKK

SEQ ID NO: 67 - protein, 773 aa, unidentified
  REGION 1..773: note = Description of Unknown: Synthetic polypeptide
MILDTDYITENGKPVIRIFKKEKGEFKIEYDRNFEPYIYALLEDDESIEDIKKITGERHGKKVRIIRVEKVKKKFLGEPIEVWKLVFEHPQDYPAIRDAIRSHPAVREIFEYDIPFAKRYLIDKGLVPMEGGEELKLLAFAIATFYHEGDEFAEGEILMISYADESGAKVITWKKIDLPYVEVVSTEREAIKRFLQVLREKDPDVLLTYNGDNFDFAYIKKRCEKLGLKFTIGRDGSEPKIQRMGDRFAVEVKGRIHLDLAPVVRHTIRLPTYTLEAVYEAVFGKKKEKVYAEEIAEAWKSEEGLKRVAQYSMEDARATYELGREFFPMEVELAKLIGQSVWDVSRSSTGNLVEWYLLRVAYERNELAPNKPGGEEYQRRMRSSYIGGYVKEPEKGLWESIAYLDFRSSAGSIIVTHNVSPDTLEKECKNYDVAPIVGYRFCKDFKGFIPSILEDLIETRQKVKRKMKATIDPIEKKMLDYRQRALKILANSYYGYQGYPKARWYSKECAESVTAWGRHYIETTIKEAEKFGFKVLYADTDGFFATIPNEKPETIKSKAKKFLKHINEKLPGMLELEYEGFYLRGFFVTKKKYALIDEDGHITTRGLEVVRRDWSEIAKETQAKVLEVILREGSIEKAAGIVKKVVEDLANYRVPVEKLIIHEQITRELKRYKATGPHVAIAKRLQARGIKVKPGIIISYVVLKGSKKISDRVILFDEYDSSRHKYDPDYYIHNQVLPAVLRILEAFGYKEKDLEYQRMKQTGLGAWLKMGKK

SEQ ID NO: 68 - protein, 773 aa, unidentified
  REGION 1..773: note = Description of Unknown: Synthetic polypeptide
MILDTDYITENGKPVIRIFKKEKGEFKIEYDRNFEPYIYALLEDDESIEDIKKITGERHGKKVRIIRVEKVKKKFLGEPIEVWKLVFEHPQDVPAIRDAIRSHPAVREIFEYDIPFAKRYLIDKGLVPMEGGEELKLLAFNIATFYHEGDEFAEGEILMISYADESGAKVITWKKIDLPYVEVVSTEREAIKRFLQVLREKDPDVLLTYNGDNFDFAYIKKRCEKLGLKFTIGRDGSEPKIQRMGDRFAVEVKGRIHLDLAPVVRHTIRLPTYTLEAVYEAVFGKKKEKVYAEEIAEAWKSEEGLKRVAQYSMEDARATYELGREFFPLEVELAKLIGQSVWDVSRSSTGNLVEWYLLRVAYERNELAPNQPGGEEYQRRMRSSYIGGYVKEPEKGLWESIAYLDFRSSAGSIIVTHNVSPDTLEKECKNYDVAPIVGYRFCKDFKGFIPSILEDLIETRQKVKRKMKATIDPIEKKMLDYRQRALKILANSYYGYQGYPKARWYSKECAESVTAWGRHYIETTIKEAEKFGFKVLYADTDGFFATIPNEKPETIKSKAKKFLKHINEKLPGMLELEYEGFYLRGFFVTKKKYALIDEDGLITTRGLEVVRRDWSEIAKETQAKVLEVILREGSIEKAAGIVKKVVEDLANYRVPVEKLIIHEQITRELKRYKATGPHVAIAKRLQARGIKVKPGTIISYVVLKGSKKISDRVILFDEYDSSRHKYDPDYYIHNQVLPAVLRILEAFGYKEKDLEYQRDKQTGLGAWLKMGKK

SEQ ID NO: 69 - protein, 773 aa, unidentified
  REGION 1..773: note = Description of Unknown: Synthetic polypeptide
MILDTDYITENGKPVIRIFKKEKGEFKIEYDRNFEPYIYALLEDDESIEDIKKITGERHGKKVRIIRVEKVKKKFLGEPIEVWKLVFEHPQDVPAIIDAIRSHPAVREIFEYDIPFAKRYLIDKGLVPMEGGEELKLLAFNIATFYHEGDEFAEGEILMISYADESGAKVITWKKIDLPYVEVVSTEREAIKRFLQVLREKDPDVLLTYNGDNFDFAYIKKRCEKLGLKFTIGRDGSEPKIQRMGDRFAVEVKGRIHLDLAPVVRHTIRLPTYTLEAVYEAVFGKKKEKVYAEEIAEAWKSEEGLKRVAQYSMEDARATYELGREFFPLEVELAKLIGQSVWDVSRSSTGNLVEWYLLRVAYERNELAPNKPGGEEYQRRMRSSYIGGYVKEPEKGLWESIAYLDFRSSAGSIIVTHNVSPDTLEKECKNYDVAPIVGYRFCKDFKGFIPSILEDLIETRQKVKRKMKATIDPIEKKMLDYRQRALKILANSYYGYQGYPKARWYSKECAESVTAWGRHYIETTIKEAEKFGFKVLYADTDGFFATIPNEKPETIKSKAKKFLKHINEKLPGMLELEYEGFYLRGFFVTKKKYALIDEDGHITTRGLEVVRRDWSEIAKETQAKVLEVILREGSIEKAAGIVKKVVEDLANYRVPVEKLIIHEQITRELKRYKATGPHVAIAKRLQARGIKVKPGTIISYVVLKGSKKISDRVILFDEYDSSRHKYDPDYYIHNQVLPAVLRILEAFGYKEKDLEYQRMKQTGLGAWLKMGKK

SEQ ID NO: 70 - protein, 773 aa, unidentified
  REGION 1..773: note = Description of Unknown: Synthetic polypeptide
MILDTDYITENGKPVIRIFKKEKGEFKIEYDRNFEPYIYALLEDDESIEDIKKITGERHGKKVRIIRVEKVKKKFLGEPIEVWKLVFEHPQDYPAIRDAIRSHPAVREIFEYDIPFAKRYLIDKGLVPMEGGEELKLLAFAIATFYHEGDEFAEGEILMISYADESGAKVITWKKIDLPYVEVVSTEREAIKRFLQVLREKDPDVLLTYNGDNFDFAYIKKRCEKLGLKFTIGRDGSEPKIQRMGDRFAVEVKGRIHLDLAPVVRHTIRLPTYTLEAVYEAVFGKKKEKVYAEEIAEAWKSEEGLKRVAQYSMEDARATYELGREFFPMEVELAKLIGQSVWDVSRSSTGNLVEWYLLRVAYERNELAPNKPGGEEYQRRMRSSYIGGYVKEPEKGLWESIAYLDFRSSAGSIIVTHNVSPDTLEKECYNYDVAPIVGYRFCKDFKGFIPSILEDLIETRQKVKRKMKATIDPIEKKMLDYRQRALKILANSYYGYQGYPKARWYSKECAESVTAWGRHYIETTIKEAEKFGFKVLYADTDGFFATIPNEKPETIKSKAKKFLKHINEKLPGMLELEYEGFYLRGFFVTKKKYALIDEDGHITTRGLEVVRRDWSEIAKETQAKVLEVILREGSIEKAAGIVKKVVEDLANYRVPVEKLIIHEQITRELKRYKATGPHVAIAKRLQARGIKVKPGTIISYVVLKGSKKISDRVILFDEYDSSRHKYDPDYYIHNQVLPAVLRILEAFGYKEKDLEYQRMKQTGLGAWLKMGKK

SEQ ID NO: 71 - protein, 773 aa, unidentified
  REGION 1..773: note = Description of Unknown: Synthetic polypeptide
MILDTDYITENGKPVIRIFKKEKGEFKIEYDRNFEPYIYALLEDDESIEDIKKITGERHGKKVRIIRVEKVKKKFLGEPIEVWKLVFEHPQDYPAIRDAIRSHPAVREIFEYDIPFAKRYLIDKGLVPMEGGEELKLLAFAIATFYHEGDEFAEGEILMISYADESGAKVITWKKIDLPYVEVVSTEREAIKRFLQVLREKDPDVLLTYNGDNFDFAYIKKRCEKLGLKFTIGRDGSEPKIQRMGDRFAVEVKGRIHLDLAPVVRHTIRLPTYTLEAVYEAVFGKKKEKVYAEEIAEAWKSEEGLKRVAQYSMEDARATYELGREFFPMEVELAKLIGQSVWDVSRSSTGNLVEWYLLRVAYERNELAPNKPGGEEYQRRMRSSYIGGYVKEPEKGLWESIAYLDFRSSAGSIIVTHNVSPDTLEKECKNYDVAPIVGYRFCKDFKGFIPSILEDLIETRQKVKRKMKATIDPIEKKMLDYRQRALKILANSYYGYQGYPKARWYSNECAESVTAWGRHYIETTIKEAEKFGFKVLYADTDGFFATIPNEKPETIKSKAKKFLKHINEKLPGMLELEYEGFYLRGFFVTKKKYALIDEDGHITTRGLEVVRRDWSEIAKETQAKVLEVILREGSIEKAAGIVKKVVEDLANYRVPVEKLIIHEQITRELKRYKATGPHVAIAKRLQARGIKVKPGTIISYVVLKGSKKISDRVILFDEYDSSRHKYDPDYYIHNQVLPAVLRILEAFGYKEKDLEYQRMKQTGLGAWLKMGKK

SEQ ID NO: 72 - protein, 773 aa, unidentified
  REGION 1..773: note = Description of Unknown: Synthetic polypeptide
MILDTDYITENGKPVIRIFKKEKGEFKIEYDRNFEPYIYALLEDDESIEDIKKITGERHGKKVRIIRVEKVKKKFLGEPIEVWKLVFEHPADFPAIRDAIRSHPAVREIFEYDIPFAKRYLIDKGLVPMEGGEELKLLAFNIATFYHEGDEFAEGEILMISYADESGAKVITWKKIDLPYVEVVSTEREAIKRFLQVLREKDPDVLLTYNGDNFDFAYIKKRCEKLGLKFTIGRDGSEPKIQRMGDRFAVEVKGRIHLDLAPVVRHTIRLPTYTLEAVYEAVFGKKKEKVYAEEIAEAWKSEEGLKRVAQYSMEDARATYELGREFFPLEVELAKLIGQSVWDVSRSSTGNLVEWYLLRVAYERNELAPNKPGGEEYQRRMRSSYIGGYVKEPEKGLWESIAYLDFRSSAGSIIVTHNVSPDTLEKECKNYDVAPIVGYRFCKDFKGFIPSILEDLIETRQKVKRKMKATIDPIEKKMLDYRQRALKILANSYYGYQGYPKARWYSKECAESVTAWGRHYIETTIKEAEKFGFKVLYADTDGFFATIPNEKPETIKSKAKKFLKHINEKLPGMLELEYEGFYLRGFFVTKKKYALIDEDGHITTRGLEVVRRDWSEIAKETQAKVLEVILREGSIEKAAGIVKKVVEDLANYRVPVEKLIIHEQITRELKRYKATGPHVAIAKRLQARGIKVKPGTIISYVVLKGSKKISDRVILFDEYDSSRHKYDPDYYIHNQVLPAVLRILEAFGYKEKDLEYQRMKQTGLGAWLKMGKK

SEQ ID NO: 73 - protein, 773 aa, unidentified
  REGION 1..773: note = Description of Unknown: Synthetic polypeptide
MILDTDYITENGKPVIRIFKKEKGEFKIEYDRNFEPYIYALLEDDESIEDIKKITGERHGKKVRIIRVEKVKKKFLGEPIEVWKLVFEHPQDYPAIRDAIRSHPAVREIFEYDIPFAKRYLIDKGLVPMEGGEELKLLAFAIATFYHEGDEFAEGEILMISYADESGAKVITWKKIDLPYVEVVSTEREAIKRFLQVLREKDPDVLLTYNGDNFDFAYIKKRCEKLGLKFTIGRDGSEPKIQRMGDRFAVEVKGRIHLDLAPVVRHTIRLPTYTLEAVYEAVFGKKKEKVYAEEIAEAWKSEEGLKRVAQYSVEDARATYELGREFFPMEVELAKLIGQSVWDVSRSSTGNLVEWYLLRVAYERNELAPNKPGGEEYQRRMRSSYIGGYVKEPEKGLWESIAYLDFRSSAGSIIVTHNVSPDTLEKECKNYDVAPIVGYRFCKDFKGFIPSILEDLIETRQKVKRKMRATIDPIEKKMLDYRQRALKILANSYYGYQGYPKARWYSKECAESVTAWGRHYIETTIKEAEKFGFKVLYADTDGFFATIPNEKPETIKSKAKKFLKHINEKLPGMLELEYEGFYLRGFFVTKKKYALIDEDGLITTRGLEVVRRDWSEIAKETQAKVLEVILREGSIEKAAGIVKKVVEDLANYRVPVEKLIIHEQITRELKRYKATGPHVAIAKRLQARGIKVKPGTIISYVVLKGSKKISDRVILFDEYDSSRHKYDPDYYIHNQVLPAVLRILEAFGYKEKDLEYQRMKQTGLGAWLKMGKK

SEQ ID NO: 74 - protein, 773 aa, unidentified; identical to SEQ ID NO: 49
  REGION 1..773: note = Description of Unknown: Synthetic polypeptide

SEQ ID NO: 75 - protein, 773 aa, unidentified
  REGION 1..773: note = Description of Unknown: Synthetic polypeptide
NILDTDYITENGKPVIRIFKKEKGEFKIEYDRNFEPYIYALLEDDESIEDIKKITGERHGKKVRIIRVEKVKKKFLGEPIEVWKLVFEHPQDYPAIRDAIRSHPAVREIFEYDIPFAKRYLIDKGLVPMEGGEELKLLAFAIATFYHEGDEFAEGEILMISYADESGAKVITWKKIDLPYVEVVSTEREAIKRFLQVLREKDPDVLLTYNGDNFDFAYIKKRCEKLGLKFTIGRDGSEPKIQRMGDRFAVEVKGRIHLDLAPVVRHTIRLPTYTLEAVYEAVFGKKKEKVYAEEIAEAWKSEEGLKRVAQYSMEDARATYELGREFFPMEVELAKLIGQSVWDVSRSSTGNLVEWYLLRVAYERNELAPNKPGGEEYQRRMRSSYIGGYVKEPEKGLWESIAYLDFRSSAGSIIVTHNVSPDTLEKECKNYDVAPIVGYRFCKDFKGFIPSILEDLIETRQKVKRKMKATIDPIEKKMLDYRQRALKILANSYYGYQGYPKARWYSKECAESVTAWGRHYIETTIKEAEKFGFKVLYADTDGFFATIPNEKPETIKSKAKKFLKHINEKLPGMLELEYEGFYLRGFFVTKKKYALIDEDGHITTRGLEVVRRDWSEIAKETQAKVLEVILREGSIEKAAGIVKKVVEDLANYRVPVEKLIIHEQITRELKRYKATGPHVAIAKRLQARGIKVKPGTIISYVVLKGSKKISDRVILFDEYDSSRHKYDPDYYIHNQVLPAVLRILEAFGYKEKDLEYQRMKQTGLGAWLKMGKK

SEQ ID NO: 76 - protein, 773 aa, unidentified
  REGION 1..773: note = Description of Unknown: Synthetic polypeptide
MILDTDYITENGKPVIRIFKKEKGEFKIEYDRNFEPYIYALLEDDESIEDIKKITGERHGKKVRIIRVEKVKKKFLGEPIEVWKLVFEHPQDVPAIRDAIRSHPAVREIFEYDIPFAKRYLIDKGLVPMEGGEELKLLAFNIATFYHEGDEFAEGEILMISYADESGAKVITWKKIDLPYVEVVSTEREAIKRFLQVLREKDPDVLLTYNGDNFDFAYIKKRCEKLGLKFTIGRDGSEPKIQRMGDRFAVEVKGRIHLDLAPVVRHTIRLPTYTLEAVYEAVFGKKKEKVYAEEIAEAWKSEEGLKRVAQYSMEDARATYELGREFFPLEVELAKLIGQSVWDVSRSSTGNLVEWYLLRVAYERNELAPNKPGGEEYQRRMRSSYIGGYVKEPEKGLWESIAYLDFRSSAGSIIVTHNVSPDTLEKECKNYDVAPIVGYRFCKDFKGFIPSILEDLIETRQKVKRKMKATIDPIEKKMLDYRQRALKILANSYYGYQGYPKARWYSKECAESVTAWGRHYIETTIKEAEKFGFKVLYADTDGFFATIPNEKPETIKSKAKKFLKHINEKLPGMLELEYEGFYLRGFFVTKKKYALIDEDGHITTRGLEVVRRDWSEIAKETQAKVLEVILREGSIEKAAGIVKKVVEDLANYRVPVEKLIIHELITRELKRYKATGPHVAIAKRLQARGIKVKPGTIISYVVLKGSKKISDRVILFDEYDSSRHKYDPDYYIHNQVLPAVLRILEAFGYKEKDLEYQRMKQTGLGAWLKMGKK

SEQ ID NO: 77 - protein, 773 aa, unidentified
  REGION 1..773: note = Description of Unknown: Synthetic polypeptide
MILDTDYITENGKPVIRIFKKEKGEFKIEYDRNFEPYIYALLEDDESIEDIKKITGERHGKKVRIIRVEKVKKKFLGEPIEVWKLVFEHPQDVPAIRDAIRSHPAVREIFEYDIPFAKRYLIDKGLVPMEGGEELKLLAFAIATFYHEGDEFAEGEILMISYADESGAKVITWKKIDLPYVEVVSTEREAIKRFLQVLREKDPDVLLTYNGDNFDFAYIKKRCEKLGLKFTIGRDGSEPKIQRMGDRFAVEVKGRIHLDLAPVVRHTIRLPTYTLEAVYEAVFGKKKEKVYAEEIAEAWKSEEGLKRVAQYSMEDARATYELGREFFPMEVELAKLIGQSVWDVSRSSTGNLVEWYLLRVAYERNELAPNKPGGEEYQRRMRSSYIGGYVKEPEKGLWESIAYLDFRSSAGSIIVTHNVSPDTLEKECKNYDVAPIVGYRFCKDFKGFIPSILEDLIETRQKVKRKMKATIDPIEKKMLDYRQRALKILANSYYGYQGYPKARWYSKECAESVTAWGRHYIETTIKEAEKFGFKVLYADTDGFFATIPNEKPETIKSKAKKFLKHINEKLPGMLELEYEGFYLRGFFVTKKKYALIDEDGHITTRGLEVVRRDWSEIAKETQAKVLEVILREGSIEKAAGIVKKVVEDLANYRVPVEKLIIHEQITRELKDYKATGPHVAIAKRLQARGIKVKPGTIISYVVLKGSKKISDRVILFDEYDSSRHKYDPDYYIHNQVLPAVLRILEAFGYKEKDLEYQRMKQTGLGAWLKMGKK

SEQ ID NO: 78 - protein, 773 aa, unidentified
  REGION 1..773: note = Description of Unknown: Synthetic polypeptide
MILDTDYITENGKPVIRIFKKEKGEFKIEYDRNFEPYIYALLEDDESIEDIKKITGERHGKKVRIIRVEKVKKKFLGEPIEVWKLVFEFPQDVPAIRDAIRSHPAVREIFEYDIPFAKRYLIDKGLVPMEGGEELKLLAFNIATFYHEGDEFAEGEILMISYADESGAKVITWKKIDLPYVEVVSTEREAIKRFLQVLREKDPDVLLTYNGDNFDFAYIKKRCEKLGLKFTIGRDGSEPKIQRMGDRFAVEVKGRIHLDLAPVVRHTIRLPTYTLEAVYEAVFGKKKEKVYAEEIAEAWKSEEGLKRVAQYSMEDARATYELGREFFPLEVELAKLIGQSVWDVSRSSTGNLVEWYLLRVAYERNELAPNKPGGEEYQRRMRSSYIGGYVKEPEKGLWESIAYLDFRSSAGSIIVTHNVSPDTLEKECKNYDVAPIVGYRFCKDFKGFIPSILEDLIETRQKVKRKMKATIDPIEKKMLDYRQRALKILANSYYGYQGYPKARWYSKECAESVTAWGRHYIETTIKEAEKFGFKVLYADTDGFFATIPNEKPETIKSKAKKFLKHINEKLPGMLELEYEGFYLRGFFVTKKKYALIDEDGHITTRGLEVVRRDWSEIAKETQAKVLEVILREGSIEKAAGIVKKVVEDLANYRVPVEKLIIHEQITRELKRYKATGPHVAIAKRLQARGIKVKPGTIISYVVLKGSKKISDRVILFDEYDSSRHKYDPDYYIHNQVLPAVLRILEAFGYKEKDLEYQRMKQTGLGAWLKMGKK

SEQ ID NO: 79 - protein, 773 aa, unidentified
  REGION 1..773: note = Description of Unknown: Synthetic polypeptide
MILDTDYITENGKPVIRIFKKEKGEFKIEYDRNFEPYIYALLEDDESIEDIKKITGERHGKKVRIIRVEKVKKKFLGEPIEVWKLVFEHPQDVPAIRDAIRSHPAVREIFEYDIPFAKRYLIDKGLVPMEGGEELKLLAFAIATFYHEGDEFAEGEILMISYADESGAKVITWKKIDLPYVEVVSTEREAIKRFLQVLREKDPDVLLTYNGDNFDFAYIKKRCEKLGLKFTIGRDGSEPKIQRMGDRFAVEVKGRIHLDLAPVVRHTIRLPTYTLEAVYEAVFGKKKEKVYAEEIAEAWKSEEGLKRVAQYSMEDARATYELGREFFPMEVELAKLIGQSVWDVSRSSTGNLVEWYLLRVAYERNELAPNKPGGEEYQRRMRSSYIGGYVKEPEKGLWESIAYLDFRSSAGSIIVTHNVSPDTLEKECKNYDVAPIVGYRFCKDFKGFIPSILEDLIETRQKVKRKMKATIDPIEKKMLDYRQRALKILANSYYGYQGYPKARWYAKECAESVTAWGRHYIETTIKEAEKFGFKVLYADTDGFFATIPNEKPETIKSKAKKFLKHINEKLPGMLELEYEGFYLRGFFVTKKKYALIDEDGHITTRGLEVVRRDWSEIAKETQAKVLEVILREGSIEKAAGIVKKVVEDLANYRVPVEKLIIHEQITRELKDYKATGPHVAIAKRLQARGIKVKPGTIISYVVLKGSKKISDRVILFDEYDSSRHKYDPDYYIHNQVLPAVLRILEAFGYKEKDLEYQRMKQTGLGAWLKMGKK

SEQ ID NO: 80 - protein, 773 aa, unidentified
  REGION 1..773: note = Description of Unknown: Synthetic polypeptide
MILDTDYITENGKPVIRIFKKEKGEFKIEYDRNFEPYIYALLEDDESIEDIKKITGERHGKKVRIIRVEKVKKKFLGEPIEVWKLVFEHPQDVPAIRDAIRSHPAVREIFEYDIPFAKRYLIDKGLVPMEGGEELKLLAFAIATFYHEGDEFAEGEILMISYADESGAKVITWKKIDLPYVEVVSTEREAIKRFLQVLREKDPDVLLTYNGDNFDFAYIKKRCEKLGLKFTIGRDGSEPKIQRMGDRFAVEVKGRIHLDLAPVVRHTIRLPTYTLEAVYEAVFGKKKEKVYAEEIAEAWKSEEGLKRVAQYSMEDARATYELGREFFPMEVELAKLIGQSVWDVSRSSTGNLVEWYLLRVAYERNELAPNKPGGEEYQRRMRSSYIGGYVKEPEKGLWESIAYLDFRSSAGSIIVTHNVSPDTLEKECKNYDVAPIVGYRFCKDFKGFIPSILEDLIETRQKVKRKMKATIDPIEKKMLDYRQRALKILANSYYGYQGYPKARWYSKECAEDVTAWGRHYIETTIKEAEKFGFKVLYADTDGFFATIPNEKPETIKSKAKKFLKHINEKLPGMLELEYEGFYLRGFFVTKKKYALIDEDGHITTRGLEVVRRDWSEIAKETQAKVLEVILREGSIEKAAGIVKKVVEDLANYRVPVEKLIIHEQITRELKDYKATGPHVAIAKRLQARGIKVKPGTIISYVVLKGSKKISDRVILFDEYDSSRHKYDPDYYIHNQVLPAVLRILEAFGYKEKDLEYQRMKQTGLGAWLKMGKK

SEQ ID NO: 81 - protein, 773 aa, unidentified
  REGION 1..773: note = Description of Unknown: Synthetic polypeptide
MILDTDYITENGKPVIRIFKKEKGEFKIEYDRNFEPYIYALLEDDESIEDIKKITGERHGKKVRIIRVEKVKKKFLGEPIEVWKLVFEHPQDVPAIRDAIRSHPAVREIFEYDIPFAKRYLIDKGLVPMEGGEELKLLAFNIATFYHEGDEFAEGEILMISYADESGAKVITWKKIDLPYVEVVSTEREAIKRFLQVLREKDPDVLLTYNGDNFDFAYIKKRCEKLGLKFTIGRDGSEPKIQRMGDRFAVEVKGRIHLDLADVVRHTIRLPTYTLEAVYEAVFGKKKEKVYAEEIAEAWKSEEGLKRVAQYSMEDARATYELGREFFPLEVELAKLIGQSVWDVSRSSTGNLVEWYLLRVAYERNELAPNKPGGEEYQRRMRSSYIGGYVKEPEKGLWESIAYLDFRSSAGSIIVTHNVSPDTLEKECKNYDVAPIVGYRFCKDFKGFIPSILEDLIETRQKVKRKMKATIDPIEKKMLDYRQRALKILANSYYGYQGYPKARWYSKECAESVTAWGRHYIETTIKEAEKFGFKVLYADTDGFFATIPNEKPETIKSKAKKFLKHINEKLPGMLELEYEGFYLRGFFVTKKKYALIDEDGHITTRGLEVVRRDWSEIAKETQAKVLEVILREGSIEKAAGIVKKVVEDLANYRVPVEKLIIHEQITRELKRYKATGPHVAIAKRLQARGIKVKPGTIISYVVLKGSKKISDRVILFDEYDSSRHKYDPDYYIHNQVLPAVLRILEAFGYKEKDLEYQRMKQTGLGAWLKMGKK

SEQ ID NO: 82 - protein, 773 aa, unidentified
  REGION 1..773: note = Description of Unknown: Synthetic polypeptide
MILDTDYITENGKPVIRIFKKEKGEFKIEYDRNFEPYIYALLEDDESIEDIKKITGERHGKKVRIIRVEKVKKKFLGEPIEVWKLVFEHPQDYPAIRDAIRSHPAVREIFEYDIPFAKRYLIDKGLVPMEGGEELKLLAFAIATFYHEGDEFAEGEILMISYADESGAKVITWKKIDLPYVEVVSTEREAIKRFLQVLREKDPDVLLTYNGDNFDFAYIKKRCEKLGLKFTIGRDGSEPKIRRMGDRFAVEVKGRIHLDLAPVVRHTIRLPTYTLEAVYEAVFGKKKEKVYAEEIAEAWKSEEGLKRVAQYSMEDARATYELGREFFPMEVELAKLIGQSVWDVSRSSTGNLVEWYLLRVAYERNELAPNKPGGEEYQRRMRSSYIGGYVKEPEKGLWESIAYLDFRSSAGSIIVTHNVSPDTLEKECKNYDVAPIVGYRFCKDFKGFIPSILEDLIETRQKVKRKMKATIDPIEKKMLDYRQRALKILANSYYGYQGYPKARWYSKECAESVTAWGRHYIETTIKEAEKFGFKVLYADTDGFFATIPNEKPETIKSKAKKFLKHINEKLPGMLELEYEGFYLRGFFVTKKKYALIDEDGHITTRGLEVVRRDWSEIAKETQAKVLEVILREGSIEKAAGIVKKVVEDLANYRVPVEKLIIHEQITRELKRYKATGPHVAIAKRLQARGIKVKPGTIISYVVLKGSKKISDRVILFDEYDSSRHKYDPDYYIHNQVLPAVLRILEAFGYKEKDLEYQRMKQTGLGAWLKMGKK

SEQ ID NO: 83 - protein, 773 aa, unidentified
  REGION 1..773: note = Description of Unknown: Synthetic polypeptide
MILDTDYITENGKPVIRIFKKEKGEFKIEYDRNFEPYIYALLEDDESIEDIKKITGERHGKKVRIIRVEKVKKKFLGEPIEVWKLVFEHPQDVPAIRDAIRSHPAVREIFEYDIPFAKRYLIDKGLVPMEGGEELKLLAFNIATFYHEGDEFAEGEILMISYADESGAKVITWKKIDLPYVEVVSTEREAIKRFLQVLREKDPDVLLTYNGDNFDFAYIKKRCEKLGLKFTIGRDGSEPKIQRMGDRFAVEVKGRIHLDLAPVVRHTIRLPTYTLEAVYEAVFGKKKEKVYAEEIAEAWKSEEGLARVAQYSVEDARATYELGREFFPLEVELAKLIGQSVWDVSRSSTGNLVEWYLLRVAYERNELAPNQPGGEEYQRRMRSSYIGGYVKEPEKGLWESIAYLDFRSSAGSIIVTHNVSPDTLEKECKNYDVAPIVGYRFCKDFKGFIPSILEDLIETRQKVKRKMKATIDPIEKKMLDYRQRALKILANSYYGYQGYPKARWYSKECAESVTAWGRHYIETTIKEAEKFGFKVLYADTDGFFATIPNEKPETIKSKAKKFLKHINEKLPGMLELEYEGFYLRGFFVTKKKYALIDEDGHITTRGLEVVRRDWSEIAKETQAKVLEVILREGSIEKAAGIVKKVVEDLANYRVPVEKLIIHEQITRELKRYKATGPHVAIAKRLQARGIKVKPGTIISYVVLKGSKKISDRVILFDEYDSSRHKYDPDYYIHNQVLPAVLRILEAFGYKEKDLEYQRMKQTGLGAWLKMGKK

SEQ ID NO: 84 - protein, 773 aa, unidentified
  REGION 1..773: note = Description of Unknown: Synthetic polypeptide
MILDTDYITENGKPVIRIFKKEKGEFKIEYDRNFEPYIYALLEDDESIEDIKKITGERHGKKVRIIRVEKVKKKFLGEPIEVWKLVFEHPQDYPAIRDAIRSHPAVREIFEYDIPFAKRYLIDKGLVPMEGGEELKLLAFAIATFYHEGDEFAEGEILMISYADESGAKVITWKKIDLPYVEVVSTEREAIKRFLQVLREKDPDVLLTYNGDNFDFAYIKKRCEKLGLKFTIGRDGSEPKIQRMGDRFAVEVKGRIHLDLAPVVRHTIRLPTYTLEAVYEAVFGKKKEKVYAEEIAEAWKSEEGLKRVAQYSMEDARATYELGREFFPMEVELAKLIGQSVWDVSRSSTGNLVEWYLLRVAYERNELAPNKPGGEEYQRRMRSSYIGGYVKEPEKGLWESIAYLDFRSSAGSIIVTHNVSPDTLEKECKNYDVAPIVGYRFCKDFKGFIPSILEDLIETRQKVKRKMKATIDPIEKKMLDYRQRALKILANSYYGYQGYPKARWYSKECAESVTAWGRHYIETTIKEAEKFGFKVLYADTDGFFATIPNEKPETIKSKAKKFLKHINEKLPGMLELEYEGFYLRGFFVTKKKYALIDEDGHITTRGLEVVRRDWSEIAKETQAKVLEVILREGSIEKAAGIVKKVVEDLANYRVPVEKLIIHEQITRELKRYKATGPHVAIAKRLQARGKKVKPGTIISYVVLKGSKKISDRVILFDEYDSSRHKYDPDYYIHNQVLPAVLRILEAFGYKEKDLEYQRMKQTGLGAWLKMGKK

SEQ ID NO: 85 - protein, 773 aa, unidentified
  REGION 1..773: note = Description of Unknown: Synthetic polypeptide
MILDTDYITENGKPVIRIFKKEKGEFKIEYDRNFEPYIYALLEDDESIEDIKKITGERHGKKVRIIRVEKVKKKFLGEPIEVWKLVFEHPQDVPAIRDAIRSHPAVREIFEYDIPFAKRYLIDKGLVPMEGGEELKLLAFNIATFYHEGDEFAEGEILMISYADESGAKVITWKKIDLPYVEVVSTEREAIKRFLQVLREKDPDVLLTYNGDNFDFAYIKKRCEKLGLKFTIGRDGSEPKIQRMGDRFAVEVKGRIHLDLAPVVRHTIRLPTYTLEAVYEAVFGKKKEKVYAEEIAEAWKSEEGLKRVAQYSMEDARATYELGREFFPLEVELAKLIGQSVWDVSRSSTGNLVEWYLLRVAYERNELAPNKPGGEEYQRRMRSSYIGGYVKEPEKGLWESIAYLDFRSSAGSIIVTHNVSPDTLEKECKNYDVAPIVGYRFCKDFKGFIPSILEDLIETRQKVKRKMKATIDPIEKKMLDYRQRALKILANSYYGYQGYPKARWYSKECAESVTAWGRHYIETTIKEAEKFGFKVLYADTDGFFATIPNEKPETIKSKAKKFLKHINEKLPGMLELEYEGFYLRGFFVTKKQYALIDEDGHITTRGLEVVRRDWSEIAKETQAKVLEVILREGSIEKAAGIVKKVVEDLANYRVPVEKLIIHEQITRELKRYKATGPHVAIAKRLQARGIKVKPGTIISYVVLKGSKKISDRVILFDEYDSSRHKYDPDYYIHNQVLPAVLRILEAFGYKEKDLEYQRMKQTGLGAWLKMGKK

SEQ ID NO: 86 - protein, 773 aa, unidentified
  REGION 1..773: note = Description of Unknown: Synthetic polypeptide
LILDTDYITENGKPVIRIFKKEKGEFKIEYDRNFEPYIYALLEDDESIEDIKKITGERHGKKVRIIRVEKVKKKFLGEPIEVWKLVFEHPQDYPAIRDAIRSHPAVREIFEYDIPFAKRYLIDKGLVPFEGGEELKLLAFAIATFYHEGDEFAEGEILMISYADESGAKVITWKKIDLPYVEVVSTEREAIKRFLQVLREKDPDVLLTYNGDNFDFAYIKKRCEKLGLKFTIGRDGSEPKIQRMGDRFAVEVKGRIHLDLAPVVRHTIRLPTYTLEAVYEAVFGKKKEKVYAEEIAEAWKSEEGLKRVAQYSMEDARATYELGREFFPMEVELAKLIGQSVWDVSRSSTGNLVEWYLLRVAYERNELAPNKPGGEEYQRRMRSSYIGGYVKEPEKGLWESIAYLDFRSSAGSIIVTHNVSPDTLEKECKNYDVAPIVGYRFCKDFKGFIPSILEDLIETRQKVKRKMKATIDPIEKKMLDYRQRALKILANSYYGYQGYPKARWYSKECAESVTAWGRHYIETTIKEAEKFGFKVLYADTDGFFATIPNEKPETIKSKAKKFLKHINEKLPGMLELEYEGFYLRGFFVTKKKYALIDEDGHITTRGLEVVRRDWSEIAKETQAKVLEVILREGSIEKAAGIVKKVVEDLANYRVPVEKLIIHEQITRELKRYKATGPHVAIAKRLQARGIKVKPGTIISYVVLKGSKKISDRVILFDEYDSSRHKYDPDYYIHNQVLPAVLRILEAFGYKEKDLEYQRMKQTGLGAWLKMGKK

SEQ ID NO: 87 - protein, 773 aa, unidentified
  REGION 1..773: note = Description of Unknown: Synthetic polypeptide
MILDTDYITENGKPVIRIFKKEKGEFKIEYDRNFEPYIYALLEDDESIEDIKKITGERHGKKVRIIRVEKVKKKFLGEPIEVWKLVFEHPYDVPAIQDAIRSHPAVREIFEYDIPFAKRYLIDKGLVPMEGGEELKLLAFNIATFYHEGDEFAEGEILMISYADESGAKVITWKKIDLPYVEVVSTEREAIKRFLQVLREKDPDVLLTYNGDNFDFAYIKKRCEKLGLKFTIGRDGSEPKIQRMGDRFAVEVKGRIHLDLAPVVRHTIRLPTYTLEAVYEAVFGKKKEKVYAEEIAEAWKSEEGLKRVAQYSMEDARATYELGREFFPLEVELAKLIGQSVWDVSRSSTGNLVEWYLLRVAYERNELAPNKPGGEEYQRRMRSSYIGGYVKEPEKGLWESIAYLDFRSSAGSIIVTHNVSPDTLEKECKNYDVAPIVGYRFCKDFKGFIPSILEDLIETRQKVKRKMKATIDPIEKKMLDYRQRALKILANSYYGYQGYPKARWYSKECAESVTAWGRHYIETTIKEAEKFGFKVLYADTDGFFATIPNEKPETIKSKAKKFLKHINEKLPGMLELEYEGFYLRGFFVTKKKYALIDEDGHITTRGLEVVRRDWSEIAKETQAKVLEVILREGSIEKAAGIVKKVVEDLANYRVPVEKLIIHEQITRELKRYKATGPHVAIAKRLQARGIKVKPGTIISYVVLKGSKKISDRVILFDEYDSSRHKYDPDYYIHNQVLPAVLRILEAFGYKEKDLEYQRMKQTGLGAWLKMGKK

SEQ ID NO: 88 - protein, 773 aa, unidentified
  REGION 1..773: note = Description of Unknown: Synthetic polypeptide
MILDTDYITENGKPVIRIFKKEKGEFKIEYDRNFEPYIYALLEDDESIEDIKKITGERHGKKVRIIRVEKVKKKFLGEPIEVWKLVFEHPQDYPAIRDAIRSHPAVREIFEYDIPFAKRYLIDKGLVPMEGGEELKLLAFAIATFYHEGDEFAEGEILMISYADESGAKVITWKKIDLPYVEVVSTEREAIKRFLQVLREKDPDVLLTYNGDNFDFAYIKKRCEKLGLKFTIGRDGSEPKIQRMGDRFAVEVKGRIHLDLAPVVRHTIRLPTYTLEAVYEAVFGKKKEKVYAEEIAEAWKSEEGLKRVAQYSMEDARATYELGREFFPMEVELAKLIGQSVWDVSRSSTGNLVEWYLLRVAYERNELAPNKPGGEEYQRRMRSSYIGGYVKEPEKGLWESIAYLDFRSSAGSIIVTHNVSPDTLEKECKNYDVAPNVGYRFCKDFKGFIPSILEDLIETRQKVKRKMKATIDPIEKKMLDYRQRALKILANSYYGYQGYPKARWYSKECAESVTAWGRHYIETTIKEAEKFGFKVLYADTDGFFATIPNEKPETIKSKAKKFLKHINEKLPGMLELEYEGFYLRGFFVTKKKYALIDEDGHITTRGLEVVRRDWSEIAKETQAKVLEVILREGSIEKAAGIVKKVVEDLANYRVPVEKLIIHEQITRELKRYKATGPHVAIAKRLQARGIKVKPGTIISYVVLKGSKKISDRVILFDEYDSSRHKYDPDYYIHNQVLPAVLRILEAFGYKEKDLEYQRMKQTGLGAWLKMGKK

SEQ ID NO: 89 - protein, 773 aa, unidentified
  REGION 1..773: note = Description of Unknown: Synthetic polypeptide
MILDTDYITENGKPVIRIFKKEKGEFKIEYDRNFEPYIYALLEDDESIEDIKKITGERHGKKVRIIRVEKVKKKFLGEPIEVWKLVFEHPQDYPAIRDAIRSHPAVREIFEYDIPFAKRYLIDKGLVPMEGGEELKLLAFAIATFYHEGDEFAEGEILMISYADESGAKVITWKKIDLPYVEVVSTEREAIKRFLQVLREKDPDVLLTYNGDNFDFAYIKKRCEKLGLKFTIGRDGSEPKIQRMGDRFAVEVKGRIHLDLAPVVRHTIRLPTYTLEAVYEAVFGKKKEKVYAEEIAEAWKSEEGLVRVAQYSMEDARATYELGREFFPMEVELAKLIGQSVWDVSRSSTGNLVEWYLLRVAYERNELAPNKPGGEEYQRRMRSSYIGGYVKEPEKGLWESIAYLDFRSSAGSIIVTHNVSPDTLEKECKNYDVAPIVGYRFCKDFKGFIPSILEDLIETRQKVKRKMKATIDPIEKKMLDYRQRALKILANSYYGYQGYPKARWYSKECAESVTAWGRHYIETTIKEAEKFGFKVLYADTDGFFATIPNEKPETIKSKAKKFLKHINEKLPGMLELEYEGFYLRGFFVTKKKYALIDEDGHITTRGLEVVRRDWSEIAKETQAKVLEVILREGSIEKAAGIVKKVVEDLANYRVPVEKLIIHEQITRELKRYKATGPHVAIAKRLQARGIKVKPGTIISYVVLKGSKKISDRVILFDEYDSSRHKYDPDYYIHNQVLPAVLRILEAFGYKEKDLEYQRMKQTGLGAWLKMGKK

SEQ ID NO: 90 - protein, 773 aa, unidentified
  REGION 1..773: note = Description of Unknown: Synthetic polypeptide
MILDTDYITENGKPVIRIFKKEKGEFKIEYDRNFEPYIYALLEDDESIEDIKKITGERHGKKVRIIRVEKVKKKFLGEPIEVWKLVFEHPQDVPAIRDAIRSHPAVREIFEYDIPFAKRYLIDKGLVPMEGGEELKLLAFNIATFYHEGDEFAEGEILMISYADESGAKVITWKKIDLPYVEVVSTEREAIKRFLQVLREKDPDVLLTYNGDNFDFAYIKKRCEKLGLKFTIGRDGSEPQIQRMGDRFAVEVKGRIHLDLAPVVRHTIRLPTYTLEAVYEAVFGKKKEKVYAEEIAEAWKSEEGLKRVAQYSVEDARATYELGREFFPLEVELAKLIGQSVWDVSRSSTGNLVEWYLLRVAYERNELAPNQPGGEEYQRRMRSSYIGGYVKEPEKGLWESIAYLDFRSSAGSIIVTHNVSPDTLEKECKNYDVAPIVGYRFCKDFKGFIPSILEDLIETRQKVKRKMKATIDPIEKKMLDYRQRALKILANSYYGYQGYPKARWYSKECAESVTAWGRHYIETTIKEAEKFGFKVLYADTDGFFATIPNEKPETIKSKAKKFLKHINEKLPGMLELEYEGFYLRGFFVTKKKYALIDEDGHITTRGLEVVRRDWSEIAKETQAKVLEVILREGSIEKAAGIVKKVVEDLANYRVPVEKLIIHEQITRELKRYKATGPHVAIAKRLQARGIKVKPGTIISYVVLKGSKKISDRVILFDEYDSSRHKYDPDYYIHNQVLPAVLRILEAFGYKEKDLEYQRDKQTGLGAWLKMGKK

SEQ ID NO: 91 - protein, 773 aa, unidentified
  REGION 1..773: note = Description of Unknown: Synthetic polypeptide
MILDTDYITENGKPVIRIFKKEKGEFKIEYDRNFEPYIYALLEDDESIEDIKKITGERHGKKVRIIRVEKVKKKFLGEPIEVWKLVFEHPQDYPAIRDAIRSHPAVREIFEYDIPFAKRYLIDKGLVPMEGGEELKLLAFAIATFYHEGDEFAEGEILMISYADESGAKVITWKKIDLPYVEVVSTEREAIKRFLQVLREKDPDVLLTYNGDNFDFNYIKKRCEKLGLKFTIGRDGSEPKIQRMGDRFAVEVKGRIHLDLAPVVRHTIRLPTYTLEAVYEAVFGKKKEKVYAEEIAEAWKSEEGLKRVAQYSMEDARATYELGREFFPMEVELAKLIGQSVWDVSRSSTGNLVEWYLLRVAYERNELAPNKPGGEEYQRRMRSSYIGGYVKEPEKGLWESIAYLDFRSSAGSIIVTHNVSPDTLEKECKNYDVAPIVGYRFCKDFKGFIPSILEDLIETRQKVKRKMKATIDPIEKKMLDYRQRALKILANSYYGYQGYPKARWYSKECAESVTAWGRHYIETTIKEAEKFGFKVLYADTDGFFATIPNEKPETIKSKAKKFLKHINEKLPGMLELEYEGFYLRGFFVTKKKYALIDEDGHITTRGLEVVRRDWSEIAKETQAKVLEVILREGSIEKAAGIVKKVVEDLANYRVPVEKLIIHEQITRELKRYKATGPHVAIAKRLQARGIKVKPGTIISYVVLKGSKKISDRVILFDEYDSSRHKYDPDYYIHNQVLPAVLRILEAFGYKEKDLEYQRMKQTGLGAWLKMGKK

SEQ ID NO: 92 - protein, 773 aa, unidentified
  REGION 1..773: note = Description of Unknown: Synthetic polypeptide
MILDTDYITENGKPVIRIFKKEKGEFKIEYDRNFEPYIYALLEDDESIEDIKKITGERHGKKVRIIRVEKVKKKFLGEPIEVWKLVFEHPQDYPAIRDAIRSHPAVREIFEYDIPFAKRYLIDKGLVPMEGGEELKLLAFAIATFYHEGDEFAEGEILMISYADESGAKVITWKKIDLPYVEVVSTEREAIKRFLQVLREKDPDVLLTYNGDNFDFAYIKKRCEKLGLKFTIGRDGSEPKIQRMGDRFAVEVKGRIHLDLAPVVRHTIRLPTYTLEAVYEAVFGKKKEKVYAEEIAEAWKSEEGLKRVAQYSMEDARATYELGREFFPMEVELAKLIGQSVWDVSRSSTGNLVEWYLLRVAYERNELAPNKPGGEEYQRRMRSSYIGGYVKEPEKGLWESIAYLDFRSSAGSIIVTHNVSPDTLEKECKNYDVAPIVGYRFCKDFKGFIPSILEDLIETRQKVKRKMKATIDPIEKKMLDYRQRALKILANSYYGYQGYPKARWYSKECAESVTAWGRHYIETTIKEAEKFGFKVLYADTDGFFATIPNEKPETIKSKAKKFLKHINEKLPGMLELEYEGFYLRGFFVTKKKYALIDEDGHITTRGLEVVRRDWSEIAKETQAKVLEVILREGSIEKAAGIVKKVVEDLANYRVPVEKLIIHEQITRELKRYKATGPHVAIAKRLQARGIEVKPGTIISYVVLKGSKKISDRVILFDEYDSSRHKYDPDYYIHNQVLPAVLRILEAFGYKEKDLEYQRMKQTGLGAWLKMGKK

SEQ ID NO: 93 - protein, 773 aa, unidentified
  REGION 1..773: note = Description of Unknown: Synthetic polypeptide
MILDTDYITENGKPVIRIFKKEKGEFKIEYDRNFEPYIYALLEDDESIEDIKKITGERHGKKVRIIRVEKVKKKFLGEPIEVWKLVFEHPQDYPAIRDAIRSHPAVREIFEYDIPFAKRYLIDKGLVPMEGGEELKLLAFAIATFYHEGDEFAEGEILMISYADESGAKVITWKKIDLPYVEVVSTEREAIKRFLQVLREKDPDVLLTYNGDNFDFAYIKKRCEKLGLKFTIGRDGSEPKIQRMGDRFAVEVKGRIHLDLAPVVRHTIRLPTYTLEAVYEAVFGKKKEKVYAEEIAEAWKSEEGLKRVAQYSMEDARATYELGREFFPMEVELAKLIGQSVWDVSRSSTGNLVEWYLLRVAYERNELAPNKPGGEEYQRRMRSSYIGGYVKEPEKGLWESIAYLDFRSSAGSIIVTHNVSPDTLEKECKNYDVAPIVGYRFCKDFKGFIPSILEDLIETRQKVKRKMKATIDPIEKKMLDYRQRALKILANSYYGYQGYPKARWYSKECAESVTAWGRHYIETTIKEAEKFGFKVLYADTDGFFATIPNEKPETIKSKAKKFLKHINEKLPGMLELEYEGFYLRGFFVTKKKYALIDEDGHITTRGLEVVRRDWSEIAKETQAKVLEVILREGSIEKAAGIVKKVVEDLANYRVPVEKLIIHEQMTRELKRYKATGPHVAIAKRLQARGIKVKPGTIISYVVLKGSKKISDRVILFDEYDSSRHKYDPDYYIHNQVLPAVLRILEAFGYKEKDLEYQRMKQTGLGAWLKMGKK

SEQ ID NO: 94 - protein, 773 aa, unidentified
  REGION 1..773: note = Description of Unknown: Synthetic polypeptide
MILDTDYITENGKPVIRIFKKEKGEFKIEYDRNFEPYIYALLEDDESIEDIKKITGERHGKKVRIIRVEKVKKKFLGEPIEVWKLVFEHPQDYPAIRDAIRSHPAVREIFEYDIPFAKRYLIDKGLVPMEGGEELKLLAFAIATFYHEGDEFAEGEILMISYADESGAKVITWKKIDLPYVEVVSTEREAIKRFLQVLREKDPDVLLTYNGDNFDFAYIKKRCEKLGLKFTIGRDGSEPKIQRMGDRFAVEVKGRIHLDLAPVVRHTIRLPTYTLEAVYEAVFGKKKEKVYAEEIAEAWKSEEGLKRVAQYSMEDARATYELGREFFPMEVELAKLIGQSVWDVSRSSTGNLVEWYLLRVAYERNELAPNKPGGEEYQRRMRSSYIGGYVKEPEKGLWESIAYLDFRSSAGSIIVTHNVSPDTLEKECKNYDVAPIVGYRFCKDFKGFIPSILEDLIETRQKVKRKMKATIDPIEKKMLDYRQRALKILANSYYGYQGYPKARWYSKECAESVTAWGRHYIETTIKEAEKFGFKVLYADTDGFFATIPNEKPETIKSKAKKFLKHINEKLPGMLELEYEGFYLRGFFVTKKKYALIDEDGHITTRGLEVVRRDWSEIAKETQAKVLEVILREGSIEKAAGIVKKVVEDLANYRVPVEKLIIHEQITRELKRYKATGPHVAIAKRLQARGNKVKPGTIISYVVLKGSKKISDRVILFDEYDSSRHKYDPDYYIHNQVLPAVLRILEAFGYKEKDLEYQRMKQTGLGAWLKMGKK

SEQ ID NO: 95 - protein, 766 aa, unidentified
  REGION 1..766: note = Description of Unknown: Synthetic polypeptide
AILDTDYITENGKPVIRIFKKEKGEFKIEYDRNFEPYIYALLEDDESIEDIKKITGERHGKKVRIIRVEKVKKKFLGEPIEVWKLVFEHPQDVPAIRDAIRSHPAVREIFEYDIPFAKRYLIDKGLVPMEGGEELKLLAFNIATFYHEGDEFAEGEILMISYADESGAKVITWKKIDLPYVEVVSTEREAIKRFLQVLREKDPDVLLTYNGDNFDFAYIKKRCEKLGLKFTIGRDGSEPKIQRMGDRFAVEVKGRIHLDLAPVVRHTIRLPTYTLEAVYEAVFGKKKEKVYAEEIAEAWKSEEGLKRVAQYSMEDARATYELGREFFPLEVELAKLIGQSVWDVSRSSTGNLVEWYLLRVAYERNELAPNKPGGEEYQRRMRSSYIGGYVKEPEKGLWESIAYLDFRSSAGSIIVTHNVSPDTLEKECKNYDVAPIVGYRFCKDFKGFIPSILEDLIETRQKVKRKMKATIDPIEKKMLDYRQRALKILANSYYGYQGYPKARWYSKECAESVTAWGRHYIETTIKEAEKFGFKVLYADTDGFFATIPNEKPETIKSKAKKFLKHINEKLPGMLELEYEGFYLRGFFVTKKKYALIDEDGHITTRGLEVVRRDWSEIAKETQAKVLEVILREGSIEKAAGIVKKVVEDLANYRVPVEKLIIHEQITRELKRYKATGPHVAIAKRLQARGIKVKPGTIISYVVLKGSKKISDRVILFDEYDSSRHKYDPDYYIHNQVLPAVLRILEAFGYKEKDLEYQRDKQTGLGA

SEQ ID NO: 96 - protein, 757 aa, unidentified
  REGION 1..757: note = Description of Unknown: Synthetic polypeptide
MILDTDYITENGKPVIRIFKKEKGEFKIEYDRNFEPYIYALLEDDESIEDIKKITGERHGKKVRIIRVEKVKKKFLGEPIEVWKLVFEHPQDVPAIRDAIRSHPAVREIFEYDIPFAKRYLIDKGLVPMEGGEELKLLAFAIATFYHEGDEFAEGEILMISYADESGAKVITWKKIDLPYVEVVSTEREAIKRFLQVLREKDPDVLLTYNGDNFDFAYIKKRCEKLGLKFTIGRDGSEPKIQRMGDRFAVEVKGRIHLDLAPVVRHTIRLPTYTLEAVYEAVFGKKKEKVYAEEIAEAWKSEEGLKRVAQYSMEDARATYELGREFFPMEVELAKLIGQSVWDVSRSSTGNLVEWYLLRVAYERNELAPNKPGGEEYQRRMRSSYIGGYVKEPEKGLWESIAYLDFRSSAGSIIVTHNVSPDTLEKECKNYDVAPIVGYRFCKDFKGFIPSILEDLIETRQKVKRKMKATIDPIEKKMLDYRQRALKILANSYYGYQGYPKARWYSKECAESVTAWGRHYIETTIKEAEKFGFKVLYADTDGFFATIPNEKPETIKSKAKKFLKHINEKLPGMLELEYEGFYLRGFFVTKKKYALIDEDGHITTRGLEVVRRKWSEIAKETQAKVLEVILREGSIEKAAGIVKKVVEDLANYRVPVEKLIIHEQITRKLKDYKATGPHVAIAKRLQARGIKVKPGTIISYVVLKGSKKISDRVILFDEYDSSRHKYDPDYYIHNQVLPAVLRILEAFGYKEKDLEYQ

SEQ ID NO: 97 - protein, 773 aa, unidentified
  REGION 1..773: note = Description of Unknown: Synthetic polypeptide
MILDTDYITENGKPVIRIFKKEKGEFKIEYDRNFEPYIYALLEDDESIEDIKKITGERHGKKVRIIRVEKVKKKFLGEPIEVWKLVFEHPQDVPAIRDAIRSHPAVREIFEYDIPFAKRYLIDKGLVPMEGGEELKLLAFAIYTFYHEGDEFAEGEILYISYADESGAKVITWKKIDLPYVEVVSTEREAIKRFLQVLREKDPDVLLTYNGDNFDFAYIKKRCEKLGLKFTIGRDGSEPKIQRMGDRFAVEVKGRIHLDLAPVVRHTIRLPTYTLEAVYEAVFGKKKEKVYAEEIAEAWKSEEGLKRVAQYSMEDARATYELGREFFPMEVELAKLIGQSVWDVSRSSTGNLVEWYLLRVAYERNELAPNKPGGEEYQRRMRSSYIGGYVKEPEKGLWESIAYLDFRSSAGSIIVTHNVSPDTLEKECKNYDVAPIVGYRFCKDFKGFIPSILEDLIETRQKVKRKMKATIDPIEKKMLDYRQRALKILANSYYGYQGYPKARWYSKECAESVTAWGRHYIETTIKEAEKFGFKVLYADTDGFFATIPNEKPETIKSKAKKFLKHINEKLPGMLELEYEGFYLRGFFVTKKKYALIDEDGHITTRGLEVVRRDWSEIAKETQAKVLEVILREGSIEKAAGIVKKVVEDLANYRVPVEKLIIHEQITRELKDYKATGPHVAIAKRLQARGIKVKPGTIISYVVLKGSKKISDRVILFDEYDSSRHKYDPDYYIHNQVLPAVLRILEAFGYKEKDLEYQRMKQTGLGAWLKMGKK

SEQ ID NO: 98 - protein, 773 aa, unidentified
  REGION 1..773: note = Description of Unknown: Synthetic polypeptide
MILDTDYITENGKPVIRIFKKEKGEFKIEYDRNFEPYIYALLEDDESIEDIKKITGERHGKKVRIIRVEKVKKKFLGEPIEVWKLVFEHPQDVPAIRDAIRSHPAVREIFEYDIPFAKRYLIDKGLVPMEGGEELKLLAFNIATFYHEGDEFAEGEILMISYADESGAKVITWKKIDLPYVEVVSTEREAIKRFLQVLREKDPDVLLTYNGDNFDFAYIKKRCEKLGLKFTIGRDGSEPKIQRMGDRFAVEVKGRIHLDLAPVVRHTIRLPTYTLEAVYEAVFGKKKEKVYAEEIAEAWKSEEGLKRVAQYSMEDARATYELGREFFPLEVELAKLIGQSVWDVSRSSTGNLVEWYLLRVAYERNELAPNKPGGEEYQRRMRSSYIGGYVKEPEKGLWESIAYLDFRSSAGSIIVTHNVSPDTLEKECKNYDVAPIVGYRFCKDFKGFIPSILEDLIETRQKVKRKMKATIDPIEKKMLDYRQRALKILANSYYGYQGYPKARWYSKECAESVTAWGRHYIETTIKEAEKFGFKVLYADTDGFFATIPNEKPETIKSKAKKFLKHINEKLPGMLELEYEGFYLRGFFVTKKKYALIDEDGHITTRGLEVVRRDWSEIAKETQAKVLEVILREGSIEKAAGIVKKVVEDLANYRVPVEKLIIHEQITRELKRYKATGPHVAISKRLQARGIKVKPGTIISYVVLKGSKKISDRVILFDEYDSSRHKYDPDYYIHNQVLPAVLRILEAFGYKEKDLEYQRMKQTGLGAWLKMGKK

SEQ ID NO: 99 - protein, 773 aa, unidentified
  REGION 1..773: note = Description of Unknown: Synthetic polypeptide
MILDTDYITENGKPVIRIFKKEKGEFKIEYDRNFEPYIYALLEDDESIEDIKKITGERHGKKVRIIRVEKVKKKFLGEPIEVWKLVFEHPQDYPAIRDAIRSHPAVREIFEYDIPFAKRYLIDKGLVPMEGGEELKLLAFAIATFYHEGDEFAEGEILMISYADESGAKVITWKKIDLPYVEVVSTEREAIKRFLQVLREKDPDVLLTYNGDNFDFAYIKKRCEKLGLKFTIGRDGSEPAIQRMGDRFAVEVKGRIHLDLAPVVRHTIRLPTYTLEAVYEAVFGKKKEKVYAEEIAEAWKSEEGLARVAQYSMEDARATYELGREFFPMEVELAKLIGQSVWDVSRSSTGNLVEWYLLRVAYERNELAPNKPGGEEYQRRMRSSYIGGYVKEPEKGLWESIAYLDFRSSAGSIIVTHNVSPDTLEKECKNYDVAPIVGYRFCKDFKGFIPSILEDLIETRQKVKRKMKATIDPIEKKMLDYRQRALKILANSYYGYQGYPKARWYSKECAESVTAWGRHYIETTIKEAEKFGFKVLYADTDGFFATIPNEKPETIKSKAKKFLKHINEKLPGMLELEYEGFYLRGFFVTKKKYALIDEDGHITTRGLEVVRRDWSEIAKETQAKVLEVILREGSIEKAAGIVKKVVEDLANYRVPVEKLIIHEQITRELKRYKATGPHVAIAKRLQARGIKVKPGTIISYVVLKGSKKISDRVILFDEYDSSRHKYDPDYYIHNQVLPAVLRILEAFGYKEKDLEYQRDKQTGLGAWLKMGKK

SEQ ID NO: 100 - protein, 773 aa, unidentified
  REGION 1..773: note = Description of Unknown: Synthetic polypeptide
FILDTDYITENGKPVIRIFKKEKGEFKIEYDRNFEPYIYALLEDDESIEDIKKITGERHGKKVRIIRVEKVKKKFLGEPIEVWKLVFEHPQDYPAIRDAIRSHPAVREIFEYDIPFAKRYLIDKGLVPMEGGEELKLLAFAIATFYHEGDEFAEGEILMISYADESGAKVITWKKIDLPYVEVVSTEREAIKRFLQVLREKDPDVLLTYNGDNFDFAYIKKRCEKLGLKFTIGRDGSEPKIQRMGDRFAVEVKGRIHLDLAPVVRHTIRLPTYTLEAVYEAVFGKKKEKVYAEEIAEAWKSEEGLKRVAQYSMEDARATYELGREFFPMEVELAKLIGQSVWDVSRSSTGNLVEWYLLRVAYERNELAPNKPGGEEYQRRMRSSYIGGYVKEPEKGLWESIAYLDFRSSAGSIIVTHNVSPDTLEKECKNYDVAPIVGYRFCKDFKGFIPSILEDLIETRQKVKRKMKATIDPIEKKMLDYRQRALKILANSYYGYQGYPKARWYSKECAESVTAWGRHYIETTIKEAEKFGFKVLYADTDGFFATIPNEKPETIKSKAKKFLKHINEKLPGMLELEYEGFYLRGFFVTKKKYALIDEDGHITTRGLEVVRRDWSEIAKETQAKVLEVILREGSIEKAAGIVKKVVEDLANYRVPVEKLIIHEQITRELKRYKATGPHVAIAKRLQARGIKVKPGTIISYVVLKGSKKISDRVILFDEYDSSRHKYDPDYYIHNQVLPAVLRILEAFGYKEKDLEYQRMKQTGLGAWLKMGKK

SEQ ID NO: 101 - protein, 757 aa, unidentified
  REGION 1..757: note = Description of Unknown: Synthetic polypeptide
MILDTDYITENGKPVIRIFKKEKGEFKIEYDRNFEPYIYALLEDDESIEDIKKITGERHGKKVRIIRVEKVKKKFLGEPIEVWKLVFEHPQDVPAIRDAIRSHPAVREIFEYDIPFAKRYLIDKGLVPMEGGEELKLLAFAIATFYHEGDEFAEGEILMISYADESGAKVITWKKIDLPYVEVVSTEREAIKRFLQVLREKDPDVLLTYNGDNFDFAYIKKRCEKLGLKFTIGRDGSEPKIQRMGDRFAVEVKGRIHLDLAPVVRHTIRLPTYTLEAVYEAVFGKKKEKVYAEEIAEAWKSEEGLKRVAQYSMEDARATYELGREFFPMEVELAKLIGQSVWDVSRSSTGNLVEWYLLRVAYERNELAPNKPGGEEYQRRMRSSYIGGYVKEPEKGLWESIAYLDFRSSAGSIIVTHNVSPDTLEKECKNYDVAPIVGYRFCKDFKGFIPSILEDLIETRQKVKRKMKATIDPIEKKMLDYRQRALKILANSYYGYQGYPKARWYSKEDAEDVTAWGRHYIETTIKEAEKFGFKVLYADTDGFFATIPNEKPETIKSKAKKFLKHINEKLPGMLELEYEGFYLRGFFVTKKKYALIDEDGHITTRGLEVVRRDWSEIAKETQAKVLEVILREGSIEKAAGIVKKVVEDLANYRVPVEKLIIHEQITRKLKDYKATGLHVAIAKRLQARGIKVKPGTIISYVVLKGSKKISDRVILFDEYDSSRHKYDPDYYIHNQVLPAVLRILEAFGYKEKDLEYQ

SEQ ID NO: 102 - protein, 773 aa, unidentified
  REGION 1..773: note = Description of Unknown: Synthetic polypeptide
MILDTDYITENGKPVIRIFKKEKGEFKIEYDRNFEPYIYALLEDDESIEDIKKITGERHGKKVRIIRVEKVKKKFLGEPIEVWKLVFEHPQDDPAIRDAIRSHPAVREIFEYDIPFAKRYLIDKGLVPMEGGEELKLLAFNIATFYHEGDEFAEGEILMISYADESGAKVITWKKIDLPYVEVVSTEREAIKRFLQVLREKDPDVLLTYNGDNFDFAYIKKRCEKLGLKFTIGRDGSEPKIQRMGDRFAVEVKGRIHLDLAPVVRHTIRLPTYTLEAVYEAVFGKKKEKVYAEEIAEAWKSEEGLKRVAQYSMEDARATYELGREFFPLEVELAKLIGQSVWDVSRSSTGNLVEWYLLRVAYERNELAPNKPGGEEYQRRMRSSYIGGYVKEPEKGLWESIAYLDFRSSAGSIIVTHNVSPDTLEKECKNYDVAPIVGYRFCKDFKGFIPSILEDLIETRQKVKRKMKATIDPIEKKMLDYRQRALKILANSYYGYQGYPKARWYSKECAESVTAWGRHYIETTIKEAEKFGFKVLYADTDGFFATIPNEKPETIKSKAKKFLKHINEKLPGMLELEYEGFYLRGFFVTKKKYALIDEDGHITTRGLEVVRRDWSEIAKETQAKVLEVILREGSIEKAAGIVKKVVEDLANYRVPVEKLIIHEQITRELKRYKATGPHVAIAKRLQARGIKVKPGTIISYVVLKGSKKISDRVILFDEYDSSRHKYDPDYYIHNQVLPAVLRILEAFGYKEKDLEYQRMKQTGLGAWLKMGKK

SEQ ID NO: 103 - protein, 772 aa, unidentified
  REGION 1..772: note = Description of Unknown: Synthetic polypeptide
ILDTDYITENGKPVIRIFKKEKGEFKIEYDRNFEPYIYALLEDDESIEDIKKITGERHGKKVRIIRVEKVKKKFLGEPIEVWKLVFEHPQDYPAIRDAIRSHPAVREIFEYDIPFAKRYLIDKGLVPMEGGEELKLLAFAIATFYHEGDEFAEGEILMISYADESGAKVITWKKIDLPYVEVVSTEREAIKRFLQVLREKDPDVLLTYNGDNFDFAYIKKRCEKLGLKFTIGRDGSEPKIQRMGDRFAVEVKGRIHLDLAPVVRHTIRLPTYTLEAVYEAVFGKKKEKVYAEEIAEAWKSEEGLKRVAQYSMEDARATYELGREFFPMEVELAKLIGQSVWDVSRSSTGNLVEWYLLRVAYERNELAPNKPGGEEYQRRMRSSYIGGYVKEPEKGLWESIAYLDFRSSAGSIIVTHNVSPDTLEKECKNYDVAPIVGYRFCKDFKGFIPSILEDLIETRQKVKRKMKATIDPIEKKMLDYRQRALKILANSYYGYQGYPKARWYSKECAESVTAWGRHYIETTIKEAEKFGFKVLYADTDGFFATIPNEKPETIKSKAKKFLKHINEKLPGMLELEYEGFYLRGFFVTKKKYALIDEDGHITTRGLEVVRRDWSEIAKETQAKVLEVILREGSIEKAAGIVKKVVEDLANYRVPVEKLIIHEQITRELKRYKATGPHVAIAKRLQARGIKVKPGTIISYVVLKGSKKISDRVILFDEYDSSRHKYDPDYYIHNQVLPAVLRILEAFGYKEKDLEYQRMKQTGLGAWLKMGKK

SEQ ID NO: 104 - protein, 773 aa, unidentified
  REGION 1..773: note = Description of Unknown: Synthetic polypeptide
MILDTDDITENGKPVIRIFKKEKGEFKIEYDRNFEPYIYALLEDDESIEDIKKITGERHGKKVRIIRVEKVKKKFLGEPIEVWKLVFEHPQDVPAIRDAIRSHPAVREIFEYDIPFAKRYLIDKGLVPMEGGEELKLLAFNIATFYHEGDEFAEGEILMISYADESGAKVITWKKIDLPYVEVVSTEREAIKRFLQVLREKDPDVLLTYNGDNFDFAYIKKRCEKLGLKFTIGRDGSEPKIQRMGDRFAVEVKGRIHLDLAPVVRHTIRLPTYTLEAVYEAVFGKKKEKVYAEEIAEAWKSEEGLKRVAQYSMEDARATYELGREFFPLEVELAKLIGQSVWDVSRSSTGNLVEWYLLRVAYERNELAPNKPGGEEYQRRMRSSYIGGYVKEPEKGLWESIAYLDFRSSAGSIIVTHNVSPDTLEKECKNYDVAPIVGYRFCKDFKGFIPSILEDLIETRQKVKRKMKATIDPIEKKMLDYRQRALKILANSYYGYQGYPKARWYSKECAESVTAWGRHYIETTIKEAEKFGFKVLYADTDGFFATIPNEKPETIKSKAKKFLKHINEKLPGMLELEYEGFYLRGFFVTKKKYALIDEDGHITTRGLEVVRRDWSEIAKETQAKVLEVILREGSIEKAAGIVKKVVEDLANYRVPVEKLIIHEQITRELKRYKATGPHVAIAKRLQARGIKVKPGTIISYVVLKGSKKISDRVILFDEYDSSRHKYDPDYYIHNQVLPAVLRILEAFGYKEKDLEYQRMKQTGLGAWLKMGKK

SEQ ID NO: 105 - protein, 773 aa, unidentified
  REGION 1..773: note = Description of Unknown: Synthetic polypeptide
MILDTDYITENGKPVIRIFKKEKGEFKIEYDRNFEPYIYALLEDDESIEDIKKITGERHGKKVRIIRVEKVKKKFLGEPIEVWKLVFEHPQDVPAIRDAIRSHPAVREIFEYDIPFAKRYLIDKGLVPMEGGEELKLLAFAIATFYHEGDEFAEGEILMISYADESGAKVITWKKIDLPYVEVVSTEREAIKRFLQVLREKDPDVLLTYNGDNFDFAYIKKRCEKLGLKFTIGRDGSEPKIQRMGDRFAVEVKGRIHLDLAPVVRHTIRLPTYTLEAVYEAVFGKKKEKVYAEEIAEAWKSEEGLKRVAQYSMEDARATYELGREFFPMEVELAKLIGQSVWDVSRSSTGNLVEWYLLRVAYERNELAPNKPGGEEYQRRMRSSYIGGYVKEPEKGLWESIAYLDFRSSAGSIIVTHNVSPDTLEKECKNYDVAPIVGYRFCKDFKGFIPSILEDLIETRQKVKRKMKATIDPIEKKMLDYRQRALKILANSYYGYQGYPKARWYSKEQAEWVTAWGRHYIETTIKEAEKFGFKVLYADTDGFFATIPNEKPETIKSKAKKFLKHINEKLPGMLELEYEGFYLRGFFVTKKKYALIDEDGHITTRGLEVVRRDWSEIAKETQAKVLEVILREGSIEKAAGIVKKVVEDLANYRVPVEKLIIHEQITRELKDYKATGPHVAIAKRLQARGIKVKPGTIISYVVLKGSKKISDRVILFDEYDSSRHKYDPDYYIHNQVLPAVLRILEAFGYKEKDLEYQRMKQTGLGAWLKMGKK

SEQ ID NO: 106 - protein, 773 aa, unidentified
  REGION 1..773: note = Description of Unknown: Synthetic polypeptide
MILDTDYITENGKPVIRIFKKEKGEFKIEYDRNFEPYIYALLEDDESIEDIKKITGERHGKKVRIIRVEKVKKKFLGEPIEVWKLVFEHPQDYPAIRDAIRSHPAVREIFEYDIPFAKRYLIDKGLVPMEGGEELKLLAFAIATFYHEGDEFAEGEILMISYADESGAKVITWKKIDLPYVEVVSTEREAIKRFLQVLREKDPDVLLTYNGDNFDFAYIKKRCEKLGLKFTIGRDGSEPKIQRMGDRFAVEVKGRIHLDLAPVVRHTIRLPTYTLEAVYEAVFGKKKEKVYAEEIAEAWKSEEGLKRVAQYSMEDARATYELGREFFPMEVELAKLIGQSVWDVSRSSTGNLVEWYLLRVAYERNELAPNKPGGEEYQRRMRSSYIGGYVKEPEKGLWESIAYLDFRSSAGSIIVTHNVSPDTLEKECKNYDVAPIVGYRFCKDFKGFIPSILEDLIETRQKVKRKMKATIDPIEKKMLDYRQRALKILANSYYGYQGYPKARWYSKECAESVTAWGRHYIETTIKEAEKFGFKVLYADTDGFFATIPNEKPETIKSKAKKFLKHINEKLPGMLELEYEGFYLRGFFVTKKKYALIDEDGHITTRGLEVVRRDWSEIAKETQAKVLEVILREGSIEKAAGIVKKVVEDLANYRVPVEKLIIHEQITRELKRYKATFPHVAIAKRLQARGIKVKPGTIISYVVLKGSKKISDRVILFDEYDSSRHKYDPDYYIHNQVLPAVLRILEAFGYKEKDLEYQRMKQTGLGAWLKMGKK

SEQ ID NO: 107 - protein, 773 aa, unidentified
  REGION 1..773: note = Description of Unknown: Synthetic polypeptide
MILDTDYITENGKPVIRIFKKEKGEFKIEYDRNFEPYIYALLEDDESIEDIKKITGERHGKKVRIIRVEKVKKKFLGEPIEVWKLVFEHPQDVPAIRDAIRSHPAVREIFEYDIPFAKRYLIDKGLVPMEGGEELKLLAFAIATFYHEGDEFAEGEILMISYADESGAKVITWKKIDLPYVEVVSTEREAIKRFLQVLREKDPDVLLTYNGDNFDFAYIKKRCEKLGLKFTIGRDGSEPKIQRMGDRFAVEVKGRIHLDLAPVVRHTIRLPTYTLEAVYEAVFGKKKEKVYAEEIAEAWKSEEGLKRVAQYSMEDARATYELGREFFPMEVELAKLIGQSVWDVSRSSTGNLVEWYLLRVAYERNELAPNKPGGEEYQRRMRSSYIGGYVKEPEKGLWESIAYLDFRSSAGSIIVTHNVSPDTLEKECKNYDVAPIVGYRFCKDFKGFIPSILEDLIETRQKVKRKMKATIDPIEKKMLDYRQRALKILANSYYGYQGYPKARWYSKENAERVTAWGRHYIETTIKEAEKFGFKVLYADTDGFFATIPNEKPETIKSKAKKFLKHINEKLPGMLELEYEGFYLRGFFVTKKKYALIDEDGHITTRGLEVVRRDWSEIAKETQAKVLEVILREGSIEKAAGIVKKVVEDLANYRVPVEKLIIHEQITRELKDYKATGPHVAIAKRLQARGIKVKPGTIISYVVLKGSKKISDRVILFDEYDSSRHKYDPDYYIHNQVLPAVLRILEAFGYKEKDLEYQRMKQTGLGAWLKMGKK

SEQ ID NO: 108 - protein, 773 aa, unidentified
  REGION 1..773: note = Description of Unknown: Synthetic polypeptide
MILDTDYITENGKPVIRIFKKEKGEFKIEYDRNFEPYIYALLEDDESIEDIKKITGERHGKKVRIIRVEKVKKKFLGEPIEVWKLVFEHPQDYPAIRDAIRSHPAVREIFEYDIPFAKRYLIDKGLVPMEGGEELKLLAFAIATFYHEGDEFAEGEILMISYADESGAKVITWKKIDLPYVEVVSTEREAIKRFLQVLREKDPDVLLTYNGDNFDFAYIKKRCEKLGLKFTIGRDGSEPKIQRMGDRFAVEVKGRIHLDLAPVVRHTIRLPTYTLEAVYEAVFGKKKEKVYAEEIAEAWKSEEGLKRVAQYSMEDARATYELGREFFPMEVELAKLIGQSVWDVSRSSTGNLVEWYLLRVAYERNELAPNDPGGEEYQRRMRSSYIGGYVKEPEKGLWESIAYLDFRSSAGSIIVTHNVSPDTLEKECKNYDVAPIVGYRFCKDFKGFIPSILEDLIETRQKVKRKMKATIDPIEKKMLDYRQRALKILANSYYGYQGYPKARWYSKECAESVTAWGRHYIETTIKEAEKFGFKVLYADTDGFFATIPNEKPETIKSKAKKFLKHINEKLPGMLELEYEGFYLRGFFVTKKKYALIDEDGHITTRGLEVVRRDWSEIAKETQAKVLEVILREGSIEKAAGIVKKVVEDLANYRVPVEKLIIHEQITRELKRYKATGPHVAIAKRLQARGIKVKPGTIISYVVLKGSKKISDRVILFDEYDSSRHKYDPDYYIHNQVLPAVLRILEAFGYKEKDLEYQRMKQTGLGAWLKMGKK

SEQ ID NO: 109 - protein, 773 aa, unidentified
  REGION 1..773: note = Description of Unknown: Synthetic polypeptide
MILDTDYIIENGKPVIRIFKKEKGEFKIEYDRNFEPYIYALLEDDESIEDIKKITGERHGKKVRIIRVEKVKKKFLGEPIEVWKLVFEHPQDVPAIRDAIRSHPAVREIFEYDIPFAKRYLIDKGLVPMEGGEELKLLAFNIATFYHEGDEFAEGEILMISYADESGAKVITWKKIDLPYVEVVSTEREAIKRFLQVLREKDPDVLLTYNGDNFDFAYIKKRCEKLGLKFTIGRDGSEPKIQRMGDRFAVEVKGRIHLDLAPVVRHTIRLPTYTLEAVYEAVFGKKKEKVYAEEIAEAWKSEEGLKRVAQYSMEDARATYELGREFFPLEVELAKLIGQSVWDVSRSSTGNLVEWYLLRVAYERNELAPNKPGGEEYQRRMRSSYIGGYVKEPEKGLWESIAYLDFRSSAGSIIVTHNVSPDTLEKECKNYDVAPIVGYRFCKDFKGFIPSILEDLIETRQKVKRKMKATIDPIEKKMLDYRQRALKILANSYYGYQGYPKARWYSKECAESVTAWGRHYIETTIKEAEKFGFKVLYADTDGFFATIPNEKPETIKSKAKKFLKHINEKLPGMLELEYEGFYLRGFFVTKKKYALIDEDGHITTRGLEVVRRDWSEIAKETQAKVLEVILREGSIEKAAGIVKKVVEDLANYRVPVEKLIIHEQITRELKRYKATGPHVAIAKRLQARGIKVKPGTIISYVVLKGSKKISDRVILFDEYDSSRHKYDPDYYIHNQVLPAVLRILEAFGYKEKDLEYQRMKQTGLGAWLKMGKK

SEQ ID NO: 110 - protein, 773 aa, unidentified
  REGION 1..773: note = Description of Unknown: Synthetic polypeptide
MILDTDYITENGKPVIRIFKKEKGEFKIEYDRNFEPYIYALLEDDESIEDIKKITGERHGKKVRIIRVEKVKKKFLGEPIEVWKLVFEHPQDYPAIRDAIRSHPAVREIFEYDIPFAKRYLIDKGLVPMEGGEELKLLAFNIATFYHEGDEFAEGEILMISYADESGAKVITWKKIDLPYVEVVSTEREAIKRFLQVLREKDPDVLLTYNGDNFDFAYIKKRCEKLGLKFTIGRDGSEPKIQRMGDRFAVEVKGRIHLDLAPVVRHTIRLPTYTLEAVYEAVFGKKKEKVYAEEIAEAWKSEEGLKRVAQYSMEDARATYELGREFFPLEVELAKLIGQSVWDVSRSSTGNLVEWYLLRVAYERNELAPNKPGGEEYQRRMRSSYIGGYVKEPEKGLWESIAYLDFRSSAGSIIVTHNVSPDTLEKECKNYDVAPIVGYRFCKDFKGFIPSILEDLIETRQKVKRKMKATIDPIEKKMLDYRQRALKILANSYYGYQGYPKARWYSKECAESVTAWGRHYIETTIKEAEKFGFKVLYADTDGFFATIPNEKPETIKSKAKKFLKHINEKLPGMLELEYEGFYLRGFFVTKKKYALIDEDGHITTRGLEVVRRDWSEIAKETQAKVLEVILREGSIEKAAGIVKKVVEDLANYRVPVEKLIIHEQITRELKRYKATGPHVAIAKRLQARGIKVKPGTIISYVVLKGSKKISDRVILFDEYDSSRHKYDPDYYIHNQVLPAVLRILEAFGYKEKDLEYQRMKQTGLGAWLKMGKK

SEQ ID NO: 111 - protein, 773 aa, unidentified
  REGION 1..773: note = Description of Unknown: Synthetic polypeptide
MILDTDYITENGKPVIRIFKKEKGEFKIEYDRNFEPYIYALLEDDESIEDIKKITGERHGKKVRIIRVEKVKKKFLGEPIEVWKLVFEHPQDYPAIRDAIRSHPAVREIFEYDIPFAKRYLIDKGLVPMEGGEELKLLAFAIATFYHEGDEFAEGEILMISYADESGAKVITWKKIDLPYVEVVSTEREAIKRFLQVLREKDPDVLLTYNGDNFDFAYIKKRCEKLGLKFTIGRDGSEPKIQRMGDRFAVEVKGRIHLDLAPVVRHTIRLPTYTLEAVYEAVFGKKKEKVYAEEIAEAWKSEEGLKRVAQYSMEDARATYELGREFFPMEVELAKLIGQSVWDVSRSSTGNLVEWYLLRVAYERNELAPNKPGGEEYQRRMRSSYIGGYVKEPEKGLWESIAYLDFRSSAGSIIVTHNVSPDTLEKECKNYDVAPIVGYRFCKDFKGFIPSILEDLIETRQKVKRKMKATIDPIEKKMLDYRQRALKILANSYYGYQGYPKARWYSKECAESVTAWGRHYIETTIKEAEKFGFKVLYADTDGFFATIPNEKPETIKSKAKKFLKHINEKLPGMLELEYEGFYLRGFFVTKKKYALIDEDGIITTRGLEVVRRDWSEIAKETQAKVLEVILREGSIEKAAGIVKKVVEDLANYRVPVEKLIIHEQITRELKRYKATGPHVAIAKRLQARGIKVKPGTIISYVVLKGSKKISDRVILFDEYDSSRHKYDPDYYIHNQVLPAVLRILEAFGYKEKDLEYQRMKQTGLGAWLKMGKK

SEQ ID NO: 112 - protein, 773 aa, unidentified
  REGION 1..773: note = Description of Unknown: Synthetic polypeptide
MILDTDYITENGKPVIRIFKKEKGEFKIEYDRNFEPYIYALLEDDESIEDIKKITGERHGKKVRIIRVEKVKKKFLGEPIEVWKLVFEHPQDYPAIRDAIRSHPAVREIFEYDIPFAKRYLIDKGLVPMEGGEELKLLAFAIATFYHEGDEFAEGEILMISYADESGAKVITWKKIDLPYVEVVSTEREAIKRFLQVLREKDPDVLLTYNGDNFDFAYIKKRCEKLGLKFTIGRDGSEPKIQRMGDRFAVEVKGRIHLDLAPVVRHTIRLPTYTLEAVYEAVFGKKKEKVYAEEIAEAWKSEEGLKRVAQYSMEDARATYELGREFFPMEVELAKLIGQSVWDVSRSSTGNLVEWYLLRVAYERNELAPNKPGGEEYQRRMRSSYIGGYVKEPEKGLWESIAYLDFRSSAGSIIVTHNVSPDTLEKECKNYDVAPIVGYRFCKDFKGFIPSILEDLIETRQKVKRKMKATIDPIEKKMLDYRQRALKILANSYYGYQGYPKARWYSKECAESVTAWGRHYIETTIKEAEKFGFKVLYADTDGFFSTIPNEKPETIKSKAKKFLKHINEKLPGMLELEYEGFYLRGFFVTKKKYALIDEDGHITTRGLEVVRRDWSEIAKETQAKVLEVILREGSIEKAAGIVKKVVEDLANYRVPVEKLIIHEQITRELKRYKATGPHVAIAKRLQARGIKVKPGTIISYVVLKGSKKISDRVILFDEYDSSRHKYDPDYYIHNQVLPAVLRILEAFGYKEKDLEYQRMKQTGLGAWLKMGKK

SEQ ID NO: 113 - protein, 773 aa, unidentified
  REGION 1..773: note = Description of Unknown: Synthetic polypeptide
MILDTDYITENGKPVIRIFKKEKGEFKIEYDRNFEPYIYALLEDDESIEDIKKITGERHGKKVRIIRVEKVKKKFLGEPIEVWKLVFEHPQDVPAIRDAIRSHPAVREIFEYDIPFAKRYLIDKGLVPMEGGEELKLLAFNIATFYHEGDEFAEGEILMISYADESGAKVITWKKIDLPYVEVVSTEREAIKRFLQVLREKDPDVLLTYNGDNFDFAYIKKRCEKLGLKFTIGRDGSEPKIQRMGDRFAVEVKGRIHLDLAPVVRLTIRLPTYTLEAVYEAVFGKKKEKVYAEEIAEAWKSEEGLKRVAQYSMEDARATYELGREFFPLEVELAKLIGQSVWDVSRSSTGNLVEWYLLRVAYERNELAPNKPGGEEYQRRMRSSYIGGYVKEPEKGLWESIAYLDFRSSAGSIIVTHNVSPDTLEKECKNYDVAPIVGYRFCKDFKGFIPSILEDLIETRQKVKRKMKATIDPIEKKMLDYRQRALKILANSYYGYQGYPKARWYSKECAESVTAWGRHYIETTIKEAEKFGFKVLYADTDGFFATIPNEKPETIKSKAKKFLKHINEKLPGMLELEYEGFYLRGFFVTKKKYALIDEDGHITTRGLEVVRRDWSEIAKETQAKVLEVILREGSIEKAAGIVKKVVEDLANYRVPVEKLIIHEQITRELKRYKATGPHVAIAKRLQARGIKVKPGTIISYVVLKGSKKISDRVILFDEYDSSRHKYDPDYYIHNQVLPAVLRILEAFGYKEKDLEYQRMKQTGLGAWLKMGKK

SEQ ID NO: 114 - protein, 757 aa, unidentified
  REGION 1..757: note = Description of Unknown: Synthetic polypeptide
MILDTDYITENGKPVIRIFKKEKGEFKIEYDRNFEPYIYALLEDDESIEDIKKITGERHGKKVRIIRVEKVKKKFLGEPIEVWKLVFEHPQDVPAIRDAIRSHPAVREIFEYDIPFAKRYLIDKGLVPMEGGEELKLLAFAIATFYHEGDEFAEGEILMISYADESGAKVITWKKIDLPYVEVVSTEREAIKRFLQVLREKDPDVLLTYNGDNFDFAYIKKRCEKLGLKFTIGRDGSEPKIQRMGDRFAVEVKGRIHLDLAPVVRHTIRLPTYTLEAVYEAVFGKKKEKVYAEEIAEAWKSEEGLKRVAQYSMEDARATYELGREFFPMEVELAKLIGQSVWDVSRSSTGNLVEWYLLRVAYERNELAPNKPGGEEYQRRMRSSYIGGYVKEPEKGLWESIAYLDFRSSAGSIIVTHNVSPDTLEKECKNYDVAPIVGYRFCKDFKGFIPSILEDLIETRQKVKRKMKATIDPIEKKMLDYRQRALKILANSYYGYQGYPKARWYSKECAESVTAWGRHYIETTIKEAEKFGFKVLYADTDGFFATIPNEKPETIKSKAKKFLKHINEKLPGMLELEYEGFYLRGFFVTKKKYALIDEDGHITTRGLEVVRRDWSEIAKETQAKVLEVILREGSIEKAAGIVKKVVEDLANYRVPVEKLIIHEQITRKLKDYKATGPHVAIAKRLQARGIQVKPGTIISYVVLKGSKKISDRVILFDEYDSSRHKYDPDYYIHNQVLPAVLRILEAFGYKEKDLEYQ

SEQ ID NO: 115 - protein, 773 aa, unidentified
  REGION 1..773: note = Description of Unknown: Synthetic polypeptide
MILDTDYITENGKPVIRIFKKEKGEFKIEYDRNFEPYIYALLEDDESIEDIKKITGERHGKKVRIIRVEKVKKKFLGEPIEVWKLVFEHPQDVPAIRDAIRSHPAVREIFEYDIPFAKRYLIDKGLVPMEGGEELKLLAFNIATFYHEGDEFAEGEILMISYADESGAKVITWKKIDLPYVEVVSTEREAIKRFLQVLREKDPDVLLTYNGDNFDFAYIKKRCEKLGLKFTIGRDGSEPKIQRMGDRFAVEVKGRIHLDLAPVVRHTIRLPTYTLEAVYEAVFGKKKEKVYAEEIAEAWKSEEGLKRVAQYSMEDARATYELGREFFPLEVELAKLIGQSVWDVSRSSTGNLVEWYLLRVAYERNELAPNKPGGEEYQRRMRSSYIGGYVKEPEKGLWESIAYLDFRSSAGSIIVTHNVSPDTLEKECKNYDVAPIVGYRFCKDFKGFIPSILEDLIETRQKVKRKMKATIDPIEKKMLDYRQRALKILANSYYGYQGYPKARWYSKECAESVTAWGRHYIETTIKEAEKFGFKVLYADTDGFFATIPNEKPETIKSKAKKFLKHINEKLPGMLELEYEGFYLRGFFVTKKKYALIDEDGHITTRGLEVVRRDWSEIAKETQAKVLEVILREGSIEKAAGIVKKVVEDLANYRVPVEKLIIHEQITRELKRYKATGPHVAIAKRLQARGIKVKPGTIISYVVLKGSKKISDRVILFDEYDSSRHKYDPDYYIHNQVLPAVLRILEAFGYKEKDLEYQRMKQTGLRAWLKMGKK

SEQ ID NO: 116 - protein, 772 aa, unidentified; identical to SEQ ID NO: 103
  REGION 1..772: note = Description of Unknown: Synthetic polypeptide

SEQ ID NO: 117 - protein, 773 aa, unidentified
  REGION 1..773: note = Description of Unknown: Synthetic polypeptide
MILDTDYITENGKPVIRIFKKEKGEFKIEYDRNFEPYIYALLEDDESIEDIKKITGERHGKKVRIIRVEKVKKKFLGEPIEVWKLVFEHPQDYPAIRDAIRSHPAVREIFEYDIPFAKRYLIDKGLVPREGGEELKLLAFAIATFYHEGDEFAEGEILMISYADESGAKVITWKKIDLPYVEVVSTEREAIKRFLQVLREKDPDVLLTYNGDNFDFAYIKKRCEKLGLKFTIGRDGSEPKIQRMGDRFAVEVKGRIHLDLAPVVRHTIRLPTYTLEAVYEAVFGKKKEKVYAEEIAEAWKSEEGLKRVAQYSMEDARATYELGREFFPMEVELAKLIGQSVWDVSRSSTGNLVEWYLLRVAYERNELAPNKPGGEEYQRRMRSSYIGGYVKEPEKGLWESIAYLDFRSSAGSIIVTHNVSPDTLEKECKNYDVAPIVGYRFCKDFKGFIPSILEDLIETRQKVKRKMKATIDPIEKKMLDYRQRALKILANSYYGYQGYPKARWYSKECAESVTAWGRHYIETTIKEAEKFGFKVLYADTDGFFATIPNEKPETIKSKAKKFLKHINEKLPGMLELEYEGFYLRGFFVTKKKYALIDEDGHITTRGLEVVRRDWSEIAKETQAKVLEVILREGSIEKAAGIVKKVVEDLANYRVPVEKLIIHEQITRELKRYKATGPHVAIAKRLQARGIKVKPGTIISYVVLKGSKKISDRVILFDEYDSSRHKYDPDYYIHNQVLPAVLRILEAFGYKEKDLEYQRMKQTGLGAWLKMGKK

SEQ ID NO: 118 - protein, 773 aa, unidentified
  REGION 1..773: note = Description of Unknown: Synthetic polypeptide
MILDTDYITENGKPVIRIFKKEKGEFKIEYDRNFEPYIYALLEDDESIEDIKKITGERHGKKVRIIRVEKVKKKFLGEPIEVWKLVFEHPQDYPAIRDAIRSHPAVREIFEYDIPFAKRYLIDKGLVPMEGGEELKLLAFAIATFYHEGDEFAEGEILMISYADESGAKVITWKKIDLPYVEVVSTEREAIKRFLQVLREKDPDVLLTYNGDNFDFAYIKKRCEKLGLKFTIGRDGSEPKIQRMGDRFAVEVKGRIHLDLAPVVRHTIRLPTYTLEAVYEAVFGKKKEKVYAEEIAEAWKSEEGLKRVAQYSMEDARATYELGREFFPMEVELAKLIGQSVWDVSRSSTGNLVEWYLLRVAYERNELAPNKPGGEEYQRRMRSSYIGGYVKEPEKGLWESIAYLDFRSSAGSIIVTHNVSPDTLEKECKNYDVAPIVGYRFCKDFKGFIPSILEDLIETRQKVKRKMKATIDPIEKKMLDYRQRALKILANSYYGYQGYPKARWYSKECAESVTAWGRHYIETTIKEAEKFGFKVLYADTDGFFATIPNEKPETIKSKAKKFLKHINEKLPGMLELEYEGFYLRGFFVTKKKYALIDEDGHITTRGLEVVRRDWSEIAKETQAKVLEVILREGSIEKAAGIVKKVVEDLANYRVPVEKLIIHEQITRELKRYKATGPHVAIAKRLQARGIKVKPGTIMSYVVLKGSKKISDRVILFDEYDSSRHKYDPDYYIHNQVLPAVLRILEAFGYKEKDLEYQRMKQTGLGAWLKMGKK

SEQ ID NO: 119 - protein, 773 aa, unidentified
  REGION 1..773: note = Description of Unknown: Synthetic polypeptide
MILDTDYITENGKPVIRIFKKEKGEFKIEYDRNFEPYIYALLEDDESIEDIKKITGERHGKKVRIIRVEKVKKKFLGEPIEVWKLVFEHPQDVPAIRDAIRSHPAVREIFEYDIPFAKRYLIDKGLVPMEGGEELKLLAFNIATFYHEGDEFAEGEILMISYADESGAKVITWKKIDLPYVEVVSTEREAIKRFLQVLREKDPDVLLTYNGDNFDFAYIKKRCEKLGLKFTIGRDGSEPKIQRMGDRFAVEVKGRIHLDLAPVVRHTIRLPTYTLEAVYEAVFGKKKEKVYAEEIAEAWKSEEGLKRVAQYSMEDARATYELGREFFPLEVELAKLIGQSVWDVSRSSTGNLVEWYLLRVAYERNELAPNKPGGEEYQRRMRSSYIGGYVKEPEKGLWESIAYLDFRSSAGSIIVTHNVSPDTLEKECKNYDVAPIVGYRFCKDFKGFIPSILEDLIETRQKVKRKMKATIDPIEKKMLDYRQRALKILANSYYGYQGYPKARWYSKECAESVTAWGRHYIETTIKEAEKFGFKVLYADTDGFFATIPNEKPETIKSKAKKFLKHINEKLPGMLELEYEGFYLRGFFVTKKSYALIDEDGHITTRGLEVVRRDWSEIAKETQAKVLEVILREGSIEKAAGIVKKVVEDLANYRVPVEKLIIHEQITRELKRYKATGPHVAIAKRLQARGIKVKPGTIISYVVLKGSKKISDRVILFDEYDSSRHKYDPDYYIHNQVLPAVLRILEAFGYKEKDLEYQRMKQTGLGAWLKMGKK

SEQ ID NO: 120 - protein, 773 aa, unidentified
  REGION 1..773: note = Description of Unknown: Synthetic polypeptide
YILDTDYITENGKPVIRIFKKEKGEFKIEYDRNFEPYIYALLEDDESIEDIKKITGERHGKKVRIIRVEKVKKKFLGEPIEVWKLVFEHPQDYPAIRDAIRSHPAVREIFEYDIPFAKRYLIDKGLVPREGGEELKLLAFAIATFYHEGDEFAEGEILMISYADESGAKVITWKKIDLPYVEVVSTEREAIKRFLQVLREKDPDVLLTYNGDNFDFAYIKKRCEKLGLKFTIGRDGSEPKIQRMGDRFAVEVKGRIHLDLAPVVRHTIRLPTYTLEAVYEAVFGKKKEKVYAEEIAEAWKSEEGLKRVAQYSMEDARATYELGREFFPMEVELAKLIGQSVWDVSRSSTGNLVEWYLLRVAYERNELAPNKPGGEEYQRRMRSSYIGGYVKEPEKGLWESIAYLDFRSSAGSIIVTHNVSPDTLEKECKNYDVAPIVGYRFCKDFKGFIPSILEDLIETRQKVKRKMKATIDPIEKKMLDYRQRALKILANSYYGYQGYPKARWYSKECAESVTAWGRHYIETTIKEAEKFGFKVLYADTDGFFATIPNEKPETIKSKAKKFLKHINEKLPGMLELEYEGFYLRGFFVTKKKYALIDEDGHITTRGLEVVRRDWSEIAKETQAKVLEVILREGSIEKAAGIVKKVVEDLANYRVPVEKLIIHEQITRELKRYKATGPHVAIAKRLQARGIKVKPGTIISYVVLKGSKKISDRVILFDEYDSSRHKYDPDYYIHNQVLPAVLRILEAFGYKEKDLEYQRMKQTGLGAWLKMGKK

SEQ ID NO: 121 - protein, 773 aa, unidentified
  REGION 1..773: note = Description of Unknown: Synthetic polypeptide
MILDTDYITENGKPVIRIFKKEKGEFKIEYDRNFEPYIYALLEDDESIEDIKKITGERHGKKVRIIRVEKVKKKFLGEPIEVWKLVFEHPQDYPAIRDAIRSHPAVREIFEYDIPFAKRYLIDKGLVPMEGGEELKLLAFAIATFYHEGDEFAEGEILMISYADESGAKVITWKKIDLPYVEVVSTEREAIKRFLQVLREKDPDVLLTYNGDNFDFAYIKKRCEKLGLKFTIGRDGSEPKIQRMGDRFAVEVKGRIHLDLAPVVRHTIRLPTYTLEAVYEAVFGKKKEKVYAEEIAEAWKSEEGLKRVAQYSMEDARATYELGREFFPMEVELAKLIGQSVWDVSRSSTGNLVEWYLLRVAYERNELAPNKPGGEEYQRRMRSSYIGGRVKEPEKGLWESIAYLDFRSSAGSIIVTHNVSPDTLEKECKNYDVAPIVGYRFCKDFKGFIPSILEDLIETRQKVKRKMKATIDPIEKKMLDYRQRALKILANSYYGYQGYPKARWYSKECAESVTAWGRHYIETTIKEAEKFGFKVLYADTDGFFATIPNEKPETIKSKAKKFLKHINEKLPGMLELEYEGFYLRGFFVTKKKYALIDEDGHITTRGLEVVRRDWSEIAKETQAKVLEVILREGSIEKAAGIVKKVVEDLANYRVPVEKLIIHEQITRELKRYKATGPHVAIAKRLQARGIKVKPGTIISYVVLKGSKKISDRVILFDEYDSSRHKYDPDYYIHNQVLPAVLRILEAFGYKEKDLEYQRMKQTGLGAWLKMGKK

SEQ ID NO: 122 - protein, 773 aa, unidentified
  REGION 1..773: note = Description of Unknown: Synthetic polypeptide
MILDTDYITENGKPVIRIFKKEKGEFKIEYDRNFEPYIYALLEDDESIEDIKKITGERHGKKVRIIRVEKVKKKFLGEPIEVWKLVFEHPQDVPAIRDAIRSHPAVREIFEYDIPFAKRYLIDKGLVPMEGGEELKLLAFKIATFYHEGDEFAEGEILMISYADESGAKVITWKKIDLPYVEVVSTEREAIKRFLQVLREKDPDVLLTYNGDNFDFAYIKKRCEKLGLKFTIGRDGSEPKIQRMGDRFAVEVKGRIHLDLAPVVRHTIRLPTYTLEAVYEAVFGKKKEKVYAEEIAEAWKSEEGLKRVAQYSMEDARATYELGREFFPLEVELAKLIGQSVWDVSRSSTGNLVEWYLLRVAYERNELAPNKPGGEEYQRRMRSSYIGGYVKEPEKGLWESIAYLDFRSSAGSIIVTHNISPDTLEKECKNYDVAPIVGYRFCKDFKGFIPSILEDLIETRQKVKRKMKATIDPIEKKMLDYRQRALKILANSYYGYQGYPKARWYSKECAESVTAWGRHYIETTIKEAEKFGFKVLYADTDGFFATIPNEKPETIKSKAKKFLKHINEKLPGMLELEYEGFYLRGFFVTKKKYALIDEDGHITTRGLEVVRRDWSEIAKETQAKVLEVILREGSIEKAAGIVKKVVEDLANYRVPVEKLIIHEQITRELKRYKATGPHVAIAKRLQARGIKVKPGTIISYVVLKGSKKISDRVILFDEYDSSRHKYDPDYYIHNQVLPAVLRILEAFGYKEKDLEYQRMKQTGLGAWLKMGKK

SEQ ID NO: 123 - protein, 773 aa, unidentified
  REGION 1..773: note = Description of Unknown: Synthetic polypeptide
VILDTDYITENGKPVIRIFKKEKGEFKIEYDRNFEPYIYALLEDDESIEDIKKITGERHGKKVRIIRVEKVKKKFLGEPIEVWKLVFEHPQDYPAIRDAIRSHPAVREIFEYDIPFAKRYLIDKGLVPMEGGEELKLLAFAIATFYHEGDEFAEGEILMISYADESGAKVITWKKIDLPYVEVVSTEREAIKRFLQVLREKDPDVLLTYNGDNFDFAYIKKRCEKLGLKFTIGRDGSEPKIQRMGDRFAVEVKGRIHLDLAPVVRHTIRLPTYTLEAVYEAVFGKKKEKVYAEEIAEAWKSEEGLKRVAQYSMEDARATYELGREFFPMEVELAKLIGQSVWDVSRSSTGNLVEWYLLRVAYERNELAPNKPGGEEYQRRMRSSYIGGYVKEPEKGLWESIAYLDFRSSAGSIIVTHNVSPDTLEKECKNYDVAPIVGYRFCKDFKGFIPSILEDLIETRQKVKRKMKATIDPIEKKMLDYRQRALKILANSYYGYQGYPKARWYSKECAESVTAWGRHYIETTIKEAEKFGFKVLYADTDGFFATIPNEKPETIKSKAKKFLKHINEKLPGMLELEYEGFYLRGFFVTKKKYALIDEDGHITTRGLEVVRRDWSEIAKETQAKVLEVILREGSIEKAAGIVKKVVEDLANYRVPVEKLIIHEQITRELKRYKATGPHVAIAKRLQARGIKVKPGTIISYVVLKGSKKISDRVILFDEYDSSRHKYDPDYYIHNQVLPAVLRILEAFGYKEKDLEYQRMKQTGLGAWLKMGKK

SEQ ID NO: 124 - protein, 757 aa, unidentified
  REGION 1..757: note = Description of Unknown: Synthetic polypeptide
MILDTDYITENGKPVIRIFKKEKGEFKIEYDRNFEPYIYALLEDDESIEDIKKITGERHGKKVRIIRVEKVKKKFLGEPIEVWKLVFEHPQDVPAIRDAIRSHPAVREIFEYDIPFAKRYLIDKGLVPMEGGEELKLLAFAIATFYHEGDEFAEGEILMISYADESGAKVITWKKIDLPYVEVVSTEREAIKRFLQVLREKDPDVLLTYNGDNFDFAYIKKRCEKLGLKFTIGRDGSEPKIQRMGDRFAVEVKGRIHLDLAPVVRHTIRLPTYTLEAVYEAVFGKKKEKVYAEEIAEAWKSEEGLKRVAQYSMEDARATYELGREFFPLEVELAKLIGQSVWDVSRSSTGNLVEWYLLRVAYERNELAPNKPGGEEYQRRMRSSYIGGYVKEPEKGLWESIAYLDFRSSAGSIIVTHNVSPDTLEKECKNYDVAPIVGYRFCKDFKGFIPSILEDLIETRQKVKRKMKATIDPIEKKMLDYRQRALKILANSYYGYQGYPKARWYSKEAAESVTAWGRHYIETTIKEAEKFGFKVLYADTDGFFATIPNEKPETIKSKAKKFLKHINEKLPGMLELEYEGFYLRGFFVTKKKYALIDEDGHITTRGLEVVRRDWSEIAKETQAKVLEVILREGSIEKAAGIVKKVVEDLANYRVPVEKLIIHEQITRELKRYKATGPHVAIAKRLQARGIKVKPGTIISYVVLKGSKKISDRVILFDEYDSSRHKYDPDYYIHNQVLPAVLRILEAFGYKEKDLEYQ

SEQ ID NO: 125 - protein, 757 aa, unidentified
  REGION 1..757: note = Description of Unknown: Synthetic polypeptide
MILDTDYITENGKPVIRIFKKEKGEFKIEYDRNFEPYIYALLEDDESIEDIKKITGERHGKKVRIIRVEKVKKKFLGEPIEVWKLVFEHPQDVPAIRDAIRSHPAVREIFEYDIPFAKRYLIDKGLVPMEGGEELKLLAFNIATFYHEGDEFAEGEILMISYADESGAKVITWKKIDLPYVEVVSTEREAIKRFLQVLREKDPDVLLTYNGDNFDFAYIKKRCEKLGLKFTIGRDGSEPKIQRMGDRFAVEVKGRIHLDLAPVVRHTIRLPTYTLEAVYEAVFGKKKEKVYAEEIAEAWKSEEGLKRVAQYSMEDARATYELGREFFPLEVELAKLIGQSVWDVSRSSTGNLVEWYLLRVAYERNELAPNKPGGEEYQRRMRSSYIGGYVKEPEKGLWESIAYLDFRSSAGSIIVTHNVSPDTLEKECKNYDVAPIVGYRFCKDFKGFIPSILEDLIETRQKVKRKMKATIDPIEKKMLDYRQRALKILANSYYGYQGYPKARWYSKECAESVTAWGRHYIETTIKEAEKFGFKVLYADTDGFFATIPNEKPETIKSKAKKFLKHINEKLPGMLELEYEGFYLRGFFVTKKKYALIDEDGHITTRGLEVVRRDWSEIAKETQAKVLEVILREGSIEKAAGIVKKVVEDLANYRVPVEKLIIHEFITRELKRYKATGLHVAIAKRLQARGIKVKPGTIISYVVLKGSKKISDRVILFDEYDSSRHKYDPDYYIHNQVLPAVLRILEAFGYKEKDLEYQ

SEQ ID NO: 126 - protein, 773 aa, unidentified
  REGION 1..773: note = Description of Unknown: Synthetic polypeptide
AILDTDYITENGKPVIRIFKKEKGEFKIEYDRNFEPYIYALLEDDESIEDIKKITGERHGKKVRIIRVEKVKKKFLGEPIEVWKLVFEHPQDVPAIRDAIRSHPAVREIFEYDIPFAKRYLIDKGLVPMEGGEELKLLAFNIATFYHEGDEFAEGEILMISYADESGAKVITWKKIDLPYVEVVSTEREAIKRFLQVLREKDPDVLLTYNGDNFDFAYIKKRCEKLGLKFTIGRDGSEPKIQRMGDRFAVEVKGRIHLDLAPVVRHTIRLPTYTLEAVYEAVFGKKKEKVYAEEIAEAWKSEEGLKRVAQYSAEDARATYELGREFFPLEVELAKLIGQSVWDVSRSSTGNLVEWYLLRVAYERNELAPNQPGGEEYQRRMRSSYIGGYVKEPEKGLWESIAYLDFRSSAGSIIVTHNVSPDTLEKECKNYDVAPIVGYRFCKDFKGFIPSILEDLIETRQKVKRKMKATIDPIEKKMLDYRQRALKILANSYYGYQGYPKARWYSKECAESVTAWGRHYIETTIKEAEKFGFKVLYADTDGFFATIPNEKPETIKSKAKKFLKHINEKLPGMLELEYEGFYLRGFFVTKKKYALIDEDGHITTRGLEVVRRDWSEIAKETQAKVLEVILREGSIEKAAGIVKKVVEDLANYRVPVEKLIIHEQITRELKRYKATGPHVAIAKRLQARGIKVKPGTIISYVVLKGSKKISDRVILFDEYDSSRHKYDPDYYIHNQVLPAVLRILEAFGYKEKDLEYQRMKQTGLGAWLKMGKK

SEQ ID NO: 127 - protein, 773 aa, unidentified
  REGION 1..773: note = Description of Unknown: Synthetic polypeptide
MILDTDYITENGKPVIRIFKKEKGEFKIEYDRNFEPYIYALLEDDESIEDIKKITGERHGKKVRIIRVEKVKKKFLGEPIEVWKLVFEHPQDYPAIRDAIRSHPAVREIFEYDIPFAKRYLIDKGLVPMEGGEELKLLAFAIATFYHEGDEFAEGEILMISYADESGAKVITWKKIDLPYVEVVSTEREAIKRFLQVLREKDPDVLLTYNGDNFDFAYIKKRCEKLGLKFTIGRDGSEPKIQRMGDRFAVEVKGRIHLDLAPVVRHTIRLPTYTLEAVYEAVFGKKKEQVYAEEIAEAWKSEEGLKRVAQYSMEDARATYELGREFFPMEVELAKLIGQSVWDVSRSSTGNLVEWYLLRVAYERNELAPNKPGGEEYQRRMRSSYIGGYVKEPEKGLWESIAYLDFRSSAGSIIVTHNVSPDTLEKECKNYDVAPIVGYRFCKDFKGFIPSILEDLIETRQKVKRKMKATIDPIEKKMLDYRQRALKILANSYYGYQGYPKARWYSKEQAEWVTAWGRHYIETTIKEAEKFGFKVLYADTDGFFATIPNEKPETIKSKAKKFLKHINEKLPGMLELEYEGFYLRGFFVTKKKYALIDEDGHITTRGLEVVRRDWSEIAKETQAKVLEVILREGSIEKAAGIVKKVVEDLANYRVPVEKLIIHEQITRELKRYKATGPHVAIAKRLQARGIKVKPGTIISYVVLKGSKKISDRVILFDEYDSSRHKYDPDYYIHNQVLPAVLRILEAFGYKEKDLEYQRMKQTGLGAWLKMGKK

SEQ ID NO: 128 - protein, 773 aa, unidentified
  REGION 1..773: note = Description of Unknown: Synthetic polypeptide
MILDTDYITENGKPVIRIFKKEKGEFKIEYDRNFEPYIYALLEDDESIEDIKKITGERHGKKVRIIRVEKVKKKFLGEPIEVWKLVFEHPQDVPAIRDAIRSHPAVREIFEYDIPFAKRYLIDKGLVPMEGGEELKLLAFNIATFYHEGDEFAEGEILMISYADESGAKVITWKKIDLPYVEVVSTEREAIKRFLQVLREKDPDVLLTYNGDNFDFAYIKKRCEKLGLKFTIGRDGSEPKIQRMGDRFAVEVKGRIHLDLAPVVRHTIRLPTYTLEAVYEAVFGKKKEKVYAEEIAEAYKSEEGLKRVAQYSMEDARATYELGREFFPLEVELAKLIGQSVWDVSRSSTGNLVEWYLLRVAYERNELAPNKPGGEEYQRRMRSSYIGGYVKEPEKGLWESIAYLDFRSSAGSIIVTHNVSPDTLEKECKNYDVAPIVGYRFCKDFKGFIPSILEDLIETRQKVKRKMKATIDPIEKKMLDYRQRALKILANSYYGYQGYPKARWYSKECAESVTAWGRHYIETTIKEAEKFGFKVLYADTDGFFATIPNEKPETIKSKAKKFLKHINEKLPGMLELEYEGFYLRGFFVTKKKYALIDEDGHITTRGLEVVRRDWSEIAKETQAKVLEVILREGSIEKAAGIVKKVVEDLANYRVPVEKLIIHEQITRELKRYKATGPHVAIAKRLQARGIKVKPGTIISYVVLKGSKKISDRVILFDEYDSSRHKYDPDYYIHNQVLPAVLRILEAFGYKEKDLEYQRMKQTGLGAWLKMGKK

SEQ ID NO: 129 - protein, 773 aa, unidentified
  REGION 1..773: note = Description of Unknown: Synthetic polypeptide
MILDTDYITENGKPVIRIFKKEKGEFKIEYDRNFEPYIYALLEDDESIEDIKKITGERHGKKVRIIRVEKVKKKFLGEPIEVWKLVFEHPVDVPAIQDAIRSHPAVREIFEYDIPFAKRYLIDKGLVPMEGGEELKLLAFNIATFYHEGDEFAEGEILMISYADESGAKVITWKKIDLPYVEVVSTEREAIKRFLQVLREKDPDVLLTYNGDNFDFAYIKKRCEKLGLKFTIGRDGSEPKIQRMGDRFAVEVKGRIHLDLAPVVRHTIRLPTYTLEAVYEAVFGKKKEKVYAEEIAEAWKSEEGLKRVAQYSMEDARATYELGREFFPLEVELAKLIGQSVWDVSRSSTGNLVEWYLLRVAYERNELAPNKPGGEEYQRRMRSSYIGGYVKEPEKGLWESIAYLDFRSSAGSIIVTHNVSPDTLEKECKNYDVAPIVGYRFCKDFKGFIPSILEDLIETRQKVKRKMKATIDPIEKKMLDYRQRALKILANSYYGYQGYPKARWYSKECAESVTAWGRHYIETTIKEAEKFGFKVLYADTDGFFATIPNEKPETIKSKAKKFLKHINEKLPGMLELEYEGFYLRGFFVTKKKYALIDEDGHITTRGLEVVRRDWSEIAKETQAKVLEVILREGSIEKAAGIVKKVVEDLANYRVPVEKLIIHEQITRELKRYKATGPHVAIAKRLQARGIKVKPGTIISYVVLKGSKKISDRVILFDEYDSSRHKYDPDYYIHNQVLPAVLRILEAFGYKEKDLEYQRMKQTGLGAWLKMGKK

SEQ ID NO: 130 - protein, 773 aa, unidentified
  REGION 1..773: note = Description of Unknown: Synthetic polypeptide
AILDTDYITENGKPVIRIFKKEKGEFKIEYDRNFEPYIYALLEDDESIEDIKKITGERHGKKVRIIRVEKVKKKFLGEPIEVWKLVFEHPQDYPAIRDAIRSHPAVREIFEYDIPFAKRYLIDKGLVPMEGGEELKLLAFAIATFYHEGDEFAEGEILMISYADESGAKVITWKKIDLPYVEVVSTEREAIKRFLQVLREKDPDVLLTYNGDNFDFAYIKKRCEKLGLKFTIGRDGSEPKIQRMGDRFAVEVKGRIHLDLAPVVRHTIRLPTYTLEAVYEAVFGKKKEKVYAEEIAEAWKSEEGLKRVAQYSMEDARATYELGREFFPMEVELAKLIGQSVWDVSRSSTGNLVEWYLLRVAYERNELAPNKPGGEEYQRRMRSSYIGGYVKEPEKGLWESIAYLDFRSSAGSIIVTHNVSPDTLEKECKNYDVAPIVGYRFCKDFKGFIPSILEDLIETRQKVKRKMKATIDPIEKKMLDYRQRALKILANSYYGYQGYPKARWYSKECAESVTAWGRHYIETTIKEAEKFGFKVLYADTDGFFATIPNEKPETIKSKAKKFLKHINEKLPGMLELEYEGFYLRGFFVTKKKYALIDEDGHITTRGLEVVRRDWSEIAKETQAKVLEVILREGSIEKAAGIVKKVVEDLANYRVPVEKLIIHEQITRELKRYKATGPHVAIAKRLQARGIKVKPGTIISYVVLKGSKKISDRVILFDEYDSSRHKYDPDYYIHNQVLPAVLRILEAFGYKEKDLEYQRMKQTGLGAWLKMGKK

SEQ ID NO: 131 - protein, 773 aa, unidentified
  REGION 1..773: note = Description of Unknown: Synthetic polypeptide
MILDTDYITENGKPVIRIFKKEKGEFKIEYDRNFEPYIYALLEDDESIEDIKKITGERHGKKVRIIRVEKVKKKFLGEPIEVWKLVFEHPQDVPAIRDAIRSHPAVREIFEYDIPFAKRYLIDKGLVPMEGGEELKLLAFNIATFYHEGDEFAEGEILMISYADESGAKVITWKKIDLPYVEVVSTEREAIKRFLQVLREKDPDVLLTYNGDNFDFAYIKKRCEKLGLKFTIGRDGSEPKIQRMGDRFAVEVKGRIHLDLAPVVRHTIRLPTYTLEAVYEAVFGKKKEKVYAEEIAEAWKSEEGLKRVAQYSMEDARATYELGREFFPLEVELAKLIGQSVWDVSRSSTGNLVEWYLLRVAYERNELAPNKPGGEEYQRRMRSSYIGGYVKEPEKGLWESIAYLDFRSSAGSIIVTHNVSPDTLEKECKNYDVAPIVGYRFCKDFKGFIPSILEDLIETRQKVKRKMKATIDPIEFKMLDYRQRALKILANSYYGYQGYPKARWYSKECAESVTAWGRHYIETTIKEAEKFGFKVLYADTDGFFATIPNEKPETIKSKAKKFLKHINEKLPGMLELEYEGFYLRGFFVTKKKYALIDEDGHITTRGLEVVRRDWSEIAKETQAKVLEVILREGSIEKAAGIVKKVVEDLANYRVPVEKLIIHEQITRELKRYKATGPHVAIAKRLQARGIKVKPGTIISYVVLKGSKKISDRVILFDEYDSSRHKYDPDYYIHNQVLPAVLRILEAFGYKEKDLEYQRMKQTGLGAWLKMGKK

SEQ ID NO: 132 - protein, 773 aa, unidentified
  REGION 1..773: note = Description of Unknown: Synthetic polypeptide
MILDTDYITENGKPVIRIFKKEKGEFKIEYDRNFEPYIYALLEDDESIEDIKKITGERHGKKVRIIRVEKVKKKFLGEPIEVWKLVFEHPQDYPAIRDAIRSHPAVREIFEYDIPFAKRYLIDKGLVPMEGGEELKLLAFAIATFYHEGDEFAEGEILMISYADESGAKVITWKKIDLPYVEVVSTEREAIKRFLQVLREKDPDVLLTYNGDNFDFAYIKKRCEKLGLKFTIGRDGSEPKIQRMGDRFAVEVKGRIHLDLAPVVRHTIRLPTYTLEAVYEAVFGKKKEKVYAEEIAEAWKSEEGLKRVAQYSMEDARATYELGREFFPMEVELAKLIGQSVWDVSRSSTGNLVEWYLLRVAYERNELAPNKPGGEEYQRRMRSSYIGGYVKEPEKGLWESIAYLDFRSSAGSIIVTHNVSPDTLEKECLNYDVAPIVGYRFCKDFKGFIPSILEDLIETRQKVKRKMKATIDPIEKKMLDYRQRALKILANSYYGYQGYPKARWYSKECAESVTAWGRHYIETTIKEAEKFGFKVLYADTDGFFATIPNEKPETIKSKAKKFLKHINEKLPGMLELEYEGFYLRGFFVTKKKYALIDEDGHITTRGLEVVRRDWSEIAKETQAKVLEVILREGSIEKAAGIVKKVVEDLANYRVPVEKLIIHEQITRELKRYKATGPHVAIAKRLQARGIKVKPGTIISYVVLKGSKKISDRVILFDEYDSSRHKYDPDYYIHNQVLPAVLRILEAFGYKEKDLEYQRMKQTGLGAWLKMGKK

SEQ ID NO: 133 - protein, 773 aa, unidentified
  REGION 1..773: note = Description of Unknown: Synthetic polypeptide
MILDTDYITENGKPVIRIFKKEKGEFKIEYDRNFEPYIYALLEDDESIEDIKKITGERHGKKVRIIRVEKVKKKFLGEPIEVWKLVFEHPQDYPAIRDAIRSHPAVREIFEYDIPFAKRYLIDKGLVPMEGGEELKLLAFAIATFYHEGDEFAEGEILMISYADESGAKVITWKKIDLPYVEVVSTEREAIKRFLQVLREKDPDVLLTYNGDNFDFAYIKKRCEKLGLKFTIGRDGSEPKIQRMGDRFAVEVKGRIHLDLAPVVRHTIRLPTYTLEAVYEAVFGKKKEKVYAEEIAEAWKSEEGLKRVAQYSMEDARATYELGREFFPMEVELAKLIGQSVWDVSRSSTGNLVEWYLLRVAYERNELAPNKPGGEEYQRRMRSSYIGGYVKEPEKGLWESIAYLDFRSSAGSIIVTHNVSPDTLEKECKNYDVAPIVGYRFCKDFKGFIPSILEDLIETRQKVKRKMKATIDPIEKKMLDYRQRALKILANSYYGYQGYPKARWYSKECAESVTAWGRHYIETTIKEAEKFGFKVLYADTDGFFATIPNEKPETIKSKAKKFLKHINEKLPGMLELEYEGFYLRGFFVTKKKYALIDEDGHITTRGLEVVRRDWSEIAKETQAKVLEVILREGSIEKAAGIVKKVVEDLANYRVPVEKLIIHEQITRELKRYKATGPHVAIAKRLQARGIKVKPGLIISYVVLKGSKKISDRVILFDEYDSSRHKYDPDYYIHNQVLPAVLRILEAFGYKEKDLEYQRMKQTGLGAWLKMGKK

SEQ ID NO: 134 - protein, 773 aa, unidentified
  REGION 1..773: note = Description of Unknown: Synthetic polypeptide
MILDTDYITENGKPVIRIFKKEKGEFKIEYDRNFEPYIYALLEDDESIEDIKKITGERHGKKVRIIRVEKVKKKFLGEPIEVWKLVFEHPQDVPAIRDAIRSHPAVREIFEYDIPFAKRYLIDKGLVPMEGGEELKLLAFNIATFYHEGDEFAEGEILMISYADESGAKVITWKKIDLPYVEVVSTEREAIKRFLQVLREKDPDVLLTYNGDNFDFAYIKKRCEKLGLKFTIGRDGSEPKIQRMGDRFAVEVKGRIHLDLAPVVRRTIRLPTYTLEAVYEAVFGKKKEKVYAEEIAEAWKSEEGLKRVAQYSMEDARATYELGREFFPLEVELAKLIGQSVWDVSRSSTGNLVEWYLLRVAYERNELAPNKPGGEEYQRRMRSSYIGGYVKEPEKGLWESIAYLDFRSSAGSIIVTHNVSPDTLEKECKNYDVAPIVGYRFCKDFKGFIPSILEDLIETRQKVKRKMKATIDPIEKKMLDYRQRALKILANSYYGYQGYPKARWYSKECAESVTAWGRHYIETTIKEAEKFGFKVLYADTDGFFATIPNEKPETIKSKAKKFLKHINEKLPGMLELEYEGFYLRGFFVTKKKYALIDEDGHITTRGLEVVRRDWSEIAKETQAKVLEVILREGSIEKAAGIVKKVVEDLANYRVPVEKLIIHEQITRELKRYKATGPHVAIAKRLQARGIKVKPGTIISYVVLKGSKKISDRVILFDEYDSSRHKYDPDYYIHNQVLPAVLRILEAFGYKEKDLEYQRMKQTGLGAWLKMGKK

SEQ ID NO: 135 - protein, 773 aa, unidentified
  REGION 1..773: note = Description of Unknown: Synthetic polypeptide
MILDTDYITENGKPVIRIFKKEKGEFKIEYDRNFEPYIYALLEDDESIEDIKKITGERHGKKVRIIRVEKVKKKFLGEPIEVWKLVFEHPQDVPAIRDAIRSHPAVREIFEYDIPFAKRYLIDKGLVPMEGGEELKLLAFNIATFYHEGDEFAEGEILMISYADESGAKVITWKKIDLPYVEVVSTEREAIKRFLQVLREKDPDVLLTYNGDNFDFAYIKKRCEKLGLKFTIGRDGSEPKIQRMGDRFAVEVKGRIHLDLAEVVRHTIRLPTYTLEAVYEAVFGKKKEKVYAEEIAEAWKSEEGLKRVAQYSMEDARATYELGREFFPLEVELAKLIGQSVWDVSRSSTGNLVEWYLLRVAYERNELAPNKPGGEEYQRRMRSSYIGGYVKEPEKGLWESIAYLDFRSSAGSIIVTHNVSPDTLEKECKNYDVAPIVGYRFCKDFKGFIPSILEDLIETRQKVKRKMKATIDPIEKKMLDYRQRALKILANSYYGYQGYPKARWYSKECAESVTAWGRHYIETTIKEAEKFGFKVLYADTDGFFATIPNEKPETIKSKAKKFLKHINEKLPGMLELEYEGFYLRGFFVTKKKYALIDEDGHITTRGLEVVRRDWSEIAKETQAKVLEVILREGSIEKAAGIVKKVVEDLANYRVPVEKLIIHEQITRELKRYKATGPHVAIAKRLQARGIKVKPGTIISYVVLKGSKKISDRVILFDEYDSSRHKYDPDYYIHNQVLPAVLRILEAFGYKEKDLEYQRMKQTGLGAWLKMGKK

SEQ ID NO: 136 - protein, 773 aa, unidentified; identical to SEQ ID NO: 49
  REGION 1..773: note = Description of Unknown: Synthetic polypeptide

SEQ ID NO: 137 - protein, 773 aa, unidentified
  REGION 1..773: note = Description of Unknown: Synthetic polypeptide
MILDTDYITENGKPVIRIFKKEKGEFKIEYDRNFEPYIYALLEDDESIEDIKKITGERHGKKVRIIRVEKVKKKFLGEPIEVWKLVFENPQDVPAIQDAIRSHPAVREIFEYDIPFAKRYLIDKGLVPMEGGEELKLLAFNIATFYHEGDEFAEGEILMISYADESGAKVITWKKIDLPYVEVVSTEREAIKRFLQVLREKDPDVLLTYNGDNFDFAYIKKRCEKLGLKFTIGRDGSEPKIQRMGDRFAVEVKGRIHLDLAPVVRHTIRLPTYTLEAVYEAVFGKKKEKVYAEEIAEAWKSEEGLKRVAQYSMEDARATYELGREFFPLEVELAKLIGQSVWDVSRSSTGNLVEWYLLRVAYERNELAPNKPGGEEYQRRMRSSYIGGYVKEPEKGLWESIAYLDFRSSAGSIIVTHNVSPDTLEKECKNYDVAPIVGYRFCKDFKGFIPSILEDLIETRQKVKRKMKATIDPIEKKMLDYRQRALKILANSYYGYQGYPKARWYSKECAESVTAWGRHYIETTIKEAEKFGFKVLYADTDGFFATIPNEKPETIKSKAKKFLKHINEKLPGMLELEYEGFYLRGFFVTKKKYALIDEDGHITTRGLEVVRRDWSEIAKETQAKVLEVILREGSIEKAAGIVKKVVEDLANYRVPVEKLIIHEQITRELKRYKATGPHVAIAKRLQARGIKVKPGTIISYVVLKGSKKISDRVILFDEYDSSRHKYDPDYYIHNQVLPAVLRILEAFGYKEKDLEYQRMKQTGLGAWLKMGKK

SEQ ID NO: 138 - protein, 773 aa, unidentified
  REGION 1..773: note = Description of Unknown: Synthetic polypeptide
MILDTDYITENGKPVIRIFKKEKGEFKIEYDRNFEPYIYALLEDDESIEDIKKITGERHGKKVRIIRVEKVKKKFLGEPIEVWKLVFEHPQDVPAIRDAIRSHPAVREIFEYDIPFAKRYLIDKGLVPMEGGEELKLLAFFIATFYHEGDEFAEGEILMISYADESGAKVITWKKIDLPYVEVVSTEREAIKRFLQVLREKDPDVLLTYNGDNFDFAYIKKRCEKLGLKFTIGRDGSEPKIQRMGDRFAVEVKGRIHLDLAPVVRHTIRLPTYTLEAVYEAVFGKKKEKVYAEEIAEAWKSEEGLKRVAQYSMEFARATYELGREFFPMEVELAKLIGQSVWDVSRSSTGNLVEWYLLRVAYERNELAPNKPGGEEYQRRMRSSYIGGYVKEPEKGLWESIAYLDFRSSAGSIIVTHNVSPDTLEKECKNYDVAPIVGYRFCKDFKGFIPSILEDLIETRQKVKRKMKATIDPIEKKMLDYRQRALKILANSYYGYQGYPKARWYSKECAESVTAWGRHYIETTIKEAEKFGFKVLYADTDGFFATIPNEKPETIKSKAKKFLKHINEKLPGMLELEYEGFYLRGFFVTKKKYALIDEDGHITTRGLEVVRRDWSEIAKETQAKVLEVILREGSIEKAAGIVKKVVEDLANYRVPVEKLIIHEQITRELKDYKATGPHVAIAKRLQARGIKVKPGTIISYVVLKGSKKISDRVILFDEYDSSRHKYDPDYYIHNQVLPAVLRILEAFGYKEKDLEYQRMKQTGLGAWLKMGKK

SEQ ID NO: 139 - protein, 773 aa, unidentified
  REGION 1..773: note = Description of Unknown: Synthetic polypeptide
MILDTDYITENGKPVIRIFKKEKGEFKIEYDRNFEPYIYALLEDDESIEDIKKITGERHGKKVRIIRVEKVKKKFLGEPIEVWKLVFEHPQDYPAIRDAIRSHPAVREIFEYDIPFAKRYLIDKGLVPMEGGEELKLLAFAIATFYHEGDEFAEGEILMISYADESGAKVITWKKIDLPYVEVVSTEREAIKRFLQVLREKDPDVLLTYNGDNFDFAYIKKRCEKLGLKFTIGRDGSEPKIQRMGDRFAVEVKGRIHLDLAPVVRHTIRLPTYTLEAVYEAVFGKKKEKVYAEEIAEAWKSEEGLKRVAQYSMEDARATYELGREFFPMEVELAKLIGQSVWDVSRSSTGNLVEWYLLRVAYERNELAPNKPGGEEYQRRMRSSYIGGYVKEPEKGLWESIAYLDFRSSAGSIIVTHNVSPDTLEKECKNYDVAPIVGYRFCKDFKGFIPSILEDLIETRQKVKRKMKATIDPIEKKMLDYRQRALKILANSYYGYQGYPKARWYSKECANSVTAWGRHYIETTIKEAEKFGFKVLYADTDGFFATIPNEKPETIKSKAKKFLKHINEKLPGMLELEYEGFYLRGFFVTKKKYALIDEDGHITTRGLEVVRRDWSEIAKETQAKVLEVILREGSIEKAAGIVKKVVEDLANYRVPVEKLIIHEQITRELKRYKATGPHVAIAKRLQARGIKVKPGTIISYVVLKGSKKISDRVILFDEYDSSRHKYDPDYYIHNQVLPAVLRILEAFGYKEKDLEYQRMKQTGLGAWLKMGKK

SEQ ID NO: 140 - protein, 773 aa, unidentified
  REGION 1..773: note = Description of Unknown: Synthetic polypeptide
MILDTDYITENGKPVIRIFKKEKGEFKIEYDRNFEPYIYALLEDDESIEDIKKITGERHGKKVRIIRVEKVKKKFLGEPIEVWKLVFEHPQDYPAIRDAIRSHPAVREIFEYDIPFAKRYLIDKGLVPMEGGEELKLLAFAIATFYHEGDEFAEGEILMISYADESGAKVITWKKIDLPYVEVVSTEREAIKRFLQVLREKDPDVLLTYNGDNFDFAYIKKRCEKLGLKFTIGRDGSEPKIQRMGDRFAVEVKGRIHLDLAPVVRHTIRLPTYTLEAVYEAVFGKKKEKVYAEEIAEAWKSEEGLKRVAQYSMEDARATYELGREFFPMEVELAKLIGQSVWDVSRSSTGNLVEWYLLRVAYERNELAPNKPGGEEYQRRMRSSYIGGFVKEPEKGLWESIAYLDFRSSAGSIIVTHNVSPDTLEKECKNYDVAPIVGYRFCKDFKGFIPSILEDLIETRQKVKRKMKATIDPIEKKMLDYRQRALKILANSYYGYQGYPKARWYSKECAESVTAWGRHYIETTIKEAEKFGFKVLYADTDGFFATIPNEKPETIKSKAKKFLKHINEKLPGMLELEYEGFYLRGFFVTKKKYALIDEDGHITTRGLEVVRRDWSEIAKETQAKVLEVILREGSIEKAAGIVKKVVEDLANYRVPVEKLIIHEQITRELKRYKATGPHVAIAKRLQARGIKVKPGTIISYVVLKGSKKISDRVILFDEYDSSRHKYDPDYYIHNQVLPAVLRILEAFGYKEKDLEYQRMKQTGLGAWLKMGKK

SEQ ID NO: 141 - protein, 757 aa, unidentified
  REGION 1..757: note = Description of Unknown: Synthetic polypeptide
MILDTDYITENGKPVIRIFKKEKGEFKIEYDRNFEPYIYALLEDDESIEDIKKITGERHGKKVRIIRVEKVKKKFLGEPIEVWKLVFEHPQDYPAIRDAIRSHPAVREIFEYDIPFAKRYLIDKGLVPMEGGEELKLLAFAIATFYHEGDEFAEGEILMISYADESGAKVITWKKIDLPYVEVVSTEREAIKRFLQVLREKDPDVLLTYNGDNFDFAYIKKRCEKLGLKFTIGRDGSEPKIQRMGDRFAVEVKGRIHLDLAPVVRHTIRLPTYTLEAVYEAVFGKKKEQVYAEEIAEAWKSEEGLKRVAQYSMEDARATYELGREFFPMEVELAKLIGQSVWDVSRSSTGNLVEWYLLRVAYERNELAPNKPGGEEYQRRMRSSYIGGYVKEPEKGLWESIAYLDFRSSAGSIIVTHNVSPDTLEKECKNYDVAPIVGYRFCKDFKGFIPSILEDLIETRQKVKRKMKATIDPIEKKMLDYRQRALKILANSYYGYQGYPKARWYSKECAESVTAWGRHYIETTIKEAEKFGFKVLYADTDGFFATIPNEKPETIKSKAKKFLKHINEKLPGMLELEYEGFYLRGFFVTKKKYALIDEDGHITTRGLEVVRRDWSEIAKETQAKVLEVILREGSIEKAAGIVKKVVEDLANYRVPVEKLIIHEQITRELKRYKATGPHVAIAKRLQARGIKVKPGTIISYVVLKGSKKISDRVILFDEYDSSRHKYDPDYYIHNQVLPAVLRILEAFGYKEKDLEYQ

SEQ ID NO: 142 - protein, 757 aa, unidentified
  REGION 1..757: note = Description of Unknown: Synthetic polypeptide
MILDTDYITENGKPVIRIFKKEKGEFKIEYDRNFEPYIYALLEDDESIEDIKKITGERHGKKVRIIRVEKVKKKFLGEPIEVWKLVFEHPQDVPAIRDAIRSHPAVREIFEYDIPFAKRYLIDKGLVPMEGGEELKLLAFAIATFYHEGDEFAEGEILMISYADESGAKVITWKKIDLPYVEVVSTEREAIKRFLQVLREKDPDVLLTYNGDNFDFAYIKKRCEKLGLKFTIGRDGSEPKIQRMGDRFAVEVKGRIHLDLAPVVRHTIRLPTYTLEAVYEAVFGKKKEKVYAEEIAEAWKSEEGLKRVAQYSMEDARATYELGREFFPMEVELAKLIGQSVWDVSRSSTGNLVEWYLLRVAYERNELAPNKPGGEEYQRRMRSSYIGGYVKEPEKGLWESIAYLDFRSSAGSIIVTHNVSPDTLEKECKNYDVAPIVGYRFCKDFKGFIPSILEDLIETRQKVKRKMKATIDPIEKKMLDYRQRALKILANSYYGYQGYPKARWYSKECAESVTAWGRHYIETTIKEAEKFGFKVLYADTDGFFATIPNEKPETIKSKAKKFLKHINEKLPGMLELEYEGFYLRGFFVTKKKYALIDEDGHITTRGLEVVRRDWSEIAKETQAKVLEVILREGSIEKAAGIVKKVVEDLANYRVPVEKLIIHEQITRKLKDYKATGPHVAIAKRLQARGIEVKPGTIISYVVLKGSKKISDRVILFDEYDSSRHKYDPDYYIHNQVLPAVLRILEAFGYKEKDLEYQ

SEQ ID NO: 143 - protein, 773 aa, unidentified
  REGION 1..773: note = Description of Unknown: Synthetic polypeptide
MILDTDYITENGKPVIRIFKKEKGEFKIEYDRNFEPYIYALLEDDESIEDIKKITGERHGKKVRIIRVEKVKKKFLGEPIEVWKLVFEHPQDIPAIRDAIRSHPAVREIFEYDIPFAKRYLIDKGLVPMEGGEELKLLAFNIATFYHEGDEFAEGEILMISYADESGAKVITWKKIDLPYVEVVSTEREAIKRFLQVLREKDPDVLLTYNGDNFDFAYIKKRCEKLGLKFTIGRDGSEPKIQRMGDRFAVEVKGRIHLDLAPVVRHTIRLPTYTLEAVYEAVFGKKKEKVYAEEIAEAWKSEEGLKRVAQYSMEDARATYELGREFFPLEVELAKLIGQSVWDVSRSSTGNLVEWYLLRVAYERNELAPNKPGGEEYQRRMRSSYIGGYVKEPEKGLWESIAYLDFRSSAGSIIVTHNVSPDTLEKECKNYDVAPIVGYRFCKDFKGFIPSILEDLIETRQKVKRKMKATIDPIEKKMLDYRQRALKILANSYYGYQGYPKARWYSKECAESVTAWGRHYIETTIKEAEKFGFKVLYADTDGFFATIPNEKPETIKSKAKKFLKHINEKLPGMLELEYEGFYLRGFFVTKKKYALIDEDGHITTRGLEVVRRDWSEIAKETQAKVLEVILREGSIEKAAGIVKKVVEDLANYRVPVEKLIIHEQITRELKRYKATGPHVAIAKRLQARGIKVKPGTIISYVVLKGSKKISDRVILFDEYDSSRHKYDPDYYIHNQVLPAVLRILEAFGYKEKDLEYQRMKQTGLGAWLKMGKK

SEQ ID NO: 144 - protein, 773 aa, unidentified
  REGION 1..773: note = Description of Unknown: Synthetic polypeptide
MILDTDYITENGKPVIRIFKKEKGEFKIEYDRNFEPYIYALLEDDESIEDIKKITGERHGKKVRIIRVEKVKKKFLGEPIEVWKLVFEHPQDVPAIRDAIRSHPAVREIFEYDIPFAKRYLIDKGLVPMEGGEELKLLAFRIATFYHEGDEFAEGEILMISYADESGAKVITWKKIDLPYVEVVSTEREAIKRFLQVLREKDPDVLLTYNGDNFDFAYIKKRCEKLGLKFTIGRDGSEPKIQRMGDRFAVEVKGRIHLDLAPVVRHTIRLPTYTLEAVYEAVFGKKKEKVYAEEIAEAWKSEEGLKRVAQYSMEDARATYELGREFFPLEVELAKLIGQSVWDVSRSSTGNLVEWYLLRVAYERNELAPNKPGGEEYQRRMRSSYIGGYVKEPEKGLWESIAYLDFRSSAGSIIVTHNVSPDTLEKECKNYDVAPIVGYRFCKDFKGFIPSILEDLIETRQKVKRKMKATIDPIEKKMLDYRQRALKILANSYYGYQGYPKARWYSKECAESVTAWGRHYIETTIKEAEKFGFKVLYADTDGFFATIPNEKPETIKSKAKKFLKHINEKLPGMLELEYEGFYLRGFFVTKKKYALIDEDGHITTRGLEVVRRDWSEIAKETQAKVLEVILREGSIEKAAGIVKKVVEDLANYRVPVEKLIIHEQITRKLKRYKATGPHVAIAKRLQARGIKVKPGTIISYVVLKGSKKISDRVILFDEYDSSRHKYDPDYYIHNQVLPAVLRILEAFGYKEKDLEYQRMKQTGLGAWLKMGKK

SEQ ID NO: 145 - protein, 773 aa, unidentified
  REGION 1..773: note = Description of Unknown: Synthetic polypeptide
MILDTDYITENGKPVIRIFKKEKGEFKIEYDRNFEPYIYALLEDDESIEDIKKITGERHGKKVRIIRVEKVKKKFLGEPIEVWKLVFEHPQDYPAIRDAIRSHPAVREIFEYDIPFAKRYLIDKGLVPMEGGEELKLLAFAIATFYHEGDEFAEGEILMISYADESGAKVITWKKIDLPYVEVVSTEREAIKRFLQVLREKDPDVLLTYNGDNFDFAYIKKRCEKLGLKFTIGRDGSEPKIQRMGDRFAVEVKGRIHLDLAPVVRHTIRLPTYTLEAVYEAVFGKKKEKVYAEEIAEAWKSEEGLKRVAQYSMEDARATYELGREFFPMEVELAKLIGQSVWDVSRSSTGNLVEWYLLRVAYERNELAPNKPGGEEYQRRMRSSYIGGYVKEPEKGLWESIAYLDFRSSAGSIIVTHNVSPDTLEKECKNYDVAPIVGYRFCKDFKGFIPSILEDLIETRQKVKRKMKATIDPIEKKMLDYRQRALKILANSYYGYQGYPKARWYSKECAESVTAWGRHYIETTIKEAEKFGFKVLYADTDGFFATIPNEKPETIKSKAKKFLKHINEKLPGMLELEYEGFYLRFFFVTKKKYALIDEDGHITTRGLEVVRRDWSEIAKETQAKVLEVILREGSIEKAAGIVKKVVEDLANYRVPVEKLIIHEQITRELKRYKATGPHVAIAKRLQARGIKVKPGTIISYVVLKGSKKISDRVILFDEYDSSRHKYDPDYYIHNQVLPAVLRILEAFGYKEKDLEYQRMKQTGLGAWLKMGKK

SEQ ID NO: 146 - protein, 773 aa, unidentified
  REGION 1..773: note = Description of Unknown: Synthetic polypeptide
MILDTDYITENGKPVIRIFKKEKGEFKIEYDRNFEPYIYALLEDDESIEDIKKITGERHGKKVRIIRVEKVKKKFLGEPIEVWKLVFEHPQDVPAIRDAIRSHPAVREIFEYDIPFAKRYLIDKGLVPMEGGEELKLLAFTIATFYHEGDEFAEGEILMISYADESGAKVITWKKIDLPYVEVVSTEREAIKRFLQVLREKDPDVLLTYNGDNFDFAYIKKRCEKLGLKFTIGRDGSEPKIQRMGDRFAVEVKGRIHLDLAPVVRHTIRLPTYTLEAVYEAVFGKKKEKVYAEEIAEAWKSEEGLKRVAQYSMEWARATYELGREFFPMEVELAKLIGQSVWDVSRSSTGNLVEWYLLRVAYERNELAPNKPGGEEYQRRMRSSYIGGYVKEPEKGLWESIAYLDFRSSAGSIIVTHNVSPDTLEKECKNYDVAPIVGYRFCKDFKGFIPSILEDLIETRQKVKRKMKATIDPIEKKMLDYRQRALKILANSYYGYQGYPKARWYSKECAESVTAWGRHYIETTIKEAEKFGFKVLYADTDGFFATIPNEKPETIKSKAKKFLKHINEKLPGMLELEYEGFYLRGFFVTKKKYALIDEDGHITTRGLEVVRRDWSEIAKETQAKVLEVILREGSIEKAAGIVKKVVEDLANYRVPVEKLIIHEQITRELKDYKATGPHVAIAKRLQARGIKVKPGTIISYVVLKGSKKISDRVILFDEYDSSRHKYDPDYYIHNQVLPAVLRILEAFGYKEKDLEYQRMKQTGLGAWLKMGKK

SEQ ID NO: 147 - protein, 773 aa, unidentified
  REGION 1..773: note = Description of Unknown: Synthetic polypeptide
MILDTDYITENGKPVIRIFKKEKGEFKIEYDRNFEPYIYALLEDDESIEDIKKITGERHGKKVRIIRVEKVKKKFLGEPIEVWKLVFEHPQDVPAIEDAIRSHPAVREIFEYDIPFAKRYLIDKGLVPMEGGEELKLLAFNIATFYHEGDEFAEGEILMISYADESGAKVITWKKIDLPYVEVVSTEREAIKRFLQVLREKDPDVLLTYNGDNFDFAYIKKRCEKLGLKFTIGRDGSEPKIQRMGDRFAVEVKGRIHLDLAPVVRHTIRLPTYTLEAVYEAVFGKKKEKVYAEEIAEAWKSEEGLKRVAQYSMEDARATYELGREFFPLEVELAKLIGQSVWDVSRSSTGNLVEWYLLRVAYERNELAPNKPGGEEYQRRMRSSYIGGYVKEPEKGLWESIAYLDFRSSAGSIIVTHNVSPDTLEKECKNYDVAPIVGYRFCKDFKGFIPSILEDLIETRQKVKRKMKATIDPIEKKMLDYRQRALKILANSYYGYQGYPKARWYSKECAESVTAWGRHYIETTIKEAEKFGFKVLYADTDGFFATIPNEKPETIKSKAKKFLKHINEKLPGMLELEYEGFYLRGFFVTKKKYALIDEDGHITTRGLEVVRRDWSEIAKETQAKVLEVILREGSIEKAAGIVKKVVEDLANYRVPVEKLIIHEQITRELKRYKATGPHVAIAKRLQARGIKVKPGTIISYVVLKGSKKISDRVILFDEYDSSRHKYDPDYYIHNQVLPAVLRILEAFGYKEKDLEYQRMKQTGLGAWLKMGKK

SEQ ID NO: 148 - protein, 773 aa, unidentified
  REGION 1..773: note = Description of Unknown: Synthetic polypeptide
MILDTDYITENGKPVIRIFKKEKGEFKIEYDRNFEPYIYALLEDDESIEDIKKITGERHGKKVRIIRVEKVKKKFLGEPIEVWKLVFEHPQDYPAIRDAIRSHPAVREIFEYDIPFAKRYLIDKGLVPMEGGEELKLLAFAIATFYHEGDEFAEGEILMISYADESGAKVITWKKIDLPYVEVVSTEREAIKRFLQVLREKDPDVLLTYNGDNFDFAYIKKRNEKLGLKFTIGRDGSEPKIQRMGDRFAVEVKGRIHLDLAPVVRHTIRLPTYTLEAVYEAVFGKKKEQVYAEEIAEAWKSEEGLKRVAQYSMEDARATYELGREFFPMEVELAKLIGQSVWDVSRSSTGNLVEWYLLRVAYERNELAPNKPGGEEYQRRMRSSYIGGYVKEPEKGLWESIAYLDFRSSAGSIIVTHNVSPDTLEKECKNYDVAPIVGYRFCKDFKGFIPSILEDLIETRQKVKRKMKATIDPIEKKMLDYRQRALKILANSYYGYQGYPKARWYSKECAESVTAWGRHYIETTIKEAEKFGFKVLYADTDGFFATIPNEKPETIKSKAKKFLKHINEKLPGMLELEYEGFYLRGFFVTKKKYALIDEDGHITTRGLEVVRRDWSEIAKETQAKVLEVILREGSIEKAAGIVKKVVEDLANYRVPVEKLIIHEQITRELKRYKATGPHVAIAKRLQARGIKVKPGTIISYVVLKGSKKISDRVILFDEYDSSRHKYDPDYYIHNQVLPAVLRILEAFGYKEKDLEYQRMKQTGLGAWLKMGKK

SEQ ID NO: 149 - protein, 757 aa, unidentified
  REGION 1..757: note = Description of Unknown: Synthetic polypeptide
MILDTDYITENGKPVIRIFKKEKGEFKIEYDRNFEPYIYALLEDDESIEDIKKITGERHGKKVRIIRVEKVKKKFLGEPIEVWKLVFEHPQDVPAIRDAIRSHPAVREIFEYDIPFAKRYLIDKGLVPMEGGEELKLLAFAIATFYHEGDEFAEGEILMISYADESGAKVITWKKIDLPYVEVVSTEREAIKRFLQVLREKDPDVLLTYNGDNFDFAYIKKRCEKLGLKFTIGRDGSEPKIQRMGDRFAVEVKGRIHLDLAPVVRHTIRLPTYTLEAVYEAVFGKKKEQVYAEEIAEAWKSEEGLKRVAQYSMEDARATYELGREFFPMEVELAKLIGQSVWDVSRSSTGNLVEWYLLRVAYERNELAPNKPGGEEYQRRMRSSYIGGYVKEPEKGLWESIAYLDFRSSAGSIIVTHNVSPDTLEKECKNYDVAPIVGYRFCKDFKGFIPSILEDLIETRQKVKRKMKATIDPIEKKMLDYRQRALKILANSYYGYQGYPKARWYSKECAESVTAWGRHYIETTIKEAEKFGFKVLYADTDGFFATIPNEKPETIKSKAKKFLKHINEKLPGMLELEYEGFYLRGFFVTKKKYALIDEDGHITTRGLEVVRRDWSEIAKETQAKVLEVILREGSIEKAAGIVKKVVEDLANYRVPVEKLIIHEQITRELKRYKATGPHVAIAKRLQARGIKVKPGTIISYVVLKGSKKISDRVILFDEYDSSRHKYDPDYYIHNQVLPAVLRILEAFGYKEKDLEYQ

SEQ ID NO: 150 - protein, 773 aa, unidentified
  REGION 1..773: note = Description of Unknown: Synthetic polypeptide
MILDTDYITENGKPVIRIFKKEKGEFKIEYDRNFEPYIYALLEDDESIEDIKKITGERHGKKVRIIRVEKVKKQFLGEPIEVWKLVFEHPQDYPAIRDAIRSHPAVREIFEYDIPFAKRYLIDKGLVPMEGGEELKLLAFAIATFYHEGDEFAEGEILMISYADESGAKVITWKKIDLPYVEVVSTEREAIKRFLQVLREKDPDVLLTYNGDNFDFAYIKKRCEKLGLKFTIGRDGSEPKIQRMGDRFAVEVKGRIHLDLAPVVRHTIRLPTYTLEAVYEAVFGKKKEKVYAEEIAEAWKSEEGLKRVAQYSMEDARATYELGREFFPMEVELAKLIGQSVWDVSRSSTGNLVEWYLLRVAYERNELAPNKPGGEEYQRRMRSSYIGGYVKEPEKGLWESIAYLDFRSSAGSIIVTHNVSPDTLEKECKNYDVAPIVGYRFCKDFKGFIPSILEDLIETRQKVKRKMKATIDPIEKKMLDYRQRALKILANSYYGYQGYPKARWYSKECAESVTAWGRHYIETTIKEAEKFGFKVLYADTDGFFATIPNEKPETIKSKAKKFLKHINEKLPGMLELEYEGFYLRGFFVTKKKYALIDEDGHITTRGLEVVRRDWSEIAKETQAKVLEVILREGSIEKAAGIVKKVVEDLANYRVPVEKLIIHEQITRELKRYKATGPHVAIAKRLQARGIKVKPGTIISYVVLKGSKKISDRVILFDEYDSSRHKYDPDYYIHNQVLPAVLRILEAFGYKEKDLEYQRMKQTGLGAWLKMGKK

SEQ ID NO: 151 - protein, 757 aa, unidentified
  REGION 1..757: note = Description of Unknown: Synthetic polypeptide
MILDTDYITENGKPVIRIFKKEKGEFKIEYDRNFEPYIYALLEDDESIEDIKKITGERHGKKVRIIRVEKVKKKFLGEPIEVWKLVFEHPQDVPAIRDAIRSHPAVREIFEYDIPFAKRYLIDKGLVPMEGGEELKLLAFAIATFYHEGDEFAEGEILMISYADESGAKVITWKKIDLPYVEVVSTEREAIKRFLQVLREKDPDVLLTYNGDNFDFAYIKKRCEKLGLKFTIGRDGSEPKIQRMGDRFAVEVKGRIHLDLAPVVRHTIRLPTYTLEAVYEAVFGKKKEKVYAEEIAEAWKSEEGLKRVAQYSMEDARATYELGREFFPLEVELAKLIGQSVWDVSRSSTGNLVEWYLLRVAYERNELAPNKPGGEEYQRRMRSSYIGGYVKEPEKGLWESIAYLDFRSSAGSIIVTHNVSPDTLEKECKNYDVAPIVGYRFCKDFKGFIPSILEDLIETRQKVKRKMKATIDPIEKKMLDYRQRALKILANSYYGYQGYPKARWYSKECAESVTAWGRHYIETTIKEAEKFGFKVLYADTDGFFATIPNEKPETIKSKAKKFLKHINEKLPGMLELEYEGFYLRGFFVTKKKYALIDEDGHITTRGLEVVRRDWSEIAKETQAKVLEVILREGSIEKAAGIVKKVVEDLANYRVPVEKLIIHEQITRKLKDYKATGPHVAIAKRLQARGIKVKPGTIISYVVLKGSKKISDRVILFDEYDSSRHKYDPDYYIHNQVLPAVLRILEAFGYKEKDLEYQ

SEQ ID NO: 152 - protein, 773 aa, unidentified
  REGION 1..773: note = Description of Unknown: Synthetic polypeptide
MILDTDYITENGKPVIRIFKKEKGEFKIEYDRNFEPYIYALLEDDESIEDIKKITGERHGKKVRIIRVEKVKKKFLGEPIEVWKLVFEHPADVPAIQDAIRSHPAVREIFEYDIPFAKRYLIDKGLVPMEGGEELKLLAFNIATFYHEGDEFAEGEILMISYADESGAKVITWKKIDLPYVEVVSTEREAIKRFLQVLREKDPDVLLTYNGDNFDFAYIKKRCEKLGLKFTIGRDGSEPKIQRMGDRFAVEVKGRIHLDLAPVVRHTIRLPTYTLEAVYEAVFGKKKEKVYAEEIAEAWKSEEGLKRVAQYSMEDARATYELGREFFPLEVELAKLIGQSVWDVSRSSTGNLVEWYLLRVAYERNELAPNKPGGEEYQRRMRSSYIGGYVKEPEKGLWESIAYLDFRSSAGSIIVTHNVSPDTLEKECKNYDVAPIVGYRFCKDFKGFIPSILEDLIETRQKVKRKMKATIDPIEKKMLDYRQRALKILANSYYGYQGYPKARWYSKECAESVTAWGRHYIETTIKEAEKFGFKVLYADTDGFFATIPNEKPETIKSKAKKFLKHINEKLPGMLELEYEGFYLRGFFVTKKKYALIDEDGHITTRGLEVVRRDWSEIAKETQAKVLEVILREGSIEKAAGIVKKVVEDLANYRVPVEKLIIHEQITRELKRYKATGPHVAIAKRLQARGIKVKPGTIISYVVLKGSKKISDRVILFDEYDSSRHKYDPDYYIHNQVLPAVLRILEAFGYKEKDLEYQRMKQTGLGAWLKMGKK

SEQ ID NO: 153 - protein, 773 aa, unidentified
  REGION 1..773: note = Description of Unknown: Synthetic polypeptide
MILDTDYITENGKPVIRIFKKEKGEFKIEYDRNFEPYIYALLEDDESIEDIKKITGERHGKKVRIIRVEKVKKKFLGEPIEVWKLVFEHPQDYPAIRDAIRSHPAVREIFEYDIPFAKRYLIDKGLVPMEGGEELKLLAFAIATFYHEGDEFAEGEILMISYADESGAKVITWKKIDLPYVEVVSTEREAIKRFAQVLREKDPDVLLTYNGDNFDFAYIKKRLEKLGLKFTIGRDGSEPKIQRMGDRFAVEVKGRIHLDLAPVVRHTIRLPTYTLEAVYEAVFGKKKEKVYAEEIAEAWKSEEGLKRVAQYSMEDARATYELGREFFPMEVELAKLIGQSVWDVSRSSTGNLVEWYLLRVAYERNELAPNKPGGEEYQRRMRSSYIGGYVKEPEKGLWESIAYLDFRSSAGSIIVTHNVSPDTLEKECKNYDVAPIVGYRFCKDFKGFIPSILEDLIETRQKVKRKMKATIDPIEKKMLDYRQRALKILANSYYGYQGYPKARWYSKECAESVTAWGRHYIETTIKEAEKFGFKVLYADTDGFFATIPNEKPETIKSKAKKFLKHINEKLPGMLELEYEGFYLRGFFVTKKKYALIDEDGHITTRGLEVVRRDWSEIAKETQAKVLEVILREGSIEKAAGIVKKVVEDLANYRVPVEKLIIHEQITRELKRYKATGPHVAIAKRLQARGIKVKPGTIISYVVLKGSKKISDRVILFDEYDSSRHKYDPDYYIHNQVLPAVLRILEAFGYKEKDLEYQRMKQTGLGAWLKMGKK

SEQ ID NO: 154 - protein, 773 aa, unidentified
  REGION 1..773: note = Description of Unknown: Synthetic polypeptide
MILDTDYITENGKPVIRIFKKEKGEFKIEYDRNFEPYIYALLEDDESIEDIKKITGERHGKKVRIIRVEKVKKKFLGEPIEVWKLVFEHPQDVPAIRDAIRSHPAVREIFEYDIPFAKRYLIDKGLVPMEGGEELKLLAFNIATFYHEGDEFAEGEILMISYADESGAKVITWKKIDLPYVEVVSTEREAIKRFLQVLREKDPDVLLTYNGDNFDFAYIKKRCEKLGLKFTIGRDGSEPKIQRMGDRFAVEVKGRIHLDLAPVVRHTIRLPTYTLEAVYEAVFGKKKEKVYAEEIAEAWKSEEGLKRVAQYSAEDARATYELGREFFPLEVELAKLIGQSVWDVSRSSTGNLVEWYLLRVAYERNELAPNKPGGEEYQRRMRSSYIGGYVKEPEKGLWESIAYLDFRSSAGSIIVTHNVSPDTLEKECKNYDVAPIVGYRFCKDFKGFIPSILEDLIETRQKVKRKMKATIDPIEKKMLDYRQRALKILANSYYGYQGYPKARWYSKECAESVTAWGRHYIETTIKEAEKFGFKVLYADTDGFFATIPNEKPETIKSKAKKFLKHINEKLPGMLELEYEGFYLRGFFVTKKKYALIDEDGHITTRGLEVVRRDWSEIAKETQAKVLEVILREGSIEKAAGIVKKVVEDLANYRVPVEKLIIHEQITRELKRYKATGPHVAIAKRLQARGIKVKPGTIISYVVLKGSKKISDRVILFDEYDSSRHKYDPDYYIHNQVLPAVLRILEAFGYKEKDLEYQRDKQTGLGAWLKMGKK

SEQ ID NO: 155 - protein, 773 aa, unidentified
  REGION 1..773: note = Description of Unknown: Synthetic polypeptide
MILDTDYITENGKPVIRIFKKEKGEFKIEYDRNFEPYIYALLEDDESIEDIKKITGERHGKKVRIIRVEKVKKKFLGEPIEVWKLVFEHPQDYPAIRDAIRSHPAVREIFEYDIPFAKRYLIDKGLVPMEGGEELKLLAFAIATFYHEGDEFAEGEILMISYADESGAKVITWKKIDLPYVEVVSTEREAIKRFLQVLREKDPDVLLTYNGDNFDFAYIKKRCEKLGLKFTIGRDGSEPKIQRMGDRFAVEVKGRIHLDLAPVVRHTIRLPTYTLEAVYEAVFGKKKEKVYAEEIAEAWKSEEGLKRVAQYSMEDARATYELGREFFPMEVELAKLIGQSVWDVSRSSTGNLVEWYLLRVAYERNELAPNKPGGEEYQRRMRSSYIGGYVKEPEKGLWESIAYLDFRSSAGSIIVTHNVSPDTLEKECKNYDVAPIVGYRFCKDFKGFIPSILEDLIETRQKVKRKMKATIDPIEKKMLDYRQRALKILANSYYGYQEYPKARWYSKECAESVTAWGRHYIETTIKEAEKFGFKVLYADTDGFFATIPNEKPETIKSKAKKFLKHINEKLPGMLELEYEGFYLRGFFVTKKKYALIDEDGHITTRGLEVVRRDWSEIAKETQAKVLEVILREGSIEKAAGIVKKVVEDLANYRVPVEKLIIHEQITRELKRYKATGPHVAIAKRLQARGIKVKPGTIISYVVLKGSKKISDRVILFDEYDSSRHKYDPDYYIHNQVLPAVLRILEAFGYKEKDLEYQRMKQTGLGAWLKMGKK

SEQ ID NO: 156 - protein, 773 aa, unidentified; identical to SEQ ID NO: 123
  REGION 1..773: note = Description of Unknown: Synthetic polypeptide

SEQ ID NO: 157 - protein, 773 aa, unidentified
  REGION 1..773: note = Description of Unknown: Synthetic polypeptide
MILDTDYITENGKPVIRIFKKEKGEFKIEYDRNFEPYIYALLEDDESIEDIKKITGERHGKKVRIIRVEKVKKKFLGEPIEVWKLVFEHPQDVPAIRDAIRSHPAVREIFEYDIPFAKRYLIDKGLVPMEGGEELKLLAFAIATFYHEGDEFAEGEILMISYADESGAKVITWKKIDLPYVEVVSTEREAIKRFLQVLREKDPDVLLTYNGDNFDFAYIKKRCEKLGLKFTIGRDGSEPKIQRMGDRFAVEVKGRIHLDLAPVVRHTIRLPTYTLEAVYEAVFGKKKERVYAEEIAEAWKSEEGLKRVAQYSMEDARATYELGREFFPMEVELAKLIGQSVWDVSRSSTGNLVEWYLLRVAYERNELAPNKPGGEEYQRRMRSSYIGGYVKEPEKGLWESIAYLDFRSSAGSIIVTHNVSPDTLEKECKNYDVAPIVGYRFCKDFKGFIPSILEDLIETRQKVKRKMKATIDPIEKKMLDYRQRALKILANSYYGYQGYPKARWYSKECAESVTAWGRHYIETTIKEAEKFGFKVLYADTDGFFATIPNEKPETIKSKAKKFLKHINEKLPGMLELEYEGFYLRGFFVTKKKYALIDEDGHITTRGLEVVRRDWSEIAKETQAKVLEVILREGSIEKAAGIVKKVVEDLANYRVPVEKLIIHEQITRELKRYKATGPHVAIAKRLQARGIKVKPGTIISYVVLKGSKKISDRVILFDEYDSSRHKYDPDYYIHNQVLPAVLRILEAFGYKEKDLEYQRMKQTGLGAWLKMGKK

SEQ ID NO: 158 - protein, 773 aa, unidentified
  REGION 1..773: note = Description of Unknown: Synthetic polypeptide
MILDTDYITENGKPVIRIFKKEKGEFKIEYDRNFEPYIYALLEDDESIEDIKKITGERHGKKVRIIRVEKVKKKFLGEPIEVWKLVFEHPQDYPAIRDAIRSHPAVREIFEYDIPFAKRYLIDKGLVPMEGGEELKLLAFAIATFYHEGDEFAEGEILMISYADESGAKVITWKKIDLPYVEVVSTEREAIKRFLQVLREKDPDVLLTYNGDNFDFAYIKKRCEKLGLKFTIGRDGSEPKIQRMGDRFAVEVKGRIHLDLAPVVRHTIRLPTYTLEAVYEAVFGKKKEKVYAEEIAEAWKSEEGLKRVAQYSMEDARATYELGREFFPMEVELAKLIGQSVWDVSRSSTGNLVEWYLLRVAYERNELAPNKPGGEEYQRRMRSSYIGGYVKEPEKGLWESIAYLDFRSSAGSIIVTHNVSPDTLEKECKNYDVAPIVGYRFCKDFKGFIPSILEDLIETRQKVKRKMKATIDPIEKKMLDYRQVALKILANSYYGYQGYPKARWYSKECAESVTAWGRHYIETTIKEAEKFGFKVLYADTDGFFATIPNEKPETIKSKAKKFLKHINEKLPGMLELEYEGFYLRGFFVTKKKYALIDEDGHITTRGLEVVRRDWSEIAKETQAKVLEVILREGSIEKAAGIVKKVVEDLANYRVPVEKLIIHEQITRELKRYKATGPHVAIAKRLQARGIKVKPGTIISYVVLKGSKKISDRVILFDEYDSSRHKYDPDYYIHNQVLPAVLRILEAFGYKEKDLEYQRMKQTGLGAWLKMGKK

SEQ ID NO: 159 - protein, 773 aa, unidentified
  REGION 1..773: note = Description of Unknown: Synthetic polypeptide
MILDTDYITENGKPVIRIFKKEKGEFKIEYDRNFEPYIYALLEDDESIEDIKKITGERHGKKVRIIRVEKVKKKFLGEPIEVWKLVFEHPQDYPAIRDAIRSHPAVREIFEYDIPFAKRYLIDKGLVPMEGGEELKLLAFAIATFYHEGDEFAEGEILMISYADESGAKVITWKKIDLPYVEVVSTEREAIKRFLQVLREKDPDVLLTYNGDNFDFAYIKKRCEKLGLKFTIGRDGSEPKIQRMGDRFAVEVKGRIHLDLAPVVRHTIRLPTYELEAVYEAVFGKKKEKVYAEEIAEAWKSEEGLKRVAQYSMEDARATYELGREFFPMEVELAKLIGQSVWDVSRSSTGNLVEWYLLRVAYERNELAPNKPGGEEYQRRMRSSYIGGYVKEPEKGLWESIAYLDFRSSAGSIIVTHNVSPDTLEKECKNYDVAPIVGYRFCKDFKGFIPSILEDLIETRQKVKRKMKATIDPIEKKMLDYRQRALKILANSYYGYQGYPKARWYSKECAESVTAWGRHYIETTIKEAEKFGFKVLYADTDGFFATIPNEKPETIKSKAKKFLKHINEKLPGMLELEYEGFYLRGFFVTKKKYALIDEDGHITTRGLEVVRRDWSEIAKETQAKVLEVILREGSIEKAAGIVKKVVEDLANYRVPVEKLIIHEQITRELKRYKATGPHVAIAKRLQARGIKVKPGTIISYVVLKGSKKISDRVILFDEYDSSRHKYDPDYYIHNQVLPAVLRILEAFGYKEKDLEYQRMKQTGLGAWLKMGKK

SEQ ID NO: 160 - protein, 773 aa, unidentified
  REGION 1..773: note = Description of Unknown: Synthetic polypeptide
MILDTDYITENGKPVIRIFKKEKGEFKIEYDRNFEPYIYALLEDDESIEDIKKITGERHGKKVRIIRVEKVKKKFLGEPIEVWKLVFEHPQDYPAIRDAIRSHPAVREIFEYDIPFAKRYLIDKGLVPMEGGEELKLLAFAIATFYHEGDEFAEGEILMISYADESGAKVITWKKIDLPYVEVVSTEREAIKRFLQVLREKDPDVLLTYNGDNFDFAYIKKRCEKLGLKFTIGRDGSEPKIQRMGDRFAVEVKGRIHLDLAPVVRHTIRLPTYTLEAVYEAVFGKKKEKVYAEEIAEAFKSEEGLKRVAQYSMEDARATYELGREFFPMEVELAKLIGQSVWDVSRSSTGNLVEWYLLRVAYERNELAPNKPGGEEYQRRMRSSYIGGYVKEPEKGLWESIAYLDFRSSAGSIIVTHNVSPDTLEKECKNYDVAPIVGYRFCKDFKGFIPSILEDLIETRQKVKRKMKATIDPIEKKMLDYRQRALKILANSYYGYQGYPKARWYSKECAESVTAWGRHYIETTIKEAEKFGFKVLYADTDGFFATIPNEKPETIKSKAKKFLKHINEKLPGMLELEYEGFYLRGFFVTKKKYALIDEDGHITTRGLEVVRRDWSEIAKETQAKVLEVILREGSIEKAAGIVKKVVEDLANYRVPVEKLIIHEQITRELKRYKATGPHVAIAKRLQARGIKVKPGTIISYVVLKGSKKISDRVILFDEYDSSRHKYDPDYYIHNQVLPAVLRILEAFGYKEKDLEYQRMKQTGLGAWLKMGKK

SEQ ID NO: 161 - protein, 773 aa, unidentified
  REGION 1..773: note = Description of Unknown: Synthetic polypeptide
MILDTDFITENGKPVIRIFKKEKGEFKIEYDRNFEPYIYALLEDDESIEDIKKITGERHGKKVRIIRVEKVKKKFLGEPIEVWKLVFEHPQDVPAIRDAIRSHPAVREIFEYDIPFAKRYLIDKGLVPMEGGEELKLLAFNIATFYHEGDEFAEGEILMISYADESGAKVITWKKIDLPYVEVVSTEREAIKRFLQVLREKDPDVLLTYNGDNFDFAYIKKRCEKLGLKFTIGRDGSEPKIQRMGDRFAVEVKGRIHLDLAPVVRHTIRLPTYTLEAVYEAVFGKKKEKVYAEEIAEAWKSEEGLKRVAQYSMEDARATYELGREFFPLEVELAKLIGQSVWDVSRSSTGNLVEWYLLRVAYERNELAPNKPGGEEYQRRMRSSYIGGYVKEPEKGLWESIAYLDFRSSAGSIIVTHNVSPDTLEKECKNYDVAPIVGYRFCKDFKGFIPSILEDLIETRQKVKRKMKATIDPIEKKMLDYRQRALKILANSYYGYQGYPKARWYSKECAESVTAWGRHYIETTIKEAEKFGFKVLYADTDGFFATIPNEKPETIKSKAKKFLKHINEKLPGMLELEYEGFYLRGFFVTKKKYALIDEDGHITTRGLEVVRRDWSEIAKETQAKVLEVILREGSIEKAAGIVKKVVEDLANYRVPVEKLIIHELITRELKRYKATGPHVAIAKRLQARGIKVKPGTIISYVVLKGSKKISDRVILFDEYDSSRHKYDPDYYIHNQVLPAVLRILEAFGYKEKDLEYQRMKQTGLGAWLKMGKK

SEQ ID NO: 162 - protein, 773 aa, unidentified
  REGION 1..773: note = Description of Unknown: Synthetic polypeptide
IILDTDYITENGKPVIRIFKKEKGEFKIEYDRNFEPYIYALLEDDESIEDIKKITGERHGKKVRIIRVEKVKKKFLGEPIEVWKLVFEHPQDYPAIRDAIRSHPAVREIFEYDIPFAKRYLIDKGLVPIEGGEELKLLAFAIATFYHEGDEFAEGEILMISYADESGAKVITWKKIDLPYVEVVSTEREAIKRFLQVLREKDPDVLLTYNGDNFDFAYIKKRCEKLGLKFTIGRDGSEPKIQRMGDRFAVEVKGRIHLDLAPVVRHTIRLPTYTLEAVYEAVFGKKKEKVYAEEIAEAWKSEEGLKRVAQYSMEDARATYELGREFFPMEVELAKLIGQSVWDVSRSSTGNLVEWYLLRVAYERNELAPNKPGGEEYQRRMRSSYIGGYVKEPEKGLWESIAYLDFRSSAGSIIVTHNVSPDTLEKECKNYDVAPIVGYRFCKDFKGFIPSILEDLIETRQKVKRKMKATIDPIEKKMLDYRQRALKILANSYYGYQGYPKARWYSKECAESVTAWGRHYIETTIKEAEKFGFKVLYADTDGFFATIPNEKPETIKSKAKKFLKHINEKLPGMLELEYEGFYLRGFFVTKKKYALIDEDGHITTRGLEVVRRDWSEIAKETQAKVLEVILREGSIEKAAGIVKKVVEDLANYRVPVEKLIIHEQITRELKRYKATGPHVAIAKRLQARGIKVKPGTIISYVVLKGSKKISDRVILFDEYDSSRHKYDPDYYIHNQVLPAVLRILEAFGYKEKDLEYQRMKQTGLGAWLKMGKK

SEQ ID NO: 163 - protein, 773 aa, unidentified
  REGION 1..773: note = Description of Unknown: Synthetic polypeptide
MILDTDYITENGKPVIRIFKKEKGEFKIEYDRNFEPYIYALLEDDESIEDIKKITGERHGKKVRIIRVEKVKKKFLGEPIEVWKLVFEHPQDVPAIRDAIRSHPAVREIFEYDIPFAKRYLIDKGLVPMEGGEELKLLAFAIATFYHEGDEFAEGEILMISYADESGAKVITWKKIDLPYVEVVSTEREAIKRFLQVLREKDPDVLLTYNGDNFDFAYIKKRCEKLGLKFTIGRDGSEPKIQRMGDRFAVEVKGRIHLDLAPVVRHTIRLPTYTLEAVYEAVFGKKKEKVYAEEIAEAWKSEEGLKRVAQYSMEDARATYELGREFFPMEVELAKLIGQSVWDVSRSSTGNLVEWYLLRVAYERNELAPNKPGGEEYQRRMRSSYIGGYVKEPEKGLWESIAYLDFRSSAGSIIVTHNVSPDTLEKECKNYDVAPIVGYRFCKDFKGFIPSILEDLIETRQKVKRKMKATIDPIEKKMLDYRQRALKILANSYYGYQGYPKARWYSKECAESVTAWGRHYIETTIKEAEKFGFKVLYADTDGFFATIPNEKPETIKSKAKKFLKHINEKLPGMLELEYEGFYLRGFFVTKKKYALIDEDGHITTRGLEVQRRDWSEIAKETQAKVLEVILREGSIEKAAGIVKKVVEDLANYRVPVEKLIIHEQITRELKRYKATGPHVAIAKRLQARGIKVKPGTIISYVVLKGSKKISDRVILFDEYDSSRHKYDPDYYIHNQVLPAVLRILEAFGYKEKDLEYQRMKQTGLGAWLKMGKK

SEQ ID NO: 164 - protein, 757 aa, unidentified
  REGION 1..757: note = Description of Unknown: Synthetic polypeptide
MILDTDYITENGKPVIRIFKKEKGEFKIEYDRNFEPYIYALLEDDESIEDIKKITGERHGKKVRIIRVEKVKKKFLGEPIEVWKLVFEHPQDVPAIRDAIRSHPAVREIFEYDIPFAKRYLIDKGLVPMEGGEELKLLAFAIATFYHEGDEFAEGEILMISYADESGAKVITWKKIDLPYVEVVSTEREAIKRFLQVLREKDPDVLLTYNGDNFDFAYIKKRCEKLGLKFTIGRDGSEPKIQRMGDRFAVEVKGRIHLDLAPVVRHTIRLPTYTLEAVYEAVFGKKKEKVYAEEIAEAWKSEEGLKRVAQYSMEDARATYELGREFFPMEVELAKLIGQSVWDVSRSSTGNLVEWYLLRVAYERNELAPNKPGGEEYQRRMRSSYIGGYVKEPEKGLWESIAYLDFRSSAGSIIVTHNVSPDTLEKECKNYDVAPIVGYRFCKDFKGFIPSILEDLIETRQKVKRKMKATIDPIEKKMLDYRQRALKILANSYYGYQGYPKARWYSKECAESVTAWGRHYIETTIKEAEKFGFKVLYADTDGFFATIPNEKPETIKSKAKKFLKHINEKLPGMLELEYEGFYLRGFFVTKKKYALIDEDGHITTRGLEVVRRDWSEIAKETQAKVLEVILREGSIEKAAGIVKKVVEDLANYRVPVEKLIIHEQITRKLKRYKATGPHVAIAKRLQARGIKVKPGTIISYVVLKGSKKISDRVILFDEYDSSRHKYDPDYYIHNQVLPAVLRILEAFGYKEKDLEYQ

SEQ ID NO: 165 - protein, 773 aa, unidentified
  REGION 1..773: note = Description of Unknown: Synthetic polypeptide
MILDTDYITENGKPVIRIFKKEKGEFKIEYDRNFEPYIYALLEDDESIEDIKKITGERHGKKVRIIRVEKVKKKFLGEPIEVWKLVFEHPQDVPAIRDAIRSHPAVREIFEYDIPFAKRYLIDKGLVPMEGGEELKLLAFNIATFYHEGDEFAEGEILMISYADESGAKVITWKKIDLPYVEVVSTEREAIKRFLQVLREKDPDVLLTYNGDNFDFAYIKKRCEKLGLKFTIGRDGSEPKIQRMGDRFAVEVKGRIHLDLAPVVRHTIRLPTYNLEAVYEAVFGKKKEKVYAEEIAEAWKSEEGLKRVAQYSMEDARATYELGREFFPLEVELAKLIGQSVWDVSRSSTGNLVEWYLLRVAYERNELAPNKPGGEEYQRRMRSSYIGGYVKEPEKGLWESIAYLDFRSSAGSIIVTHNVSPDTLEKECKNYDVAPIVGYRFCKDFKGFIPSILEDLIETRQKVKRKMKATIDPIEKKMLDYRQRALKILANSYYGYQGYPKARWYSKECAESVTAWGRHYIETTIKEAEKFGFKVLYADTDGFFATIPNEKPETIKSKAKKFLKHINEKLPGMLELEYEGFYLRGFFVTKKKYALIDEDGHITTRGLEVVRRDWSEIAKETQAKVLEVILREGSIEKAAGIVKKVVEDLANYRVPVEKLIIHEQITRELKRYKATGPHVAIAKRLQARGIKVKPGTIISYVVLKGSKKISDRVILFDEYDSSRHKYDPDYYIHNQVLPAVLRILEAFGYKEKDLEYQRMKQTGLGAWLKMGKK

SEQ ID NO: 166 - protein, 773 aa, unidentified
  REGION 1..773: note = Description of Unknown: Synthetic polypeptide
MILDTDYITENGKPVIRIFKKEKGEFKIEYDRNFEPYIYALLEDDESIEDIKKITGERHGKKVRIIRVEKVKKKFLGEPIEVWKLVFEHPQDVPAIRDAIRSHPAVREIFEYDIPFAKRYLIDKGLVPMEGGEELKLLAFNIATFYHEGDEFAEGEILMISYADESGAKVITWKKIDLPYVEVVSTEREAIKRFLQVLREKDPDVLLTYNGDNFDFAYIKKRCEKLGLKFTIGRDGSEPKIQRMGDRFAVEVKGRIHLDLAPVVRHTIRLPTYELEAVYEAVFGKKKEKVYAEEIAEAWKSEEGLKRVAQYSMEDARATYELGREFFPLEVELAKLIGQSVWDVSRSSTGNLVEWYLLRVAYERNELAPNKPGGEEYQRRMRSSYIGGYVKEPEKGLWESIAYLDFRSSAGSIIVTHNVSPDTLEKECKNYDVAPIVGYRFCKDFKGFIPSILEDLIETRQKVKRKMKATIDPIEKKMLDYRQRALKILANSYYGYQGYPKARWYSKECAESVTAWGRHYIETTIKEAEKFGFKVLYADTDGFFATIPNEKPETIKSKAKKFLKHINEKLPGMLELEYEGFYLRGFFVTKKKYALIDEDGHITTRGLEVVRRDWSEIAKETQAKVLEVILREGSIEKAAGIVKKVVEDLANYRVPVEKLIIHEQITRELKRYKATGPHVAIAKRLQARGIKVKPGTIISYVVLKGSKKISDRVILFDEYDSSRHKYDPDYYIHNQVLPAVLRILEAFGYKEKDLEYQRMKQTGLGAWLKMGKK

SEQ ID NO: 167 - protein, 773 aa, unidentified
  REGION 1..773: note = Description of Unknown: Synthetic polypeptide
MILDTDYITENGKPVIRIFKKEKGEFKIEYDRNFEPYIYALLEDDESIEDIKKITGERHGKKVRIIRVEKVKKKFLGEPIEVWKLVFEHPQDYPAIRDAIRSHPAVREIFEYDIPFAKRYLIDKGLVPMEGGEELKLLAFAIATFYHEGDEFAEGEILMISYADESGAKVITWKKIDLPYVEVVSTEREAIKRFLQVLREKDPDVLLTYNGDNFDFAYIKKRCEKLGLKFTIGRDGSEPKIQRMGDRFAVEVKGRIHLDLAPVVRHTIRLPTYTLEAVYEAVFGKKKEKVYAEEIAEAWKSEEGLKRVAQYSMEDARATYELGREFFPMEVELAKLIGQSVWDVSRSSTGNLVEWYLLRVAYERNELAPNKPGGEEYQRRMRSSYIGGYVKEPEKGLWESIAYLDFRSSAGSIIVTHNVSPDTLEKECKNYDVAPIVGYRFCKDFKGFIPSILEDLIETRQKVKRKMKATIDPIEKKMLDYRQRALKILANSYYGYQGYPKARWYSKECAESVTAWGRHYIETTIKEAEKFGFKVLYADTDGFFATIPNEKPETIKSKAKKFLKHINEKLPGMLELEYEGFYLRGFFVTKKKYALIDEDGHITTRGLEVVRRDWSEIAKETQAKVLEVILREGSIEKAAGIVKKVVEDLANYRVPVEKLIIHEQITRELKRYKATRPHVAIAKRLQARGIKVKPGTIISYVVLKGSKKISDRVILFDEYDSSRHKYDPDYYIHNQVLPAVLRILEAFGYKEKDLEYQRMKQTGLGAWLKMGKK

SEQ ID NO: 168 - protein, 773 aa, unidentified
  REGION 1..773: note = Description of Unknown: Synthetic polypeptide
MILDTDYITENGKPVIRIFKKEKGEFKIEYDRNFEPYIYALLEDDESIEDIKKITGERHGKKVRIIRVEKVKKKFLGEPIEVWKLVFEHPQDYPAIRDAIRSHPAVREIFEYDIPFAKRYLIDKGLVPMEGGEELKLLAFAIATFYHEGDEFAEGEILMISYADESGAKVITWKKIDLPYVEVVSTEREAIKRFLQVLREKDPDVLLTYNGDNFDFAYIKKRCEKLGLKFTIGRDGSEPKIQRMGDRFAVEVKGRIHLDLAPVVRHTIRLPTYTLEAVYEAVFGKKKEKVYAEEIAEAWKSEEGLKRVAQYSMEDARATYELGREFFPMEVELAKLIGQSVWDVSRSSYGNLVEWYLLRVAYERNELAPNKPGGEEYQRRMRSSYIGGYVKEPEKGLWESIAYLDFRSSAGSIIVTHNVSPDTLEKECKNYDVAPIVGYRFCKDFKGFIPSILEDLIETRQKVKRKMKATIDPIEKKMLDYRQRALKILANSYYGYQGYPKARWYSKECAESVTAWGRHYIETTIKEAEKFGFKVLYADTDGFFATIPNEKPETIKSKAKKFLKHINEKLPGMLELEYEGFYLRGFFVTKKKYALIDEDGHITTRGLEVVRRDWSEIAKETQAKVLEVILREGSIEKAAGIVKKVVEDLANYRVPVEKLIIHEQITRELKRYKATGPHVAIAKRLQARGIKVKPGTIISYVVLKGSKKISDRVILFDEYDSSRHKYDPDYYIHNQVLPAVLRILEAFGYKEKDLEYQRMKQTGLGAWLKMGKK

SEQ ID NO: 169 - protein, 773 aa, unidentified
  REGION 1..773: note = Description of Unknown: Synthetic polypeptide
MILDTDYITENGKPVIRIFKKEKGEFKIEYDRNFEPYIYALLEDDESIEDIKKITGERHGKKVRIIRVEKVKKKFLGEPIEVWKLVFEHPQDYPAIRDAIRSHPAVREIFEYDIPFAKRYLIDKGLVPMEGGEELKLLAFAIATFYHEGDEFAEGEILMISYADESGAKVITWKKIDLPYVEVVSTEREAIKRFLQVLREKDPDVLLTYNGDNFDFAYIKKRCEKLGLKFTIGRDGSEPKIQRMGDRFAVEVKGRIHLDLAPVVRHTIRLPTYTLEAVYEAVFGKKKEKVYAEEIAEAWKSEEGLKRVAQYSMEDARATYELGREFFPMEVELAKLIGQSVWDVSRSSTGNLVEWYLLRVAYERNELAPNKPGGEEYQRRMRSSYIGGYVKEPEKGLWESIAYLDFRSSAGSIIVTHNVSPDTLEKECKNYDVAPIVGYRFCKDFKGFIPSILEDLIETRQKVKRKMKATIDPIEKKMLDYRQRALKILANSYYGYQGYPKARWYSKECAESVTAWGRHYIETTIKEAEKFGFKVLYADTDGFFATIPNEKPETIKSKAKKFLKHINEKLPGMLELEYEGFYLRGFFVTKKKYALIDEDGHITTRGLEVVRRDWSEIAKETQAKVLEVILREGSIEKAAGIVKKVVEDLANYRVPVEKLIIHEQITRELKRYKATGPHVAIAKRLQARGIKVQPGTIISYVVLKGSKKISDRVILFDEYDSSRHKYDPDYYIHNQVLPAVLRILEAFGYKEKDLEYQRMKQTGLGAWLKMGKK

SEQ ID NO: 170 - protein, 773 aa, unidentified
  REGION 1..773: note = Description of Unknown: Synthetic polypeptide
MILDTDYITENGKPVIRIFKKEKGEFKIEYDRNFEPYIYALLEDDESIEDIKKITGERHGKKVRIIRVEKVKKKFLGEPIEVWKLVFEHPQDYPAIRDAIRSHPAVREIFEYDIPFAKRYLIDKGLVPMEGGEELKLLAFAIATFYHEGDEFAEGEILMISYADESGAKVITWKKIDLPYVEVVSTEREAIKRFLQVLREKDPDVLLTYNGDNFDFAYIKKRCEKLGLKFTIGRDGSEPKIQRMGDRFAVEVKGRIHLDLAPVVRHTIRLPTYTLEAVYEAVFGKKKEKVYAEEIAEAWKSEEGLKRVAQYSMEDARATYELGREFFPMEVELAKLIGQSVWDVSRSSTGNLVEWYLLRVAYERNELAPNKPGGEEYQRRMRSSYIGGYVKEPEKGLWESIAYLDFRSSAGSIIVTHNVSPDTLEKECKNYDVAPIVGYRFCKDFKGFIPSILEDLIETRQKVKRKMKATIDPIEKKMLDYRQRALKILANSYYGYQGYPKARWYSKECAESVTAWGRHYIETTIKEAEKFGFKVLYADTDGFFATIPNEKPETIKSKAKKFLKHINEKLPGMLELEYEGFYLRGFFVTKKKYALIDEDGHITTRYLEVVRRDWSEIAKETQAKVLEVILREGSIEKAAGIVKKVVEDLANYRVPVEKLIIHEQITRELKRYKATGPHVAIAKRLQARGIKVKPGTIISYVVLKGSKKISDRVILFDEYDSSRHKYDPDYYIHNQVLPAVLRILEAFGYKEKDLEYQRMKQTGLGAWLKMGKK

SEQ ID NO: 171 - protein, 773 aa, unidentified
  REGION 1..773: note = Description of Unknown: Synthetic polypeptide
MILDTDYITENGKPVIRIFKKEKGEFKIEYDRNFEPYIYALLEDDESIEDIKKITGERHGKKVRIIRVEKVKKKFLGEPIEVWKLVFEHPQDYPAIRDAIRSHPAVREIFEYDIPFAKRYLIDKGLVPMEGGEELKLLAFAIATFYHEGDEFAEGEILMISYADESGAKVITWKKIDLPYVEVVSTEREAIKRFLQVLREKDPDVLLTYNGDNFDFAYIKKRCEKLGLKFTIGRDGSEPKIQRMGDRFAVEVKGRIHLDLAPVVRHTIRLPTYTLEAVYEAVFGKKKEKVYAEEIAEAWKSEEGLKRVAQYSMEDARATYELGREFFPMEVELAKLIGQSVWDVSRSSTGNLVEWYLLRVAYERNELAPNKPGGEEYQRRMRSSYIGGYVKEPEKGLWESIAYLDFRSSAGSIIVTHNVSPDTLEKECKNYDVAPIVGYRFCKDFKGFIPSILEDLIETRQKVKRKMKATIDPIEKKMLDYRQRALKILANSYYGYQGYPKARWYSKECAESVTAWGRHYIETTIKEAEKFGFKVLYADTDGFFATIPNEKPETIKSKAKKFLKHINEKLPGMLELEYEGFYLRGFFVTKKKYALIDEDGHITTRGLEVVRRDWSEIAKETQAKVLEVILREGSIEKAAGIVKKVVEDLANYRVPVEKLIIHEQITRELKRYKATGPHVAIAKRLQARGIKVYPGTIISYVVLKGSKKISDRVILFDEYDSSRHKYDPDYYIHNQVLPAVLRILEAFGYKEKDLEYQRMKQTGLGAWLKMGKK

SEQ ID NO: 172 - protein, 773 aa, unidentified
  REGION 1..773: note = Description of Unknown: Synthetic polypeptide
MILDTDYITENGKPVIRIFKKEKGEFKIEYDRNFEPYIYALLEDDESIEDIKKITGERHGKKVRIIRVEKVKKKFLGEPIEVWKLVFEHPQDYPAIRDAIRSHPAVREIFEYDIPFAKRYLIDKGLVPMEGGEELKLLAFAIATFYHEGDEFAEGEILMISYADESGAKVITWKKIDLPYVEVVSTEREAIKRFLQVLREKDPDVLLTYNGDNFDFAYIKKRPEKLGLKFTIGRDGSEPKIQRMGDRFAVEVKGRIHLDLAPVVRHTIRLPTYTLEAVYEAVFGKKKEQVYAEEIAEAWKSEEGLKRVAQYSMEDARATYELGREFFPMEVELAKLIGQSVWDVSRSSTGNLVEWYLLRVAYERNELAPNKPGGEEYQRRMRSSYIGGYVKEPEKGLWESIAYLDFRSSAGSIIVTHNVSPDTLEKECKNYDVAPIVGYRFCKDFKGFIPSILEDLIETRQKVKRKMKATIDPIEKKMLDYRQRALKILANSYYGYQGYPKARWYSKECAESVTAWGRHYIETTIKEAEKFGFKVLYADTDGFFATIPNEKPETIKSKAKKFLKHINEKLPGMLELEYEGFYLRGFFVTKKKYALIDEDGHITTRGLEVVRRDWSEIAKETQAKVLEVILREGSIEKAAGIVKKVVEDLANYRVPVEKLIIHEQITRELKRYKATGPHVAIAKRLQARGIKVKPGTIISYVVLKGSKKISDRVILFDEYDSSRHKYDPDYYIHNQVLPAVLRILEAFGYKEKDLEYQRMKQTGLGAWLKMGKK

SEQ ID NO: 173 - protein, 773 aa, unidentified
  REGION 1..773: note = Description of Unknown: Synthetic polypeptide
MILDTDYITENGKPVIRIFKKEKGEFKIEYDRNFEPYIYALLEDDESIEDIKKITGERHGKKVRIIRVEKVKKKFLGEPIEVWKLVFEHPQDYPAIRDAIRSHPAVREIFEYDIPFAKRYLIDKGLVPMEGGEELKLLAFAIATFYHEGDEFAEGEILMISYADESGAKVITWKKIDLPYVEVVSTEREAIKRFLQVLREKDPDVLLTYNGDNFDFAYIKKRCEKLGLKFTIGRDGSEPKIQRMGDRFAVEVKGRIHLDLAPVVRHTIRLPTYTLEAVYEAVFGKKKEKVYAEEIAEAWKSEEGLKRVAQYSMEDARATYELGREFFPMEVELAKLIGQSVWDVSRSSTGNLVEWYLLRVAYERNELAPNKPGGEEYQRRMRSSYIGGYVKEPEKGLWESIAYLDFRSSAGSIIVTHNISPDTLEKECKNYDVAPIVGYRFCKDFKGFIPSILEDLIETRQKVKRKMKATIDPIEKKMLDYRQRALKILANSYYGYNGYPKARWYNKEAAESVTAWGRHYIETTIKEAEKFGFKVLYADTDGFFATIPNEKPETIKSKAKKFLKHINEKLPGMLELEYEGFYLRGFFVTKKKYALIDEDGHITTRGLEVVRRDWSEIAKETQAKVLEVILREGSIEKAAGIVKKVVEDLANYRVPVEKLIIHEQITRELKRYKATGPHVAIAKRLQARGIKVKPGTIISYVVLKGSKKISDRVILFDEYDSSRHKYDPDYYIHNQVLPAVLRILEAFGYKEKDLEYQRMKQTGLGAWLKMGKK

SEQ ID NO: 174 - protein, 773 aa, unidentified
  REGION 1..773: note = Description of Unknown: Synthetic polypeptide
MILDTDYITENGKPVIRIFKKEKGEFKIEYDRNFEPYIYALLEDDESIEDIKKITGERHGKKVRIIRVEKVKKKFLGEPIEVWKLVFEHPQDYPAIRDAIRSHPAVREIFEYDIPFAKRYLIDKGLVPMEGGEELKLLAFAIATFYHEGDEFAEGEILMISYADESGAKVITWKKIDLPYVEVVSTEREAIKRFLQVLREKDPDVLLTYNGDNFDFAYIKKRCEKLGLKFTIGRDGSEPKIQRMGDRFAVEVKGRIHLDLAPVVRHTIRLPTYTLEAVYEAVFGKKKEKVYAEEIAEAWKSEEGLKRVAQYSMEDARATYELGREFFPMEVELAKLIGQSVWDVSRSSTGNLVEWYLLRVAYERNELAPNKPGGEEYQRRMRSSYIGGYVKEPEKGLWESIAYLDFRSSAGSIIVTHNVSPDTLEKECKNYDVAPIVGYRFCKDFKGFIPSILEDLIETRQKVKRKMKATIDPIEKKMLDYRQRALKILANSYYGYQGYPKARWYSKECAESVTAWGRHYIETTIKEAEKFGFKVLYADTDEFFATIPNEKPETIKSKAKKFLKHINEKLPGMLELEYEGFYLRGFFVTKKKYALIDEDGHITTRGLEVVRRDWSEIAKETQAKVLEVILREGSIEKAAGIVKKVVEDLANYRVPVEKLIIHEQITRELKRYKATGPHVAIAKRLQARGIKVKPGTIISYVVLKGSKKISDRVILFDEYDSSRHKYDPDYYIHNQVLPAVLRILEAFGYKEKDLEYQRMKQTGLGAWLKMGKK

SEQ ID NO: 175 - protein, 773 aa, unidentified
  REGION 1..773: note = Description of Unknown: Synthetic polypeptide
MILDTDYITENGKPVIRIFKKEKGEFKIEYDRNFEPYIYALLEDDESIEDIKKITGERHGKKVRIIRVEKVKKKFLGEPIEVWKLVFEHPQDVPAIADAIRSHPAVREIFEYDIPFAKRYLIDKGLVPMEGGEELKLLAFNIATFYHEGDEFAEGEILMISYADESGAKVITWKKIDLPYVEVVSTEREAIKRFLQVLREKDPDVLLTYNGDNFDFAYIKKRCEKLGLKFTIGRDGSEPKIQRMGDRFAVEVKGRIHLDLAPVVRHTIRLPTYTLEAVYEAVFGKKKEKVYAEEIAEAWKSEEGLKRVAQYSMEDARATYELGREFFPLEVELAKLIGQSVWDVSRSSTGNLVEWYLLRVAYERNELAPNKPGGEEYQRRMRSSYIGGYVKEPEKGLWESIAYLDFRSSAGSIIVTHNVSPDTLEKECKNYDVAPIVGYRFCKDFKGFIPSILEDLIETRQKVKRKMKATIDPIEKKMLDYRQRALKILANSYYGYQGYPKARWYSKECAESVTAWGRHYIETTIKEAEKFGFKVLYADTDGFFATIPNEKPETIKSKAKKFLKHINEKLPGMLELEYEGFYLRGFFVTKKKYALIDEDGHITTRGLEVVRRDWSEIAKETQAKVLEVILREGSIEKAAGIVKKVVEDLANYRVPVEKLIIHEQITRELKRYKATGPHVAIAKRLQARGIKVKPGTIISYVVLKGSKKISDRVILFDEYDSSRHKYDPDYYIHNQVLPAVLRILEAFGYKEKDLEYQRMKQTGLGAWLKMGKK

SEQ ID NO: 176 - protein, 773 aa, unidentified
  REGION 1..773: note = Description of Unknown: Synthetic polypeptide
MILDTDYITENGKPVIRIFKKEKGEFKIEYDRNFEPYIYALLEDDESIEDIKKITGERHGKKVRIIRVEKVKKKFLGEPIEVWKLVFEHPQDYPAIRDAIRSHPAVREIFEYDIPFAKRYLIDKGLVPMEGGEELKLLAFAIATFYHEGDEFAEGEILMISYADESGAKVITWKKIDLPYVEVVSTEREAIKRFLQVLREKDPDVLLTYNGDNFDFAYIKKRAEKLGLKFTIGRDGSEPKIQRMGDRFAVEVKGRIHLDLAPVVRHTIRLPTYTLEAVYEAVFGKKKEKVYAEEIAEAWKSEEGLKRVAQYSMEDARATYELGREFFPMEVELAKLIGQSVWDVSRSSTGNLVEWYLLRVAYERNELAPNKPGGEEYQRRMRSSYIGGYVKEPEKGLWESIAYLDFRSSAGSIIVTHNVSPDTLEKECKNYDVAPIVGYRFCKDFKGFIPSILEDLIETRQKVKRKMKATIDPIEKKMLDYRQRALKILANSYYGYQGYPKARWYSKEAAESVTAWGRHYIETTIKEAEKFGFKVLYADTDGFFATIPNEKPETIKSKAKKFLKHINEKLPGMLELEYEGFYLRGFFVTKKKYALIDEDGHITTRGLEVVRRDWSEIAKETQAKVLEVILREGSIEKAAGIVKKVVEDLANYRVPVEKLIIHEQITRELKRYKATGPHVAIAKRLQARGIKVKPGTIISYVVLKGSKKISDRVILFDEYDSSRHKYDPDYYIHNQVLPAVLRILEAFGYKEKDLEYQRMKQTGLGAWLKMGKK

SEQ ID NO: 177 - protein, 773 aa, unidentified
  REGION 1..773: note = Description of Unknown: Synthetic polypeptide
MILDTDYITENGKPVIRIFKKEKGEFKIEYDRNFEPYIYALLEDDESIEDIKKITGERHGKKVRIIRVEKVKKKFLGEPIEVWKLVFEHPQDYPAIRDAIRSHPAVREIFEYDIPFAKRYLIDKGLVPMEGGEELKLLAFAIATFYHEGDEFAEGEILMISYADESGAKVITWKKIDLPYVEVVSTEREAIKRFLQVLREKDPDVLLTYNGDNFDFAYIKKRCEKLGLKFTIGRDGSEPKIQRMGDRFAVEVKGRIHLDLAPVVRHTIRLPTYTLEAVYEAVFGKKKEKVYAEEIAEAWKSEEGLKRVAQYSMEDARATYELGREFFPMEVELAKLIGQSVWDVSRSSTGNLVEWYLLRVAYERNELAPNKPGGEEYQRRMRSSYIGGYVKEPEKGLWESIAYLDFRSSAGSIIVTHNVSPDTLEKECKNYDVAPIVGYRFCKDFKGFIPSILEDLIETRQKVKRKLKATIDPIEKKMLDYRQRALKILANSYYGYQGYPKARWYSKECAESVTAWGRHYIETTIKEAEKFGFKVLYADTDGFFATIPNEKPETIKSKAKKFLKHINEKLPGMLELEYEGFYLRGFFVTKKKYALIDEDGHITTRGLEVVRRDWSEIAKETQAKVLEVILREGSIEKAAGIVKKVVEDLANYRVPVEKLIIHEQITRELKRYKATGPHVAIAKRLQARGIKVKPGTIISYVVLKGSKKISDRVILFDEYDSSRHKYDPDYYIHNQVLPAVLRILEAFGYKEKDLEYQRMKQTGLGAWLKMGKK

SEQ ID NO: 178 - protein, 773 aa, unidentified
  REGION 1..773: note = Description of Unknown: Synthetic polypeptide
MILDTDYITENGKPVIRIFKKEKGEFKIEYDRNFEPYIYALLEDDESIEDIKKITGERHGKKVRIIRVEKVKKKFLGEPIEVWKLVFEHPQDYPAIRDAIRSHPAVREIFEYDIPFAKRYLIDKGLVPMEGGEELKLLAFAIATFYHEGDEFAEGEILMISYADESGAKVITWKKIDLPYVEVVSTEREAIKRFLQVLREKDPDVLLTYNGDNFDFAYIKKRCEKLGLKFTIGRDGSEPKIQRMGDRFAVEVKGRIHLDLAPVVRHTIRLPTYTLEAVYEAVFGKKKEKVYAEEIAEAWKSEEGLKRVAQYSMEDARATYELGREFFPMEVELAKLIGQSVWDVSRSSTGNLVEWYLLRVAYERNELAPNKPGGEEYQRRMRSSYIGGYVKEPEKGLWESIAYLDFRSSAGSIIVTHNVSPDTLEKECKNYDVAPIVGYRFCKDFKGFIPSILEDLIETRQKVKRKQKATIDPIEKKMLDYRQRALKILANSYYGYQGYPKARWYSKECAESVTAWGRHYIETTIKEAEKFGFKVLYADTDGFFATIPNEKPETIKSKAKKFLKHINEKLPGMLELEYEGFYLRGFFVTKKKYALIDEDGHITTRGLEVVRRDWSEIAKETQAKVLEVILREGSIEKAAGIVKKVVEDLANYRVPVEKLIIHEQITRELKRYKATGPHVAIAKRLQARGIKVKPGTIISYVVLKGSKKISDRVILFDEYDSSRHKYDPDYYIHNQVLPAVLRILEAFGYKEKDLEYQRMKQTGLGAWLKMGKK

SEQ ID NO: 179 - protein, 773 aa, unidentified
  REGION 1..773: note = Description of Unknown: Synthetic polypeptide
MILDTDYITENGKPVIRIFKKEKGEFKIEYDRNFEPYIYALLEDDESIEDIKKITGERHGKKVRIIRVEKVKKKFLGEPIEVWKLVFEHPQDYPAIRDAIRSHPAVREIFEYDIPFAKRYLIDKGLVPMEGGEELKLLAFAIATFYHEGDEFAEGEILMISYADESGAKVITWKKIDLPYVEVVSTEREAIKRFLQVLREKDPDVLLTYNGDNFDFAYIKKRCEKLGLKFTIGRDGSEPKIQRMGDRFAVEVKGRIHLDLAPVVRHTIRLPTYTLEAVYEAVFGKKKEKVYAEEIAEAWKSEEGLKRVAQYSMEDARATYELGREFFPMEVELAKLIGQSVWDVSRSSTGNLVEWYLLRVAYERNELAPNKPGGEEYQRRMRSSYIGGEVKEPEKGLWESIAYLDFRSSAGSIIVTHNVSPDTLEKECKNYDVAPIVGYRFCKDFKGFIPSILEDLIETRQKVKRKMKATIDPIEKKMLDYRQRALKILANSYYGYQGYPKARWYSKECAESVTAWGRHYIETTIKEAEKFGFKVLYADTDGFFATIPNEKPETIKSKAKKFLKHINEKLPGMLELEYEGFYLRGFFVTKKKYALIDEDGHITTRGLEVVRRDWSEIAKETQAKVLEVILREGSIEKAAGIVKKVVEDLANYRVPVEKLIIHEQITRELKRYKATGPHVAIAKRLQARGIKVKPGTIISYVVLKGSKKISDRVILFDEYDSSRHKYDPDYYIHNQVLPAVLRILEAFGYKEKDLEYQRMKQTGLGAWLKMGKK

SEQ ID NO: 180 - protein, 773 aa, unidentified
  REGION 1..773: note = Description of Unknown: Synthetic polypeptide
MILDTDYITENGKPVIRIFKKEKGEFKIEYDRNFEPYIYALLEDDESIEDIKKITGERHGKKVRIIRVEKVKKKFLGEPIEVWKLVFEHPQDYPAIRDAIRSHPAVREIFEYDIPFAKRYLIDKGLVPMEGGEELKLLAFAIATFYHEGDEFAEGEILMISYADESGAKVITWKKIDLPYVEVVSTEREAIKRFLQVLREKDPDVLLTYNGDNFDFAYIKKRCEKLGLKFTIGRDGSEPKIQRMGDRFAVEVKGRIHLDLAPVVRHTIRLPTYTLEAVYEAVFGKKKEKVYAEEIAEAWKSEEGLKRVAQYSVEDARATYELGREFFPMEVELAKLIGQSVWDVSRSSTGNLVEWYLLRVAYERNELAPNQPGGEEYQRRMRSSYIGGYVKEPEKGLWESIAYLDFRSSAGSIIVTHNVSPDTLEKECKNYDVAPIVGYRFCKDFKGFIPSILEDLIETRQKVKRKMKATIDPIEKKMLDYRQRALKILANSYYGYQGYPKARWYSKECAESVTAWGRHYIETTIKEAEKFGFKVLYADTDGFFATIPNEKPETIKSKAKKFLKHINEKLPGMLELEYEGFYLRGFFVTKKKYALIDEDGLITTRGLEVVRRDWSEIAKETQAKVLEVILREGSIEKAAGIVKKVVEDLANYRVPVEKLIIHEQITRELKRYKATGPHVAIAKRLQARGIKVKPGTIISYVVLKGSKKISDRVILFDEYDSSRHKYDPDYYIHNQVLPAVLRILEAFGYKEKDLEYQRMKQTGLGAWLKMGKK

SEQ ID NO: 181 - protein, 773 aa, unidentified
  REGION 1..773: note = Description of Unknown: Synthetic polypeptide
MILDTDYITENGKPVIRIFKKEKGEFKIEYDRNFEPYIYALLEDDESIEDIKKITGERHGKKVRIIRVEKVKKKFLGEPIEVWKLVFEHPQDVPAIRDAIRSHPAVREIFEYDIPFAKRYLIDKGLVPMEGGEELKLLAFNIATFYHEGDEFAEGEILMISYADESGAKVITWKKIDLPYVEVVSTEREAIKRFLQVLREKDPDVLLTYNGDNFDFAYIKKRCEKLGLKFTIGRDGSEPKIQRMGDRFAVEVKGRIHLDLAPVVRHTIRLPTYTLEAVYEAVFGKKKEKVYAEEIAEAWKSEEGLARVAQYSMEDARATYELGREFFPLEVELAKLIGQSVWDVSRSSTGNLVEWYLLRVAYERNELAPNKPGGEEYQRRMRSSYIGGYVKEPEKGLWESIAYLDFRSSAGSIIVTHNVSPDTLEKECKNYDVAPIVGYRFCKDFKGFIPSILEDLIETRQKVKRKMKATIDPIEKKMLDYRQRALKILANSYYGYQGYPKARWYSKECAESVTAWGRHYIETTIKEAEKFGFKVLYADTDGFFATIPNEKPETIKSKAKKFLKHINEKLPGMLELEYEGFYLRGFFVTKKKYALIDEDGLITTRGLEVVRRDWSEIAKETQAKVLEVILREGSIEKAAGIVKKVVEDLANYRVPVEKLIIHEQITRELKRYKATGPHVAIAKRLQARGIKVKPGTIISYVVLKGSKKISDRVILFDEYDSSRHKYDPDYYIHNQVLPAVLRILEAFGYKEKDLEYQRDKQTGLGAWLKMGKK

SEQ ID NO: 182 - protein, 773 aa, unidentified
  REGION 1..773: note = Description of Unknown: Synthetic polypeptide
MILDTDYITENGKPVIRIFKKEKGEFKIEYDRNFEPYIYALLEDDESIEDIKKITGERHGKKVRIIRVEKVKKKFLGEPIEVWKLVFEHPQDYPAIRDAIRSHPAVREIFEYDIPFAKRYLIDKGLVPMEGGEELKLLAFAIATFYHEGDEFAEGEILMISYADESGAKVITWKKIDLPYVEVVSTEREAIKRFLQVLREKDPDVLLTYNGDNFDFAYIKKRLEKLGLKFTIGRDGSEPKIQRMGDRFAVEVKGRIHLDLAPVVRHTIRLPTYTLEAVYEAVFGKKKEKVYAEEIAEAWKSEEGLKRVAQYSMEDARATYELGREFFPMEVELAKLIGQSVWDVSRSSTGNLVEWYLLRVAYERNELAPNKPGGEEYQRRMRSSYIGGYVKEPEKGLWESIAYLDFRSSAGSIIVTHNVSPDTLEKECKNYDVAPIVGYRFCKDFKGFIPSILEDLIETRQKVKRKMKATIDPIEKKMLDYRQRALKILANSYYGYQGYPKARWYSKECAESVTAWGRHYIETTIKEAEKFGFKVLYADTDGFFATIPNEKPETIKSKAKKFLKHINEKLPGMLELEYEGFYLRGFFVTKKKYALIDEDGHITTRGLEVVRRDWSEIAKETQAKVLEVILREGSIEKAAGIVKKVVEDLANYRVPVEKLIIHEQITRELKRYKATGPHVAIAKRLQARGIKVKPGTIISYVVLKGSKKISDRVILFDEYDSSRHKYDPDYYIHNQVLPAVLRILEAFGYKEKDLEYQRMKQTGLGAWLKMGKK

SEQ ID NO: 183 - protein, 757 aa, unidentified
  REGION 1..757: note = Description of Unknown: Synthetic polypeptide
MILDTDYITENGKPVIRIFKKEKGEFKIEYDRNFEPYIYALLEDDESIEDIKKITGERHGKKVRIIRVEKVKKKFLGEPIEVWKLVFEHPQDVPAIRDAIRSHPAVREIFEYDIPFAKRYLIDKGLVPMEGGEELKLLAFAIATFYHEGDEFAEGEILMISYADESGAKVITWKKIDLPYVEVVSTEREAIKRFLQVLREKDPDVLLTYNGDNFDFAYIKKRCEKLGLKFTIGRDGSEPKIQRMGDRFAVEVKGRIHLDLAPVVRHTIRLPTYTLEAVYEAVFGKKKEKVYAEEIAEAWKSEEGLKRVAQYSMEDARATYELGREFFPMEVELAKLIGQSVWDVSRSSTGNLVEWYLLRVAYERNELAPNKPGGEEYQRRMRSSYIGGYVKEPEKGLWESIAYLDFRSSAGSIIVTHNVSPDTLEKECKNYDVAPIVGYRFCKDFKGFIPSILEDLIETRQKVKRKMKATIDPIEKKMLDYRQRALKILANSYYGYQGYPKARWYSKECAESVTAWGRHYIETTIKEAEKFGFKVLYADTDGFFATIPNEKPETIKSKAKKFLKHINEKLPGMLELEYEGFYLRGFFVTKKKYALIDEDGHITTRGLEVVRRDWSEIAKETQAKVLEVILREGSIEKAAGIVKKVVEDLANYRVPVEKLIIHEQITRRLKDYKATGPHVAIAKRLQARGIKVNPGTIISYVVLKGSKKISDRVILFDEYDSSRHKYDPDYYIHNQVLPAVLRILEAFGYKEKDLEYQ

SEQ ID NO: 184 - protein, 773 aa, unidentified
  REGION 1..773: note = Description of Unknown: Synthetic polypeptide
MILDTDYITENGKPVIRIFKKEKGEFKIEYDRNFEPYIYALLEDDESIEDIKKITGERHGKKVRIIRVEKVKKKFLGEPIEVWKLVFEHPQDYPAIRDAIRSHPAVREIFEYDIPFAKRYLIDKGLVPMEGGEELKLLAFAIATFYHEGDEFAEGEILMISYADESGAKVITWKKIDLPYVEVVSTEREAIKRFLQVLREKDPDVLLTYNGDNFDFAYIKKRCEKLGLKFTIGRDGSEPKIQRMGDRFAVEVKGRIHLDLAPVVRHTIRLPTYTLEAVYEAVFGKKKEQVYAEEIAEAWKSEEGLKRVAQYSMEDARATYELGREFFPMEVELAKLIGQSVWDVSRSSTGNLVEWYLLRVAYERNELAPNKPGGEEYQRRMRSSYIGGYVKEPEKGLWESIAYLDFRSSAGSIIVTHNVSPDTLEKECKNYDVAPIVGYRFCKDFKGFIPSILEDLIETRQKVKRKMKATIDPIEKKMLDYRQRALKILANSYYGYQGYPKARWYAKECAESVTAWGRHYIETTIKEAEKFGFKVLYADTDGFFATIPNEKPETIKSKAKKFLKHINEKLPGMLELEYEGFYLRGFFVTKKKYALIDEDGHITTRGLEVVRRDWSEIAKETQAKVLEVILREGSIEKAAGIVKKVVEDLANYRVPVEKLIIHEQITRELKRYKATGPHVAIAKRLQARGIKVKPGTIISYVVLKGSKKISDRVILFDEYDSSRHKYDPDYYIHNQVLPAVLRILEAFGYKEKDLEYQRMKQTGLGAWLKMGKK

SEQ ID NO: 185 - protein, 773 aa, unidentified
  REGION 1..773: note = Description of Unknown: Synthetic polypeptide
MILDTDYITENGKPVIRIFKKEKGEFKIEYDRNFEPYIYALLEDDESIEDIKKITGERHGKKVRIIRVEKVKKKFLGEPIEVWKLVFEHPQDYPAIRDAIRSHPAVREIFEYDIPFAKRYLIDKGLVPMEGGEELKLLAFAIATFYHEGDEFAEGEILMISYADESGAKVITWKKIDLPYVEVVSTEREAIKRFLQVLREKDPDVLLTYNGDNFDFAYIKKRCEKLGLKFTIGRDGSEPKIQRMGDRFAVEVKGRIHLDLAPVVRHTIRLPTYTLEAVYEAVFGKKKEKVYAEEIAEAWKSEEGLKRVAQYSMEDARATYELGREFFPMEVELAKLIGQSVWDVSRSSTGNLVEWYLLRVAYERNELAPNKPGGEEYQRRMRSSYIGGYVKEPEKGLWESIAYLDFRSSAGSIIVTHNVSPDTLEKECKNYDVAPIVGYRFCKDFKGFIPSILEDLIETRQKVKRKMKATIDPIEKKMLDYRQRALKILANSYYGYQGYPKARWYSKECAESVTAWGRHYIETTIKEAEKFGFKVLYADTDGFFATIPNEKPETIKSKAKKFLKHINEKLPGMLELEYEGFYLRGFFVTKKKYALIDEDGHITTRGLEVVRRDWSEIAKETQAKVLEVILREGSIEAAAGIVKKVVEDLANYRVPVEKLIIHEQITRELKRYKATGPHVAIAKRLQARGIKVKPGTIISYVVLKGSKKISDRVILFDEYDSSRHKYDPDYYIHNQVLPAVLRILEAFGYKEKDLEYQRMKQTGLGAWLKMGKK

SEQ ID NO: 186 - protein, 773 aa, unidentified
  REGION 1..773: note = Description of Unknown: Synthetic polypeptide
MILDTDYITENGKPVIRIFKKEKGEFKIEYDRNFEPYIYALLEDDESIEDIKKITGERHGKKVRIIRVEKVKKKFLGEPIEVWKLVFEHPQDVPAIRDAIRSHPAVREIFEYDIPFAKRYLIDKGLVPMEGGEELKLLAFNIATFYHEGDEFAEGEILMISYADESGAKVITWKKIDLPYVEVVSTEREAIKRFLQVLREKDPDVLLTYNGDNFDFAYIKKRCEKLGLKFTIGRDGSEPKIQRMGDRFAVEVKGRIHLDLAPVVRHTIRLPTYTLEAVYEAVFGKKKEKVYAEEIAEAWKSEEGLKRVAQYSMEDARATYELGREFFPLEVELAKLIGQSVWDVSRSSTGNLVEWYLLRVAYERNELAPNKPGGEEYQRRMRSSYIGGYVKEPEKGLWESIAYLDFRSSAGSIIVTHNVSPDTLEKECKNYDVAPIVGYRFCKDFKGFIPSILEDLIETRQKVKRKMKATIDPIEKKMLDYRQRALKILANSYYGYQGYPKARWYSKECAESVTAWGRHYIETTIKEAEKFGFKVLYADTDGFFATIPNEKPETIKSKAKKFLKHINEKLPGMLELEYEGFYLRGFFVTKKKYALIDEDGHITTRGLEVVRRDWSEIAKETQAKVLEVILREGSIEKAAGIVKKVVEDLANYRVPVEKLIIHEQITRELKRYKATQPHVAIAKRLQARGIKVKPGTIISYVVLKGSKKISDRVILFDEYDSSRHKYDPDYYIHNQVLPAVLRILEAFGYKEKDLEYQRMKQTGLGAWLKMGKK

SEQ ID NO: 187 - protein, 773 aa, unidentified
  REGION 1..773: note = Description of Unknown: Synthetic polypeptide
MILDTDYITENGKPVIRIFKKEKGEFKIEYDRNFEPYIYALLEDDESIEDIKKITGERHGKKVRIIRVEKVKKKFLGEPIEVWKLVFEHPQDYPAIRDAIRSHPAVREIFEYDIPFAKRYLIDKGLVPMEGGEELKLLAFAIATFYHEGDEFAEGEILMISYADESGAKVITWKKIDLPYVEVVSTEREALKRFLQVLREKDPDVLLTYNGDNFDFAYIKKRAEKLGLKFTIGRDGSEPKIQRMGDRFAVEVKGRIHLDLAPVVRHTIRLPTYTLEAVYEAVFGKKKEKVYAEEIAEAWKSEEGLKRVAQYSMEDARATYELGREFFPMEVELAKLIGQSVWDVSRSSTGNLVEWYLLRVAYERNELAPNKPGGEEYQRRMRSSYIGGYVKEPEKGLWESIAYLDFRSSAGSIIVTHNVSPDTLEKECKNYDVAPIVGYRFCKDFKGFIPSILEDLIETRQKVKRKMKATIDPIEKKMLDYRQRALKILANSYYGYQGYPKARWYSKECAESVTAWGRHYIETTIKEAEKFGFKVLYADTDGFFATIPNEKPETIKSKAKKFLKHINEKLPGMLELEYEGFYLRGFFVTKKKYALIDEDGHITTRGLEVVRRDWSEIAKETQAKVLEVILREGSIEKAAGIVKKVVEDLANYRVPVEKLIIHEQITRELKRYKATGPHVAIAKRLQARGIKVKPGTIISYVVLKGSKKISDRVILFDEYDSSRHKYDPDYYIHNQVLPAVLRILEAFGYKEKDLEYQRMKQTGLGAWLKMGKK

SEQ ID NO: 188 - protein, 773 aa, unidentified
  REGION 1..773: note = Description of Unknown: Synthetic polypeptide
MILDTDYITENGKPVIRIFKKEKGEFKIEYDRNFEPYIYALLEDDESIEDIKKITGERHGKKVRIIRVEKVKKKFLGEPIEVWKLVFEHPYDVPAIRDAIRSHPAVREIFEYDIPFAKRYLIDKGLVPMEGGEELKLLAFNIATFYHEGDEFAEGEILMISYADESGAKVITWKKIDLPYVEVVSTEREAIKRFLQVLREKDPDVLLTYNGDNFDFAYIKKRCEKLGLKFTIGRDGSEPKIQRMGDRFAVEVKGRIHLDLAPVVRHTIRLPTYTLEAVYEAVFGKKKEKVYAEEIAEAWKSEEGLKRVAQYSMEDARATYELGREFFPLEVELAKLIGQSVWDVSRSSTGNLVEWYLLRVAYERNELAPNKPGGEEYQRRMRSSYIGGYVKEPEKGLWESIAYLDFRSSAGSIIVTHNVSPDTLEKECKNYDVAPIVGYRFCKDFKGFIPSILEDLIETRQKVKRKMKATIDPIEKKMLDYRQRALKILANSYYGYQGYPKARWYSKECAESVTAWGRHYIETTIKEAEKFGFKVLYADTDGFFATIPNEKPETIKSKAKKFLKHINEKLPGMLELEYEGFYLRGFFVTKKKYALIDEDGHITTRGLEVVRRDWSEIAKETQAKVLEVILREGSIEKAAGIVKKVVEDLANYRVPVEKLIIHEQITRELKRYKATGPHVAIAKRLQARGIKVKPGTIISYVVLKGSKKISDRVILFDEYDSSRHKYDPDYYIHNQVLPAVLRILEAFGYKEKDLEYQRMKQTGLGAWLKMGKK

SEQ ID NO: 189 - protein, 757 aa, unidentified
  REGION 1..757: note = Description of Unknown: Synthetic polypeptide
MILDTDYITENGKPVIRIFKKEKGEFKIEYDRNFEPYIYALLEDDESIEDIKKITGERHGKKVRIIRVEKVKKKFLGEPIEVWKLVFEHPQDVPAIRDAIRSHPAVREIFEYDIPFAKRYLIDKGLVPMEGGEELKLLAFAIATFYHEGDEFAEGEILMISYADESGAKVITWKKIDLPYVEVVSTEREAIKRFLQVLREKDPDVLLTYNGDNFDFAYIKKRCEKLGLKFTIGRDGSEPKIQRMGDRFAVEVKGRIHLDLAPVVRHTIRLPTYTLEAVYEAVFGKKKEKVYAEEIAEAWKSEEGLKRVAQYSMEDARATYELGREFFPLEVELAKLIGQSVWDVSRSSTGNLVEWYLLRVAYERNELAPNKPGGEEYQRRMRSSYIGGYVKEPEKGLWESIAYLDFRSSAGSIIVTHNVSPDTLEKECKNYDVAPIVGYRFCKDFKGFIPSILEDLIETRQKVKRKMKATIDPIEKKMLDYRQRALKILANSYYGYQGYPKARWYSKECAESVTAWGRHYIETTIKEAEKFGFKVLYADTDGFFATIPNEKPETIKSKAKKFLKHINEKLPGMLELEYEGFYLRGFFVTKKKYALIDEDGHITTRGLEVVRRAWSEIAKETQAKVLEVILREGSIEKAAGIVKKVVEDLANYRVPVEKLIIHEQITRELKRYKATGPHVAIAKRLQARGIKVKPGTIISYVVLKGSKKISDRVILFDEYDSSRHKYDPDYYIHNQVLPAVLRILEAFGYKEKDLEYQ

SEQ ID NO: 190 - protein, 757 aa, unidentified
  REGION 1..757: note = Description of Unknown: Synthetic polypeptide
MILDTDYITENGKPVIRIFKKEKGEFKIEYDRNFEPYIYALLEDDESIEDIKKITGERHGKKVRIIRVEKVKKKFLGEPIEVWKLVFEHPQDVPAIRDAIRSHPAVREIFEYDIPFAKRYLIDKGLVPMEGGEELKLLAFAIATFYHEGDEFAEGEILMISYADESGAKVITWKKIDLPYVEVVSTEREAIKRFLQVLREKDPDVLLTYNGDNFDFAYIKKRCEKLGLKFTIGRDGSEPKIQRMGDRFAVEVKGRIHLDLAPVVRHTIRLPTYTLEAVYEAVFGKKKEKVYAEEIAEAWKSEEGLKRVAQYSMEDARATYELGREFFPMEVELAKLIGQSVWDVSRSSTGNLVEWYLLRVAYERNELAPNKPGGEEYQRRMRSSYIGGYVKEPEKGLWESIAYLDFRSSAGSIIVTHNVSPDTLEKECKNYDVAPIVGYRFCKDFKGFIPSILEDLIETRQKVKRKMKATIDPIEKKMLDYRQRALKILANSYYGYQGYPKARWYSKECAESVTAWGRHYIETTIKEAEKFGFKVLYADTDGFFATIPNEKPETIKSKAKKFLKHINEKLPGMLELEYEGFYLRGFFVTKKKYALIDEDGHITTRGLEVVRRDWSEIAKETQAKVLEVILREGSIEKAAGIVKKVVEDLANYRVPVEKLIIHETITRKLKDYKATGPHVAIAKRLQARGIKVKPGTIISYVVLKGSKKISDRVILFDEYDSSRHKYDPDYYIHNQVLPAVLRILEAFGYKEKDLEYQ

SEQ ID NO: 191 - protein, 757 aa, unidentified
  REGION 1..757: note = Description of Unknown: Synthetic polypeptide
MILDTDYITENGKPVIRIFKKEKGEFKIEYDRNFEPYIYALLEDDESIEDIKKITGERHGKKVRIIRVEKVKKKFLGEPIEVWKLVFEHPQDVPAIRDAIRSHPAVREIFEYDIPFAKRYLIDKGLVPMEGGEELKLLAFAIATFYHEGDEFAEGEILMISYADESGAKVITWKKIDLPYVEVVSTEREAIKRFLQVLREKDPDVLLTYNGDNFDFAYIKKRCEKLGLKFTIGRDGSEPKIQRMGDRFAVEVKGRIHLDLAPVVRHTIRLPTYTLEAVYEAVFGKKKEKVYAEEIAEAWKSEEGLKRVAQYSMEDARATYELGREFFPMEVELAKLIGQSVWDVSRSSTGNLVEWYLLRVAYERNELAPNKPGGEEYQRRMRSSYIGGYVKEPEKGLWESIAYLDFRSSAGSIIVTHNVSPDTLEKECKNYDVAPIVGYRFCKDFKGFIPSILEDLIETRQKVKRKMKATIDPIEKKMLDYRQRALKILANSYYGYQGYPKARWYSKECAESVTAWGRHYIETTIKEAEKFGFKVLYADTDGFFATIPNEKPETIKSKAKKFLKHINEKLPGMLELEYEGFYLRGFFVTKKKYALIDEDGHITTRGLEVVRRDWSEIAKETQAKVLEVILREGSIEKAAGIVKKVVEDLANYRVPVEKLIIHEQITRKLKDYKATGPHVAIAKRLQARGIKVYPGTIISYVVLKGSKKISDRVILFDEYDSSRHKYDPDYYIHNQVLPAVLRILEAFGYKEKDLEYQ

SEQ ID NO: 192 - protein, 757 aa, unidentified
  REGION 1..757: note = Description of Unknown: Synthetic polypeptide
MILDTDYITENGKPVIRIFKKEKGEFKIEYDRNFEPYIYALLEDDESIEDIKKITGERHGKKVRIIRVEKVKKKFLGEPIEVWKLVFEHPQDVPAIRDAIRSHPAVREIFEYDIPFAKRYLIDKGLVPMEGGEELKLLAFAIATFYHEGDEFAEGEILMISYADESGAKVITWKKIDLPYVEVVSTEREAIKRFLQVLREKDPDVLLTYNGDNFDFAYIKKRCEKLGLKFTIGRDGSEPKIQRMGDRFAVEVKGRIHLDLAPVVRHTIRLPTYTLEAVYEAVFGKKKEKVYAEEIAEAWKSEEGLKRVAQYSMEDARATYELGREFFPMEVELAKLIGQSVWDVSRSSTGNLVEWYLLRVAYERNELAPNKPGGEEYQRRMRSSYIGGYVKEPEKGLWESIAYLDFRSSAGSIIVTHNVSPDTLEKECKNYDVAPIVGYRFCKDFKGFIPSILEDLIETRQKVKRKMKATIDPIEKKMLDYRQRALKILANSYYGYQGYPKARWYSKECAESVTAWGRHYIETTIKEAEKFGFKVLYADTDGFFATIPNEKPETIKSKAKKFLKHINEKLPGMLELEYEGFYLRGFFVTKKKYALIDEDGHITTRGLEVVRRDWSEIAKETQAKVLEVILREGSIEKAAGIVKKVVEDLANYRVPVEKLIIHEIITRELKRYKATGPHVAIAKRLQARGIKVKPGTIISYVVLKGSKKISDRVILFDEYDSSRHKYDPDYYIHNQVLPAVLRILEAFGYKEKDLEYQ

SEQ ID NO: 193 - protein, 773 aa, unidentified
  REGION 1..773: note = Description of Unknown: Synthetic polypeptide
MILDTDYITENGKPVIRIFKKEKGEFKIEYDRNFEPYIYALLEDDESIEDIKKITGERHGKKVRIIRVEKVKKKFLGEPIEVWKLVFEHPQDYPAIRDAIRSHPAVREIFEYDIPFAKRYLIDKGLVPMEGGEELKLLAFAIATFYHEGDEFAEGEILMISYADESGAKVITWKKIDLPYVEVVSTEREAIKRFLQVLREKDPDVLLTYNGDNFDFAYIKKRCEKLGLKFTIGRDGSEPKIQRMGDRFAVEVKGRIHLDLAPVVRHTIRLPTYTLEAVYEAVFGKKKEKVYAEEIAEAWKSEEGLKRVAQYSMEDARATYELGREFFPMEVELAKLIGQSVWDVSRSSTGNLVEWYLLRVAYERNELAPNKPGGEEYQRRMRSSYIGGYVKEPEKGLWESIAYLDFRSSAGSIIVTHNVSPDTLEKECKNYDVAPIVGYRFCKDFKGFIPSILEDLIETRQKVKRKMKATIDPIEKKMLDYRQRALKKLANSYYGYQGYPKARWYSKECAESVTAWGRHYIETTIKEAEKFGFKVLYADTDGFFATIPNEKPETIKSKAKKFLKHINEKLPGMLELEYEGFYLRGFFVTKKKYALIDEDGHITTRGLEVVRRDWSEIAKETQAKVLEVILREGSIEKAAGIVKKVVEDLANYRVPVEKLIIHEQITRELKRYKATGPHVAIAKRLQARGIKVKPGTIISYVVLKGSKKISDRVILFDEYDSSRHKYDPDYYIHNQVLPAVLRILEAFGYKEKDLEYQRMKQTGLGAWLKMGKK

SEQ ID NO: 194 - protein, 773 aa, unidentified
  REGION 1..773: note = Description of Unknown: Synthetic polypeptide
MILDTDYITENGKPVIRIFKKEKGEFKIEYDRNFEPYIYALLEDDESIEDIKKITGERHGKKVRIIRVEKVKKKFLGEPIEVWKLVFEHPQDVPAIRDAIRSHPAVREIFEYDIPFAKRYLIDKGLVPMEGGEELKLLAFAIATFYHEGDEFAEGEILMISYADESGAKVITWKKIDLPYVEVVSTEREAIKRFLQVLREKDPDVLLTYNGDNFDFAYIKKRCEKLGLKFTIGRDGSEPKIQRMGDRFAVEVKGRIHLDLAPVVRHTIRLPTYTLEAVYEAVFGKKKEKVYAEEIAEAWKSEEGLKRVAQYSMEDARATYELGREFFPMEVELAKLIGQSVWDVSRSSTGNLVEWYLLRVAYERNELAPNKPGGEEYQRRMRSSYIGGYVKEPEKGLWESIAYLDFRSSAGSIIVTHNVSPDTLEKECKNYDVAPIVGYRFCKDFKGFIPSILEDLIETRQKVKRKMKATIDPIEKKMLDYRQRALKILANSYYGYQGYPKARWYSKENAEDVTAWGRHYIETTIKEAEKFGFKVLYADTDGFFATIPNEKPETIKSKAKKFLKHINEKLPGMLELEYEGFYLRGFFVTKKKYALIDEDGHITTRGLEVVRRDWSEIAKETQAKVLEVILREGSIEKAAGIVKKVVEDLANYRVPVEKLIIHEQITRELKDYKATGPHVAIAKRLQARGIKVKPGTIISYVVLKGSKKISDRVILFDEYDSSRHKYDPDYYIHNQVLPAVLRILEAFGYKEKDLEYQRMKQTGLGAWLKMGKK

SEQ ID NO: 195 - protein, 757 aa, unidentified
  REGION 1..757: note = Description of Unknown: Synthetic polypeptide
MILDTDYITENGKPVIRIFKKEKGEFKIEYDRNFEPYIYALLEDDESIEDIKKITGERHGKKVRIIRVEKVKKKFLGEPIEVWKLVFEHPQDVPAIRDAIRSHPAVREIFEYDIPFAKRYLIDKGLVPMEGGEELKLLAFAIATFYHEGDEFAEGEILMISYADESGAKVITWKKIDLPYVEVVSTEREAIKRFLQVLREKDPDVLLTYNGDNFDFAYIKKRCEKLGLKFTIGRDGSEPKIQRMGDRFAVEVKGRIHLDLAPVVRHTIRLPTYTLEAVYEAVFGKKKEKVYAEEIAEAWKSEEGLKRVAQYSMEDARATYELGREFFPMEVELAKLIGQSVWDVSRSSTGNLVEWYLLRVAYERNELAPNKPGGEEYQRRMRSSYIGGYVKEPEKGLWESIAYLDFRSSAGSIIVTHNVSPDTLEKECKNYDVAPIVGYRFCKDFKGFIPSILEDLIETRQKVKRKMKATIDPIEKKMLDYRQRALKILANSYYGYQGYPKARWYSKECAESVTAWGRHYIETTIKEAEKFGFKVLYADTDGFFATIPNEKPETIKSKAKKFLKHINEKLPGMLELEYEGFYLRGFFVTKKKYALIDEDGHITTRGLEVVRRDWSEIAKETQAKVLEVILREGSIEKAAGIVKKVVEDLANYRVPVEKLIIHEQITRKLKDYKATGPHVAIAKRLQARGIKVSPGTIISYVVLKGSKKISDRVILFDEYDSSRHKYDPDYYIHNQVLPAVLRILEAFGYKEKDLEYQ

SEQ ID NO: 196 - protein, 773 aa, unidentified
  REGION 1..773: note = Description of Unknown: Synthetic polypeptide
MILDTDYITENGKPVIRIFKKEKGEFKIEYDRNFEPYIYALLEDDESIEDIKKITGERHGKKVRIIRVEKVKKKFLGEPIEVWKLVFEHPQDYPAIRDAIRSHPAVREIFEYDIPFAKRYLIDKGLVPMEGGEELKLLAFAIATFYHEGDEFAEGEILMISYADESGAKVITWKKIDLPYVEVVSTEREAIKRFLQVLREKDPDVLLTYNGDNFDFAYIKKRCEKLGLKFTIGRDGSEPKIQRMGDRFAVEVKGRIHLDLAPVVRHTIRLPTYTLEAVYEAVFGKKKEKVYAEEIAEAWKSEEGLKRVAQYSMEDARATYELGREFFPMEVELAKLIGQSVWDVSRSSTGNLVEWYLLRVAYERNELAPNKPGGEEYQRRMRSEYIGGYVKEPEKGLWESIAYLDFRSSAGSIIVTHNVSPDTLEKECKNYDVAPIVGYRFCKDFKGFIPSILEDLIETRQKVKRKMKATIDPIEKKMLDYRQRALKILANSYYGYQGYPKARWYSKECAESVTAWGRHYIETTIKEAEKFGFKVLYADTDGFFATIPNEKPETIKSKAKKFLKHINEKLPGMLELEYEGFYLRGFFVTKKKYALIDEDGHITTRGLEVVRRDWSEIAKETQAKVLEVILREGSIEKAAGIVKKVVEDLANYRVPVEKLIIHEQITRELKRYKATGPHVAIAKRLQARGIKVKPGTIISYVVLKGSKKISDRVILFDEYDSSRHKYDPDYYIHNQVLPAVLRILEAFGYKEKDLEYQRMKQTGLGAWLKMGKK

SEQ ID NO: 197 - protein, 773 aa, unidentified
  REGION 1..773: note = Description of Unknown: Synthetic polypeptide
MILDTDYITENGKPVIRIFKKEKGEFKIEYDRNFEPYIYALLEDDESIEDIKKITGERHGKKVRIIRVEKVKKKFLGEPIEVWKLVFEHPQDYPAIRDAIRSHPAVREIFEYDIPFAKRYLIDKGLVPMEGGEELKLLAFAIATFYHEGDEFAEGEILMISYADESGAKVITWKKIDLPYVEVVSTEREAIKRFLQVLREKDPDVLLTYNGDNFDFAYIKKRCEKLGLKFTIGRDGSEPKIQRMGDRFAVEVKGRIHLDLAPVVRHTIRLPTYTLEAVYEAVFGKKKEKVYAEEIAEAWKSEEGLKRVAQYSMEDARATYELGREFFPMEVELAKLIGQSVWDVSRSSTGNLVEWYLLRVAYERNELAPNKPGGEEYQRRMRSSYIGGYVKEPEKGLWESIAYLDFRSSAGSIIVTHNVSPDTLEKECKNYDVAPIVGYRFCKDFKGFIPSILEDLIETRQKVKRKMKATIDPIEKKMLDYRQRALKILANSYYGYQGYPKARWYSKECAESVTAWGRHYIETTIKEAEKFGFKVLYADTDGFFATIPNEKPETIKSKAKKFLKHINEKLPGMLELEYEGFYLRGFFVTKKKYALIDEDGHITTRGLEVVRRDWSEIAKETQAKVLEVILREGSIEKAAGIVKKVVEDLANYRVPVEKLIIHEQITRELKRYKATGPHVAIAKRLQARGIKVKPGTIISWVVLKGSKKISDRVILFDEYDSSRHKYDPDYYIHNQVLPAVLRILEAFGYKEKDLEYQRMKQTGLGAWLKMGKK

SEQ ID NO: 198 - protein, 773 aa, unidentified
  REGION 1..773: note = Description of Unknown: Synthetic polypeptide
MILDTDYITENGKPVIRIFKKEKGEFKIEYDRNFEPYIYALLEDDESIEDIKKITGERHGKKVRIIRVEKVKKKFLGEPIEVWKLVFEHPQDVPAIRDAIRSHPAVREIFEYDIPFAKRYLIDKGLVPMEGGEELKLLAFNIATFYHEGDEFAEGEILMISYADESGAKVITWKKIDLPYVEVVSTEREAIKRFLQVLREKDPDVLLTYNGDNFDFAYIKKRCEKLGLKFTIGRDGSEPKIQRMGDRFAVEVKGRIHLDLAPVVRHTIRLPTYTLEAVYEAVFGKKKEKVYAEEIAEAWKSEEGLKRVAQYSMEDARATYELGREFFPLEVELAKLIGQSVWDVSRSSTGNLVEWYLLRVAYERNELAPNKPGGEEYQRRMRSSYIGGYVKEPEKGLWESIAYLDFRSSAGSIIVTHNVSPDTLEKECKNYDVAPIVGYRFCKDFKGFIPSILEDLIETRQKVKRKMKATIDPIEKKMLDYRQRALKILANSYYGYQGYPKARWYSKECAESVTAWGRHYIETTIKEAEKFGFKVLYADTDGFFATIPNEKPETIKSKAKKFLKHINEKLPGMLELEYEGFYLRGFFVTKKKYALIDEDGHITTRGLEVVRRDWSEIAKETQAKVLEVILREGSIEKAAGIVKKVVEDLANYRVPVEKLIIHEQITRELKRYKATGKHVAIAKRLQARGIKVKPGTIISYVVLKGSKKISDRVILFDEYDSSRHKYDPDYYIHNQVLPAVLRILEAFGYKEKDLEYQRMKQTGLGAWLKMGKK

SEQ ID NO: 199 - protein, 773 aa, unidentified
  REGION 1..773: note = Description of Unknown: Synthetic polypeptide
MILDTDYITENGKPVIRIFKKEKGEFKIEYDRNFEPYIYALLEDDESIEDIKKITGERHGKKVRIIRVEKVKKKFLGEPIEVWKLVFEHPQDYPAIRDAIRSHPAVREIFEYDIPFAKRYLIDKGLVPMEGGEELKLLAFAIATFYHEGDEFAEGEILMISYADESGAKVITWKKIDLPYVEVVSTEREAIKRFLQVLREKDPDVLLTYNGDNFDFAYIKKRCEKLGLKFTIGRDGSEPKIQRMGDRFAVEVKGRIHLDLAPVVRHTIRLPTYTLEAVYEAVFGKKKEKVYAEEIAEAWKSEEGLKRVAQYSMEDARATYELGREFFPMEVELAKLIGQSVWDVSRSSTGNLVEWYLLRVAYERNELAPNKPGGEEYQRRMRSSYIGGYVKEPEKGLWESIAYLDFRSSAGSIIVTHNVSPDTLEKECKNYDVAPIVGYRFCKDFKGFIPSILEDLIETRQKVKRKMKATIDPIEKKMLDYRQRALKILANSYYGYQGYPKARWYSKECAESVTAWGRHYIETTIKEAEKFGFKVLYADTDGFFATIPNEKPETIKSVAKKFLKHINEKLPGMLELEYEGFYLRGFFVTKKKYALIDEDGHITTRGLEVVRRDWSEIAKETQAKVLEVILREGSIEKAAGIVKKVVEDLANYRVPVEKLIIHEQITRELKRYKATGPHVAIAKRLQARGIKVKPGTIISYVVLKGSKKISDRVILFDEYDSSRHKYDPDYYIHNQVLPAVLRILEAFGYKEKDLEYQRMKQTGLGAWLKMGKK

SEQ ID NO: 200 - protein, 773 aa, unidentified
  REGION 1..773: note = Description of Unknown: Synthetic polypeptide
MILDTDYITENGKPVIRIFKKEKGEFKIEYDRNFEPYIYALLEDDESIEDIKKITGERHGKKVRIIRVEKVKKKFLGEPIEVWKLVFEHPQDYPAIRDAIRSHPAVREIFEYDIPFAKRYLIDKGLVPMEGGEELKLLAFAIATFYHEGDEFAEGEILMISYADESGAKVITWKKIDLPYVEVVSTEREAIKRFLQVLREKDPDVLLTYNGDNFDFAYIKKRCEKLGLKFTIGRDGSEPKIQRMGDRFAVEVKGRIHLDLAPVVRHTIRLPTYTLEAVYEAVFGKKKEKVYAEEIAEAWKSEEGLKRVAQYSMEDARATYELGREFFPMEVELAKLIGQSVWDVSRSSTGNLVEWYLLRVAYERNELAPNKPGGEEYQRRMRSSYIGGYVKEPEKGLWESIAYLDFRSSAGSIIVTHNVSPDTLEKECKNYDVAPIVGYRFCKDFKGFIPSILEDLIETRQKVKRKMKATIDPIEKKMLDYRQRALKILANSYYGYQGYPKARWYSKECAESVTAWGRHYIETTIKEAEKFGFKVLYADTDGFFATIPNEKPETIKSKAKKFLKHINEKLPGMLELEYEGFYLRGFFVTKKKYALIDEDGHITTRGLEVVRRDWSEIAKETQAKVLEVILREGSIEKAAGIVKKVVEDLANYRVPVEKLIIHEQITRELKRYKATGPHVAIAKRLQARGIRVKPGTIISYVVLKGSKKISDRVILFDEYDSSRHKYDPDYYIHNQVLPAVLRILEAFGYKEKDLEYQRMKQTGLGAWLKMGKK

SEQ ID NO: 201 - protein, 773 aa, unidentified
  REGION 1..773: note = Description of Unknown: Synthetic polypeptide
MILDTDYITENGKPVIRIFKKEKGEFKIEYDRNFEPYIYALLEDDESIEDIKKITGERHGKKVRIIRVEKVKKKFLGEPIEVWKLVFEHPQDYPAIRDAIRSHPAVREIFEYDIPFAKRYLIDKGLVPMEGGEELKLLAFAIATFYHEGDEFAEGEILMISYADESGAKVITWKKIDLPYVEVVSTEREAIKRFLQVLREKDPDVLLTYNGDNFDFAYIKKRCEKLGLKFTIGRDGSEPKIQRMGDRFAVEVKGRIHLDLAPVVRHTIRLPTYTLEAVYEAVFGKKKEKVYAEEIAEAWKSEEGLKRVAQYSMEDARATYELGREFFPMEVELAKLIGQSVWDVSRSSTGNLVEWYLLRVAYERNELAPNKPGGEEYQRRMRSSYIGGYVKEPEKGLWESIAYLDFRSSAGSIIVTHNVSPDTLEKECKNYDVAPIVGYRFCKDFKGFIPSILEDLIETRQKVKRKMKATIDPIEKKMLDYRQRALKILANSYYGYQGYPKARWYSKECAESVTAWGRHYIETTIKEAEKFGFKVLYADTDGFFATIPNEKPETIKSKAKKFLKHINEKLPGMLELEYEGFYLRGFFVTKKKYALIDEDGHITTRGLEVVRRDWSEIAKETQAKVLEVILREGSIEKAAGIVKKVVEDLANYRVPVEKLIIHRQITRELKRYKATGPHVAIAKRLQARGIKVKPGTIISYVVLKGSKKISDRVILFDEYDSSRHKYDPDYYIHNQVLPAVLRILEAFGYKEKDLEYQRMKQTGLGAWLKMGKK

SEQ ID NO: 202 - protein, 773 aa, unidentified
  REGION 1..773: note = Description of Unknown: Synthetic polypeptide
MILDTDYITENGKPVIRIFKKEKGEFKIEYDRNFEPYIYALLEDDESIEDIKKITGERHGKKVRIIRVEKVKKKFLGEPIEVWKLVFEHPQDYPAIRDAIRSHPAVREIFEYDIPFAKRYLIDKGLVPMEGGEELKLLAFAIATFYHEGDEFAEGEILMISYADESGAKVITWKKIDLPYVEVVSTEREAIKRFLQVLREKDPDVLLTYNGDNFDFAYIKKRCEKLGLKFTIGRDGSEPKIQRMGDRFAVEVKGRIHLDLAPVVRHTIRLPTYTLEAVYEAVFGKKKEKVYAEEIAEAWKSEEGLKRVAQYSMEDARATYELGREFFPMEVELAKLIGQSVWDVSRSSTGNLVEWYLLRVAYERNELAPNKPGGEEYQRRMRSSYIGGYVKEPEKGLWESIAYLDFRSSAGSIIVTHNVSPDTLEKECKNYDVAPIVGYRFCKDFKGFIPSILEDLIETRQKVKRKMKATIDPIEKKMLDYRQRALKILANSYYGYQGYPKARWYSKECAESVTAWGRHYIETTIKEAEKFGFKVLYADTDGFFATIPNEKPETIKSKAKKFLKHINEKLPGMLELEYEGFYLRIFFVTKKKYALIDEDGHITTRGLEVVRRDWSEIAKETQAKVLEVILREGSIEKAAGIVKKVVEDLANYRVPVEKLIIHEQITRELKRYKATGPHVAIAKRLQARGIKVKPGTIISYVVLKGSKKISDRVILFDEYDSSRHKYDPDYYIHNQVLPAVLRILEAFGYKEKDLEYQRMKQTGLGAWLKMGKK

SEQ ID NO: 203 - protein, 773 aa, unidentified
  REGION 1..773: note = Description of Unknown: Synthetic polypeptide
MILDTDYITENGKPVIRIFKKEKGEFKIEYDRNFEPYIYALLEDDESIEDIKKITGERHGKKVRIIRVEKVKKKFLGEPIEVWKLVFEHPQDYPAIRDAIRSHPAVREIFEYDIPFAKRYLIDKGLVPMEGGEELKLLAFAIATFYHEGDEFAEGEILMISYADESGAKVITWKKIDLPYVEVVSTEREAIKRFLQVLREKDPDVLLTYNGDNFDFAYIKKRCEKLGLKFTIGRDGSEPKIQRMGDRFAVEVKGRIHLDLAPVVRHTIRLPTYTLEAVYEAVFGKKKEKVYAEEIAEAWKSEEGLKRVAQYSMEDARATYELGREFFPMEVELAKLIGQSVWDVSRSSTGNLVEWYLLRVAYERNELAPNKPGGEEYQRRMRSSYIGGDVKEPEKGLWESIAYLDFRSSAGSIIVTHNVSPDTLEKECKNYDVAPIVGYRFCKDFKGFIPSILEDLIETRQKVKRKMKATIDPIEKKMLDYRQRALKILANSYYGYQGYPKARWYSKECAESVTAWGRHYIETTIKEAEKFGFKVLYADTDGFFATIPNEKPETIKSKAKKFLKHINEKLPGMLELEYEGFYLRGFFVTKKKYALIDEDGHITTRGLEVVRRDWSEIAKETQAKVLEVILREGSIEKAAGIVKKVVEDLANYRVPVEKLIIHEQITRELKRYKATGPHVAIAKRLQARGIKVKPGTIISYVVLKGSKKISDRVILFDEYDSSRHKYDPDYYIHNQVLPAVLRILEAFGYKEKDLEYQRMKQTGLGAWLKMGKK

SEQ ID NO: 204 - protein, 773 aa, unidentified
  REGION 1..773: note = Description of Unknown: Synthetic polypeptide
MILDTDYITENGKPVIRIFKKEKGEFKIEYDRNFEPYIYALLEDDESIEDIKKITGERHGKKVRIIRVEKVKKKFLGEPIEVWKLVFEHPQDYPAIRDAIRSHPAVREIFEYDIPFAKRYLIDKGLVPMEGGEELKLLAFAIATFYHEGDEFAEGEILMISYADESGAKVITWKKIDLPYVEVVSTEREAIKRFLQVLREKDPDVLLTYNGDNFDFAYIKKRCEKLGLKFTIGRDGSEPKIQRMGDRFAVEVKGRIHLDLAPVVRHTIRLPTYTLEAVYEAVFGKKKEKVYAEEIAEAWKSEEGLKRVAQYSMEDARATYELGREFFPMEVELAKLIGQSVWDVSRSSTGNLVEWYLLRVAYERNELAPNKPGGEEYQRRMRSSYIGGYVKEPEKGLWESIAYLDFRSSAGSIIVTHNVSPDTLEKECKNYDVAPIVGYRFCKDFKGFIPSILEDLIETRQKVKRKMKATIDPIEKKMLDYRQTALKILANSYYGYQGYPKARWYSKECAESVTAWGRHYIETTIKEAEKFGFKVLYADTDGFFATIPNEKPETIKSKAKKFLKHINEKLPGMLELEYEGFYLRGFFVTKKKYALIDEDGHITTRGLEVVRRDWSEIAKETQAKVLEVILREGSIEKAAGIVKKVVEDLANYRVPVEKLIIHEQITRELKRYKATGPHVAIAKRLQARGIKVKPGTIISYVVLKGSKKISDRVILFDEYDSSRHKYDPDYYIHNQVLPAVLRILEAFGYKEKDLEYQRMKQTGLGAWLKMGKK

SEQ ID NO: 205 - protein, 773 aa, unidentified
  REGION 1..773: note = Description of Unknown: Synthetic polypeptide
MILDTDYITENGKPVIRIFKKEKGEFKIEYDRNFEPYIYALLEDDESIEDIKKITGERHGKKVRIIRVEKVKKKFLGEPIEVWKLVFEHPQDYPAIRDAIRSHPAVREIFEYDIPFAKRYLIDKGLVPMEGGEELKLLAFAIATFYHEGDEFAEGEILMISYADESGAKVITWKKIDLPYVEVVSTEREAIKRFLQVLREKDPDVLLTYNGDNFDFAYIKKRCEKLGLKFTIGRDGSEPKIQRMGDRFAVEVKGRIHLDLAPVVRHTIRLPTYTLEAVYEAVFGKKKEKVYAEEIAEAWKSEEGLKRVAQYSMEDARATYELGREFFPMEVELAKLIGQSVWDVSRSSTGNLVEWYLLRVAYERNELAPNKPGGEEYQRRMRSSYIGGYVKEPEKGLWESIAYLDFRSSAGSIIVTHNVSPDTLEKECKNYDVAPIVGYRFCKDFKGFIPSILEDLIETRQKVKRKMKATIDPIEKKMLDYRQRALKELANSYYGYQGYPKARWYSKECAESVTAWGRHYIETTIKEAEKFGFKVLYADTDGFFATIPNEKPETIKSKAKKFLKHINEKLPGMLELEYEGFYLRGFFVTKKKYALIDEDGHITTRGLEVVRRDWSEIAKETQAKVLEVILREGSIEKAAGIVKKVVEDLANYRVPVEKLIIHEQITRELKRYKATGPHVAIAKRLQARGIKVKPGTIISYVVLKGSKKISDRVILFDEYDSSRHKYDPDYYIHNQVLPAVLRILEAFGYKEKDLEYQRMKQTGLGAWLKMGKK

SEQ ID NO: 206 - protein, 773 aa, unidentified
  REGION 1..773: note = Description of Unknown: Synthetic polypeptide
MILDTDYITENGKPVIRIFKKEKGEFKIEYDRNFEPYIYALLEDDESIEDIKKITGERHGKKVRIIRVEKVKKKFLGEPIEVWKLVFEHPQDYPAIRDAIRSHPAVREIFEYDIPFAKRYLIDKGLVPMEGGEELKLLAFAIATFYHEGDEFAEGEILMISYADESGAKVITWKKIDLPYVEVVSTEREAIKRFLQVLREKDPDVLLTYNGDNFDFAYIKKRCEKLGLKFTIGRDGSEPKIQRMGDRFAVEVKGRIHLDLAPVVRHTIRLPTYTLEAVYEAVFGKKKEKVYAEEIAEAWKSEEGLKRVAQYSMEDARATYELGREFFPMEVELAKLIGQSVWDVSRSSTGNLVEWYLLRVAYERNELAPNKPGGEEYQRRMRSSYIGGYVKEPEKGLWESIAYLDFRSSAGSIIVTHNVSPDTLEKECKNYDVAPIVGYRFCKDFKGFIPSILEDLIETRQKVKRKMKATIDPIEKKMLDYRQRALKILANSYYGYQGYPKARWYSKECAESVTAWGRHYIETTIKEAEKFGFKVLYADTDGFFATIPNEKPETIKSKAKKFLKHINEKLPGMLELEYEGFYLRTFFVTKKKYALIDEDGHITTRGLEVVRRDWSEIAKETQAKVLEVILREGSIEKAAGIVKKVVEDLANYRVPVEKLIIHEQITRELKRYKATGPHVAIAKRLQARGIKVKPGTIISYVVLKGSKKISDRVILFDEYDSSRHKYDPDYYIHNQVLPAVLRILEAFGYKEKDLEYQRMKQTGLGAWLKMGKK

SEQ ID NO: 207 - protein, 773 aa, unidentified
  REGION 1..773: note = Description of Unknown: Synthetic polypeptide
MILDTDYITENGKPVIRIFKKEKGEFKIEYDRNFEPYIYALLEDDESIEDIKKITGERHGKKVRIIRVEKVKKKFLGEPIEVWKLVFEHPQDVPAIRDAIRSHPAVREIFEYDIPFAKRYLIDKGLVPMEGGEELKLLAFNIATFYHEGDEFAEGEILMISYADESGAKVITWKKIDLPYVEVVSTEREAIKRFLQVLREKDPDVLLTYNGDNFDFAYIKKRCEKLGLKFTIGRDGSEPKTQRMGDRFAVEVKGRIHLDLAPVVRHTIRLPTYTLEAVYEAVFGKKKEKVYAEEIAEAWKSEEGLKRVAQYSMEDARATYELGREFFPLEVELAKLIGQSVWDVSRSSTGNLVEWYLLRVAYERNELAPNKPGGEEYQRRMRSSYIGGYVKEPEKGLWESIAYLDFRSSAGSIIVTHNVSPDTLEKECKNYDVAPIVGYRFCKDFKGFIPSILEDLIETRQKVKRKMKATIDPIEKKMLDYRQRALKILANSYYGYQGYPKARWYSKECAESVTAWGRHYIETTIKEAEKFGFKVLYADTDGFFATIPNEKPETIKSKAKKFLKHINEKLPGMLELEYEGFYLRGFFVTKKKYALIDEDGHITTRGLEVVRRDWSEIAKETQAKVLEVILREGSIEKAAGIVKKVVEDLANYRVPVEKLIIHEQITRELKRYKATGPHVAIAKRLQARGIKVKPGTIISYVVLKGSKKISDRVILFDEYDSSRHKYDPDYYIHNQVLPAVLRILEAFGYKEKDLEYQRMKQTGLGAWLKMGKK

SEQ ID NO: 208 - protein, 773 aa, unidentified
  REGION 1..773: note = Description of Unknown: Synthetic polypeptide
MILDTDYITENGKPVIRIFKKEKGEFKIEYDRNFEPYIYALLEDDESIEDIKKITGERHGKKVRIIRVEKVKKKFLGEPIEVWKLVFEHPQDVPAIRDAIRSHPAVREIFEYDIPFAKRYLIDKGLVPMEGGEELKLLAFAIATFYHEGDEFAEGEILMISYADESGAKVITWKKIDLPYVEVVSTEREAIKRFLQVLREKDPDVLLTYNGDNFDFAYIKKRCEKLGLKFTIGRDGSEPKIQRMGDRFAVEVKGRIHLDLAPVVRHTIRLPTYTLEAVYEAVFGKKKEKVYAEEIAEAWKSEEGLKRVAQYSMEDARATYELGREFFPMEVELAKLIGQSVWDVSRSSTGNLVEWYLLRVAYERNELAPNKPGGEEYQRRMRSSYIGGYVKEPEKGLWESIAYLDFRSSAGSIIVTHNVSPDTLEKECKNYDVAPIVGYRFCKDFKGFIPSILEDLIETRQKVKRKMKATIDPIEKKMLDYRQRALKILANSYYGYQGYPKARWYSKECAESVTAWGRHYIETTIKEAEKFGFKVLYADTDGFFATIPNEKPETIKSKAKKFLKHINEKLPGMLELEYEGFYLRGFFVTKKKYALIDEDGHITTRGLEVDRRDWSEIAKETQAKVLEVILREGSIEKAAGIVKKVVEDLANYRVPVEKLIIHEQITRELKRYKATGPHVAIAKRLQARGIKVKPGTIISYVVLKGSKKISDRVILFDEYDSSRHKYDPDYYIHNQVLPAVLRILEAFGYKEKDLEYQRMKQTGLGAWLKMGKK

SEQ ID NO: 209 - protein, 773 aa, unidentified
  REGION 1..773: note = Description of Unknown: Synthetic polypeptide
MILDTDYITENGKPVIRIFKKEKGEFKIEYDRNFEPYIYALLEDDESIEDIKKITGERHGKKVRIIRVEKVKKKFLGEPIEVWKLVFEHPQDVPAIRDAIRSHPAVREIFEYDIPFAKRYLIDKGLVPMEGGEELKLLAFNIATFYHEGDEFAEGEILMISYADESGAKVITWKKIDLPYVEVVSTEREAIKRFLQVLREKDPDVLLTYNGDNFDFAYIKKRCEKLGLKFTIGRDGSEPKIQRMGDRFAVEVKGRIHLDLAPVVRHTIRLPTYTLEAVYEAVFGKKKEKVYAEEIAEAWKSEEGLARVAQYSMEDARATYELGREFFPLEVELAKLIGQSVWDVSRSSTGNLVEWYLLRVAYERNELAPNQPGGEEYQRRMRSSYIGGYVKEPEKGLWESIAYLDFRSSAGSIIVTHNVSPDTLEKECQNYDVAPIVGYRFCKDFKGFIPSILEDLIETRQKVKRKMKATIDPIEKKMLDYRQRALKILANSYYGYQGYPKARWYSKECAESVTAWGRHYIETTIKEAEKFGFKVLYADTDGFFATIPNEKPETIKSKAKKFLKHINEKLPGMLELEYEGFYLRGFFVTKKKYALIDEDGHITTRGLEVVRRDWSEIAKETQAKVLEVILREGSIEKAAGIVKKVVEDLANYRVPVEKLIIHEQITRELKRYKATGPHVAIAKRLQARGIKVKPGTIISYVVLKGSKKISDRVILFDEYDSSRHKYDPDYYIHNQVLPAVLRILEAFGYKEKDLEYQRMKQTGLGAWLKMGKK

SEQ ID NO: 210 - protein, 773 aa, unidentified
  REGION 1..773: note = Description of Unknown: Synthetic polypeptide
MILDTDYITENGKPVIRIFKKEKGEFKIEYDRNFEPYIYALLEDDESIEDIKKITGERHGKKVRIIRVEKVKKKFLGEPIEVWKLVFEHPQDVPAIRDAIRSHPAVREIFEYDIPFAKRYLIDKGLVPMEGGEELKLLAFKIATFYHEGDEFAEGEILMISYADESGAKVITWKKIDLPYVEVVSTEREAIKRFLQVLREKDPDVLLTYNGDNFDFAYIKKRCEKLGLKFTIGRDGSEPKIQRMGDRFAVEVKGRIHLDLAPVVRHTIRLPTYTLEAVYEAVFGKKKEKVYAEEIAEAWKSEEGLKRVAQYSMEDARATYELGREFFPLEVELAKLIGQSVWDVSRSSTGNLVEWYLLRVAYERNELAPNKPGGEEYQRRMRSSYIGGYVKEPEKGLWESIAYLDFRSSAGSIIVTHNVSPDTLEKECKNYDVAPIVGYRFCKDFKGFIPSILEDLIETRQKVKRKMKATIDPIEKKMLDYRQRALKILANSYYGYMGYPKARWYSKECAESVTAWGRHYIETTIKEAEKFGFKVLYADTDGFFATIPNEKPETIKSKAKKFLKHINEKLPGMLELEYEGFYLRGFFVTKKKYALIDEDGHITTRGLEVVRRDWSEIAKETQAKVLEVILREGSIEKAAGIVKKVVEDLANYRVPVEKLIIHEQITRELKRYKATGPHVAIAKRLQARGIKVKPGTIISYVVLKGSKKISDRVILFDEYDSSRHKYDPDYYIHNQVLPAVLRILEAFGYKEKDLEYQRMKQTGLGAWLKMGKK

SEQ ID NO: 211 - protein, 773 aa, unidentified
  REGION 1..773: note = Description of Unknown: Synthetic polypeptide
MILDTDYITENGKPVIRIFKKEKGEFKIEYDRNFEPYIYALLEDDESIEDIKKITGERHGKKVRIIRVEKVKKKFLGEPIEVWKLVFEHPQDVPAIRDAIRSHPAVREIFEYDIPFAKRYLIDKGLVPMEGGEELKLLAFNIATFYHEGDEFAEGEILMISYADESGAKVITWKKIDLPYVEVVSTEREAIKRFLQVLREKDPDVLLTYNGDNFDFAYIKKRCEKLGLKFTIGRDGSEPKIQRMGDRFAVEVKGRIHLDLAPVVRHTIRLPTYTLEAVYEAVFGKKKEKVYAEEIAEAWKSEEGLKRVAQYSMEDARATYELGREFFPLEVELAKLIGQSVWDVSRSSTGNLVEWYLLRVAYERNELAPNKPGGEEYQRRMRSSYIGGYVKEPEKGLWESIAYLDFRSSAGSIIVTHNVSPDTLEKECKNYDVAPIVGYRFCKDFKGFIPSILEDLIETRQKVKRKMKATIDPIEKKMLDYRQRALKILANSYYGYQGYPKARWYSKECAESVTAWGRHYIETTIKEAEKFGFKVLYADTDGFFATIPNEKPETIKSKAKKFLKHINEKLPGMLELEYEGFYLRGFFVTKKKYALIDEDGHITTRRLEVVRRDWSEIAKETQAKVLEVILREGSIEKAAGIVKKVVEDLANYRVPVEKLIIHEQITRELKRYKATGPHVAIAKRLQARGIKVKPGTIISYVVLKGSKKISDRVILFDEYDSSRHKYDPDYYIHNQVLPAVLRILEAFGYKEKDLEYQRMKQTGLGAWLKMGKK

SEQ ID NO: 212 - protein, 773 aa, unidentified
  REGION 1..773: note = Description of Unknown: Synthetic polypeptide
MILDTDYITENGKPVIRIFKKEKGEFKIEYDRNFEPYIYALLEDDESIEDIKKITGERHGKKVRIIRVEKVKKKFLGEPIEVWKLVFEHPQDYPAIRDAIRSHPAVREIFEYDIPFAKRYLIDKGLVPMEGGEELKLLAFAIATFYHEGDEFAEGEILMISYADESGAKVITWKKIDLPYVEVVSTEREAIKRFLQVLREKDPDVLLTYNGDNFDFAYIKKRCEKLGLKFTIGRDGSEPAIQRMGDRFAVEVKGRIHLDLAPVVRHTIRLPTYTLEAVYEAVFGKKKEKVYAEEIAEAWKSEEGLKRVAQYSMEDARATYELGREFFPMEVELAKLIGQSVWDVSRSSTGNLVEWYLLRVAYERNELAPNKPGGEEYQRRMRSSYIGGYVKEPEKGLWESIAYLDFRSSAGSIIVTHNVSPDTLEKECKNYDVAPIVGYRFCKDFKGFIPSILEDLIETRQKVKRKMKATIDPIEKKMLDYRQRALKILANSYYGYQGYPKARWYSKECAESVTAWGRHYIETTIKEAEKFGFKVLYADTDGFFATIPNEKPETIKSKAKKFLKHINEKLPGMLELEYEGFYLRGFFVTKKKYALIDEDGHITTRGLEVVRRDWSEIAKETQAKVLEVILREGSIEKAAGIVKKVVEDLANYRVPVEKLIIHEQITRELKRYKATGPHVAIAKRLQARGIKVKPGTIISYVVLKGSKKISDRVILFDEYDSSRHKYDPDYYIHNQVLPAVLRILEAFGYKEKDLEYQRMKQTGLGAWLKMGKK

SEQ ID NO: 213 - protein, 773 aa, unidentified
  REGION 1..773: note = Description of Unknown: Synthetic polypeptide
MILDTDYITENGKPVIRIFKKEKGEFKIEYDRNFEPYIYALLEDDESIEDIKKITGERHGKKVRIIRVEKVKKKFLGEPIEVWKLVFEHPQDYPAIRDAIRSHPAVREIFEYDIPFAKRYLIDKGLVPMEGGEELKLLAFAIATFYHEGDEFAEGEILMISYADESGAKVITWKKIDLPYVEVVSTEREAIKRFLQVLREKDPDVLLTYNGDNFDFAYIKKRCEKLGLKFTIGRDGSEPKIQRMGDRFAVEVKGRIHLDLAPVVRHTIRLPTYTLEAVYEAVFGKKKEKVYAEEIAEAWKSEEGLKRVAQYSMEDARATYELGREFFPMEVELAKLIGQSVWDVSRSSSGNLVEWYLLRVAYERNELAPNKPGGEEYQRRMRSSYIGGYVKEPEKGLWESIAYLDFRSSAGSIIVTHNVSPDTLEKECKNYDVAPIVGYRFCKDFKGFIPSILEDLIETRQKVKRKMKATIDPIEKKMLDYRQRALKILANSYYGYQGYPKARWYSKECAESVTAWGRHYIETTIKEAEKFGFKVLYADTDGFFATIPNEKPETIKSKAKKFLKHINEKLPGMLELEYEGFYLRGFFVTKKKYALIDEDGHITTRGLEVVRRDWSEIAKETQAKVLEVILREGSIEKAAGIVKKVVEDLANYRVPVEKLIIHEQITRELKRYKATGPHVAIAKRLQARGIKVKPGTIISYVVLKGSKKISDRVILFDEYDSSRHKYDPDYYIHNQVLPAVLRILEAFGYKEKDLEYQRMKQTGLGAWLKMGKK

SEQ ID NO: 214 - protein, 773 aa, unidentified
  REGION 1..773: note = Description of Unknown: Synthetic polypeptide
MILDTDYITENGKPVIRIFKKEKGEFKIEYDRNFEPYIYALLEDDESIEDIKKITGERHGKKVRIIRVEKVKKKFLGEPIEVWKLVFEHPQDYPAIRDAIRSHPAVREIFEYDIPFAKRYLIDKGLVPMEGGEELKLLAFAIATFYHEGDEFAEGEILMISYADESGAKVITWKKIDLPYVEVVSTEREAIKRFLQVLREKDPDVLLTYNGDNFDFAYIKKRCEKLGLKFTIGRDGSEPKIQRMGDRFAVEVKGRIHLDLAPVVRHTIRLPTYTLEAVYEAVFGKKKEKVYAEEIAEAWKSEEGLKRVAQYSMEDARATYELGREFFPMEVELAKLIGQSVWDVSRSSTGNLVEWYLLRVAYERNELAPNKPGGEEYQRRMRSSYIGGYVKEPEKGLWESIAYLDFRSSAGSIIVTHNVSPDTLEKECKNYDVAPIVGYRFCKDFKGFIPSILEDLIETRQKVKRKMKATIDPIEKKMLDYRQRALKILANSYYGYQGYPKARWYSKECAESVTAWGRHYIETTIKEAEKFGFKVLYADTDGFFATIPNEKPETIKSKAKKFLKHINEKLPGKLELEYEGFYLRGFFVTKKKYALIDEDGHITTRGLEVVRRDWSEIAKETQAKVLEVILREGSIEKAAGIVKKVVEDLANYRVPVEKLIIHEQITRELKRYKATGPHVAIAKRLQARGIKVKPGTIISYVVLKGSKKISDRVILFDEYDSSRHKYDPDYYIHNQVLPAVLRILEAFGYKEKDLEYQRMKQTGLGAWLKMGKK

SEQ ID NO: 215 - protein, 773 aa, unidentified
  REGION 1..773: note = Description of Unknown: Synthetic polypeptide
MILDTDYITENGKPVIRIFKKEKGEFKIEYDRNFEPYIYALLEDDESIEDIKKITGERHGKKVRIIRVEKVKKKFLGEPIEVWKLVFEHPQDVPAIRDAIRSHPAVREIFEYDIPFAKRYLIDKGLVPMEGGEELKLLAFNIATFYHEGDEFAEGEILMISYADESGAKVITWKKIDLPYVEVVSTEREAIKRFLQVLREKDPDVLLTYNGDNFDFAYIKKRCEKLGLKFTIGRDGSEPKPQRMGDRFAVEVKGRIHLDLAPVVRHTIRLPTYTLEAVYEAVFGKKKEKVYAEEIAEAWKSEEGLKRVAQYSMEDARATYELGREFFPLEVELAKLIGQSVWDVSRSSTGNLVEWYLLRVAYERNELAPNKPGGEEYQRRMRSSYIGGYVKEPEKGLWESIAYLDFRSSAGSIIVTHNVSPDTLEKECKNYDVAPIVGYRFCKDFKGFIPSILEDLIETRQKVKRKMKATIDPIEKKMLDYRQRALKILANSYYGYQGYPKARWYSKECAESVTAWGRHYIETTIKEAEKFGFKVLYADTDGFFATIPNEKPETIKSKAKKFLKHINEKLPGMLELEYEGFYLRGFFVTKKKYALIDEDGHITTRGLEVVRRDWSEIAKETQAKVLEVILREGSIEKAAGIVKKVVEDLANYRVPVEKLIIHEQITRELKRYKATGPHVAIAKRLQARGIKVKPGTIISYVVLKGSKKISDRVILFDEYDSSRHKYDPDYYIHNQVLPAVLRILEAFGYKEKDLEYQRMKQTGLGAWLKMGKK

SEQ ID NO: 216 - protein, 773 aa, unidentified; identical to SEQ ID NO: 75
  REGION 1..773: note = Description of Unknown: Synthetic polypeptide

SEQ ID NO: 217 - protein, 773 aa, unidentified
  REGION 1..773: note = Description of Unknown: Synthetic polypeptide
MILDTDYITENGKPVIRIFKKEKGEFKIEYDRNFEPYIYALLEDDESIEDIKKITGERHGKKVRIIRVEKVKKKFLGEPIEVWKLVFEHPQDYPAIRDAIRSHPAVREIFEYDIPFAKRYLIDKGLVPMEGGEELKLLAFAIATFYHEGDEFAEGEILMISYADESGAKVITWKKIDLPYVEVVSTEREAIKRFLQVLREKDPDVLLTYNGDNFDFAYIKKRCEKLGLKFTIGRDGSEPKIQRMGDRFAVEVKGRIHLDLAPVVRHTIRLPTYTLEAVYEAVFGKKKEKVYAEEIAEAWKSEEGLKRVAQYSMEDARATYELGREFFPMEVELAKLIGQSVWDVSRSSTGNLVEWYLLRVAYERNELAPNKPGGEEYQRRMRSSYDGGYVKEPEKGLWESIAYLDFRSSAGSIIVTHNVSPDTLEKECKNYDVAPIVGYRFCKDFKGFIPSILEDLIETRQKVKRKMKATIDPIEKKMLDYRQRALKILANSYYGYQGYPKARWYSKECAESVTAWGRHYIETTIKEAEKFGFKVLYADTDGFFATIPNEKPETIKSKAKKFLKHINEKLPGMLELEYEGFYLRGFFVTKKKYALIDEDGHITTRGLEVVRRDWSEIAKETQAKVLEVILREGSIEKAAGIVKKVVEDLANYRVPVEKLIIHEQITRELKRYKATGPHVAIAKRLQARGIKVKPGTIISYVVLKGSKKISDRVILFDEYDSSRHKYDPDYYIHNQVLPAVLRILEAFGYKEKDLEYQRMKQTGLGAWLKMGKK

SEQ ID NO: 218 - protein, 773 aa, unidentified
  REGION 1..773: note = Description of Unknown: Synthetic polypeptide
MILDTDYITENGKPVIRIFKKEKGEFKIEYDRNFEPYIYALLEDDESIEDIKKITGERHGKKVRIIRVEKVKKKFLGEPIEVWKLVFEHPQDVPAIRDAIRSHPAVREIFEYDIPFAKRYLIDKGLVPMEGGEELKLLAFAIATFYHEGDEFAEGEILMISYADESGAKVITWKKIDLPYVEVVSTEREAIKRFLQVLREKDPDVLLTYNGDNFDFAYIKKRCEKLGLKFTIGRDGSEPKIQRMGDRFAVEVKGRIHLDLAPVVRHTIRLPTYTLEAVYEAVFGKKKEKVYAEEIAEAWKSEEGLKRVAQYSMEDARATYELGREFFPMEVELAKLIGQSVWDVSRSSTGNLVEWYLLRVAYERNELAPNKPGGEEYQRRMRSSYIGGYVKEPEKGLWESIAYLDFRSSAGSIIVTHNVSPDTLEKECKNYDVAPIVGYRFCKDFKGFIPSILEDLIETRQKVKRKMKATIDPIEKKMLDYRQRALKILANSYYGYQGYPKARWYSKEDAEDVTAWGRHYIETTIKEAEKFGFKVLYADTDGFFATIPNEKPETIKSKAKKFLKHINEKLPGMLELEYEGFYLRGFFVTKKKYALIDEDGHITTRGLEVVRRDWSEIAKETQAKVLEVILREGSIEKAAGIVKKVVEDLANYRVPVEKLIIHEQITRELKDYKATGPHVAIAKRLQARGIKVKPGTIISYVVLKGSKKISDRVILFDEYDSSRHKYDPDYYIHNQVLPAVLRILEAFGYKEKDLEYQRMKQTGLGAWLKMGKK

SEQ ID NO: 219 - protein, 773 aa, unidentified
  REGION 1..773: note = Description of Unknown: Synthetic polypeptide
MILDTDQITENGKPVIRIFKKEKGEFKIEYDRNFEPYIYALLEDDESIEDIKKITGERHGKKVRIIRVEKVKKKFLGEPIEVWKLVFEHPQDYPAIRDAIRSHPAVREIFEYDIPFAKRYLIDKGLVPMEGGEELKLLAFAIATFYHEGDEFAEGEILMISYADESGAKVITWKKIDLPYVEVVSTEREAIKRFLQVLREKDPDVLLTYNGDNFDFAYIKKRCEKLGLKFTIGRDGSEPKIQRMGDRFAVEVKGRIHLDLAPVVRHTIRLPTYTLEAVYEAVFGKKKEKVYAEEIAEAWKSEEGLKRVAQYSMEDARATYELGREFFPMEVELAKLIGQSVWDVSRSSTGNLVEWYLLRVAYERNELAPNKPGGEEYQRRMRSSYIGGYVKEPEKGLWESIAYLDFRSSAGSIIVTHNVSPDTLEKECKNYDVAPIVGYRFCKDFKGFIPSILEDLIETRQKVKRKMKATIDPIEKKMLDYRQRALKILANSYYGYQGYPKARWYSKECAESVTAWGRHYIETTIKEAEKFGFKVLYADTDGFFATIPNEKPETIKSKAKKFLKHINEKLPGMLELEYEGFYLRGFFVTKKKYALIDEDGHITTRGLEVVRRDWSEIAKETQAKVLEVILREGSIEKAAGIVKKVVEDLANYRVPVEKLIIHEQITRELKRYKATGPHVAIAKRLQARGIKVKPGTIISYVVLKGSKKISDRVILFDEYDSSRHKYDPDYYIHNQVLPAVLRILEAFGYKEKDLEYQRMKQTGLGAWLKMGKK

SEQ ID NO: 220 - protein, 773 aa, unidentified
  REGION 1..773: note = Description of Unknown: Synthetic polypeptide
MILDTDYITENGKPVIRIFKKEKGEFKIEYDRNFEPYIYALLEDDESIEDIKKITGERHGKKVRIIRVEKVKKKFLGEPIEVWKLVFEHPQDVPAIQDAIRSHPAVREIFEYDIPFAKRYLIDKGLVPMEGGEELKLLAFNIATFYHEGDEFAEGEILMISYADESGAKVITWKKIDLPYVEVVSTEREAIKRFLQVLREKDPDVLLTYNGDNFDFAYIKKRCEKLGLKFTIGRDGSEPKIQRMGDRFAVEVKGRIHLDLAPVVRHTIRLPTYTLEAVYEAVFGKKKEKVYAEEIAEAWKSEEGLKRVAQYSMEDARATYELGREFFPLEVELAKLIGQSVWDVSRSSTGNLVEWYLLRVAYERNELAPNKPGGEEYQRRMRSSYIGGYVKEPEKGLWESIAYLDFRSSAGSIIVTHNVSPDTLEKECKNYDVAPIVGYRFCKDFKGFIPSILEDLIETRQKVKRKMKATIDPIEKKMLDYRQRALKILANSYYGYQGYPKARWYSKECAESVTAWGRHYIETTIKEAEKFGFKVLYADTDGFFATIPNEKPETIKSKAKKFLKHINEKLPGMLELEYEGFYLRGFFVTKKKYALIDEDGHITTRGLEVVRRDWSEIAKETQAKVLEVILREGSIEKAAGIVKKVVEDLANYRVPVEKLIIHEQITRELKRYKATGPHVAIAKRLQARGIKVKPGTIISYVVLKGSKKISDRVILFDEYDSSRHKYDPDYYIHNQVLPAVLRILEAFGYKEKDLEYQRMKQTGLGAWLKMGKK

SEQ ID NO: 221 - protein, 773 aa, unidentified
  REGION 1..773: note = Description of Unknown: Synthetic polypeptide
MILDTDYITENGKPVIRIFKKEKGEFKIEYDRNFEPYIYALLEDDESIEDIKKITGERHGKKVRIIRVEKVKKKFLGEPIEVWKLVFEHPQDYPAIRDAIRSHPAVREIFEYDIPFAKRYLIDKGLVPMEGGEELKLLAFAIATFYHEGDEFAEGEILMISYADESGAKVITWKKIDLPYVEVVSTEREAIKRFLQVLREKDPDVLLTYNGDNFDFAYIKKRCEKLGLKFTIGRDGSEPKIQRMGDRFAVEVKGRIHLDLAPVVRHTIRLPTYTLEAVYEAVFGKKKEKVYAEEIAEAWKSEEGLKRVAQYSMEDARATYELGREFFPMEVELAKLIGQSVWDVSRSSTGNLVEWYLLRVAYERNELAPNKPGGEEYQRRMRSSYIGGYVKEPEKGLWESIAYLDFRSSAGSIIVTHNVSPDTLEKECKNYDVAPIVGYRFCKDFKGFIPSILEDLIETRQKVKRKMKATIDPIEKKMLDYRQRALKILANSYYGYFGYPKARWYLKEIAESVTAWGRHYIETTIKEAEKFGFKVLYADTDGFFATIPNEKPETIKSKAKKFLKHINEKLPGMLELEYEGFYLRGFFVTKKKYALIDEDGHITTRGLEVVRRDWSEIAKETQAKVLEVILREGSIEKAAGIVKKVVEDLANYRVPVEKLIIHEQITRELKRYKATGPHVAIAKRLQARGIKVKPGTIISYVVLKGSKKISDRVILFDEYDSSRHKYDPDYYIHNQVLPAVLRILEAFGYKEKDLEYQRMKQTGLGAWLKMGKK

SEQ ID NO: 222 - protein, 757 aa, unidentified
  REGION 1..757: note = Description of Unknown: Synthetic polypeptide
MILDTDYITENGKPVIRIFKKEKGEFKIEYDRNFEPYIYALLEDDESIEDIKKITGERHGKKVRIIRVEKVKKKFLGEPIEVWKLVFEHPQDVPAIRDAIRSHPAVREIFEYDIPFAKRYLIDKGLVPMEGGEELKLLAFAIATFYHEGDEFAEGEILMISYADESGAKVITWKKIDLPYVEVVSTEREAIKRFLQVLREKDPDVLLTYNGDNFDFAYIKKRCEKLGLKFTIGRDGSEPKIQRMGDRFAVEVKGRIHLDLAPVVRHTIRLPTYTLEAVYEAVFGKKKEKVYAEEIAEAWKSEEGLKRVAQYSMEDARATYELGREFFPMEVELAKLIGQSVWDVSRSSTGNLVEWYLLRVAYERNELAPNKPGGEEYQRRMRSSYIGGYVKEPEKGLWESIAYLDFRSSAGSIIVTHNVSPDTLEKECKNYDVAPIVGYRFCKDFKGFIPSILEDLIETRQKVKRKMKATIDPIEKKMLDYRQRALKILANSYYGYQGYPKARWYSKECAESVTAWGRHYIETTIKEAEKFGFKVLYADTDGFFATIPNEKPETIKSKAKKFLKHINEKLPGMLELEYEGFYLRGFFVTKKKYALIDEDGHITTRGLEVVRRDWSEIAKETQAKVLEVILREGSIEKAAGIVKKVVEDLANYRVPVEKLIIHERITRKLKDYKATGPHVAIAKRLQARGIKVKPGTIISYVVLKGSKKISDRVILFDEYDSSRHKYDPDYYIHNQVLPAVLRILEAFGYKEKDLEYQ

SEQ ID NO: 223 - protein, 773 aa, unidentified
  REGION 1..773: note = Description of Unknown: Synthetic polypeptide
MILDTDYITENGKPVIRIFKKEKGEFKIEYDRNFEPYIYALLEDDESIEDIKKITGERHGKKVRIIRVEKVKKKFLGEPIEVWKLVFEHPQDYPAIRDAIRSHPAVREIFEYDIPFAKRYLIDKGLVPMEGGEELKLLAFAIATFYHEGDEFAEGEILMISYADESGAKVITWKKIDLPYVEVVSTEREAIKRFLQVLREKDPDVLLTYNGDNFDFAYIKKRCEKLGLKFTIGRDGSEPKIQRMGDRFAVEVKGRIHLDLAPVVRHTIRLPTYTLEAVYEAVFGKKKEQVYAEEIAEAWKSEEGLKRVAQYSMEDARATYELGREFFPMEVELAKLIGQSVWDVSRSSTGNLVEWYLLRVAYERNELAPNKPGGEEYQRRMRSSYIGGYVKEPEKGLWESIAYLDFRSSAGSIIVTHNVSPDTLEKECKNYDVAPIVGYRFCKDFKGFIPSILEDLIETRQKVKRKMKATIDPIEKKMLDYRQRALKILANSYYGYMGYPKARWYSKECAESVTAWGRHYIETTIKEAEKFGFKVLYADTDGFFATIPNEKPETIKSKAKKFLKHINEKLPGMLELEYEGFYLRGFFVTKKKYALIDEDGHITTRGLEVVRRDWSEIAKETQAKVLEVILREGSIEKAAGIVKKVVEDLANYRVPVEKLIIHEQITRELKRYKATGPHVAIAKRLQARGIKVKPGTIISYVVLKGSKKISDRVILFDEYDSSRHKYDPDYYIHNQVLPAVLRILEAFGYKEKDLEYQRMKQTGLGAWLKMGKK

SEQ ID NO: 224 - protein, 773 aa, unidentified
  REGION 1..773: note = Description of Unknown: Synthetic polypeptide
MILDTDYITENGKPVIRIFKKEKGEFKIEYDRNFEPYIYALLEDDESIEDIKKITGERHGKKVRIIRVEKVKKKFLGEPIEVWKLVFEHPQDYPAIRDAIRSHPAVREIFEYDIPFAKRYLIDKGLVPMEGGEELKLLAFAIATFYHEGDEFAEGEILMISYADESGAKVITWKKIDLPYVEVVSTEREAIKRFLQVLREKDPDVLLTYNGDNFDFAYIKKRCEKLGLKFTIGRDGSEPKIQRMGDRFAVEVKGRIHLDLAPVVRHTIRLPTYTLEAVYEAVFGKKKEKVYAEEIAEAWKSEEGLKRVAQYSMEDARATYELGREFFPMEVELAKLIGQSVWDVSRSSTGNLVEWYLLRVAYERNELAPNKPGGEEYQRRMRSSYIGGYVKEPEKGLWESIAYLDFRSSAGSIIVTHNVSPDTLEKECKNYDVAPIVGYRFCKDFKGFIPSILEDLIETRQKVKRKMKATIDPIEKKMLDYRQRALKILANSYYGYRGYPKARWYNKESAESVTAWGRHYIETTIKEAEKFGFKVLYADTDGFFATIPNEKPETIKSKAKKFLKHINEKLPGMLELEYEGFYLRGFFVTKKKYALIDEDGHITTRGLEVVRRDWSEIAKETQAKVLEVILREGSIEKAAGIVKKVVEDLANYRVPVEKLIIHEQITRELKRYKATGPHVAIAKRLQARGIKVKPGTIISYVVLKGSKKISDRVILFDEYDSSRHKYDPDYYIHNQVLPAVLRILEAFGYKEKDLEYQRMKQTGLGAWLKMGKK

SEQ ID NO: 225 - protein, 773 aa, unidentified
  REGION 1..773: note = Description of Unknown: Synthetic polypeptide
MILDTDYITENGKPVIRIFKKEKGEFKIEYDRNFEPYIYALLEDDESIEDIKKITGERHGKKVRIIRVEKVKKKFLGEPIEVWKLVFEHPQDVPAIRDAIRSHPAVREIFEYDIPFAKRYLIDKGLVPMEGGEELKLLAFQIATFYHEGDEFAEGEILMISYADESGAKVITWKKIDLPYVEVVSTEREAIKRFLQVLREKDPDVLLTYNGDNFDFAYIKKRCEKLGLKFTIGRDGSEPKIQRMGDRFAVEVKGRIHLDLAPVVRHTIRLPTYTLEAVYEAVFGKKKEKVYAEEIAEAWKSEEGLKRVAQYSMEDARATYELGREFFPMEVELAKLIGQSVWDVSRSSTGNLVEWYLLRVAYERNELAPNKPGGEEYQRRMRSSYIGGYVKEPEKGLWESIAYLDFRSSAGSIIVTHNVSPDTLEKECKNYDVAPIVGYRFCKDFKGFIPSILEDLIETRQKVKRKMKATIDPIEKKMLDYRQRALKILANSYYGYQGYPKARWYSKECAESVTAWGRHYIETTIKEAEKFGFKVLYADTDGFFATIPNEKPETIKSKAKKFLKHINEKLPGMLELEYEGFYLRGFFVTKKKYALIDEDGHITTRGLEVVRRDWSEIAKETQAKVLEVILREGSIEKAAGIVKKVVEDLANYRVPVEKLIIHEQITRELKDYKATGPHVAIAKRLQARGIKVKPGTIISYVVLKGSKKISDRVILFDEYDSSRHKYDPDYYIHNQVLPAVLRILEAFGYKEKDLEYQRMKQTGLGAWLKMGKK

SEQ ID NO: 226 - protein, 773 aa, unidentified
  REGION 1..773: note = Description of Unknown: Synthetic polypeptide
MILDTDYITENGKPVIRIFKKEKGEFKIEYDRNFEPYIYALLEDDESIEDIKKITGERHGKKVRIIRVEKVKKKFLGEPIEVWKLVFEHPQDYPAIRDAIRSHPAVREIFEYDIPFAKRYLIDKGLVPMEGGEELKLLAFAIATFYHEGDEFAEGEILMISYADESGAKVITWKKIDLPYVEVVSTEREAIKRFLQVLREKDPDVLLTYNGDNFDFAYIKKRCEKLGLKFTIGRDGSEPKIQRMGDRFAVEVKGRIHLDLAPVVRHTIRLPTYTLEAVYEAVFGKKKEKVYAEEIAEAWKSEEGLKRVAQYSMEDARATYELGREFFPMEVELAKLIGQSVWDVSRSSAGNLVEWYLLRVAYERNELAPNKPGGEEYQRRMRSSYIGGYVKEPEKGLWESIAYLDFRSSAGSIIVTHNVSPDTLEKECKNYDVAPIVGYRFCKDFKGFIPSILEDLIETRQKVKRKMKATIDPIEKKMLDYRQRALKILANSYYGYQGYPKARWYSKECAESVTAWGRHYIETTIKEAEKFGFKVLYADTDGFFATIPNEKPETIKSKAKKFLKHINEKLPGMLELEYEGFYLRGFFVTKKKYALIDEDGHITTRGLEVVRRDWSEIAKETQAKVLEVILREGSIEKAAGIVKKVVEDLANYRVPVEKLIIHEQITRELKRYKATGPHVAIAKRLQARGIKVKPGTIISYVVLKGSKKISDRVILFDEYDSSRHKYDPDYYIHNQVLPAVLRILEAFGYKEKDLEYQRMKQTGLGAWLKMGKK

SEQ ID NO: 227 - protein, 773 aa, unidentified
  REGION 1..773: note = Description of Unknown: Synthetic polypeptide
MILDTDYITENGKPVIRIFKKEKGEFKIEYDRNFEPYIYALLEDDESIEDIKKITGERHGKKVRIIRVEKVKKKFLGEPIEVWKLVFEHPQDYPAIRDAIRSHPAVREIFEYDIPFAKRYLIDKGLVPMEGGEELKLLAFAIATFYHEGDEFAEGEILMISYADESGAKVITWKKIDLPYVEVVSTEREAIKRFLQVLREKDPDVLLTYNGDNFDFAYIKKRCEKLGLKFTIGRDGSEPKIQRMGDRFAVEVKGRIHLDLAPVVRHTIRLPTYTLEAVYEAVFGKKKEKVYAEEIAEAWKSEEGLKRVAQYSMEDARATYELGREFFPMEVELAKLIGQSVWDVSRSSTGNLVEWYLLRVAYERNELAPNVPGGEEYQRRMRSSYIGGYVKEPEKGLWESIAYLDFRSSAGSIIVTHNVSPDTLEKECKNYDVAPIVGYRFCKDFKGFIPSILEDLIETRQKVKRKMKATIDPIEKKMLDYRQRALKILANSYYGYQGYPKARWYSKECAESVTAWGRHYIETTIKEAEKFGFKVLYADTDGFFATIPNEKPETIKSKAKKFLKHINEKLPGMLELEYEGFYLRGFFVTKKKYALIDEDGHITTRGLEVVRRDWSEIAKETQAKVLEVILREGSIEKAAGIVKKVVEDLANYRVPVEKLIIHEQITRELKRYKATGPHVAIAKRLQARGIKVKPGTIISYVVLKGSKKISDRVILFDEYDSSRHKYDPDYYIHNQVLPAVLRILEAFGYKEKDLEYQRMKQTGLGAWLKMGKK

SEQ ID NO: 228 - protein, 773 aa, unidentified
  REGION 1..773: note = Description of Unknown: Synthetic polypeptide
MILDTDYIDENGKPVIRIFKKEKGEFKIEYDRNFEPYIYALLEDDESIEDIKKITGERHGKKVRIIRVEKVKKKFLGEPIEVWKLVFEHPQDYPAIRDAIRSHPAVREIFEYDIPFAKRYLIDKGLVPMEGGEELKLLAFAIATFYHEGDEFAEGEILMISYADESGAKVITWKKIDLPYVEVVSTEREAIKRFLQVLREKDPDVLLTYNGDNFDFAYIKKRCEKLGLKFTIGRDGSEPKIQRMGDRFAVEVKGRIHLDLAPVVRHTIRLPTYTLEAVYEAVFGKKKEKVYAEEIAEAWKSEEGLKRVAQYSMEDARATYELGREFFPMEVELAKLIGQSVWDVSRSSTGNLVEWYLLRVAYERNELAPNKPGGEEYQRRMRSSYIGGYVKEPEKGLWESIAYLDFRSSAGSIIVTHNVSPDTLEKECKNYDVAPIVGYRFCKDFKGFIPSILEDLIETRQKVKRKMKATIDPIEKKMLDYRQRALKILANSYYGYQGYPKARWYSKECAESVTAWGRHYIETTIKEAEKFGFKVLYADTDGFFATIPNEKPETIKSKAKKFLKHINEKLPGMLELEYEGFYLRGFFVTKKKYALIDEDGHITTRGLEVVRRDWSEIAKETQAKVLEVILREGSIEKAAGIVKKVVEDLANYRVPVEKLIIHEQITRELKRYKATGPHVAIAKRLQARGIKVKPGTIISYVVLKGSKKISDRVILFDEYDSSRHKYDPDYYIHNQVLPAVLRILEAFGYKEKDLEYQRMKQTGLGAWLKMGKK

SEQ ID NO: 229 - protein, 773 aa, unidentified
  REGION 1..773: note = Description of Unknown: Synthetic polypeptide
MILDTDYITENGKPVIRIFKKEKGEFKIEYDRNFEPYIYALLEDDESIEDIKKITGERHGKKVRIIRVEKVKKKFLGEPIEVWKLVFEHPQDYPAIRDAIRSHPAVREIFEYDIPFAKRYLIDKGLVPMEGGEELKLLAFAIATFYHEGDEFAEGEILMISYADESGAKVITWKKIDLPYVEVVSTEREAIKRFLQVLREKDPDVLLTYNGDNFDFAYIKKRCEKLGLKFTIGRDGSEPKIQRMGDRFAVEVKGRIHLDLAPVVRHTIRLPTYTLEAVYEAVFGKKKEKVYAEEIAEAWKSEEGLKRVAQYSMEDARATYELGREFFPMEVELAKLIGQSVWDVSRSSTGNLVEWYLLRVAYERNELAPNKPGGEEYQRRMRSSYIGGYVKEPEKGLWESIAYLDFRSSAGSIIVTHNVSPDTLEKECKNYDVAPIVGYRFCKDFKGFIPSILEDLIETRQKVKRKMKATIDPIEKKMLDYRQRALKILANSYYGYQGYPKARWYSKECAESVTAWGRHYIETTIKEAEKFGFKVLYADTDGFFATIPNEKPETIKSKAKKFLKHINEKLPGMLELEYEGFYLRGFFVTKKKYALIDEDGHITTRGLEVVRRDWSEIAKETQAKVLEVILREGSIEKAAGIVKKVVEDLANYRVPVEKLIIHEQITRELKRYKATGPHVAIAKRLQARGYKVKPGTIISYVVLKGSKKISDRVILFDEYDSSRHKYDPDYYIHNQVLPAVLRILEAFGYKEKDLEYQRMKQTGLGAWLKMGKK

SEQ ID NO: 230 - protein, 757 aa, unidentified
  REGION 1..757: note = Description of Unknown: Synthetic polypeptide
MILDTDYITENGKPVIRIFKKEKGEFKIEYDRNFEPYIYALLEDDESIEDIKKITGERHGKKVRIIRVEKVKKKFLGEPIEVWKLVFEHPQDVPAIRDAIRSHPAVREIFEYDIPFAKRYLIDKGLVPMEGGEELKLLAFAIATFYHEGDEFAEGEILMISYADESGAKVITWKKIDLPYVEVVSTEREAIKRFLQVLREKDPDVLLTYNGDNFDFAYIKKRCEKLGLKFTIGRDGSEPKIQRMGDRFAVEVKGRIHLDLAPVVRHTIRLPTYTLEAVYEAVFGKKKEKVYAEEIAEAWKSEEGLKRVAQYSMEDARATYELGREFFPMEVELAKLIGQSVWDVSRSSTGNLVEWYLLRVAYERNELAPNKPGGEEYQRRMRSSYIGGYVKEPEKGLWESIAYLDFRSSAGSIIVTHNVSPDTLEKECKNYDVAPIVGYRFCKDFKGFIPSILEDLIETRQKVKRKMKATIDPIEKKMLDYRQRALKILANSYYGYQGYPKARWYSKECAESVTAWGRHYIETTIKEAEKFGFKVLYADTDGFFATIPNEKPETIKSKAKKFLKHINEKLPGMLELEYEGFYLRGFFVTKKKYALIDEDGHITTRGLEVVRRFWSEIAKETQAKVLEVILREGSIEKAAGIVKKVVEDLANYRVPVEKLIIHEQITRKLKDYKATGPHVAIAKRLQARGIKVKPGTIISYVVLKGSKKISDRVILFDEYDSSRHKYDPDYYIHNQVLPAVLRILEAFGYKEKDLEYQ

SEQ ID NO: 231 - protein, 773 aa, unidentified
  REGION 1..773: note = Description of Unknown: Synthetic polypeptide
MILDTDYITENGKPVIRIFKKEKGEFKIEYDRNFEPYIYALLEDDESIEDIKKITGERHGKKVRIIRVEKVKKKFLGEPIEVWKLVFEHPQEYPAIRDAIRSHPAVREIFEYDIPFAKRYLIDKGLVPMEGGEELKLLAFAIATFYHEGDEFAEGEILMISYADESGAKVITWKKIDLPYVEVVSTEREAIKRFLQVLREKDPDVLLTYNGDNFDFAYIKKRCEKLGLKFTIGRDGSEPKIQRMGDRFAVEVKGRIHLDLAPVVRHTIRLPTYTLEAVYEAVFGKKKEKVYAEEIAEAWKSEEGLKRVAQYSMEDARATYELGREFFPMEVELAKLIGQSVWDVSRSSTGNLVEWYLLRVAYERNELAPNKPGGEEYQRRMRSSYIGGYVKEPEKGLWESIAYLDFRSSAGSIIVTHNVSPDTLEKECKNYDVAPIVGYRFCKDFKGFIPSILEDLIETRQKVKRKMKATIDPIEKKMLDYRQRALKILANSYYGYQGYPKARWYSKECAESVTAWGRHYIETTIKEAEKFGFKVLYADTDGFFATIPNEKPETIKSKAKKFLKHINEKLPGMLELEYEGFYLRGFFVTKKKYALIDEDGHITTRGLEVVRRDWSEIAKETQAKVLEVILREGSIEKAAGIVKKVVEDLANYRVPVEKLIIHEQITRELKRYKATGPHVAIAKRLQARGIKVKPGTIISYVVLKGSKKISDRVILFDEYDSSRHKYDPDYYIHNQVLPAVLRILEAFGYKEKDLEYQRMKQTGLGAWLKMGKK

SEQ ID NO: 232 - protein, 773 aa, unidentified
  REGION 1..773: note = Description of Unknown: Synthetic polypeptide
MILDTDYITENGKPVIRIFKKEKGEFKIEYDRNFEPYIYALLEDDESIEDIKKITGERHGKKVRIIRVEKVKKKFLGEPIEVWKLVFEHPQDVPAIRDAIRSHPAVREIFEYDIPFAKRYLIDKGLVPMEGGEELKLLAFNIATFYHEGDEFAEGEILMISYADESGAKVITWKKIDLPYVEVVSTEREAIKRFLQVLREKDPDVLLTYNGDNFDFAYIKKRCEKLGLKFTIGRDGSEPKIQRMGDRFAVEVKGRIHLDLAPVVRKTIRLPTYTLEAVYEAVFGKKKEKVYAEEIAEAWKSEEGLKRVAQYSMEDARATYELGREFFPLEVELAKLIGQSVWDVSRSSTGNLVEWYLLRVAYERNELAPNKPGGEEYQRRMRSSYIGGYVKEPEKGLWESIAYLDFRSSAGSIIVTHNVSPDTLEKECKNYDVAPIVGYRFCKDFKGFIPSILEDLIETRQKVKRKMKATIDPIEKKMLDYRQRALKILANSYYGYQGYPKARWYSKECAESVTAWGRHYIETTIKEAEKFGFKVLYADTDGFFATIPNEKPETIKSKAKKFLKHINEKLPGMLELEYEGFYLRGFFVTKKKYALIDEDGHITTRGLEVVRRDWSEIAKETQAKVLEVILREGSIEKAAGIVKKVVEDLANYRVPVEKLIIHEQITRELKRYKATGPHVAIAKRLQARGIKVKPGTIISYVVLKGSKKISDRVILFDEYDSSRHKYDPDYYIHNQVLPAVLRILEAFGYKEKDLEYQRMKQTGLGAWLKMGKK

SEQ ID NO: 233 - protein, 757 aa, unidentified
  REGION 1..757: note = Description of Unknown: Synthetic polypeptide
MILDTDYITENGKPVIRIFKKEKGEFKIEYDRNFEPYIYALLEDDESIEDIKKITGERHGKKVRIIRVEKVKKKFLGEPIEVWKLVFEHPQDVPAIRDAIRSHPAVREIFEYDIPFAKRYLIDKGLVPMEGGEELKLLAFNIATFYHEGDEFAEGEILMISYADESGAKVITWKKIDLPYVEVVSTEREAIKRFLQVLREKDPDVLLTYNGDNFDFAYIKKRCEKLGLKFTIGRDGSEPKIQRMGDRFAVEVKGRIHLDLAPVVRHTIRLPTYTLEAVYEAVFGKKKEKVYAEEIAEAWKSEEGLKRVAQYSMEDARATYELGREFFPLEVELAKLIGQSVWDVSRSSTGNLVEWYLLRVAYERNELAPNKPGGEEYQRRMRSSYIGGYVKEPEKGLWESIAYLDFRSSAGSIIVTHNVSPDTLEKECKNYDVAPIVGYRFCKDFKGFIPSILEDLIETRQKVKRKMKATIDPIEKKMLDYRQRALKILANSYYGYQGYPKARWYSKECAESVTAWGRHYIETTIKEAEKFGFKVLYADTDGFFATIPNEKPETIKSKAKKFLKHINEKLPGMLELEYEGFYLRGFFVTKKKYALIDEDGHITTRGLEVVRRDWSEIAKETQAKVLEVILREGSIEKAAGIVKKVVEDLANYRVPVEKLIIHEQITRELKRYKATGPHVAIAKRLQARGIKVKPGTIISYVVLKGSKKISDRVILFDEYDSSRHKYDPDYYIHNQVLPAVLRILEAFGYKEKDLEYQ

SEQ ID NO: 234 - protein, 772 aa, unidentified; identical to SEQ ID NO: 103
  REGION 1..772: note = Description of Unknown: Synthetic polypeptide

SEQ ID NO: 235 - protein, 773 aa, unidentified
  REGION 1..773: note = Description of Unknown: Synthetic polypeptide
MILDTDYITENGKPVIRIFKKEKGEFKIEYDRNFEPYIYALLEDDESIEDIKKITGERHGKKVRIIRVEKVKKKFLGEPIEVWKLVFEHPQDYPAIRDAIRSHPAVREIFEYDIPFAKRYLIDKGLVPMEGGEELKLLAFAIATFYHEGDEFAEGEILMISYADESGAKVITWKKIDLPYVEVVSTEREAIKRFLQVLREKDPDVLLTYNGDNFDFAYIKKRCEKLGLKFTIGRDGSEPKIQRMGDRFAVEVKGRIHLDLAPVVRHTIRLPTYTLEAVYEAVFGKKKEKVYAEEIAEAWKSEEGLKRVAQYSMEDARATYELGREFFPMEVELAKLIGQSVWDVSRSSTGNLVEWYLLRVAYERNELAPNKPGGEEYQRRMRSSYIGGYVKEPEKGLWESIAYLDFRSSAGSIIVTHNVSPDTLEKECKNYDVAPIVGYRFCKDFKGFIPSILEDLIETRQKVKRKMKATIDPIEKKMLDYRQRALKILANSYYGYYGYPKARWYSKEIAESVTAWGRHYIETTIKEAEKFGFKVLYADTDGFFATIPNEKPETIKSKAKKFLKHINEKLPGMLELEYEGFYLRGFFVTKKKYALIDEDGHITTRGLEVVRRDWSEIAKETQAKVLEVILREGSIEKAAGIVKKVVEDLANYRVPVEKLIIHEQITRELKRYKATGPHVAIAKRLQARGIKVKPGTIISYVVLKGSKKISDRVILFDEYDSSRHKYDPDYYIHNQVLPAVLRILEAFGYKEKDLEYQRMKQTGLGAWLKMGKK

SEQ ID NO: 236 - protein, 773 aa, unidentified
  REGION 1..773: note = Description of Unknown: Synthetic polypeptide
MILDTDYITENGKPVIRIFKKEKGEFKIEYDRNFEPYIYALLEDDESIEDIKKITGERHGKKVRIIRVEKVKKKFLGEPIEVWKLVFEHPQDYPAIRDAIRSHPAVREIFEYDIPFAKRYLIDKGLVPMEGGEELKLLAFAIATFYHEGDEFAEGEILMISYADESGAKVITWKKIDLPYVEVVSTEREAIKRFLQVLREKDPDVLLTYNGDNFDFAYIKKRCEKLGLKFTIGRDGSEPKIQRMGDRFAVEVKGRIHLDLAPVVRHTIRLPTYTLEAVYEAVFGKKKEKVYAEEIAEAWKSEEGLKRVAQYSMEDARATYELGREFFPMEVELAKLIGQSVWDVSRSSTGNLVEWYLLRVAYERNELAPNKPGGEEYQRRMRSSYIGGYVKEPEKGLWESIAYLDFRSSAGSIIVTHNVSPDTLEKECKNYDVAPIVGYRFCKDFKGFIPSILEDLIETRQKVKRKMKATIDPIEKKMLDYRQRALKILANSYYGYQGYPKARWYSKECAESVTAWGRHYIETTIKEAEKFGFKVLYADTDGFFATIPNEKPETIKSKAKKFLKHINEKLPGMLELEYEGFYLRYFFVTKKKYALIDEDGHITTRGLEVVRRDWSEIAKETQAKVLEVILREGSIEKAAGIVKKVVEDLANYRVPVEKLIIHEQITRELKRYKATGPHVAIAKRLQARGIKVKPGTIISYVVLKGSKKISDRVILFDEYDSSRHKYDPDYYIHNQVLPAVLRILEAFGYKEKDLEYQRMKQTGLGAWLKMGKK

SEQ ID NO: 237 - protein, 773 aa, unidentified
  REGION 1..773: note = Description of Unknown: Synthetic polypeptide
MILDTDYITENGKPVIRIFKKEKGEFKIEYDRNFEPYIYALLEDDESIEDIKKITGERHGKKVRIIRVEKVKKKFLGEPIEVWKLVFEHPQDLPAIRDAIRSHPAVREIFEYDIPFAKRYLIDKGLVPMEGGEELKLLAFNIATFYHEGDEFAEGEILMISYADESGAKVITWKKIDLPYVEVVSTEREAIKRFLQVLREKDPDVLLTYNGDNFDFAYIKKRCEKLGLKFTIGRDGSEPKIQRMGDRFAVEVKGRIHLDLAPVVRHTIRLPTYTLEAVYEAVFGKKKEKVYAEEIAEAWKSEEGLKRVAQYSMEDARATYELGREFFPLEVELAKLIGQSVWDVSRSSTGNLVEWYLLRVAYERNELAPNKPGGEEYQRRMRSSYIGGYVKEPEKGLWESIAYLDFRSSAGSIIVTHNVSPDTLEKECKNYDVAPIVGYRFCKDFKGFIPSILEDLIETRQKVKRKMKATIDPIEKKMLDYRQRALKILANSYYGYQGYPKARWYSKECAESVTAWGRHYIETTIKEAEKFGFKVLYADTDGFFATIPNEKPETIKSKAKKFLKHINEKLPGMLELEYEGFYLRGFFVTKKKYALIDEDGHITTRGLEVVRRDWSEIAKETQAKVLEVILREGSIEKAAGIVKKVVEDLANYRVPVEKLIIHEQITRELKRYKATGPHVAIAKRLQARGIKVKPGTIISYVVLKGSKKISDRVILFDEYDSSRHKYDPDYYIHNQVLPAVLRILEAFGYKEKDLEYQRMKQTGLGAWLKMGKK

SEQ ID NO: 238 - protein, 773 aa, unidentified
  REGION 1..773: note = Description of Unknown: Synthetic polypeptide
MILDTDYITENGKPVIRIFKKEKGEFKIEYDRNFEPYIYALLEDDESIEDIKKITGERHGKKVRIIRVEKVKKKFLGEPIEVWKLVFEHPQDYPAIRDAIRSHPAVREIFEYDIPFAKRYLIDKGLVPMEGGEELKLLAFAIATFYHEGDEFAEGEILMISYADESGAKVITWKKIDLPYVEVVSTEREAIKRFLQVLREKDPDVLLTYNGDNFDFAYIKKRCEKLGLKFTIGRDGSEPKIQRMGDRFAVEVKGRIHLDLAPVVRHTIRLPTYTLEAVYEAVFGKKKEKVYAEEIAEAWKSEEGLKRVAQYSMEDARATYELGREFFPMEVELAKLIGQSVWDVSRSSTGNLVEWYLLRVAYERNELAPNKPGGEEYQRRMRSSYIGGYVKEPEKGLWESIAYLDFRSSAGSIIVTHNVSPDTLEKECKNYDVAPIVGYRFCKDFKGFIPSILEDLIETRQKVKRKMKATIDPIEKKMLDYRQRALKILANSYYGYQGYPKARWYSKECAESVTAWGRHYIETTIKEAEKFGFKVLYADTDGFFATIPNEKPETIKSKAKKFLKHINEKLPGMLELEYEGFYLRGFFVTKKKYALIDEDGHITTRGLEVVRRDWSEIAKETQAKVLEVILREGSIEKAAGIVKKVVEDLANYRVPVEKLIIHEQITRELKRYKATGPHVAIAKRLQARGIKVKPGTIISYVVLKGSKKISDRVILFDEYDSSRHKYDPDYYIHNQVLPAVLRILEAFGYKEKDLEYQRMKQTGLRAWLKMGKK

SEQ ID NO: 239 - protein, 757 aa, unidentified
  REGION 1..757: note = Description of Unknown: Synthetic polypeptide
MILDTDYITENGKPVIRIFKKEKGEFKIEYDRNFEPYIYALLEDDESIEDIKKITGERHGKKVRIIRVEKVKKKFLGEPIEVWKLVFEHPQDVPAIRDAIRSHPAVREIFEYDIPFAKRYLIDKGLVPMEGGEELKLLAFAIATFYHEGDEFAEGEILMISYADESGAKVITWKKIDLPYVEVVSTEREAIKRFLQVLREKDPDVLLTYNGDNFDFAYIKKRCEKLGLKFTIGRDGSEPKIQRMGDRFAVEVKGRIHLDLAPVVRHTIRLPTYTLEAVYEAVFGKKKEKVYAEEIAEAWKSEEGLKRVAQYSMEDARATYELGREFFPMEVELAKLIGQSVWDVSRSSTGNLVEWYLLRVAYERNELAPNKPGGEEYQRRMRSSYIGGYVKEPEKGLWESIAYLDFRSSAGSIIVTHNVSPDTLEKECKNYDVAPIVGYRFCKDFKGFIPSILEDLIETRQKVKRKMKATIDPIEKKMLDYRQRALKILANSYYGYQGYPKARWYSKECAESVTAWGRHYIETTIKEAEKFGFKVLYADTDGFFATIPNEKPETIKSKAKKFLKHINEKLPGMLELEYEGFYLRGFFVTKKKYALIDEDGHITTRGLEVVRRQWSEIAKETQAKVLEVILREGSIEKAAGIVKKVVEDLANYRVPVEKLIIHEQITRKLKDYKATGPHVAIAKRLQARGIKVKPGTIISYVVLKGSKKISDRVILFDEYDSSRHKYDPDYYIHNQVLPAVLRILEAFGYKEKDLEYQ

SEQ ID NO: 240 - protein, 773 aa, unidentified
  REGION 1..773: note = Description of Unknown: Synthetic polypeptide
MILDTDYITENGKPVIRIFKKEKGEFKIEYDRNFEPYIYALLEDDESIEDIKKITGERHGKKVRIIRVEKVKKKFLGEPIEVWKLVFEHPQDVPAIRDAIRSHPAVREIFEYDIPFAKRYLIDKGLVPMEGGEELKLLAFNIATFYHEGDEFAEGEILMISYADESGAKVITWKKIDLPYVEVVSTEREAIKRFLQVLREKDPDVLLTYNGDNFDFAYIKKRCEKLGLKFTIGRDGSEPAIQRMGDRFAVEVKGRIHLDLAPVVRHTIRLPTYTLEAVYEAVFGKKKEKVYAEEIAEAWKSEEGLARVAQYSMEDARATYELGREFFPLEVELAKLIGQSVWDVSRSSTGNLVEWYLLRVAYERNELAPNKPGGEEYQRRMRSSYIGGYVKEPEKGLWESIAYLDFRSSAGSIIVTHNVSPDTLEKECQNYDVAPIVGYRFCKDFKGFIPSILEDLIETRQKVKRKMKATIDPIEKKMLDYRQRALKILANSYYGYQGYPKARWYSKECAESVTAWGRHYIETTIKEAEKFGFKVLYADTDGFFATIPNEKPETIKSKAKKFLKHINEKLPGMLELEYEGFYLRGFFVTKKKYALIDEDGHITTRGLEVVRRDWSEIAKETQAKVLEVILREGSIEKAAGIVKKVVEDLANYRVPVEKLIIHEQITRELKRYKATGPHVAIAKRLQARGIKVKPGTIISYVVLKGSKKISDRVILFDEYDSSRHKYDPDYYIHNQVLPAVLRILEAFGYKEKDLEYQRMKQTGLGAWLKMGKK

SEQ ID NO: 241 - protein, 773 aa, unidentified
  REGION 1..773: note = Description of Unknown: Synthetic polypeptide
MILDTDYITENGKPVIRIFKKEKGEFKIEYDRNFEPYIYANLEDDESIEDIKKITGERHGKKVRIIRVEKVKKKFLGEPIEVWKLVFEHPQDYPAIRDAIRSHPAVREIFEYDIPFAKRYLIDKGLVPMEGGEELKLLAFAIATFYHEGDEFAEGEILMISYADESGAKVITWKKIDLPYVEVVSTEREAIKRFLQVLREKDPDVLLTYNGDNFDFAYIKKRCEKLGLKFTIGRDGSEPKIQRMGDRFAVEVKGRIHLDLAPVVRHTIRLPTYTLEAVYEAVFGKKKEKVYAEEIAEAWKSEEGLKRVAQYSMEDARATYELGREFFPMEVELAKLIGQSVWDVSRSSTGNLVEWYLLRVAYERNELAPNKPGGEEYQRRMRSSYIGGYVKEPEKGLWESIAYLDFRSSAGSIIVTHNVSPDTLEKECKNYDVAPIVGYRFCKDFKGFIPSILEDLIETRQKVKRKMKATIDPIEKKMLDYRQRALKILANSYYGYQGYPKARWYSKECAESVTAWGRHYIETTIKEAEKFGFKVLYADTDGFFATIPNEKPETIKSKAKKFLKHINEKLPGMLELEYEGFYLRGFFVTKKKYALIDEDGHITTRGLEVVRRDWSEIAKETQAKVLEVILREGSIEKAAGIVKKVVEDLANYRVPVEKLIIHEQITRELKRYKATGPHVAIAKRLQARGIKVKPGTIISYVVLKGSKKISDRVILFDEYDSSRHKYDPDYYIHNQVLPAVLRILEAFGYKEKDLEYQRMKQTGLGAWLKMGKK

SEQ ID NO: 242 - protein, 773 aa, unidentified
  REGION 1..773: note = Description of Unknown: Synthetic polypeptide
MILDTDYITENGKPVIRIFKKEKGEFKIEYDRNFEPYIYALLEDDESIEDIKKITGERHGKKVRIIRVEKVKKKFLGEPIEVWKLVFEHPQDYPAIRDAIRSHPAVREIFEYDIPFAKRYLIDKGLVPMEGGEELKLLAFAIATFYHEGDEFAEGEILMISYADESGAKVITWKKIDLPYVEVVSTEREAIKRFLQVLREKDPDVLLTYNGDNFDFAYIKKRCEKLGLKFTIGRDGSEPKIQRMGDRFAVEVKGRIHLDLAPVVRHTIRLPTYTLEAVYEAVFGKKKEKVYAEEIAEAWKSEEGLKRVAQYSMEDARATYELGREFFPMEVELAKLIGQSVWDVSRSSTGNLVEWYLLRVAYERNELAPNKPGGEEYQRRMRSSYIGGYVKEPEKGLWESIAYLDFRSSAGSIIVTHNVSPDTLEKECKNYDVAPIVGYRFCKDFKGFIPSILEDLIETRQKVKRKMKATIDPIEKKMLDYRQRALKILANSYYGYQGYPKARWYSKECAESVTAWGRHYIETTIKEAEKFGFKVLYADTDGFFATIPNEKPETIKSKAKKFLKHINEKLPGMLELEYEGFYLRGFFVTKKKYALIDEDGHITTRGLEVVRRDWSEIAKETQAKVLEVILREGSIEKAAGIVKKVVEDLANYRVPVEKLIIHEQITRELKRYKATGKHVAIAKRLQARGIKVKPGTIISYVVLKGSKKISDRVILFDEYDSSRHKYDPDYYIHNQVLPAVLRILEAFGYKEKDLEYQRMKQTGLGAWLKMGKK

SEQ ID NO: 243 - protein, 773 aa, unidentified
  REGION 1..773: note = Description of Unknown: Synthetic polypeptide
MILDTDYITENGKPVIRIFKKEKGEFKIEYDRNFEPYIYALLEDDESIEDIKKITGERHGKKVRIIRVEKVKKKFLGEPIEVWKLVFEHPQDYPAIRDAIRSHPAVREIFEYDIPFAKRYLIDKGLVPMEGGEELKLLAFAIATFYHEGDEFAEGEILMISYADESGAKVITWKKIDLPYVEVVSTEREAIKRFLQVLREKDPDVLLTYNGDNFDFAYIKKRCEKLGLKFTIGRDGSEPKIQRMGDRFAVEVKGRIHLDLAPVVRHTIRLPTYTLEAVYEAVFGKKKEKVYAEEIAEAWKSEEGLKRVAQYSMEDARATYELGREFFPMEVELAKLIGQSVWDVSRSSTGNLVEWYLLRVAYERNELAPNKPGGEEYQRRMRSSYIGGYVKEPEKGLWESIAYLDFRSSAGSIIVTHNVSPDTLEKECKNYDVAPIVGYRFCKDFKGFIPSILEDLIETRQKVKRKMKATIDPIEKKMLDYRQRALKILANSYYGYQGYPKARWYSKECAESVTAWGRHYIETTIKEAEKFGFKVLYADTDGFFATIPNEKPETIKSKAKKFLKHINEKLPGMLELEYEGFYLRGFFVTKKKYALIDEDGHITTRGLEVVRRDWSEIAKETQAKVLEVILREGSIEKAAGIVKKVVEDLANYRVPVEKLIIHEQITRRLKRYKATGPHVAIAKRLQARGIKVKPGTIISYVVLKGSKKISDRVILFDEYDSSRHKYDPDYYIHNQVLPAVLRILEAFGYKEKDLEYQRMKQTGLGAWLKMGKK

SEQ ID NO: 244 - protein, 773 aa, unidentified
  REGION 1..773: note = Description of Unknown: Synthetic polypeptide
VILDTDYITENGKPVIRIFKKEKGEFKIEYDRNFEPYIYALLEDDESIEDIKKITGERHGKKVRIIRVEKVKKKFLGEPIEVWKLVFEHPQDYPAIRDAIRSHPAVREIFEYDIPFAKRYLIDKGLVPREGGEELKLLAFAIATFYHEGDEFAEGEILMISYADESGAKVITWKKIDLPYVEVVSTEREAIKRFLQVLREKDPDVLLTYNGDNFDFAYIKKRCEKLGLKFTIGRDGSEPKIQRMGDRFAVEVKGRIHLDLAPVVRHTIRLPTYTLEAVYEAVFGKKKEKVYAEEIAEAWKSEEGLKRVAQYSMEDARATYELGREFFPMEVELAKLIGQSVWDVSRSSTGNLVEWYLLRVAYERNELAPNKPGGEEYQRRMRSSYIGGYVKEPEKGLWESIAYLDFRSSAGSIIVTHNVSPDTLEKECKNYDVAPIVGYRFCKDFKGFIPSILEDLIETRQKVKRKMKATIDPIEKKMLDYRQRALKILANSYYGYQGYPKARWYSKECAESVTAWGRHYIETTIKEAEKFGFKVLYADTDGFFATIPNEKPETIKSKAKKFLKHINEKLPGMLELEYEGFYLRGFFVTKKKYALIDEDGHITTRGLEVVRRDWSEIAKETQAKVLEVILREGSIEKAAGIVKKVVEDLANYRVPVEKLIIHEQITRELKRYKATGPHVAIAKRLQARGIKVKPGTIISYVVLKGSKKISDRVILFDEYDSSRHKYDPDYYIHNQVLPAVLRILEAFGYKEKDLEYQRMKQTGLGAWLKMGKK

SEQ ID NO: 245 - protein, 773 aa, unidentified
  REGION 1..773: note = Description of Unknown: Synthetic polypeptide
MILDTDRITENGKPVIRIFKKEKGEFKIEYDRNFEPYIYALLEDDESIEDIKKITGERHGKKVRIIRVEKVKKKFLGEPIEVWKLVFEHPQDYPAIRDAIRSHPAVREIFEYDIPFAKRYLIDKGLVPMEGGEELKLLAFAIATFYHEGDEFAEGEILMISYADESGAKVITWKKIDLPYVEVVSTEREAIKRFLQVLREKDPDVLLTYNGDNFDFAYIKKRCEKLGLKFTIGRDGSEPKIQRMGDRFAVEVKGRIHLDLAPVVRHTIRLPTYTLEAVYEAVFGKKKEKVYAEEIAEAWKSEEGLKRVAQYSMEDARATYELGREFFPMEVELAKLIGQSVWDVSRSSTGNLVEWYLLRVAYERNELAPNKPGGEEYQRRMRSSYIGGYVKEPEKGLWESIAYLDFRSSAGSIIVTHNVSPDTLEKECKNYDVAPIVGYRFCKDFKGFIPSILEDLIETRQKVKRKMKATIDPIEKKMLDYRQRALKILANSYYGYQGYPKARWYSKECAESVTAWGRHYIETTIKEAEKFGFKVLYADTDGFFATIPNEKPETIKSKAKKFLKHINEKLPGMLELEYEGFYLRGFFVTKKKYALIDEDGHITTRGLEVVRRDWSEIAKETQAKVLEVILREGSIEKAAGIVKKVVEDLANYRVPVEKLIIHEQITRELKRYKATGPHVAIAKRLQARGIKVKPGTIISYVVLKGSKKISDRVILFDEYDSSRHKYDPDYYIHNQVLPAVLRILEAFGYKEKDLEYQRMKQTGLGAWLKMGKK

SEQ ID NO: 246 - protein, 773 aa, unidentified
  REGION 1..773: note = Description of Unknown: Synthetic polypeptide
MILDTDYITENGKPVIRIFKKEKGEFKIEYDRNFEPYIYALLEDDESIEDIKKITGERHGKKVRIIRVEKVKKKFLGEPIEVWKLVFEHPQDYPAIRDAIRSHPAVREIFEYDIPFAKRYLIDKGLVPMEGGEELKLLAFAIATFYHEGDEFAEGEILMISYADESGAKVITWKKIDLPYVEVVSTEREAIKRFLQVLREKDPDVLLTYNGDNFDFAYIKKRCEKLGLKFTIGRDGSEPKIQRMGDRFAVEVKGRIHLDLAPVVRHTIRLPTYTLEAVYEAVFGKKKEQVYAEEIAEAWKSEEGLKRVAQYSMEDARATYELGREFFPMEVELAKLIGQSVWDVSRSSTGNLVEWYLLRVAYERNELAPNKPGGEEYQRRMRSSYIGGYVKEPEKGLWESIAYLDFRSSAGSIIVTHNVSPDTLEKECKNYDVAPIVGYRFCKDFKGFIPSILEDLIETRQKVKRKMKATIDPIEKKMLDYRQRALKILANSYYGYQGYPKARWYSKEHAESVTAWGRHYIETTIKEAEKFGFKVLYADTDGFFATIPNEKPETIKSKAKKFLKHINEKLPGMLELEYEGFYLRGFFVTKKKYALIDEDGHITTRGLEVVRRDWSEIAKETQAKVLEVILREGSIEKAAGIVKKVVEDLANYRVPVEKLIIHEQITRELKRYKATGPHVAIAKRLQARGIKVKPGTIISYVVLKGSKKISDRVILFDEYDSSRHKYDPDYYIHNQVLPAVLRILEAFGYKEKDLEYQRMKQTGLGAWLKMGKK

SEQ ID NO: 247 - protein, 773 aa, unidentified
  REGION 1..773: note = Description of Unknown: Synthetic polypeptide
MILDTDYITENGKPVIRIFKKEKGEFKIEYDRNFEPYIYALLEDDESIEDIKKITGERHGKKVRIIRVEKVKKKFLGEPIEVWKLVFEHPQDYPAIRDAIRSHPAVREIFEYDIPFAKRYLIDKGLVPMEGGEELKLLAFAIATFYHEGDEFAEGEILMISYADESGAKVITWDKIDLPYVEVVSTEREAIKRFLQVLREKDPDVLLTYNGDNFDFAYIKKRCEKLGLKFTIGRDGSEPKIQRMGDRFAVEVKGRIHLDLAPVVRHTIRLPTYTLEAVYEAVFGKKKEKVYAEEIAEAWKSEEGLKRVAQYSMEDARATYELGREFFPMEVELAKLIGQSVWDVSRSSTGNLVEWYLLRVAYERNELAPNKPGGEEYQRRMRSSYIGGYVKEPEKGLWESIAYLDFRSSAGSIIVTHNVSPDTLEKECKNYDVAPIVGYRFCKDFKGFIPSILEDLIETRQKVKRKMKATIDPIEKKMLDYRQRALKILANSYYGYQGYPKARWYSKECAESVTAWGRHYIETTIKEAEKFGFKVLYADTDGFFATIPNEKPETIKSKAKKFLKHINEKLPGMLELEYEGFYLRGFFVTKKKYALIDEDGHITTRGLEVVRRDWSEIAKETQAKVLEVILREGSIEKAAGIVKKVVEDLANYRVPVEKLIIHEQITRELKRYKATGPHVAIAKRLQARGIKVKPGTIISYVVLKGSKKISDRVILFDEYDSSRHKYDPDYYIHNQVLPAVLRILEAFGYKEKDLEYQRMKQTGLGAWLKMGKK

SEQ ID NO: 248 - protein, 757 aa, unidentified
  REGION 1..757: note = Description of Unknown: Synthetic polypeptide
MILDTDYITENGKPVIRIFKKEKGEFKIEYDRNFEPYIYALLEDDESIEDIKKITGERHGKKVRIIRVEKVKKKFLGEPIEVWKLVFEHPQDVPAIRDAIRSHPAVREIFEYDIPFAKRYLIDKGLVPMEGGEELKLLAFAIATFYHEGDEFAEGEILMISYADESGAKVITWKKIDLPYVEVVSTEREAIKRFLQVLREKDPDVLLTYNGDNFDFAYIKKRCEKLGLKFTIGRDGSEPKIQRMGDRFAVEVKGRIHLDLAPVVRHTIRLPTYTLEAVYEAVFGKKKEKVYAEEIAEAWKSEEGLKRVAQYSMEDARATYELGREFFPLEVELAKLIGQSVWDVSRSSTGNLVEWYLLRVAYERNELAPNKPGGEEYQRRMRSSYIGGYVKEPEKGLWESIAYLDFRSSAGSIIVTHNVSPDTLEKECKNYDVAPIVGYRFCKDFKGFIPSILEDLIETRQKVKRKMKATIDPIEKKMLDYRQRALKILANSYYGYQGYPKARWYSKECAESVTAWGRHYIETTIKEAEKFGFKVLYADTDGFFATIPNEKPETIKSKAKKFLKHINEKLPGMLELEYEGFYLRGFFVTKKKYALIDEDGHITTRGLEVVRRQWSEIAKETQAKVLEVILREGSIEKAAGIVKKVVEDLANYRVPVEKLIIHEQITRELKRYKATGPHVAIAKRLQARGIKVKPGTIISYVVLKGSKKISDRVILFDEYDSSRHKYDPDYYIHNQVLPAVLRILEAFGYKEKDLEYQ

SEQ ID NO: 249 - protein, 773 aa, unidentified
  REGION 1..773: note = Description of Unknown: Synthetic polypeptide
MILDTDYITENGKPVIRIFKKEKGEFKIEYDRNFEPYIYALLEDDESIEDIKKITGERHGKKVRIIRVEKVKKKFLGEPIEVWKLVFEHPQDYPAIRDAIRSHPAVREIFEYDIPFAKRYLIDKGLVPMEGGEELKLLAFAIATFYHEGDEFAEGEILMISYADESGAKVITWKKIDLPYVEVVSTEREAIKRFLQVLREKDPDVLLTYNGDNFDFAYIKKRCEKLGLKFTIGRDGSEPKIQRMGDRFAVEVKGRIHLDLAPVVRHTIRLPTYTLEAVYEAVFGKKKEKVYAEEIAEAWKSEEGLARVAQYSMEDARATYELGREFFPMEVELAKLIGQSVWDVSRSSTGNLVEWYLLRVAYERNELAPNQPGGEEYQRRMRSSYIGGYVKEPEKGLWESIAYLDFRSSAGSIIVTHNVSPDTLEKECQNYDVAPIVGYRFCKDFKGFIPSILEDLIETRQKVKRKMKATIDPIEKKMLDYRQRALKILANSYYGYQGYPKARWYSKECAESVTAWGRHYIETTIKEAEKFGFKVLYADTDGFFATIPNEKPETIKSKAKKFLKHINEKLPGMLELEYEGFYLRGFFVTKKKYALIDEDGHITTRGLEVVRRDWSEIAKETQAKVLEVILREGSIEKAAGIVKKVVEDLANYRVPVEKLIIHEQITRELKRYKATGPHVAIAKRLQARGIKVKPGTIISYVVLKGSKKISDRVILFDEYDSSRHKYDPDYYIHNQVLPAVLRILEAFGYKEKDLEYQRMKQTGLGAWLKMGKK

SEQ ID NO: 250 - protein, 773 aa, unidentified
  REGION 1..773: note = Description of Unknown: Synthetic polypeptide
MILDTDYITENGKPVIRIFKKEKGEFKIEYDRNFEPYIYALLEDDESIEDIKKITGERHGKKVRIIRVEKVKKKFLGEPIEVWKLVFEHPQDYPAIRDAIRSHPAVREIFEYDIPFAKRYLIDKGLVPMEGGEELKLLAFAIATFYHEGDEFAEGEILMISYADESGAKVITWKKIDLPYVEVVSTEREAIKRFLQVLREKDPDVLLTYNGDNFDFAYIKKRCEKLGLKFTIGRDGSEPKIQRMGDRFAVEVKGRIHLDLAPVVRHTIRLPTYTLEAVYEAVFGKKKEKVYAEEIAEAWKSEEGLKRVAQYSMEDARATYELGREFFPMEVELAKLIGQSVWDVSRSSTGNLVEWYLLRVAYERNELAPNKPGGEEYQRRMRSSYIGGYVKEPEKGLWESIAYLDFRSSAGSIIVTHNVSPDTLEKECKNYDVAPIVGYRFCKDFKGFIPSILEDLIETRQKVKRKMKATIDPIEKKMLDYRQRALKILANSYYGYLGYPKARWYSKECAESVTAWGRHYIETTIKEAEKFGFKVLYADTDGFFATIPNEKPETIKSKAKKFLKHINEKLPGMLELEYEGFYLRGFFVTKKKYALIDEDGHITTRGLEVVRRDWSEIAKETQAKVLEVILREGSIEKAAGIVKKVVEDLANYRVPVEKLIIHEQITRELKRYKATGPHVAIAKRLQARGIKVKPGTIISYVVLKGSKKISDRVILFDEYDSSRHKYDPDYYIHNQVLPAVLRILEAFGYKEKDLEYQRMKQTGLGAWLKMGKK

SEQ ID NO: 251 - protein, 773 aa, unidentified
  REGION 1..773: note = Description of Unknown: Synthetic polypeptide
FILDTDYITENGKPVIRIFKKEKGEFKIEYDRNFEPYIYALLEDDESIEDIKKITGERHGKKVRIIRVEKVKKKFLGEPIEVWKLVFEHPQDYPAIRDAIRSHPAVREIFEYDIPFAKRYLIDKGLVPREGGEELKLLAFAIATFYHEGDEFAEGEILMISYADESGAKVITWKKIDLPYVEVVSTEREAIKRFLQVLREKDPDVLLTYNGDNFDFAYIKKRCEKLGLKFTIGRDGSEPKIQRMGDRFAVEVKGRIHLDLAPVVRHTIRLPTYTLEAVYEAVFGKKKEKVYAEEIAEAWKSEEGLKRVAQYSMEDARATYELGREFFPMEVELAKLIGQSVWDVSRSSTGNLVEWYLLRVAYERNELAPNKPGGEEYQRRMRSSYIGGYVKEPEKGLWESIAYLDFRSSAGSIIVTHNVSPDTLEKECKNYDVAPIVGYRFCKDFKGFIPSILEDLIETRQKVKRKMKATIDPIEKKMLDYRQRALKILANSYYGYQGYPKARWYSKECAESVTAWGRHYIETTIKEAEKFGFKVLYADTDGFFATIPNEKPETIKSKAKKFLKHINEKLPGMLELEYEGFYLRGFFVTKKKYALIDEDGHITTRGLEVVRRDWSEIAKETQAKVLEVILREGSIEKAAGIVKKVVEDLANYRVPVEKLIIHEQITRELKRYKATGPHVAIAKRLQARGIKVKPGTIISYVVLKGSKKISDRVILFDEYDSSRHKYDPDYYIHNQVLPAVLRILEAFGYKEKDLEYQRMKQTGLGAWLKMGKK

SEQ ID NO: 252 - protein, 773 aa, unidentified
  REGION 1..773: note = Description of Unknown: Synthetic polypeptide
MILDTDYITENGKPVIRIFKKEKGEFKIEYDRNFEPYIYALLEDDESIEDIKKITGERHGKKVRIIRVEKVKKKFLGEPIEVWKLVFEHPQDYPAIRDAIRSHPAVREIFEYDIPFAKRYLIDKGLVPMEGGEELKLLAFAIATFYHEGDEFAEGEILMISYADESGAKVITWKKIDLPYVEVVSTEREAIKRFLQVLREKDPDVLLTYNGDNFDFAYIKKRCEKLGLKFTIGRDGSEPKIQRMGDRFAVEVKGRIHLDLAPVVRHTIRLPTYTLEAVYEAVFGKKKEKVYAEEIAEAWKSEEGLKRVAQYSMEDARATYELGREFFPMEVELAKLIGQSVWDVSRSSTGNLVEWYLLRVAYERNELAPNKPGGEEYQRRMRSSYIGGYVKEPEKGLWESIAYLDFRSSAGSIIVTHNVSPDTLEKECKNYDVAPIVGYRFCKDFKGFIPSILEDLIETRQKVKRKMKATIDPIEFKMLDYRQRALKILANSYYGYQGYPKARWYSKECAESVTAWGRHYIETTIKEAEKFGFKVLYADTDGFFATIPNEKPETIKSKAKKFLKHINEKLPGMLELEYEGFYLRGFFVTKKKYALIDEDGHITTRGLEVVRRDWSEIAKETQAKVLEVILREGSIEKAAGIVKKVVEDLANYRVPVEKLIIHEQITRELKRYKATGPHVAIAKRLQARGIKVKPGTIISYVVLKGSKKISDRVILFDEYDSSRHKYDPDYYIHNQVLPAVLRILEAFGYKEKDLEYQRMKQTGLGAWLKMGKK

SEQ ID NO: 253 - protein, 773 aa, unidentified
  REGION 1..773: note = Description of Unknown: Synthetic polypeptide
MILDTDYIIENGKPVIRIFKKEKGEFKIEYDRNFEPYIYALLEDDESIEDIKKITGERHGKKVRIIRVEKVKKKFLGEPIEVWKLVFEHPQDYPAIRDAIRSHPAVREIFEYDIPFAKRYLIDKGLVPMEGGEELKLLAFAIATFYHEGDEFAEGEILMISYADESGAKVITWKKIDLPYVEVVSTEREAIKRFLQVLREKDPDVLLTYNGDNFDFAYIKKRCEKLGLKFTIGRDGSEPKIQRMGDRFAVEVKGRIHLDLAPVVRHTIRLPTYTLEAVYEAVFGKKKEKVYAEEIAEAWKSEEGLKRVAQYSMEDARATYELGREFFPMEVELAKLIGQSVWDVSRSSTGNLVEWYLLRVAYERNELAPNKPGGEEYQRRMRSSYIGGYVKEPEKGLWESIAYLDFRSSAGSIIVTHNVSPDTLEKECKNYDVAPIVGYRFCKDFKGFIPSILEDLIETRQKVKRKMKATIDPIEKKMLDYRQRALKILANSYYGYQGYPKARWYSKECAESVTAWGRHYIETTIKEAEKFGFKVLYADTDGFFATIPNEKPETIKSKAKKFLKHINEKLPGMLELEYEGFYLRGFFVTKKKYALIDEDGHITTRGLEVVRRDWSEIAKETQAKVLEVILREGSIEKAAGIVKKVVEDLANYRVPVEKLIIHEQITRELKRYKATGPHVAIAKRLQARGIKVKPGTIISYVVLKGSKKISDRVILFDEYDSSRHKYDPDYYIHNQVLPAVLRILEAFGYKEKDLEYQRMKQTGLGAWLKMGKK

SEQ ID NO: 254 - protein, 773 aa, unidentified
  REGION 1..773: note = Description of Unknown: Synthetic polypeptide
MILDTDYITENGKPVIRIFKKEKGEFKIEYDRNFEPYIYALLEDDESIEDIKKITGERHGKKVRIIRVEKVKKKFLGEPIEVWKLVFEHPQDYPAIRDAIRSHPAVREIFEYDIPFAKRYLIDKGLVPMEGGEELKLLAFAIATFYHEGDEFAEGEILMISYADESGAKVITWKKIDLPYVEVVSTEREAIKRFLQVLREKDPDVLLTYNGDNFDFAYIKKRCEKLGLKFTIGRDGSEPKIQRMGDRFAVEVKGRIHLDLAPVVRHTIRLPTYTLEAVYEAVFGKKKEKVYAEEIAEAWKSEEGLKRVAQYSMEDARATYELGREFFPMEVELAKLIGQSVWDVSRSSTGNLVEWYLLRVAYERNELAPNKPGGEEYQRRMRSSYIGGYVKEPEKGLWESIAYLDFRSSAGSIIVTHNVSPDTLEKECKNYDVAPIVGYRFCKDFKGFIPSILEDLIETRQKVKRKMKATIDPIEKKMLDYRQRALKILANSYYGYQGYPKARWYSKECAESVTAWGRHYIETTIKEAEKFGFKVLYADTDGFFATIPNEKPETIKSKAKKFLKHINEKLPGMLELEYEGFYLRGFFVTKKKYALIDEDGHITTRGLEVVRRDWSEIAKETQAKVLEVILREGSIEKAAGIVKKVVEDLANYRVPVEKLIIHEQITRELKRYKATGPHVAIAKRLQARGRKVKPGTIISYVVLKGSKKISDRVILFDEYDSSRHKYDPDYYIHNQVLPAVLRILEAFGYKEKDLEYQRMKQTGLGAWLKMGKK

SEQ ID NO: 255 - protein, 773 aa, unidentified
  REGION 1..773: note = Description of Unknown: Synthetic polypeptide
MILDTDYITENGKPVIRIFKKEKGEFKIEYDRNFEPYIYALLEDDESIEDIKKITGERHGKKVRIIRVEKVKKKFLGEPIEVWKLVFEHPQDVPAIRDAIRSHPAVREIFEYDIPFAKRYLIDKGLVPMEGGEELKLLAFAIATFYHEGDEFAEGEILMISYADESGAKVITWKKIDLPYVEVVSTEREAIKRFLQVLREKDPDVLLTYNGDNFDFAYIKKRCEKLGLKFTIGRDGSEPKIQRMGDRFAVEVKGRIHLDLAPVVRHTIRLPTYTLEAVYEAVFGKKKEKVYAEEIAEAWKSEEGLKRVAQYSMEDARATYELGREFFPMEVELAKLIGQSVWDVSRSSTGNLVEWYLLRVAYERNELAPNKPGGEEYQRRMRSSYIGGYVKEPEKGLWESIAYLDFRSSAGSIIVTHNVSPDTLEKECKNYDVAPIVGYRFCKDFKGFIPSILEDLIETRQKVKRKMKATIDPIEKKMLDYRQRALKILANSYYGYQGYPKARWYSKEDAEHVTAWGRHYIETTIKEAEKFGFKVLYADTDGFFATIPNEKPETIKSKAKKFLKHINEKLPGMLELEYEGFYLRGFFVTKKKYALIDEDGHITTRGLEVVRRDWSEIAKETQAKVLEVILREGSIEKAAGIVKKVVEDLANYRVPVEKLIIHEQITRELKDYKATGPHVAIAKRLQARGIKVKPGTIISYVVLKGSKKISDRVILFDEYDSSRHKYDPDYYIHNQVLPAVLRILEAFGYKEKDLEYQRMKQTGLGAWLKMGKK

SEQ ID NO: 256 - protein, 773 aa, unidentified
  REGION 1..773: note = Description of Unknown: Synthetic polypeptide
MILDTDYITENGKPVIRIFKKEKGEFKIEYDRNFEPYIYALLEDDESIEDIKKITGERHGKKVRIIRVEKVKKKFLGEPIEVWKLVFEHPQDYPAIRDAIRSHPAVREIFEYDIPFAKRYLIDKGLVPMEGGEELKLLAFAIATFYHEGDEFAEGEILMISYADESGAKVITWKKIDLPYVEVVSTEREAIKRFLQVLREKDPDVLLTYNGDNFDFAYIKKRCEKLGLKFTIGRDGSEPKIQRMGDRFAVEVKGRIHLDLAPVVRHTIRLPTYTLEAVYEAVFGKKKEQVYAEEIAEAWKSEEGLKRVAQYSMEDARATYELGREFFPMEVELAKLIGQSVWDVSRSSTGNLVEWYLLRVAYERNELAPNKPGGEEYQRRMRSSYIGGYVKEPEKGLWESIAYLDFRSSAGSIIVTHNVSPDTLEKECKNYDVAPIVGYRFCKDFKGFIPSILEDLIETRQKVKRKMKATIDPIEKKMLDYRQRALKILANSYYGYQGYPKARWYSKEQAEDVTAWGRHYIETTIKEAEKFGFKVLYADTDGFFATIPNEKPETIKSKAKKFLKHINEKLPGMLELEYEGFYLRGFFVTKKKYALIDEDGHITTRGLEVVRRDWSEIAKETQAKVLEVILREGSIEKAAGIVKKVVEDLANYRVPVEKLIIHEQITRELKRYKATGPHVAIAKRLQARGIKVKPGTIISYVVLKGSKKISDRVILFDEYDSSRHKYDPDYYIHNQVLPAVLRILEAFGYKEKDLEYQRMKQTGLGAWLKMGKK

SEQ ID NO: 257 - protein, 773 aa, unidentified
  REGION 1..773: note = Description of Unknown: Synthetic polypeptide
MILDTDYITENGKPVIRIFKKEKGEFKIEYDRNFEPYIYALLEDDESIEDIKKITGERHGKKVRIIRVEKVKKKFLGEPIEVWKLVFEHPQDYPAIRDAIRSHPAVREIFEYDIPFAKRYLIDKGLVPMEGGEELKLLAFAIATFYHEGDEFAEGEILMISYADESGAKVITWKKIDLPYVEVVSTEREAIKRFLQVLREKDPDVLLTYNGDNFDFAYIKKRCEKLGLKFTIGRDGSEPKIQRMGDRFAVEVKGRIHLDLAPVVRHTIRLQTYTLEAVYEAVFGKKKEKVYAEEIAEAWKSEEGLKRVAQYSMEDARATYELGREFFPMEVELAKLIGQSVWDVSRSSTGNLVEWYLLRVAYERNELAPNKPGGEEYQRRMRSSYIGGYVKEPEKGLWESIAYLDFRSSAGSIIVTHNVSPDTLEKECKNYDVAPIVGYRFCKDFKGFIPSILEDLIETRQKVKRKMKATIDPIEKKMLDYRQRALKILANSYYGYQGYPKARWYSKECAESVTAWGRHYIETTIKEAEKFGFKVLYADTDGFFATIPNEKPETIKSKAKKFLKHINEKLPGMLELEYEGFYLRGFFVTKKKYALIDEDGHITTRGLEVVRRDWSEIAKETQAKVLEVILREGSIEKAAGIVKKVVEDLANYRVPVEKLIIHEQITRELKRYKATGPHVAIAKRLQARGIKVKPGTIISYVVLKGSKKISDRVILFDEYDSSRHKYDPDYYIHNQVLPAVLRILEAFGYKEKDLEYQRMKQTGLGAWLKMGKK

SEQ ID NO: 258 - protein, 773 aa, unidentified
  REGION 1..773: note = Description of Unknown: Synthetic polypeptide
MILDTDYITENGKPVIRIFKKEKGEFKIEYDRNFEPYIYALLEDDESIEDIKKITGERHGKKVRIIRVEKVKKKFLGEPIEVWKLVFEHPQDVPAIRDAIRSHPAVREIFEYDIPFAKRYLIDKGLVPMEGGEELKLLAFNIATFYHEGDEFAEGEILMISYADESGAKVITWKKIDLPYVEVVSTEREAIKRFLQVLREKDPDVLLTYNGDNFDFAYIKKRCEKLGLKFTIGRDGSEPKIQRMGDRFAVEVKGRIHLDLAPVVRHTIRLPTYTLEAVYEAVFGKKKEKVYAEEIAEAWKSEEGLKRVAQYSMEDARATYELGREFFPLEVELAKLIGQSVWDVSRSSTGNLVEWYLLRVAYERNELAPNKPGGEEYQRRMRSSYIGGYVKEPEKGLWESIAYLDFRSSAGSIIVTHNVSPDTLEKECKNYDVAPIVGYRFCKDFKGFIPSILEDLIETRQKVKRKMKATIDPIEKKMLDYRQRALKILANSYYGYQGYPKARWYSKECAESVTAWGRHYIETTIKEAEKFGFKVLYADTDGFFATIPNEKPETIKSKAKKFLKHINEKLPGMLELEYEGFYLRGFFVTKKYYALIDEDGHITTRGLEVVRRDWSEIAKETQAKVLEVILREGSIEKAAGIVKKVVEDLANYRVPVEKLIIHEQITRELKRYKATGPHVAIAKRLQARGIKVKPGTIISYVVLKGSKKISDRVILFDEYDSSRHKYDPDYYIHNQVLPAVLRILEAFGYKEKDLEYQRMKQTGLGAWLKMGKK

SEQ ID NO: 259 - protein, 773 aa, unidentified
  REGION 1..773: note = Description of Unknown: Synthetic polypeptide
MILDTDYITENGKPVIRIFKKEKGEFKIEYDRNFEPYIYALLEDDESIEDIKKITGERHGKKVRIIRVEKVKKKFLGEPIEVWKLVFEHPQDVPAIRDAIRSHPAVREIFEYDIPFAKRYLIDKGLVPMEGGEELKLLAFAIATFYHEGDEFAEGEILMISYADESGAKVITWKKIDLPYVEVVSTEREAIKRFLQVLREKDPDVLLTYNGDNFDFAYIKKRCEKLGLKFTIGRDGSEPKIQRMGDRFAVEVKGRIHLDLAPVVRHTIRLPTYTLEAVYEAVFGKKKEKVYAEEIAEAWKSEEGLKRVAQYSMEDARATYELGREFFPMEVELAKLIGQSVWDVSRSSTGNLVEWYLLRVAYERNELAPNKPGGEEYQRRMRSSYIGGYVKEPEKGLWESIAYLDFRSSAGSIIVTHNVSPDTLEKECKNYDVAPIVGYRFCKDFKGFIPSILEDLIETRQKVKRKMKATIDPIEKKMLDYRQRALKILANSYYGYMGYPKARWYSKENAESVTAWGRHYIETTIKEAEKFGFKVLYADTDGFFATIPNEKPETIKSKAKKFLKHINEKLPGMLELEYEGFYLRGFFVTKKKYALIDEDGHITTRGLEVVRRDWSEIAKETQAKVLEVILREGSIEKAAGIVKKVVEDLANYRVPVEKLIIHEQITRELKRYKATGPHVAIAKRLQARGIKVKPGTIISYVVLKGSKKISDRVILFDEYDSSRHKYDPDYYIHNQVLPAVLRILEAFGYKEKDLEYQRMKQTGLGAWLKMGKK

SEQ ID NO: 260 - protein, 773 aa, unidentified
  REGION 1..773: note = Description of Unknown: Synthetic polypeptide
MILDTDYITENGKPVIRIFKKEKGEFKIEYDRNFEPYIYALLEDDESIEDIKKITGERHGKKVRIIRVEKVKKKFLGEPIEVWKLVFEHPQDVPAIRDAIRSHPAVREIFEYDIPFAKRYLIDKGLVPMEGGEELKLLAFAIVTFYHEGDEFAEGEILWISYADESGAKVITWKKIDLPYVEVVSTEREAIKRFLQVLREKDPDVLLTYNGDNFDFAYIKKRCEKLGLKFTIGRDGSEPKIQRMGDRFAVEVKGRIHLDLAPVVRHTIRLPTYTLEAVYEAVFGKKKEKVYAEEIAEAWKSEEGLKRVAQYSMEDARATYELGREFFPMEVELAKLIGQSVWDVSRSSTGNLVEWYLLRVAYERNELAPNKPGGEEYQRRMRSSYIGGYVKEPEKGLWESIAYLDFRSSAGSIIVTHNVSPDTLEKECKNYDVAPIVGYRFCKDFKGFIPSILEDLIETRQKVKRKMKATIDPIEKKMLDYRQRALKILANSYYGYQGYPKARWYSKECAESVTAWGRHYIETTIKEAEKFGFKVLYADTDGFFATIPNEKPETIKSKAKKFLKHINEKLPGMLELEYEGFYLRGFFVTKKKYALIDEDGHITTRGLEVVRRDWSEIAKETQAKVLEVILREGSIEKAAGIVKKVVEDLANYRVPVEKLIIHEQITRELKDYKATGPHVAIAKRLQARGIKVKPGTIISYVVLKGSKKISDRVILFDEYDSSRHKYDPDYYIHNQVLPAVLRILEAFGYKEKDLEYQRMKQTGLGAWLKMGKK

SEQ ID NO: 261 - protein, 773 aa, unidentified; identical to SEQ ID NO: 75
  REGION 1..773: note = Description of Unknown: Synthetic polypeptide

SEQ ID NO: 262 - protein, 773 aa, unidentified
  REGION 1..773: note = Description of Unknown: Synthetic polypeptide
MILDTDYITENGKPVIRIFKKEKGEFKIEYDRNFEPYIYALLEDDESIEDIKKITGERHGKKVRIIRVEKVKKKFLGEPIEVWKLVFEHPQDVPAIRDAIRSHPAVREIFEYDIPFAKRYLIDKGLVPMEGGEELKLLAFAIATFYHEGDEFAEGEILMISYADESGAKVITWKKIDLPYVEVVSTEREAIKRFLQVLREKDPDVLLTYNGDNFDFAYIKKRCEKLGLKFTIGRDGSEPKIQRMGDRFAVEVKGRIHLDLAPVVRHTIRLPTYTLEAVYEAVFGKKKEKVYAEEIAEAWKSEEGLKRVAQYSMEDARATYELGREFFPMEVELAKLIGQSVWDVSRSSTGNLVEWYLLRVAYERNELAPNKPGGEEYQRRMRSSYIGGYVKEPEKGLWESIAYLDFRSSAGSIIVTHNVSPDTLEKECKNYDVAPIVGYRFCKDFKGFIPSILEDLIETRQKVKRKMKATIDPIEKKMLDYRQRALKILANSYYGYQGYPKARWYSKECAESVTAWGRHYIETTIKEAEKFGFKVLYADTDGFFATIPNEKPETIKSKAKKFLKHINEKLPGMLELEYEGFYLRGFFVTKKKYALIDEDGHITTRGLEVVRRDWSEIAKETQAKVLEVILREGSIEKAAGIVKKVVEDLANYRVPVEKLIIHEFITRELKRYKATGPHVAIAKRLQARGIKVKPGTIISYVVLKGSKKISDRVILFDEYDSSRHKYDPDYYIHNQVLPAVLRILEAFGYKEKDLEYQRMKQTGLGAWLKMGKK

SEQ ID NO: 263 - protein, 773 aa, unidentified
  REGION 1..773: note = Description of Unknown: Synthetic polypeptide
MILDTDYITENGKPVIRIFKKEKGEFKIEKDRNFEPYIYALLEDDESIEDIKKITGERHGKKVRIIRVEKVKKKFLGEPIEVWKLVFEHPQDYPAIRDAIRSHPAVREIFEYDIPFAKRYLIDKGLVPMEGGEELKLLAFAIATFYHEGDEFAEGEILMISYADESGAKVITWKKIDLPYVEVVSTEREAIKRFLQVLREKDPDVLLTYNGDNFDFAYIKKRCEKLGLKFTIGRDGSEPKIQRMGDRFAVEVKGRIHLDLAPVVRHTIRLPTYTLEAVYEAVFGKKKEKVYAEEIAEAWKSEEGLKRVAQYSMEDARATYELGREFFPMEVELAKLIGQSVWDVSRSSTGNLVEWYLLRVAYERNELAPNKPGGEEYQRRMRSSYIGGYVKEPEKGLWESIAYLDFRSSAGSIIVTHNVSPDTLEKECKNYDVAPIVGYRFCKDFKGFIPSILEDLIETRQKVKRKMKATIDPIEKKMLDYRQRALKILANSYYGYQGYPKARWYSKECAESVTAWGRHYIETTIKEAEKFGFKVLYADTDGFFATIPNEKPETIKSKAKKFLKHINEKLPGMLELEYEGFYLRGFFVTKKKYALIDEDGHITTRGLEVVRRDWSEIAKETQAKVLEVILREGSIEKAAGIVKKVVEDLANYRVPVEKLIIHEQITRELKRYKATGPHVAIAKRLQARGIKVKPGTIISYVVLKGSKKISDRVILFDEYDSSRHKYDPDYYIHNQVLPAVLRILEAFGYKEKDLEYQRMKQTGLGAWLKMGKK

SEQ ID NO: 264 - protein, 773 aa, unidentified
  REGION 1..773: note = Description of Unknown: Synthetic polypeptide
MILDTDYITENGKPVIRIFKKEKGEFKIEYDRNFEPYIYALLEDDESIEDIKKITGERHGKKVRIIRVEKVKKKFLGEPIEVWKLVFEHPQDYPAIRDAIRSHPAVREIFEYDIPFAKRYLIDKGLVPMEGGEELKLLAFAIATFYHEGDEFAEGEILMISYADESGAKVITWKKIDLPYVEVVSTEREAIKRFLQVLREKDPDVLLTYNGDNFDFAYIKKRCEKLGLKFTIGRDGSEPKIQRMGDRFAVEVKGRIHLDLAPVVRHTIRLPTYTLEAVYEAVFGKKKEQVYAEEIAEAWKSEEGLKRVAQYSMEDARATYELGREFFPMEVELAKLIGQSVWDVSRSSTGNLVEWYLLRVAYERNELAPNKPGGEEYQRRMRSSYIGGYVKEPEKGLWESIAYLDFRSSAGSIIVTHNVSPDTLEKECKNYDVAPIVGYRFCKDFKGFIPSILEDLIETRQKVKRKMKATIDPIEKKMLDYRQRALKILANSYYGYQGYPKARWYSKEDAEKVTAWGRHYIETTIKEAEKFGFKVLYADTDGFFATIPNEKPETIKSKAKKFLKHINEKLPGMLELEYEGFYLRGFFVTKKKYALIDEDGHITTRGLEVVRRDWSEIAKETQAKVLEVILREGSIEKAAGIVKKVVEDLANYRVPVEKLIIHEQITRELKRYKATGPHVAIAKRLQARGIKVKPGTIISYVVLKGSKKISDRVILFDEYDSSRHKYDPDYYIHNQVLPAVLRILEAFGYKEKDLEYQRMKQTGLGAWLKMGKK

SEQ ID NO: 265 - protein, 773 aa, unidentified
  REGION 1..773: note = Description of Unknown: Synthetic polypeptide
MILDTDYITENGKPVIRIFKKEKGEFKIEYDRNFEPYIYALLEDDESIEDIKKITGERHGKKVRIIRVEKVKKKFLGEPIEVWKLVFEHPQDYPAIRDAIRSHPAVREIFEYDIPFAKRYLIDKGLVPMEGGEELKLLAFAIATFYHEGDEFAEGEILMISYADESGAKVITWKKIDLPYVEVVSTEREAIKRFLQVLREKDPDVLLTYNGDNFDFAYIKKRCEKLGLKFTIGRDGSEPKIQRMGDRFAVEVKGRIHLDLAPVVRHTIRLPTYTLEAVYEAVFGKKKEKVYAEEIAEAWKSEEGLKRVAQYSMEDARATYELGREFFPMEVELAKLIGQSVWDVSRSSTGNLVEWYLLRVAYERNELAPNKPGGEEYQRRMRSSYAGGYVKEPEKGLWESIAYLDFRSSAGSIIVTHNVSPDTLEKECKNYDVAPIVGYRFCKDFKGFIPSILEDLIETRQKVKRKMKATIDPIEKKMLDYRQRALKILANSYYGYQGYPKARWYSKECAESVTAWGRHYIETTIKEAEKFGFKVLYADTDGFFATIPNEKPETIKSKAKKFLKHINEKLPGMLELEYEGFYLRGFFVTKKKYALIDEDGHITTRGLEVVRRDWSEIAKETQAKVLEVILREGSIEKAAGIVKKVVEDLANYRVPVEKLIIHEQITRELKRYKATGPHVAIAKRLQARGIKVKPGTIISYVVLKGSKKISDRVILFDEYDSSRHKYDPDYYIHNQVLPAVLRILEAFGYKEKDLEYQRMKQTGLGAWLKMGKK

SEQ ID NO: 266 - protein, 773 aa, unidentified
  REGION 1..773: note = Description of Unknown: Synthetic polypeptide
MILDTDYITENGKPVIRIFKKEKGEFKIEYDRNFEPYIYALLEDDESIEDIKKITGERHGKKVRIIRVEKVKKKFLGEPIEVWKLVFEHPVDFPAIRDAIRSHPAVREIFEYDIPFAKRYLIDKGLVPMEGGEELKLLAFNIATFYHEGDEFAEGEILMISYADESGAKVITWKKIDLPYVEVVSTEREAIKRFLQVLREKDPDVLLTYNGDNFDFAYIKKRCEKLGLKFTIGRDGSEPKIQRMGDRFAVEVKGRIHLDLAPVVRHTIRLPTYTLEAVYEAVFGKKKEKVYAEEIAEAWKSEEGLKRVAQYSMEDARATYELGREFFPLEVELAKLIGQSVWDVSRSSTGNLVEWYLLRVAYERNELAPNKPGGEEYQRRMRSSYIGGYVKEPEKGLWESIAYLDFRSSAGSIIVTHNVSPDTLEKECKNYDVAPIVGYRFCKDFKGFIPSILEDLIETRQKVKRKMKATIDPIEKKMLDYRQRALKILANSYYGYQGYPKARWYSKECAESVTAWGRHYIETTIKEAEKFGFKVLYADTDGFFATIPNEKPETIKSKAKKFLKHINEKLPGMLELEYEGFYLRGFFVTKKKYALIDEDGHITTRGLEVVRRDWSEIAKETQAKVLEVILREGSIEKAAGIVKKVVEDLANYRVPVEKLIIHEQITRELKRYKATGPHVAIAKRLQARGIKVKPGTIISYVVLKGSKKISDRVILFDEYDSSRHKYDPDYYIHNQVLPAVLRILEAFGYKEKDLEYQRMKQTGLGAWLKMGKK

SEQ ID NO: 267 - protein, 773 aa, unidentified
  REGION 1..773: note = Description of Unknown: Synthetic polypeptide
MILDTDYITENGKPVIRIFKKEKGEFKIEYDRNFEPYIYALLEDDESIEDIKKITGERHGKKVRIIRVEKVKKKFLGEPIEVWKLVFEHPQDVPAIRDAIRSHPAVREIFEYDIPFAKRYLIDKGLVPMEGGEELKLLAFAIATFYHEGDEFAEGEILMISYADESGAKVITWKKIDLPYVEVVSTEREAIKRFLQVLREKDPDVLLTYNGDNFDFAYIKKRCEKLGLKFTIGRDGSEPKIQRMGDRFAVEVKGRIHLDLAPVVRHTIRLPTYTLEAVYEAVFGKKKEKVYAEEIAEAWKSEEGLKRVAQYSMEDARATYELGREFFPMEVELAKLIGQSVWDVSRSSTGNLVEWYLLRVAYERNELAPNKPGGEEYQRRMRSSYIGGYVKEPEKGLWESIAYLDFRSSAGSIIVTHNVSPDTLEKECKNYDVAPIVGYRFCKDFKGFIPSILEDLIETRQKVKRKMKATIDPIEKKMLDYRQRALKILANSYYGYQGYPKARWYSKEDAEKVTAWGRHYIETTIKEAEKFGFKVLYADTDGFFATIPNEKPETIKSKAKKFLKHINEKLPGMLELEYEGFYLRGFFVTKKKYALIDEDGHITTRGLEVVRRDWSEIAKETQAKVLEVILREGSIEKAAGIVKKVVEDLANYRVPVEKLIIHEQITRELKDYKATGPHVAIAKRLQARGIKVKPGTIISYVVLKGSKKISDRVILFDEYDSSRHKYDPDYYIHNQVLPAVLRILEAFGYKEKDLEYQRMKQTGLGAWLKMGKK

SEQ ID NO: 268 - protein, 773 aa, unidentified
  REGION 1..773: note = Description of Unknown: Synthetic polypeptide
MILDTDYITENGKPVIRIFKKEKGEFKIEYDRNFEPYIYALLEDDESIEDIKKITGERHGKKVRIIRVEKVKKKFLGEPIEVWKLVFEHPQDYPAIRDAIRSHPAVREIFEYDIPFAKRYLIDKGLVPMEGGEELKLLAFAIATFYHEGDEFAEGEILMISYADESGAKVITWKKIDLPYVEVVSTEREAIKRFLQVLREKDPDVLLTYNGDNFDFAYIKKRCEKLGLKFTIGRDGSEPKIQRMGDRFAVEVKGRIHLDLAPVVRHTIRLPTYTLEAVYEAVFGKKKEKVYAEEIAEAWKSEEGLKRVAQYSMEDARATYELGREFFPMEVELAKLIGQSVWDVSRSSTGNLVEWYLLRVAYERNELAPNKPGGEEYQRRMRSSYIGGYVKEPEKGLWESIAYLDFRSSAGSIIVTHNVSPDTLEKECKNYDVAPIVGYRFCKDFKGFIPSILEDLIETRQKVKRKMKATIDPIEKKMLDYRQRALKQLANSYYGYQGYPKARWYSKECAESVTAWGRHYIETTIKEAEKFGFKVLYADTDGFFATIPNEKPETIKSKAKKFLKHINEKLPGMLELEYEGFYLRGFFVTKKKYALIDEDGHITTRGLEVVRRDWSEIAKETQAKVLEVILREGSIEKAAGIVKKVVEDLANYRVPVEKLIIHEQITRELKRYKATGPHVAIAKRLQARGIKVKPGTIISYVVLKGSKKISDRVILFDEYDSSRHKYDPDYYIHNQVLPAVLRILEAFGYKEKDLEYQRMKQTGLGAWLKMGKK

SEQ ID NO: 269 - protein, 773 aa, unidentified
  REGION 1..773: note = Description of Unknown: Synthetic polypeptide
MILDTDYITENGKPVIRIFKKEKGEFKIEYDRNFEPYIYALLEDDESIEDIKKITGERHGKKVRIIRVEKVKKKFLGEPIEVWKLVFEHPRDVPAIQDAIRSHPAVREIFEYDIPFAKRYLIDKGLVPMEGGEELKLLAFNIATFYHEGDEFAEGEILMISYADESGAKVITWKKIDLPYVEVVSTEREAIKRFLQVLREKDPDVLLTYNGDNFDFAYIKKRCEKLGLKFTIGRDGSEPKIQRMGDRFAVEVKGRIHLDLAPVVRHTIRLPTYTLEAVYEAVFGKKKEKVYAEEIAEAWKSEEGLKRVAQYSMEDARATYELGREFFPLEVELAKLIGQSVWDVSRSSTGNLVEWYLLRVAYERNELAPNKPGGEEYQRRMRSSYIGGYVKEPEKGLWESIAYLDFRSSAGSIIVTHNVSPDTLEKECKNYDVAPIVGYRFCKDFKGFIPSILEDLIETRQKVKRKMKATIDPIEKKMLDYRQRALKILANSYYGYQGYPKARWYSKECAESVTAWGRHYIETTIKEAEKFGFKVLYADTDGFFATIPNEKPETIKSKAKKFLKHINEKLPGMLELEYEGFYLRGFFVTKKKYALIDEDGHITTRGLEVVRRDWSEIAKETQAKVLEVILREGSIEKAAGIVKKVVEDLANYRVPVEKLIIHEQITRELKRYKATGPHVAIAKRLQARGIKVKPGTIISYVVLKGSKKISDRVILFDEYDSSRHKYDPDYYIHNQVLPAVLRILEAFGYKEKDLEYQRMKQTGLGAWLKMGKK

SEQ ID NO: 270 - protein, 773 aa, unidentified
  REGION 1..773: note = Description of Unknown: Synthetic polypeptide
MILDTDYITENGKNVIRIFKKEKGEFKIEYDRNFEPYIYALLEDDESIEDIKKITGERHGKKVRIIRVEKVKKKFLGEPIEVWKLVFEHPQDYPAIRDAIRSHPAVREIFEYDIPFAKRYLIDKGLVPMEGGEELKLLAFAIATFYHEGDEFAEGEILMISYADESGAKVITWKKIDLPYVEVVSTEREAIKRFLQVLREKDPDVLLTYNGDNFDFAYIKKRCEKLGLKFTIGRDGSEPKIQRMGDRFAVEVKGRIHLDLAPVVRHTIRLPTYTLEAVYEAVFGKKKEKVYAEEIAEAWKSEEGLKRVAQYSMEDARATYELGREFFPMEVELAKLIGQSVWDVSRSSTGNLVEWYLLRVAYERNELAPNKPGGEEYQRRMRSSYIGGYVKEPEKGLWESIAYLDFRSSAGSIIVTHNVSPDTLEKECKNYDVAPIVGYRFCKDFKGFIPSILEDLIETRQKVKRKMKATIDPIEKKMLDYRQRALKILANSYYGYQGYPKARWYSKECAESVTAWGRHYIETTIKEAEKFGFKVLYADTDGFFATIPNEKPETIKSKAKKFLKHINEKLPGMLELEYEGFYLRGFFVTKKKYALIDEDGHITTRGLEVVRRDWSEIAKETQAKVLEVILREGSIEKAAGIVKKVVEDLANYRVPVEKLIIHEQITRELKRYKATGPHVAIAKRLQARGIKVKPGTIISYVVLKGSKKISDRVILFDEYDSSRHKYDPDYYIHNQVLPAVLRILEAFGYKEKDLEYQRMKQTGLGAWLKMGKK

SEQ ID NO: 271 - protein, 773 aa, unidentified
  REGION 1..773: note = Description of Unknown: Synthetic polypeptide
MILDTDYITENGKPVIRIFKKEKGEFKIEYDRNFEPYIYALLEDDESIEDIKKITGERHGKKVRIIRVEKVKKKFLGEPIEVWKLVFEHPQDVPAIRDAIRSHPAVREIFEYDIPFAKRYLIDKGLVPMEGGEELKLLAFAIATFYHEGDEFAEGEILMISYADESGAKVITWKKIDLPYVEVVSTEREAIKRFLQVLREKDPDVLLTYNGDNFDFAYIKKRCEKLGLKFTIGRDGSEPKIQRMGDRFAVEVKGRIHLDLAPVVRHTIRLPTYTLEAVYEAVFGKKKEKVYAEEIAEAWKSEEGLKRVAQYSMEDARATYELGREFFPMEVELAKLIGQSVWDVSRSSTGNLVEWYLLRVAYERNELAPNKPGGEEYQRRMRSSYIGGYVKEPEKGLWESIAYLDFRSSAGSIIVTHNVSPDTLEKECKNYDVAPIVGYRFCKDFKGFIPSILEDLIETRQKVKRKMKATIDPIEKKMLDYRQRALKILANSYYGYQGYPKARWYSKEQAERVTAWGRHYIETTIKEAEKFGFKVLYADTDGFFATIPNEKPETIKSKAKKFLKHINEKLPGMLELEYEGFYLRGFFVTKKKYALIDEDGHITTRGLEVVRRDWSEIAKETQAKVLEVILREGSIEKAAGIVKKVVEDLANYRVPVEKLIIHEQITRELKDYKATGPHVAIAKRLQARGIKVKPGTIISYVVLKGSKKISDRVILFDEYDSSRHKYDPDYYIHNQVLPAVLRILEAFGYKEKDLEYQRMKQTGLGAWLKMGKK

SEQ ID NO: 272 - protein, 773 aa, unidentified
  REGION 1..773: note = Description of Unknown: Synthetic polypeptide
MILDTDYITENGKPVIRIFKKEKGEFKIEYDRNFEPYIYALLEDDESIEDIKKITGERHGKKVRIIRVEKVKKKFLGEPIEVWKLVFEHPQDVPAIRDAIRSHPAVREIFEYDIPFAKRYLIDKGLVPMEGGEELKLLAFNIATFYHEGDEFAEGEILMISYADESGAKVITWKKIDLPYVEVVSTEREAIKRFLQVLREKDPDVLLTYNGDNFDFAYIKKRCEKLGLKFTIGRDGSEPKIQRMGDRFAVEVKGRIHLDLAPVVRHTIRLPTYTLEAVYEAVFGKKKEKVYAEEIAEAWKSEEGLKRVAQYSMEDARATYELGREFFPLEVELAKLIGQSVWDVSRSSTGNLVEWYLLRVAYERNELAPNVPGGEEYQRRMRSSYIGGYVKEPEKGLWESIAYLDFRSSAGSIIVTHNVSPDTLEKECKNYDVAPIVGYRFCKDFKGFIPSILEDLIETRQKVKRKMKATIDPIEKKMLDYRQRALKILANSYYGYQGYPKARWYSKECAESVTAWGRHYIETTIKEAEKFGFKVLYADTDGFFATIPNEKPETIKSKAKKFLKHINEKLPGMLELEYEGFYLRGFFVTKKKYALIDEDGHITTRGLEVVRRDWSEIAKETQAKVLEVILREGSIEKAAGIVKKVVEDLANYRVPVEKLIIHEQITRELKRYKATGPHVAIAKRLQARGIKVKPGTIISYVVLKGSKKISDRVILFDEYDSSRHKYDPDYYIHNQVLPAVLRILEAFGYKEKDLEYQRMKQTGLGAWLKMGKK

SEQ ID NO: 273 - protein, 773 aa, unidentified
  REGION 1..773: note = Description of Unknown: Synthetic polypeptide
MILDTDYITENGKPVIRIFKKEKGEFKIEYDRNFEPYIYALLEDDESIEDIKKITGERHGKKVRIIRVEKVKKKFLGEPIEVWKLVFEHPQDYPAIRDAIRSHPAVREIFEYDIPFAKRYLIDKGLVPMEGGEELKLLAFAIATFYHEGDEFAEGEILMISYADESGAKVITWKKIDLPYVEVVSTEREAIKRFLQVLREKDPDVLLTYNGDNFDFAYIKKRCEKLGLKFTIGRDGSEPKIQRMGDRFAVEVKGRIHLDLAPVVRHTIRLPTYTLEAVYEAVFGKKKEKVYAEEIAEAWKSEEGLKRVAQYSMEDARATYELGREFFPMEVELAKLIGQSVWDVSRSSTGNLVEWYLLRVAYERNELAPNKPGGEEYQRRMRSSYIGGYVKEPEKGLWESIAYLDFRSSAGSIIVTHNVSPDTLEKECKNYDVAPIVGYRFCKDFKGFIPSILEDLIETRQKVKRKMKATIDPIEKKMLDYRQRALKILANSYYGYQGYPKARWYSKECAESVTAWGRHYIETTIKEAEKFGFKVLYADTDGFFATIPNEKPETIKSKAKKFLKHINEKLPGMLELEYEGFYLRGFFVTKKKYALIDEDGHITTRQLEVVRRDWSEIAKETQAKVLEVILREGSIEKAAGIVKKVVEDLANYRVPVEKLIIHEQITRELKRYKATGPHVAIAKRLQARGIKVKPGTIISYVVLKGSKKISDRVILFDEYDSSRHKYDPDYYIHNQVLPAVLRILEAFGYKEKDLEYQRMKQTGLGAWLKMGKK

SEQ ID NO: 274 - protein, 773 aa, unidentified
  REGION 1..773: note = Description of Unknown: Synthetic polypeptide
MILDTDYITENGKPVIRIFKKEKGEFKIEYDRNFEPYIYALLEDDESIEDIKKITGERHGKKVRIIRVEKVKKKFLGEPIEVWKLVFEHPQDYPAIRDAIRSHPAVREIFEYDIPFAKRYLIDKGLVPMEGGEELKLLAFAIATFYHEGDEFAEGEILMISYADESGAKVITWKKIDLPYVEVVSTEREAIKRFLQVLREKDPDVLLTYNGDNFDFAYIKKRCEKLGLKFTIGRDGSEPKIQRMGDRFAVEVKGRIHLDLAPVVRHTIRLPTYTLEAVYEAVFGKKKEKVYAEEIAEAWKSEEGLKRVAQYSMEDARATYELGREFFPMEVELAKLIGQSVWDVSRSSTGNLVEWYLLRVAYERNELAPNKPGGEEYQRRMRSSYIGGYVKEPEKGLWESIAYLDFRSSAGSIIVTHNVSPDTLEKECKNYDVAPIVGYRFCKDFKGFIPSILEDLIETRQKVKRKMKATIDPIEKKMLDYRQRALKILANSYYGYQGYPKARWYSKECAESVTAWGRHYIETTIKEAEKFGFKVLYADTDGFFATIPNEKPETIKSKAKKFLKHINEKLPGMLELEYEGFYLRGFFVTKKWYALIDEDGHITTRGLEVVRRDWSEIAKETQAKVLEVILREGSIEKAAGIVKKVVEDLANYRVPVEKLIIHEQITRELKRYKATGPHVAIAKRLQARGIKVKPGTIISYVVLKGSKKISDRVILFDEYDSSRHKYDPDYYIHNQVLPAVLRILEAFGYKEKDLEYQRMKQTGLGAWLKMGKK

SEQ ID NO: 275 - protein, 773 aa, unidentified
  REGION 1..773: note = Description of Unknown: Synthetic polypeptide
MILDTDYITENGKPVIRIFKKEKGEFKIEYDRNFEPYIYALLEDDESIEDIKKITGERHGKKVRIIRVEKVKKKFLGEPIEVWKLVFEHPQDYPAIRDAIRSHPAVREIFEYDIPFAKRYLIDKGLVPMEGGEELKLLAFAIATFYHEGDEFAEGEILMISYADESGAKVITWKKIDLPYVEVVSTEREAIKRFLQVLREKDPDVLLTYNGDNFDFAYIKKRCEKLGLKFTIGRDGSEPKIQRMGDRFAVEVKGRIHLDLAPVVRHTIRLPTYTLEAVYEAVFGKKKEKVYAEEIAEAWKSEEGLKRVAQYSMEDARATYELGREFFPMEVELAKLIGQSVWDVSRSSTGNLVEWYLLRVAYERNELAPNKPGGEEYQRRMRSSYIGGIVKEPEKGLWESIAYLDFRSSAGSIIVTHNVSPDTLEKECKNYDVAPIVGYRFCKDFKGFIPSILEDLIETRQKVKRKMKATIDPIEKKMLDYRQRALKILANSYYGYQGYPKARWYSKECAESVTAWGRHYIETTIKEAEKFGFKVLYADTDGFFATIPNEKPETIKSKAKKFLKHINEKLPGMLELEYEGFYLRGFFVTKKKYALIDEDGHITTRGLEVVRRDWSEIAKETQAKVLEVILREGSIEKAAGIVKKVVEDLANYRVPVEKLIIHEQITRELKRYKATGPHVAIAKRLQARGIKVKPGTIISYVVLKGSKKISDRVILFDEYDSSRHKYDPDYYIHNQVLPAVLRILEAFGYKEKDLEYQRMKQTGLGAWLKMGKK

SEQ ID NO: 276 - protein, 773 aa, unidentified
  REGION 1..773: note = Description of Unknown: Synthetic polypeptide
MILDTDFITENGKPVIRIFKKEKGEFKIEYDRNFEPYIYALLEDDESIEDIKKITGERHGKKVRIIRVEKVKKKFLGEPIEVWKLVFEHPQDYPAIRDAIRSHPAVREIFEYDIPFAKRYLIDKGLVPMEGGEELKLLAFAIATFYHEGDEFAEGEILMISYADESGAKVITWKKIDLPYVEVVSTEREAIKRFLQVLREKDPDVLLTYNGDNFDFAYIKKRCEKLGLKFTIGRDGSEPKIQRMGDRFAVEVKGRIHLDLAPVVRHTIRLPTYTLEAVYEAVFGKKKEKVYAEEIAEAWKSEEGLKRVAQYSMEDARATYELGREFFPMEVELAKLIGQSVWDVSRSSTGNLVEWYLLRVAYERNELAPNKPGGEEYQRRMRSSYIGGYVKEPEKGLWESIAYLDFRSSAGSIIVTHNVSPDTLEKECKNYDVAPIVGYRFCKDFKGFIPSILEDLIETRQKVKRKMKATIDPIEKKMLDYRQRALKILANSYYGYQGYPKARWYSKECAESVTAWGRHYIETTIKEAEKFGFKVLYADTDGFFATIPNEKPETIKSKAKKFLKHINEKLPGMLELEYEGFYLRGFFVTKKKYALIDEDGHITTRGLEVVRRDWSEIAKETQAKVLEVILREGSIEKAAGIVKKVVEDLANYRVPVEKLIIHEQITRELKRYKATGPHVAIAKRLQARGIKVKPGTIISYVVLKGSKKISDRVILFDEYDSSRHKYDPDYYIHNQVLPAVLRILEAFGYKEKDLEYQRMKQTGLGAWLKMGKK

SEQ ID NO: 277 - protein, 773 aa, unidentified
  REGION 1..773: note = Description of Unknown: Synthetic polypeptide
MILDTDYITENGKPVIRIFKKEKGEFKIEYDRNFEPYIYALLEDDESIEDIKKITGERHGKKVRIIRVEKVKKKFLGEPIEVWKLVFEHPQDYPAIRDAIRSHPAVREIFEYDIPFAKRYLIDKGLVPMEGGEELKLLAFAIATFYHEGDEFAEGEILMISYADESGAKVITWKKIDLPYVEVVSTEREAIKRFLQVLREKDPDVLLTYNGDNFDFAYIKKRCEKLGLKFTIGRDGSEPKIQRMGDRFAVEVKGRIHLDLAPVVRHTIRLPTYTLEAVYEAVFGKKKEKVYAEEIAEAWKSEEGLKRVAQYSMEDARATYELGREFFPMEVELAKLIGQSVWDVSRSSTGNLVEWYLLRVAKERNELAPNKPGGEEYQRRMRSSYIGGYVKEPEKGLWESIAYLDFRSSAGSIIVTHNVSPDTLEKECKNYDVAPIVGYRFCKDFKGFIPSILEDLIETRQKVKRKMKATIDPIEKKMLDYRQRALKILANSYYGYQGYPKARWYSKECAESVTAWGRHYIETTIKEAEKFGFKVLYADTDGFFATIPNEKPETIKSKAKKFLKHINEKLPGMLELEYEGFYLRGFFVTKKKYALIDEDGHITTRGLEVVRRDWSEIAKETQAKVLEVILREGSIEKAAGIVKKVVEDLANYRVPVEKLIIHEQITRELKRYKATGPHVAIAKRLQARGIKVKPGTIISYVVLKGSKKISDRVILFDEYDSSRHKYDPDYYIHNQVLPAVLRILEAFGYKEKDLEYQRMKQTGLGAWLKMGKK

SEQ ID NO: 278 - protein, 773 aa, unidentified
  REGION 1..773: note = Description of Unknown: Synthetic polypeptide
MILDTDYITENGKPVIRIFKKEKGEFKIEYDRNFEPYIYALLEDDESIEDIKKITGERHGKKVRIIRVEKVKKKFLGEPIEVWKLVFEHPQDVPAIRDAIRSHPAVREIFEYDIPFAKRYLIDKGLVPMEGGEELKLLAFAIITFYHEGDEFAEGEILWISYADESGAKVITWKKIDLPYVEVVSTEREAIKRFLQVLREKDPDVLLTYNGDNFDFAYIKKRCEKLGLKFTIGRDGSEPKIQRMGDRFAVEVKGRIHLDLAPVVRHTIRLPTYTLEAVYEAVFGKKKEKVYAEEIAEAWKSEEGLKRVAQYSMEDARATYELGREFFPMEVELAKLIGQSVWDVSRSSTGNLVEWYLLRVAYERNELAPNKPGGEEYQRRMRSSYIGGYVKEPEKGLWESIAYLDFRSSAGSIIVTHNVSPDTLEKECKNYDVAPIVGYRFCKDFKGFIPSILEDLIETRQKVKRKMKATIDPIEKKMLDYRQRALKILANSYYGYQGYPKARWYSKECAESVTAWGRHYIETTIKEAEKFGFKVLYADTDGFFATIPNEKPETIKSKAKKFLKHINEKLPGMLELEYEGFYLRGFFVTKKKYALIDEDGHITTRGLEVVRRDWSEIAKETQAKVLEVILREGSIEKAAGIVKKVVEDLANYRVPVEKLIIHEQITRELKDYKATGPHVAIAKRLQARGIKVKPGTIISYVVLKGSKKISDRVILFDEYDSSRHKYDPDYYIHNQVLPAVLRILEAFGYKEKDLEYQRMKQTGLGAWLKMGKK

SEQ ID NO: 279 - protein, 773 aa, unidentified
  REGION 1..773: note = Description of Unknown: Synthetic polypeptide
MILDTDYITENGKPVIRIFKKEKGEFKIEYDRNFEPYIYALLEDDESIEDIKKITGERHGKKVRIIRVEKVKKKFLGEPIEVWKLVFEHPQDYPAIRDAIRSHPAVREIFEYDIPFAKRYLIDKGLVPMEGGEELKLLAFAIATFYHEGDEFAEGEILMISYADESGAKVITWKKIDLPYVEVVSTEREAIKRFLQVLREKDPDVLLTYNGDNFDFAYIKKRCEKLGLKFTIGRDGSEPKIQRMGDRFAVEVKGRIHLDLAPVVRHTIRLPTYTLEAVYEAVFGKKKEQVYAEEIAEAWKSEEGLKRVAQYSMEDARATYELGREFFPMEVELAKLIGQSVWDVSRSSTGNLVEWYLLRVAYERNELAPNKPGGEEYQRRMRSSYIGGYVKEPEKGLWESIAYLDFRSSAGSIIVTHNVSPDTLEKECKNYDVAPIVGYRFCKDFKGFIPSILEDLIETRQKVKRKMKATIDPIEKKMLDYRQRALKILANSYYGYQGYPKARWYSKENAEDVTAWGRHYIETTIKEAEKFGFKVLYADTDGFFATIPNEKPETIKSKAKKFLKHINEKLPGMLELEYEGFYLRGFFVTKKKYALIDEDGHITTRGLEVVRRDWSEIAKETQAKVLEVILREGSIEKAAGIVKKVVEDLANYRVPVEKLIIHEQITRELKRYKATGPHVAIAKRLQARGIKVKPGTIISYVVLKGSKKISDRVILFDEYDSSRHKYDPDYYIHNQVLPAVLRILEAFGYKEKDLEYQRMKQTGLGAWLKMGKK

SEQ ID NO: 280 - protein, 773 aa, unidentified
  REGION 1..773: note = Description of Unknown: Synthetic polypeptide
MILDTDYITENGKPVIRIFKKEKGEFKIEYDRNFEPYIYALLEDDESIEDIKKITGERHGKKVRIIRVEKVKKKFLGEPIEVWKLVFEHPQDYPAIRDAIRSHPAVREIFEYDIPFAKRYLIDKGLVPMEGGEELKLLAFAIATFYHEGDEFAEGEILMISYADESGAKVITWKKIDLPYVEVVSTEREAIKRFLQVLREKDPDVLLTYNGDNFDFAYIKKRCEKLGLKFTIGRDGSEPKIQRMGDRFAVEVKGRIHLDLAPVVRHTIRLPTYTLEAVYEAVFGKKKEKVYAEEIAEAWKSEEGLKRVAQYSMEDARATYELGREFFPMEVELAKLIGQSVWDVSRSSTGNLVEWYLLRVAYERNELAPNKPGGEEYQRRRRSSYIGGYVKEPEKGLWESIAYLDFRSSAGSIIVTHNVSPDTLEKECKNYDVAPIVGYRFCKDFKGFIPSILEDLIETRQKVKRKMKATIDPIEKKMLDYRQRALKILANSYYGYQGYPKARWYSKECAESVTAWGRHYIETTIKEAEKFGFKVLYADTDGFFATIPNEKPETIKSKAKKFLKHINEKLPGMLELEYEGFYLRGFFVTKKKYALIDEDGHITTRGLEVVRRDWSEIAKETQAKVLEVILREGSIEKAAGIVKKVVEDLANYRVPVEKLIIHEQITRELKRYKATGPHVAIAKRLQARGIKVKPGTIISYVVLKGSKKISDRVILFDEYDSSRHKYDPDYYIHNQVLPAVLRILEAFGYKEKDLEYQRMKQTGLGAWLKMGKK

SEQ ID NO: 281 - protein, 773 aa, unidentified
  REGION 1..773: note = Description of Unknown: Synthetic polypeptide
MILDTDYITENGKPVIRIFKKEKGEFKIEYDRNFEPYIYALLEDDESIEDIKKITGERHGKKVRIIRVEKVKKKFLGEPIEVWKLVFEHPQDYPAIRDAIRSHPAVREIFEYDIPFAKRYLIDKGLVPMEGGEELKLLAFAIATFYHEGDEFAEGEILMISYADESGAKVITWKKIDLPYVEVVSTEREAIKRFLQVLREKDPDVLLTYNGDNFDFAYIKKRCEKLGLKFTIGRDGSEPKIQRMGDRFAVEVKGRIHLDLAPVVRHTIRLPTYTLEAVYEAVFGKKKEKVYAEEIAEAWKSEEGLKRVAQYSMEDARATYELGREFFPMEVELAKLIGQSVWDVSRSSTGNLVEWYLLRVAYERNELAPNKPGGEEYQRRMRSSYIGGYVKEPEKGLWESIAYLDFRSSAGSIIVTHNVSPDTLEKECKNYDVAPIVGYRFCKDFKGFIPSILEDLIETRQKVKRKMKATIDPIEKKMLDYRQRALKILANSYYGYQGYPKARWYSKECAESVTAWGRHYIETTIKEAEKFGFKVLYADTDGFFATIPNEKPETIKSKAKKFLKHINEKLPGMLELEYEGFYLRGFFVTKKKYALIDEDGHITTRGLEVVRRDWSEIAKETQAKVLEVILREGSIEKAAGIVKKVVEDLANYRVPVEKLIIHEQITRELKRYKATGPHVAIAKRLQARGIKVKPGTIISYVVLKGSKKISDRVILFDEYDSSRHKYDPDYYIHNQVLPAVLRILEAFGYKEKDLEYQRMKQTGLFAWLKMGKK

SEQ ID NO: 282 - protein, 773 aa, unidentified
  REGION 1..773: note = Description of Unknown: Synthetic polypeptide
MILDTDYITENGKPVIRIFKKEKGEFKIEYDRNFEPYIYALLEDDESIEDIKKITGERHGKKVRIIRVEKVKKKFLGEPIEVWKLVFEHPQDYPAIRDAIRSHPAVREIFEYDIPFAKRYLIDKGLVPMEGGEELKLLAFAIATFYHEGDEFAEGEILMISYADESGAKVITWKKIDLPYVEVVSTEREAIKRFLQVLREKDPDVLLTYNGDNFDFAYIKKRCEKLGLKFTIGRDGSEPKIQRMGDRFAVEVKGRIHLDLAPVVRHTIRLPTYTLEAVYEAVFGKKKEKVYAEEIAEAWKSEEGLKRVAQYSMEDARATYELGREFFPMEVELAKLIGQSVWDVSRSSTGNLVEWYLLRVAYERNELAPNKPGGEEYQRRMRSSYIGGYVKEPEKGLWESIAYLDFRSSAGSIIVTHNVSPDTLEKECKNYDVAPIVGYRFCKDFKGFIPSILEDLIETRQKVKRKMKATIDPIEKKMLDYRQRALKILANSYYGYQGYPKARWYSKECAESVTAWGRHYIETTIKEAEKFGFKVLYADTDGFFATIPNEKPETIKSKAKKFLKHINEKLPGMLELEYEGFYLRGFFVTKKKYALIDEDGHITTRGLEVVRRDWSEIAKETQAKVLEVILREGSIEKAAGIVKKVVEDLANYRVPVEKLIIHEQITRELKRYKATGPHVALAKRLQARGIKVKPGTIISYVVLKGSKKISDRVILFDEYDSSRHKYDPDYYIHNQVLPAVLRILEAFGYKEKDLEYQRMKQTGLGAWLKMGKK

SEQ ID NO: 283 - protein, 757 aa, unidentified
  REGION 1..757: note = Description of Unknown: Synthetic polypeptide
MILDTDYITENGKPVIRIFKKEKGEFKIEYDRNFEPYIYALLEDDESIEDIKKITGERHGKKVRIIRVEKVKKKFLGEPIEVWKLVFEHPQDVPAIRDAIRSHPAVREIFEYDIPFAKRYLIDKGLVPMEGGEELKLLAFAIATFYHEGDEFAEGEILMISYADESGAKVITWKKIDLPYVEVVSTEREAIKRFLQVLREKDPDVLLTYNGDNFDFAYIKKRCEKLGLKFTIGRDGSEPKIQRMGDRFAVEVKGRIHLDLAPVVRHTIRLPTYTLEAVYEAVFGKKKEKVYAEEIAEAWKSEEGLKRVAQYSMEDARATYELGREFFPMEVELAKLIGQSVWDVSRSSTGNLVEWYLLRVAYERNELAPNKPGGEEYQRRMRSSYIGGYVKEPEKGLWESIAYLDFRSSAGSIIVTHNVSPDTLEKECKNYDVAPIVGYRFCKDFKGFIPSILEDLIETRQKVKRKMKATIDPIEKKMLDYRQRALKILANSYYGYQGYPKARWYSKECAESVTAWGRHYIETTIKEAEKFGFKVLYADTDGFFATIPNEKPETIKSKAKKFLKHINEKLPGMLELEYEGFYLRGFFVTKKKYALIDEDGHITTRGLEVVRRDWSEIAKETQAKVLEVILREGSIEKAAGIVKKVVEDLANYRVPVEKLIIHEKITRKLKDYKATGPHVAIAKRLQARGIKVKPGTIISYVVLKGSKKISDRVILFDEYDSSRHKYDPDYYIHNQVLPAVLRILEAFGYKEKDLEYQ

SEQ ID NO: 284 - protein, 773 aa, unidentified
  REGION 1..773: note = Description of Unknown: Synthetic polypeptide
MILDTDYITENGKPVIRIFKKEKGEFKIEYDRNFEPYIYALLEDDESIEDIKKITGERHGKKVRIIRVEKVKKKFLGEPIEVWKLVFEHPQDVPAIRDAIRSHPAVREIFEYDIPFAKRYLIDKGLVPMEGGEELKLLAFRIATFYHEGDEFAEGEILMISYADESGAKVITWKKIDLPYVEVVSTEREAIKRFLQVLREKDPDVLLTYNGDNFDFAYIKKRCEKLGLKFTIGRDGSEPKIQRMGDRFAVEVKGRIHLDLAPVVRHTIRLPTYTLEAVYEAVFGKKKEKVYAEEIAEAWKSEEGLKRVAQYSMEDARATYELGREFFPLEVELAKLIGQSVWDVSRSSTGNLVEWYLLRVAYERNELAPNKPGGEEYQRRMRSSYIGGYVKEPEKGLWESIAYLDFRSSAGSIIVTHNISPDTLEKECKNYDVAPIVGYRFCKDFKGFIPSILEDLIETRQKVKRKMKATIDPIEKKMLDYRQRALKILANSYYGYQGYPKARWYSKECAESVTAWGRHYIETTIKEAEKFGFKVLYADTDGFFATIPNEKPETIKSKAKKFLKHINEKLPGMLELEYEGFYLRGFFVTKKKYALIDEDGHITTRGLEVVRRDWSEIAKETQAKVLEVILREGSIEKAAGIVKKVVEDLANYRVPVEKLIIHEQITRELKRYKATGPHVAIAKRLQARGIKVKPGTIISYVVLKGSKKISDRVILFDEYDSSRHKYDPDYYIHNQVLPAVLRILEAFGYKEKDLEYQRMKQTGLGAWLKMGKK

SEQ ID NO: 285 - protein, 773 aa, unidentified
  REGION 1..773: note = Description of Unknown: Synthetic polypeptide
MILDTDYITENGKPVIRIFKKEKGEFKIEYDRNFEPYIYALLEDDESIEDIKKITGERHGKKVRIIRVEKVKKKFLGEPIEVWKLVFEHPQDVPAIRDAIRSHPAVREIFEYDIPFAKRYLIDKGLVPMEGGEELKLLAFFIATFYHEGDEFAEGEILMISYADESGAKVITWKKIDLPYVEVVSTEREAIKRFLQVLREKDPDVLLTYNGDNFDFAYIKKRCEKLGLKFTIGRDGSEPKIQRMGDRFAVEVKGRIHLDLAPVVRHTIRLPTYTLEAVYEAVFGKKKEKVYAEEIAEAWKSEEGLKRVAQYSMEWARATYELGREFFPMEVELAKLIGQSVWDVSRSSTGNLVEWYLLRVAYERNELAPNKPGGEEYQRRMRSSYIGGYVKEPEKGLWESIAYLDFRSSAGSIIVTHNVSPDTLEKECKNYDVAPIVGYRFCKDFKGFIPSILEDLIETRQKVKRKMKATIDPIEKKMLDYRQRALKILANSYYGYQGYPKARWYSKECAESVTAWGRHYIETTIKEAEKFGFKVLYADTDGFFATIPNEKPETIKSKAKKFLKHINEKLPGMLELEYEGFYLRGFFVTKKKYALIDEDGHITTRGLEVVRRDWSEIAKETQAKVLEVILREGSIEKAAGIVKKVVEDLANYRVPVEKLIIHEQITRELKDYKATGPHVAIAKRLQARGIKVKPGTIISYVVLKGSKKISDRVILFDEYDSSRHKYDPDYYIHNQVLPAVLRILEAFGYKEKDLEYQRMKQTGLGAWLKMGKK

SEQ ID NO: 286 - protein, 773 aa, unidentified
  REGION 1..773: note = Description of Unknown: Synthetic polypeptide
MILDTDYITENGKPVIRIFKKEKGEFKIEYDRNFEPYIYALLEDDESIEDIKKITGERHGKKVRIIRVEKVKKKFLGEPIEVWKLVFEHPQDVPAIRDAIRSHPAVREIFEYDIPFAKRYLIDKGLVPMEGGEELKLLAFNIATFYHEGDEFAEGEILMISYADESGAKVITWKKIDLPYVEVVSTEREAIKRFLQVLREKDPDVLLTYNGDNFDFAYIKKRCEKLGLKFTIGRDGSEPKIQRMGDRFAVEVKGRIHLDLAPVVRHTIRLPTYTLEAVYEAVFGKKKEKVYAEEIAEAWKSEEGLARVAQYSVEDARATYELGREFFPLEVELAKLIGQSVWDVSRSSTGNLVEWYLLRVAYERNELAPNKPGGEEYQRRMRSSYIGGYVKEPEKGLWESIAYLDFRSSAGSIIVTHNVSPDTLEKECKNYDVAPIVGYRFCKDFKGFIPSILEDLIETRQKVKRKMKATIDPIEKKMLDYRQRALKILANSYYGYQGYPKARWYSKECAESVTAWGRHYIETTIKEAEKFGFKVLYADTDGFFATIPNEKPETIKSKAKKFLKHINEKLPGMLELEYEGFYLRGFFVTKKKYALIDEDGHITTRGLEVVRRDWSEIAKETQAKVLEVILREGSIEKAAGIVKKVVEDLANYRVPVEKLIIHEQITRELKRYKATGPHVAIAKRLQARGIKVKPGTIISYVVLKGSKKISDRVILFDEYDSSRHKYDPDYYIHNQVLPAVLRILEAFGYKEKDLEYQRMKQTGLGAWLKMGKK

SEQ ID NO: 287 - protein, 773 aa, unidentified
  REGION 1..773: note = Description of Unknown: Synthetic polypeptide
MILDTDYITENGKPVIRIFKKEKGEFKIEYDRNFEPYIYALLEDDESIEDIKKITGERHGKKVRIIRVEKVKKKFLGEPIEVWKLVFEHPQDVPAIRDAIRSHPAVREIFEYDIPFAKRYLIDKGLVPMEGGEELKLLAFNIATFYHEGDEFAEGEILMISYADESGAKVITWKKIDLPYVEVVSTEREAIKRFLQVLREKDPDVLLTYNGDNFDFAYIKKRCEKLGLKFTIGRDGSEPKIQRMGDRFAVEVKGRIHLDLAPVVRHTIRLPTYTLEAVYEAVFGKKKEKVYAEEIAEAWKSEEGLKRVAQYSMEDARATYELGREFFPLEVELAKLIGQSVWDVSRSSTGNLVEWYLLRVAYERNELAPNKPGGEEYQRRMRSSYIGGYVKEPEKGLWESIAYLDFRSSAGSIIVTHNVSPDTLEKECKNYDVAPIVGYRFCKDFKGFIPSILEDLIETRQKVKRKMKATIDPIEKKMLDYRQRALKILANSYYGYMGYPKARWYSKECAESVTAWGRHYIETTIKEAEKFGFKVLYADTDGFFATIPNEKPETIKSKAKKFLKHINEKLPGMLELEYEGFYLRGFFVTKKKYALIDEDGHITTRGLEVVRRDWSEIAKETQAKVLEVILREGSIEKAAGIVKKVVEDLANYRVPVEKLIIHEQITRELKRYKATGPHVAIAKRLQARGIKVKPGTIISYVVLKGSKKISDRVILFDEYDSSRHKYDPDYYIHNQVLPAVLRILEAFGYKEKDLEYQRMKQTGLGAWLKMGKK

SEQ ID NO: 288 - protein, 773 aa, unidentified
  REGION 1..773: note = Description of Unknown: Synthetic polypeptide
MILDTDYITENGKPVIRIFKKEKGEFKIEYDRNFEPYIYALLEDDESIEDIKKITGERHGKKVRIIRVEKVKKKFLGEPIEVWKLVFEHPQDYPAIRDAIRSHPAVREIFEYDIPFAKRYLIDKGLVPMEGGEELKLLAFAIATFYHEGDEFAEGEILMISYADESGAKVITWKKIDLPYVEVVSTEREAIKRFLQVLREKDPDVLLTYNGDNFDFAYIKKRCEKLGLKFTIGRDGSEPKIQRMGDRFAVEVKGRIHLDLAPVVRHTIRLPTYTLEAVYEAVFGKKKEKVYAEEIAEAWKSEEGLRRVAQYSMEDARATYELGREFFPMEVELAKLIGQSVWDVSRSSTGNLVEWYLLRVAYERNELAPNKPGGEEYQRRMRSSYIGGYVKEPEKGLWESIAYLDFRSSAGSIIVTHNVSPDTLEKECKNYDVAPIVGYRFCKDFKGFIPSILEDLIETRQKVKRKMKATIDPIEKKMLDYRQRALKILANSYYGYQGYPKARWYSKECAESVTAWGRHYIETTIKEAEKFGFKVLYADTDGFFATIPNEKPETIKSKAKKFLKHINEKLPGMLELEYEGFYLRGFFVTKKKYALIDEDGHITTRGLEVVRRDWSEIAKETQAKVLEVILREGSIEKAAGIVKKVVEDLANYRVPVEKLIIHEQITRELKRYKATGPHVAIAKRLQARGIKVKPGTIISYVVLKGSKKISDRVILFDEYDSSRHKYDPDYYIHNQVLPAVLRILEAFGYKEKDLEYQRMKQTGLGAWLKMGKK

SEQ ID NO: 289 - protein, 773 aa, unidentified
  REGION 1..773: note = Description of Unknown: Synthetic polypeptide
MILDTDYITENGKPVIRIFKKEKGEFKIEYDRNFEPYIYALLEDDESIEDIKKITGERHGKKVRIIRVEKVKKKFLGEPIEVWKLVFEHPQDVPAIRDAIRSHPAVREIFEYDIPFAKRYLIDKGLVPMEGGEELKLLAFNIATFYHEGDEFAEGEILMISYADESGAKVITWKKIDLPYVEVVSTEREAIKRFLQVLREKDPDVLLTYNGDNFDFAYIKKRCEKLGLKFTIGRDGSEPKIQRMGDRFAVEVKGRIHLDLAPVVRATIRLPTYTLEAVYEAVFGKKKEKVYAEEIAEAWKSEEGLKRVAQYSMEDARATYELGREFFPLEVELAKLIGQSVWDVSRSSTGNLVEWYLLRVAYERNELAPNKPGGEEYQRRMRSSYIGGYVKEPEKGLWESIAYLDFRSSAGSIIVTHNVSPDTLEKECKNYDVAPIVGYRFCKDFKGFIPSILEDLIETRQKVKRKMKATIDPIEKKMLDYRQRALKILANSYYGYQGYPKARWYSKECAESVTAWGRHYIETTIKEAEKFGFKVLYADTDGFFATIPNEKPETIKSKAKKFLKHINEKLPGMLELEYEGFYLRGFFVTKKKYALIDEDGHITTRGLEVVRRDWSEIAKETQAKVLEVILREGSIEKAAGIVKKVVEDLANYRVPVEKLIIHEQITRELKRYKATGPHVAIAKRLQARGIKVKPGTIISYVVLKGSKKISDRVILFDEYDSSRHKYDPDYYIHNQVLPAVLRILEAFGYKEKDLEYQRMKQTGLGAWLKMGKK

SEQ ID NO: 290 - protein, 773 aa, unidentified
  REGION 1..773: note = Description of Unknown: Synthetic polypeptide
MILDTDYITENGKPVIRIFKKEKGEFKIEYDRNFEPYIYALLEDDESIEDIKKITGERHGKKVRIIRVEKVKKKFLGEPIEVWKLVFEHPQDYPAIRDAIRSHPAVREIFEYDIPFAKRYLIDKGLVPMEGGEELKLLAFAIATFYHEGDEFAEGEILMISYADESGAKVITWKKIDLPYVEVVSTEREAIKRFLQVLREKDPDVLLTYNGDNFDFAYIKKRCEKLGLKFTIGRDGSEPKIQRMGDRFAVEVKGRIHLDLAPVVRHTIRLPTYTLEAVYEAVFGKKKEKVYAEEIAEAWKSEEGLKRVAQYSMEDARATYELGREFFPMEVELAKLIGQSVWDVSRSSTGNLVEWYLLRVAYERNELAPNKPGGEEYQRRMRSSYIGGYVKEPEKGLWESIAYLDFRSSAGSIIVTHNVSPDTLEKECKNYDVAPTVGYRFCKDFKGFIPSILEDLIETRQKVKRKMKATIDPIEKKMLDYRQRALKILANSYYGYQGYPKARWYSKECAESVTAWGRHYIETTIKEAEKFGFKVLYADTDGFFATIPNEKPETIKSKAKKFLKHINEKLPGMLELEYEGFYLRGFFVTKKKYALIDEDGHITTRGLEVVRRDWSEIAKETQAKVLEVILREGSIEKAAGIVKKVVEDLANYRVPVEKLIIHEQITRELKRYKATGPHVAIAKRLQARGIKVKPGTIISYVVLKGSKKISDRVILFDEYDSSRHKYDPDYYIHNQVLPAVLRILEAFGYKEKDLEYQRMKQTGLGAWLKMGKK

SEQ ID NO: 291 - protein, 773 aa, unidentified
  REGION 1..773: note = Description of Unknown: Synthetic polypeptide
MILDTDYITENGKPVIRIFKKEKGEFKIEYDRNFEPYIYALLEDDESIEDIKKITGERHGKKVRIIRVEKVKKKFLGEPIEVWKLVFEHPQDYPAIRDAIRSHPAVREIFEYDIPFAKRYLIDKGLVPMEGGEELKLLAFAIATFYHEGDEFAEGEILMISYADESGAKVITWEKIDLPYVEVVSTEREAIKRFLQVLREKDPDVLLTYNGDNFDFAYIKKRCEKLGLKFTIGRDGSEPKIQRMGDRFAVEVKGRIHLDLAPVVRHTIRLPTYTLEAVYEAVFGKKKEKVYAEEIAEAWKSEEGLKRVAQYSMEDARATYELGREFFPMEVELAKLIGQSVWDVSRSSTGNLVEWYLLRVAYERNELAPNKPGGEEYQRRMRSSYIGGYVKEPEKGLWESIAYLDFRSSAGSIIVTHNVSPDTLEKECKNYDVAPIVGYRFCKDFKGFIPSILEDLIETRQKVKRKMKATIDPIEKKMLDYRQRALKILANSYYGYQGYPKARWYSKECAESVTAWGRHYIETTIKEAEKFGFKVLYADTDGFFATIPNEKPETIKSKAKKFLKHINEKLPGMLELEYEGFYLRGFFVTKKKYALIDEDGHITTRGLEVVRRDWSEIAKETQAKVLEVILREGSIEKAAGIVKKVVEDLANYRVPVEKLIIHEQITRELKRYKATGPHVAIAKRLQARGIKVKPGTIISYVVLKGSKKISDRVILFDEYDSSRHKYDPDYYIHNQVLPAVLRILEAFGYKEKDLEYQRMKQTGLGAWLKMGKK

SEQ ID NO: 292 - protein, 773 aa, unidentified
  REGION 1..773: note = Description of Unknown: Synthetic polypeptide
MILDTDYITENGKPVIRIFKKEKGEFKIEYDRNFEPYIYALLEDDESIEDIKKITGERHGKKVRIIRVEKVKKKFLGEPIEVWKLVFEHPQDYPAIRDAIRSHPAVREIFEYDIPFAKRYLIDKGLVPMEGGEELKLLAFAIATFYHEGDEFAEGEILMISYADESGAKVITWKKIDLPYVEVVSTEREAIKRFLQVLREKDPDVLLTYNGDNFDFAYIKKRCEKLGLKFTIGRDGSEPKIQRMGDRFAVEVKGRIHLDLAPVVRHTIRLPTYTLEAVYEAVFGKKKEKVYAEEIAEAWKSEEGLKRVAQYSMEDARATYELGREFFPMEVELAKLIGQSVWDVSRSSTGNLVEWYLLRVAYERNELAPNKPGGEEYQRRMRSSYIGGYVKEPEKGLWESIAYLDFRSSAGSIIVTHNISPDTLEKECKNYDVAPIVGYRFCKDFKGFIPSILEDLIETRQKVKRKMKATIDPIEKKMLDYRQRALKILANSYYGYYGYPKARWYSKECAESVTAWGRHYIETTIKEAEKFGFKVLYADTDGFFATIPNEKPETIKSKAKKFLKHINEKLPGMLELEYEGFYLRGFFVTKKKYALIDEDGHITTRGLEVVRRDWSEIAKETQAKVLEVILREGSIEKAAGIVKKVVEDLANYRVPVEKLIIHEQITRELKRYKATGPHVAIAKRLQARGIKVKPGTIISYVVLKGSKKISDRVILFDEYDSSRHKYDPDYYIHNQVLPAVLRILEAFGYKEKDLEYQRMKQTGLGAWLKMGKK

SEQ ID NO: 293 - protein, 757 aa, unidentified
  REGION 1..757: note = Description of Unknown: Synthetic polypeptide
MILDTDYITENGKPVIRIFKKEKGEFKIEYDRNFEPYIYALLEDDESIEDIKKITGERHGKKVRIIRVEKVKKKFLGEPIEVWKLVFEHPQDVPAIRDAIRSHPAVREIFEYDIPFAKRYLIDKGLVPMEGGEELKLLAFAIATFYHEGDEFAEGEILMISYADESGAKVITWKKIDLPYVEVVSTEREAIKRFLQVLREKDPDVLLTYNGDNFDFAYIKKRCEKLGLKFTIGRDGSEPKIQRMGDRFAVEVKGRIHLDLAPVVRHTIRLPTYTLEAVYEAVFGKKKEKVYAEEIAEAWKSEEGLKRVAQYSMEDARATYELGREFFPMEVELAKLIGQSVWDVSRSSTGNLVEWYLLRVAYERNELAPNKPGGEEYQRRMRSSYIGGYVKEPEKGLWESIAYLDFRSSAGSIIVTHNVSPDTLEKECKNYDVAPIVGYRFCKDFKGFIPSILEDLIETRQKVKRKMKATIDPIEKKMLDYRQRALKILANSYYGYQGYPKARWYSKECAESVTAWGRHYIETTIKEAEKFGFKVLYADTDGFFATIPNEKPETIKSKAKKFLKHINEKLPGMLELEYEGFYLRGFFVTKKKYALIDEDGHITTRGLEVVRRDWSEIAKETQAKVLEVILREGSIEKAAGIVKKVVEDLANYRVPVEKLIIHEQITRRLKDYKATGPHVAIAKRLQARGIKVQPGTIISYVVLKGSKKISDRVILFDEYDSSRHKYDPDYYIHNQVLPAVLRILEAFGYKEKDLEYQ

SEQ ID NO: 294 - protein, 773 aa, unidentified
  REGION 1..773: note = Description of Unknown: Synthetic polypeptide
MILDTDYITENGKPVIRIFKKEKGEFKIEYDRNFEPYIYALLEDDESIEDIKKITGERHGKKVRIIRVEKVKKKFLGEPIEVWKLVFEHPQDYPAIRDAIRSHPAVREIFEYDIPFAKRYLIDKGLVPMEGGEELKLLAFAIATFYHEGDEFAEGEILMISYADESGAKVITWKKIDLPYVEVVSTEREAIKRFLQVLREKDPDVLLTYNGDNFDFAYIKKRCEKLGLKFTIGRDGSEPKIQRMGDRFAVEVKGRIHLDLAPVVRHTIRLLTYTLEAVYEAVFGKKKEKVYAEEIAEAWKSEEGLKRVAQYSMEDARATYELGREFFPMEVELAKLIGQSVWDVSRSSTGNLVEWYLLRVAYERNELAPNKPGGEEYQRRMRSSYIGGYVKEPEKGLWESIAYLDFRSSAGSIIVTHNVSPDTLEKECKNYDVAPIVGYRFCKDFKGFIPSILEDLIETRQKVKRKMKATIDPIEKKMLDYRQRALKILANSYYGYQGYPKARWYSKECAESVTAWGRHYIETTIKEAEKFGFKVLYADTDGFFATIPNEKPETIKSKAKKFLKHINEKLPGMLELEYEGFYLRGFFVTKKKYALIDEDGHITTRGLEVVRRDWSEIAKETQAKVLEVILREGSIEKAAGIVKKVVEDLANYRVPVEKLIIHEQITRELKRYKATGPHVAIAKRLQARGIKVKPGTIISYVVLKGSKKISDRVILFDEYDSSRHKYDPDYYIHNQVLPAVLRILEAFGYKEKDLEYQRMKQTGLGAWLKMGKK

SEQ ID NO: 295 - protein, 773 aa, unidentified
  REGION 1..773: note = Description of Unknown: Synthetic polypeptide
MILDTDYITENGKPVIRIFKKEKGEFKIEYDRNFEPYIYALLEDDESIEDIKKITGERHGKKVRIIRVEKVKKKFLGEPIEVWKLVFEHPQDYPAIRDAIRSHPAVREIFEYDIPFAKRYLIDKGLVPMEGGEELKLLAFAIATFYHEGDEFAEGEILMISYADESGAKVITWKKIDLPYVEVVSTEREAIKRFLQVLREKDPDVLLTYNGDNFDFAYIKKRCEKLGLKFTIGRDGSEPKIQRMGDRFAVEVKGRIHLDLAPVVRHTIRLPTYALEAVYEAVFGKKKEKVYAEEIAEAWKSEEGLKRVAQYSMEDARATYELGREFFPMEVELAKLIGQSVWDVSRSSTGNLVEWYLLRVAYERNELAPNKPGGEEYQRRMRSSYIGGYVKEPEKGLWESIAYLDFRSSAGSIIVTHNVSPDTLEKECKNYDVAPIVGYRFCKDFKGFIPSILEDLIETRQKVKRKMKATIDPIEKKMLDYRQRALKILANSYYGYQGYPKARWYSKECAESVTAWGRHYIETTIKEAEKFGFKVLYADTDGFFATIPNEKPETIKSKAKKFLKHINEKLPGMLELEYEGFYLRGFFVTKKKYALIDEDGHITTRGLEVVRRDWSEIAKETQAKVLEVILREGSIEKAAGIVKKVVEDLANYRVPVEKLIIHEQITRELKRYKATGPHVAIAKRLQARGIKVKPGTIISYVVLKGSKKISDRVILFDEYDSSRHKYDPDYYIHNQVLPAVLRILEAFGYKEKDLEYQRMKQTGLGAWLKMGKK

SEQ ID NO: 296 - protein, 773 aa, unidentified
  REGION 1..773: note = Description of Unknown: Synthetic polypeptide
MILDTDYITENGKPVIRIFKKEKGEFKIEYDRNFEPYIYALLEDDESIEDIKKITGERHGKKVRIIRVEKVKKKFLGEPIEVWKLVFEHPQDVPAIRDAIRSHPAVREIFEYDIPFAKRYLIDKGLVPMEGGEELKLLAFNIATFYHEGDEFAEGEILMISYADESGAKVITWKKIDLPYVEVVSTEREAIKRFLQVLREKDPDVLLTYNGDNFDFAYIKKRCEKLGLKFTIGRDGSEPQIQRMGDRFAVEVKGRIHLDLAPVVRHTIRLPTYTLEAVYEAVFGKKKEKVYAEEIAEAWKSEEGLKRVAQYSVEDARATYELGREFFPLEVELAKLIGQSVWDVSRSSTGNLVEWYLLRVAYERNELAPNQPGGEEYQRRMRSSYIGGYVKEPEKGLWESIAYLDFRSSAGSIIVTHNVSPDTLEKECKNYDVAPIVGYRFCKDFKGFIPSILEDLIETRQKVKRKMRATIDPIEKKMLDYRQRALKILANSYYGYQGYPKARWYSKECAESVTAWGRHYIETTIKEAEKFGFKVLYADTDGFFATIPNEKPETIKSKAKKFLKHINEKLPGMLELEYEGFYLRGFFVTKKKYALIDEDGHITTRGLEVVRRDWSEIAKETQAKVLEVILREGSIEKAAGIVKKVVEDLANYRVPVEKLIIHEQITRELKRYKATGPHVAIAKRLQARGIKVKPGTIISYVVLKGSKKISDRVILFDEYDSSRHKYDPDYYIHNQVLPAVLRILEAFGYKEKDLEYQRMKQTGLGAWLKMGKK

SEQ ID NO: 297 - protein, 773 aa, unidentified
  REGION 1..773: note = Description of Unknown: Synthetic polypeptide
MILDTDYITENGKPVIRIFKKEKGEFKIEYDRNFEPYIYALLEDDESIEDIKKITGERHGKKVRIIRVEKVKKKFLGEPIEVWKLVFEHPQDYPAIRDAIRSHPAVREIFEYDIPFAKRYLIDKGLVPMEGGEELKLLAFAIATFYHEGDEFAEGEILMISYADESGAKVITWKKIDLPYVEVVSTEREAIKRFLQVLREKDPDVLLTYNGDNFDFAYIKKRCEKLGLKFTIGRDGSEPKIQRMGDRFAVEVKGRIHLDLAPVVRHTIRLPTYTLEAVYEAVFGKKKEQVYAEEIAEAWKSEEGLKRVAQYSMEDARATYELGREFFPMEVELAKLIGQSVWDVSRSSTGNLVEWYLLRVAYERNELAPNKPGGEEYQRRMRSSYIGGYVKEPEKGLWESIAYLDFRSSAGSIIVTHNVSPDTLEKECKNYDVAPIVGYRFCKDFKGFIPSILEDLIETRQKVKRKMKATIDPIEKKMLDYRQRALKILANSYYGYQGYPKARWYRKECAESVTAWGRHYIETTIKEAEKFGFKVLYADTDGFFATIPNEKPETIKSKAKKFLKHINEKLPGMLELEYEGFYLRGFFVTKKKYALIDEDGHITTRGLEVVRRDWSEIAKETQAKVLEVILREGSIEKAAGIVKKVVEDLANYRVPVEKLIIHEQITRELKRYKATGPHVAIAKRLQARGIKVKPGTIISYVVLKGSKKISDRVILFDEYDSSRHKYDPDYYIHNQVLPAVLRILEAFGYKEKDLEYQRMKQTGLGAWLKMGKK

SEQ ID NO: 298 - protein, 773 aa, unidentified
  REGION 1..773: note = Description of Unknown: Synthetic polypeptide
MILDTDYITENGKPVIRIFKKEKGEFKIEYDRNFEPYIYALLEDDESIEDIKKITGERHGKKVRIIRVEKVKKKFLGEPIEVWKLVFEHPQDYPAIRDAIRSHPAVREIFEYDIPFAKRYLIDKGLVPMEGGEELKLLAFAIATFYHEGDEFAEGEILMISYADESGAKVITWKKIDLPYVEVVSTEREAIKRFLQVLREKDPDVLLTYNGDNFDFAYIKKRCEKLGLKFTIGRDGSEPKIQRMGDRFAVEVKGRIHLDLAPVVRHTIRLPTYTLEAVYEAVFGKKKEKVYAEEIAEAWKSEEGLKRVAQYSMEDARATYELGREFFPMEVELAKLIGQSVWDVSRSSTGNLVEWYLLRVAYERNELAPNKPGGEEYQRRMRSSYIGGYVKEPEKGLWESIAYLDFRSSAGSIIVTHNVSPDTLEKECKNYDVAPIVGYRFCKDFKGFIPSILEDLIETRQKVKRKMKATIDPIEKKMLDYRQRALKILANSYYGYMGYPKARWYSKECAESVTAWGRHYIETTIKEAEKFGFKVLYADTDGFFATIPNEKPETIKSKAKKFLKHINEKLPGMLELEYEGFYLRGFFVTKKKYALIDEDGHITTRGLEVVRRDWSEIAKETQAKVLEVILREGSIEKAAGIVKKVVEDLANYRVPVEKLIIHEQITRELKRYKATGPHVAIAKRLQARGIKVKPGTIISYVVLKGSKKISDRVILFDEYDSSRHKYDPDYYIHNQVLPAVLRILEAFGYKEKDLEYQRMKQTGLGAWLKMGKK

SEQ ID NO: 299 - protein, 773 aa, unidentified
  REGION 1..773: note = Description of Unknown: Synthetic polypeptide
MILDTDYITENGKPVIRIFKKEKGEFKIEYDRNFEPYIYALLEDDESIEDIKKITGERHGKKVRIIRVEKVKKKFLGEPIEVWKLVFEHPQDYPAIRDAIRSHPAVREIFEYDIPFAKRYLIDKGLVPMEGGEELKLLAFAIATFYHEGDEFAEGEILMISYADESGAKVITWKKIDLPYVEVVSTEREAIKRFLQVLREKDPDVLLTYNGDNFDFAYIKKRCEKLGLKFTIGRDGSEPKIQRMGDRFAVEVKGRIHLDLAPVVRHTIRLPTYTLEAVYEAVFGKKKEKVYAEEIAEAWKSEEGLKRVAQYSMEDARATYELGREFFPMEVELAKLIGQSVWDVSRSSTGNLVEWYLLRVAYERNELAPNKPGGEEYQRRMRSSYIGGYVKEPEKGLWESIAYLDFRSSAGSIIVTHNVSPDTLEKECKNYDVAPIVGYRFCKDFKGFIPSILEDLIETRQKVKRKMKATIDPIEKKMLDYRQRALKILANSYYGYQGYPKARWYSKECAESVTAWGRHYIETTIKEAEKFGFKVLYADTDGFFATIPNEKPETIKSKAKKFLKHINEKLPGMLELEYEGFYLRGFFVTKKKYALIDEDGHITTRGLEVVRRDWSEIAKETQAKVLEVILREGSIETAAGIVKKVVEDLANYRVPVEKLIIHEQITRELKRYKATGPHVAIAKRLQARGIKVKPGTIISYVVLKGSKKISDRVILFDEYDSSRHKYDPDYYIHNQVLPAVLRILEAFGYKEKDLEYQRMKQTGLGAWLKMGKK

SEQ ID NO: 300 - protein, 773 aa, unidentified
  REGION 1..773: note = Description of Unknown: Synthetic polypeptide
MILDTDYITENGKPVIRIFKKEKGEFKIEYDRNFEPYIYALLEDDESIEDIKKITGERHGKKVRIIRVEKVKKKFLGEPIEVWKLVFEHPQDVPAIRDAIRSHPAVREIFEYDIPFAKRYLIDKGLVPMEGGEELKLLAFAIATFYHEGDEFAEGEILMISYADESGAKVITWKKIDLPYVEVVSTEREAIKRFLQVLREKDPDVLLTYNGDNFDFAYIKKRCEKLGLKFTIGRDGSEPKIQRMGDRFAVEVKGRIHLDLAPVVRHTIRLPTYTLEAVYEAVFGKKKEKVYAEEIAEAWKSEEGLKRVAQYSMEDARATYELGREFFPMEVELAKLIGQSVWDVSRSSTGNLVEWYLLRVAYERNELAPNKPGGEEYQRRMRSSYIGGYVKEPEKGLWESIAYLDFRSSAGSIIVTHNVSPDTLEKECKNYDVAPIVGYRFCKDFKGFIPSILEDLIETRQKVKRKMKATIDPIEKKMLDYRQRALKILANSYYGYQGYPKARWYSKEDAEFVTAWGRHYIETTIKEAEKFGFKVLYADTDGFFATIPNEKPETIKSKAKKFLKHINEKLPGMLELEYEGFYLRGFFVTKKKYALIDEDGHITTRGLEVVRRDWSEIAKETQAKVLEVILREGSIEKAAGIVKKVVEDLANYRVPVEKLIIHEQITRELKDYKATGPHVAIAKRLQARGIKVKPGTIISYVVLKGSKKISDRVILFDEYDSSRHKYDPDYYIHNQVLPAVLRILEAFGYKEKDLEYQRMKQTGLGAWLKMGKK

SEQ ID NO: 301 - protein, 773 aa, unidentified
  REGION 1..773: note = Description of Unknown: Synthetic polypeptide
MILDTDYITENGKPVIRIFKKEKGEFKIEYDRNFEPYIYALLEDDESIEDIKKITGERHGKKVRIIRVEKVKKKFLGEPIEVWKLVFEHPQDVPAIRDAIRSHPAVREIFEYDIPFAKRYLIDKGLVPMEGGEELKLLAFNIATFYHEGDEFAEGEILMISYADESGAKVITWKKIDLPYVEVVSTEREAIKRFLQVLREKDPDVLLTYNGDNFDFAYIKKRCEKLGLKFTIGRDGSEPKIQRMGDRFAVEVKGRIHLDLAPVVRHTIRLPTYTLEAVYEAVFGKKKEKVYAEEIAEAWKSEEGLKRVAQYSMEDARATYELGREFFPLEVELAKLIGQSVWDVSRSSTGNLVEWYLLRVAYERNELAPNKPGGEEYQRRMRSSYIGGYVKEPEKGLWESIAYLDFRSSAGSIIVTHNVSPDTLEKECKNYDVAPIVGYRFCKDFKGFIPSILEDLIETRQKVKRKMKATIDPIEKKMLDYRQRALKILANSYYGYQGYPKARWYSKECAESVTAWGRHYIETTIKEAEKFGFKVLYADTDGFFATIPNEKPETIKSKAKKFLKHINEKLPGMLELEYEGFYLRGFFVTKKKYALIDEDGHITTRGLEVVRRDWSEIAKETQAKVLEVILREGSIEKAAGIVKKVVEDLANYRVPVEKLIIHEQITRELKRYKATGPQVAIAKRLQARGIKVKPGTIISYVVLKGSKKISDRVILFDEYDSSRHKYDPDYYIHNQVLPAVLRILEAFGYKEKDLEYQRMKQTGLGAWLKMGKK

SEQ ID NO: 302 - protein, 773 aa, unidentified
  REGION 1..773: note = Description of Unknown: Synthetic polypeptide
MILDTDYITENGKPVIRIFKKEKGEFKIEYDRNFEPYIYALLEDDESIEDIKKITGERHGKKVRIIRVEKVKKKFLGEPIEVWKLVFEHPQDYPAIRDAIRSHPAVREIFEYDIPFAKRYLIDKGLVPMEGGEELKLLAFAIATFYHEGDEFAEGEILMISYADESGAKVITWKKIDLPYVEVVSTEREAIKRFLQVLREKDPDVLLTYNGDNFDFAYIKKRCEKLGLKFTIGRDGSEPKIQRMGDRFAVEVKGRIHLDLAPVVRHTIRLPTYTLEAVYEAVFGKKKEKVYAEEIAEAWKSEEGLKRVAQYSMEDARATYELGREFFPMEVELAKLIGQSVWDVSRSSTGNLVEWYLLRVAYERNELAPNKPGGEEYQRRMRSSYIGGYVKEPEKGLWESIAYLDFRSSAGSIIVTHNVSPDTLEKECKNYDVAPIVGYRFCKDFKGFIPSILEDLIETRQKVKRKMKATIDPIEKKMLDYRQRALKILANSYYGYQGYPKARWYSKECAESVTAWGRHYIETTIKEAEKFGFKVLYADTDGFFATIPNEKPETIKSKAKKFLKHINEKLPGMLELEYEGFYLRGFFVTKKKYALIDEDGHITTRGLEVVRRDWSEIAKETQAKVLEVILREGSIEKAAGIVKKVVEDLANYRVPVEKLIIHKQITRELKRYKATGPHVAIAKRLQARGIKVKPGTIISYVVLKGSKKISDRVILFDEYDSSRHKYDPDYYIHNQVLPAVLRILEAFGYKEKDLEYQRMKQTGLGAWLKMGKK

SEQ ID NO: 303 - protein, 773 aa, unidentified
  REGION 1..773: note = Description of Unknown: Synthetic polypeptide
MILDTDYITENGKPVIRIFKKEKGEFKIEYDRNFEPYIYALLEDDESIEDIKKITGERHGKKVRIIRVEKVKKKFLGEPIEVWKLVFEHPQDVPAILDAIRSHPAVREIFEYDIPFAKRYLIDKGLVPMEGGEELKLLAFNIATFYHEGDEFAEGEILMISYADESGAKVITWKKIDLPYVEVVSTEREAIKRFLQVLREKDPDVLLTYNGDNFDFAYIKKRCEKLGLKFTIGRDGSEPKIQRMGDRFAVEVKGRIHLDLAPVVRHTIRLPTYTLEAVYEAVFGKKKEKVYAEEIAEAWKSEEGLKRVAQYSMEDARATYELGREFFPLEVELAKLIGQSVWDVSRSSTGNLVEWYLLRVAYERNELAPNKPGGEEYQRRMRSSYIGGYVKEPEKGLWESIAYLDFRSSAGSIIVTHNVSPDTLEKECKNYDVAPIVGYRFCKDFKGFIPSILEDLIETRQKVKRKMKATIDPIEKKMLDYRQRALKILANSYYGYQGYPKARWYSKECAESVTAWGRHYIETTIKEAEKFGFKVLYADTDGFFATIPNEKPETIKSKAKKFLKHINEKLPGMLELEYEGFYLRGFFVTKKKYALIDEDGHITTRGLEVVRRDWSEIAKETQAKVLEVILREGSIEKAAGIVKKVVEDLANYRVPVEKLIIHEQITRELKRYKATGPHVAIAKRLQARGIKVKPGTIISYVVLKGSKKISDRVILFDEYDSSRHKYDPDYYIHNQVLPAVLRILEAFGYKEKDLEYQRMKQTGLGAWLKMGKK

SEQ ID NO: 304 - protein, 773 aa, unidentified
  REGION 1..773: note = Description of Unknown: Synthetic polypeptide
MILDTDYITENGKPVIRIFKKEKGEFKIEYDRNFEPYIYALLEDDESIEDIKKITGERHGKKVRIIRVEKVKKKFLGEPIEVWKLVFEHPQDVPAIRDAIRSHPAVREIFEYDIPFAKRYLIDKGLVPMEGGEELKLLAFNIATFYHEGDEFAEGEILMISYADESGAKVITWKKIDLPYVEVVSTEREAIKRFLQVLREKDPDVLLTYNGDNFDFAYIKKRCEKLGLKFTIGRDGSEPKIQRMGDRFAVEVKGRIHLDLAPVVRHTIRLPTYTLEAVYEAVFGKKKEKVYAEEIAEAWKSEEGLKRVAQYSVEDARATYELGREFFPLEVELAKLIGQSVWDVSRSSTGNLVEWYLLRVAYERNELAPNQPGGEEYQRRMRSSYIGGYVKEPEKGLWESIAYLDFRSSAGSIIVTHNVSPDTLEKECKNYDVAPIVGYRFCKDFKGFIPSILEDLIETRQKVKRKMKATIDPIEKKMLDYRQRALKILANSYYGYQGYPKARWYSKECAESVTAWGRHYIETTIKEAEKFGFKVLYADTDGFFATIPNEKPETIKSKAKKFLKHINEKLPGMLELEYEGFYLRGFFVTKKKYALIDEDGLITTRGLEVVRRDWSEIAKETQAKVLEVILREGSIEKAAGIVKKVVEDLANYRVPVEKLIIHEQITRELKRYKATGPHVAIAKRLQARGIKVKPGTIISYVVLKGSKKISDRVILFDEYDSSRHKYDPDYYIHNQVLPAVLRILEAFGYKEKDLEYQRMKQTGLGAWLKMGKK

SEQ ID NO: 305 - protein, 757 aa, unidentified
  REGION 1..757: note = Description of Unknown: Synthetic polypeptide
MILDTDYITENGKPVIRIFKKEKGEFKIEYDRNFEPYIYALLEDDESIEDIKKITGERHGKKVRIIRVEKVKKKFLGEPIEVWKLVFEHPQDVPAIRDAIRSHPAVREIFEYDIPFAKRYLIDKGLVPMEGGEELKLLAFNIATFYHEGDEFAEGEILMISYADESGAKVITWKKIDLPYVEVVSTEREAIKRFLQVLREKDPDVLLTYNGDNFDFAYIKKRCEKLGLKFTIGRDGSEPKIQRMGDRFAVEVKGRIHLDLAPVVRHTIRLPTYTLEAVYEAVFGKKKEKVYAEEIAEAWKSEEGLKRVAQYSMEDARATYELGREFFPMEVELAKLIGQSVWDVSRSSTGNLVEWYLLRVAYERNELAPNKPGGEEYQRRMRSSYIGGYVKEPEKGLWESIAYLDFRSSAGSIIVTHNVSPDTLEKECKNYDVAPIVGYRFCKDFKGFIPSILEDLIETRQKVKRKMKATIDPIEKKMLDYRQRALKILANSYYGYQGYPKARWYSKECAESVTAWGRHYIETTIKEAEKFGFKVLYADTDGFFATIPNEKPETIKSKAKKFLKHINEKLPGMLELEYEGFYLRGFFVTKKKYALIDEDGHITTRGLEVVRRDWSEIAKETQAKVLEVILREGSIEKAAGIVKKVVEDLANYRVPVEKLIIHEQITRKLKDYKATGPHVAIAKRLQARGIKVKPGTIISYVVLKGSKKISDRVILFDEYDSSRHKYDPDYYIHNQVLPAVLRILEAFGYKEKDLEYQ

SEQ ID NO: 306 - protein, 773 aa, unidentified; identical to SEQ ID NO: 123
  REGION 1..773: note = Description of Unknown: Synthetic polypeptide

SEQ ID NO: 307 - protein, 773 aa, unidentified
  REGION 1..773: note = Description of Unknown: Synthetic polypeptide
MILDTDYITENGKPVIRIFKKEKGEFKIEYDRNFEPYIYALLEDDESIEDIKKITGERHGKKVRIIRVEKVKKKFLGEPIEVWKLVFEHPQDYPAIRDAIRSHPAVREIFEYDIPFAKRYLIDKGLVPMEGGEELKLLAFAIATFYHEGDEFAEGEILMISYADESGAKVITWKKIDLPYVEVVSTEREAIKRFLQVLREKDPDVLLTYNGDNFDFAYIKKRCEKLGLKFTIGRDGSEPKIQRMGDRFAVEVKGRIHLDLAPVVRHTIRLPTYTLEAVYEAVFGKKKEKVYAEEIAEAWKSEEGLKRVAQYSMEDARATYELGREFFPMEVELAKLIGQSVWDVSRSSTGNLVEWYLLRVAYERNELAPNQPGGEEYQRRMRSSYIGGYVKEPEKGLWESIAYLDFRSSAGSIIVTHNVSPDTLEKECKNYDVAPIVGYRFCKDFKGFIPSILEDLIETRQKVKRKMKATIDPIEKKMLDYRQRALKILANSYYGYQGYPKARWYSKECAESVTAWGRHYIETTIKEAEKFGFKVLYADTDGFFATIPNEKPETIKSKAKKFLKHINEKLPGMLELEYEGFYLRGFFVTKKKYALIDEDGHITTRGLEVVRRDWSEIAKETQAKVLEVILREGSIEKAAGIVKKVVEDLANYRVPVEKLIIHEQITRELKRYKATGPHVAIAKRLQARGIKVKPGTIISYVVLKGSKKISDRVILFDEYDSSRHKYDPDYYIHNQVLPAVLRILEAFGYKEKDLEYQRMKQTGLGAWLKMGKK

SEQ ID NO: 308 - protein, 773 aa, unidentified
  REGION 1..773: note = Description of Unknown: Synthetic polypeptide
MILDTDYITENGKPVIRIFKKEKGEFKIEYDRNFEPYIYALLEDDESIEDIKKITGERHGKKVRIIRVEKVKKKFLGEPIEVWKLVFEHPQDVPAIRDAIRSHPAVREIFEYDIPFAKRYLIDKGLVPMEGGEELKLLAFNIATFYHEGDEFAEGEILMISYADESGAKVITWKKIDLPYVEVVSTEREAIKRFLQVLREKDPDVLLTYNGDNFDFAYIKKRCEKLGLKFTIGRDGSEPKIQRMGDRFAVEVKGRIHLDLAPVVRHTIRLPTYTLEAVYEAVFGKKKEKVYAEEIAEAWKSEEGLKRVAQYSMELARATYELGREFFPMEVELAKLIGQSVWDVSRSSTGNLVEWYLLRVAYERNELAPNKPGGEEYQRRMRSSYIGGYVKEPEKGLWESIAYLDFRSSAGSIIVTHNVSPDTLEKECKNYDVAPIVGYRFCKDFKGFIPSILEDLIETRQKVKRKMKATIDPIEKKMLDYRQRALKILANSYYGYQGYPKARWYSKECAESVTAWGRHYIETTIKEAEKFGFKVLYADTDGFFATIPNEKPETIKSKAKKFLKHINEKLPGMLELEYEGFYLRGFFVTKKKYALIDEDGHITTRGLEVVRRDWSEIAKETQAKVLEVILREGSIEKAAGIVKKVVEDLANYRVPVEKLIIHEQITRELKDYKATGPHVAIAKRLQARGIKVKPGTIISYVVLKGSKKISDRVILFDEYDSSRHKYDPDYYIHNQVLPAVLRILEAFGYKEKDLEYQRMKQTGLGAWLKMGKK

SEQ ID NO: 309 - protein, 773 aa, unidentified
  REGION 1..773: note = Description of Unknown: Synthetic polypeptide
MILDTDYITENGKPVIRIFKKEKGEFKIEYDRNFEPYIYALLEDDESIEDIKKITGERHGKKVRIIRVEKVKKKFLGEPIEVWKLVFEHPQDVPAIRDAIRSHPAVREIFEYDIPFAKRYLIDKGLVPMEGGEELKLLAFAIATFYHEGDEFAEGEILMISYADESGAKVITWKKIDLPYVEVVSTEREAIKRFLQVLREKDPDVLLTYNGDNFDFAYIKKRCEKLGLKFTIGRDGSEPKIQRMGDRFAVEVKGRIHLDLAPVVRHTIRLPTYTLEAVYEAVFGKKKEKVYAEEIAEAWKSEEGLKRVAQYSMEDARATYELGREFFPMEVELAKLIGQSVWDVSRSSTGNLVEWYLLRVAYERNELAPNKPGGEEYQRRMRSSYIGGYVKEPEKGLWESIAYLDFRSSAGSIIVTHNVSPDTLEKECKNYDVAPIVGYRFCKDFKGFIPSILEDLIETRQKVKRKMKATIDPIEKKMLDYRQRALKILANSYYGYQGYPKARWYSKECAESVTAWGRHYIETTIKEAEKFGFKVLYADTDGFFATIPNEKPETIKSKAKKFLKHINEKLPGMLELEYEGFYLRGFFVTKKKYALIDEDGHITTRGLEVRRRDWSEIAKETQAKVLEVILREGSIEKAAGIVKKVVEDLANYRVPVEKLIIHEQITRELKRYKATGPHVAIAKRLQARGIKVKPGTIISYVVLKGSKKISDRVILFDEYDSSRHKYDPDYYIHNQVLPAVLRILEAFGYKEKDLEYQRMKQTGLGAWLKMGKK

SEQ ID NO: 310 - protein, 773 aa, unidentified
  REGION 1..773: note = Description of Unknown: Synthetic polypeptide
MILDTDYITENGKPVIRIFKKEKGEFKIEYDRNFEPYIYALLEDDESIEDIKKITGERHGKKVRIIRVEKVKKKFLGEPIEVWKLVFKHPQDYPAIRDAIRSHPAVREIFEYDIPFAKRYLIDKGLVPMEGGEELKLLAFAIATFYHEGDEFAEGEILMISYADESGAKVITWKKIDLPYVEVVSTEREAIKRFLQVLREKDPDVLLTYNGDNFDFAYIKKRCEKLGLKFTIGRDGSEPKIQRMGDRFAVEVKGRIHLDLAPVVRHTIRLPTYTLEAVYEAVFGKKKEKVYAEEIAEAWKSEEGLKRVAQYSMEDARATYELGREFFPMEVELAKLIGQSVWDVSRSSTGNLVEWYLLRVAYERNELAPNKPGGEEYQRRMRSSYIGGYVKEPEKGLWESIAYLDFRSSAGSIIVTHNVSPDTLEKECKNYDVAPIVGYRFCKDFKGFIPSILEDLIETRQKVKRKMKATIDPIEKKMLDYRQRALKILANSYYGYQGYPKARWYSKECAESVTAWGRHYIETTIKEAEKFGFKVLYADTDGFFATIPNEKPETIKSKAKKFLKHINEKLPGMLELEYEGFYLRGFFVTKKKYALIDEDGHITTRGLEVVRRDWSEIAKETQAKVLEVILREGSIEKAAGIVKKVVEDLANYRVPVEKLIIHEQITRELKRYKATGPHVAIAKRLQARGIKVKPGTIISYVVLKGSKKISDRVILFDEYDSSRHKYDPDYYIHNQVLPAVLRILEAFGYKEKDLEYQRMKQTGLGAWLKMGKK

SEQ ID NO: 311 - protein, 773 aa, unidentified
  REGION 1..773: note = Description of Unknown: Synthetic polypeptide
MILDTDYITENGKPVIRIFKKEKGEFKIEYDRNFEPYIYALLEDDESIEDIKKITGERHGKKVRIIRVEKVKKKFLGEPIEVWKLVFEHPQDYPAIRDAIRSHPAVREIFEYDIPFAKRYLIDKGLVPMEGGEELKLLAFAIATFYHEGDEFAEGEILMISYADESGAKVITWKKIDLPYVEVVSTEREAIKRFLQVLREKDPDVLLTYNGDNFDFAYIKKRCEKLGLKFTIGRDGSEPKIQRMGDRFAVEVKGRIHLDLAPVVRHTIRLPTYTLEAVYEAVFGKKKEKVYAEEIAEAWKSEEGLKRVAQYSMEDARATYELGREFFPMEVELAKLIGQSVWDVSRSSTGNLVEWYLLRVAYERNELAPNKPGGEEYQRRMRSSYIGGYVKEPEKGLWESIAYLDFRSSAGSIIVTHNVSPDTLEKECKNYDVAPIVGYRFCKDFKGFIPSILEDLIETRQKVKRKMKATIDPIEKKMLDYRQRALKNLANSYYGYQGYPKARWYSKECAESVTAWGRHYIETTIKEAEKFGFKVLYADTDGFFATIPNEKPETIKSKAKKFLKHINEKLPGMLELEYEGFYLRGFFVTKKKYALIDEDGHITTRGLEVVRRDWSEIAKETQAKVLEVILREGSIEKAAGIVKKVVEDLANYRVPVEKLIIHEQITRELKRYKATGPHVAIAKRLQARGIKVKPGTIISYVVLKGSKKISDRVILFDEYDSSRHKYDPDYYIHNQVLPAVLRILEAFGYKEKDLEYQRMKQTGLGAWLKMGKK

SEQ ID NO: 312 - protein, 773 aa, unidentified
  REGION 1..773: note = Description of Unknown: Synthetic polypeptide
MILDTDYITENGKPVIRIFKKEKGEFKIEYDRNFEPYIYALLEDDESIEDIKKITGERHGKKVRIIRVEKVKKKFLGEPIEVWKLVFEHPQDVPAIRDAIRSHPAVREIFEYDIPFAKRYLIDKGLVPMEGGEELKLLAFWIATFYHEGDEFAEGEILMISYADESGAKVITWKKIDLPYVEVVSTEREAIKRFLQVLREKDPDVLLTYNGDNFDFAYIKKRCEKLGLKFTIGRDGSEPKIQRMGDRFAVEVKGRIHLDLAPVVRHTIRLPTYTLEAVYEAVFGKKKEKVYAEEIAEAWKSEEGLKRVAQYSMEWARATYELGREFFPMEVELAKLIGQSVWDVSRSSTGNLVEWYLLRVAYERNELAPNKPGGEEYQRRMRSSYIGGYVKEPEKGLWESIAYLDFRSSAGSIIVTHNVSPDTLEKECKNYDVAPIVGYRFCKDFKGFIPSILEDLIETRQKVKRKMKATIDPIEKKMLDYRQRALKILANSYYGYQGYPKARWYSKECAESVTAWGRHYIETTIKEAEKFGFKVLYADTDGFFATIPNEKPETIKSKAKKFLKHINEKLPGMLELEYEGFYLRGFFVTKKKYALIDEDGHITTRGLEVVRRDWSEIAKETQAKVLEVILREGSIEKAAGIVKKVVEDLANYRVPVEKLIIHEQITRELKDYKATGPHVAIAKRLQARGIKVKPGTIISYVVLKGSKKISDRVILFDEYDSSRHKYDPDYYIHNQVLPAVLRILEAFGYKEKDLEYQRMKQTGLGAWLKMGKK

SEQ ID NO: 313 - protein, 758 aa, unidentified
  REGION 1..758: note = Description of Unknown: Synthetic polypeptide
MILDTDYITENGKPVIRIFKKEKGEFKIEYDRNFEPYIYALLEDDESIEDIKKITGERHGKKVRIIRVEKVKKKFLGEPIEVWKLVFEHPQDVPAIRDAIRSHPAVREIFEYDIPFAKRYLIDKGLVPMEGGEELKLLAFNIATFYHEGDEFAEGEILMISYADESGAKVITWKKIDLPYVEVVSTEREAIKRFLQVLREKDPDVLLTYNGDNFDFAYIKKRCEKLGLKFTIGRDGSEPKIQRMGDRFAVEVKGRIHLDLAPVVRHTIRLPTYTLEAVYEAVFGKKKEKVYAEEIAEAWKSEEGLKRVAQYSMEDARATYELGREFFPLEVELAKLIGQSVWDVSRSSTGNLVEWYLLRVAYERNELAPNKPGGEEYQRRMRSSYIGGYVKEPEKGLWESIAYLDFRSSAGSIIVTHNVSPDTLEKECKNYDVAPIVGYRFCKDFKGFIPSILEDLIETRQKVKRKMKATIDPIEKKMLDYRQRALKILANSYYGYQGYPKARWYSKECAESVTAWGRHYIETTIKEAEKFGFKVLYADTDGFFATIPNEKPETIKSKAKKFLKHINEKLPGMLELEYEGFYLRGFFVTKKKYALIDEDGHITTRGLEVVRRDWSEIAKETQAKVLEVILREGSIEKAAGIVKKVVEDLANYRVPVEKLIIHEQITRELKRYKATGLHVAIAKRLQARGIKVKPGTIISYVVLKGSKKISDRVILFDEYDSSRHKYDPDYYIHNQVLPAVLRILEAFGYKEKDLEYQR

SEQ ID NO: 314 - protein, 773 aa, unidentified
  REGION 1..773: note = Description of Unknown: Synthetic polypeptide
MILDTDYITENGKPVIRIFKKEKGEFKIEYDRNFEPYIYALLEDDESIEDIKKITGERHGKKVRIIRVEKVKKKFLGEPIEVWKLVFEHPQDYPAIRDAIRSHPAVREIFEYDIPFAKRYLIDKGLVPMEGGEELKLLAFAIATFYHEGDEFAEGEILMISYADESGAKVITWKKIDLPYVEVVSTEREAIKRFLQVLREKDPDVLLTYNGDNFDFAYIKKRCEKLGLKFTIGRDGSEPKIQRMGDRFAVEVKGRIHLDLAPVVRHTIRLPTYTLEAVYEAVFGKKKEKVYAEEIAEAWKSEEGLKRVAQYSMEDARATYELGREFFPMEVELAKLIGQSVWDVSRSSTGNLVEWYLLRVAYERNELAPNKPGGEEYQRRMRSSYIGGYVKEPEKGLWESIAYLDFRSSAGSIIVTHNISPDTLEKECKNYDVAPIVGYRFCKDFKGFIPSILEDLIETRQKVKRKMKATIDPIEKKMLDYRQRALKILANSYYGYFGYPKARWYNKELAESVTAWGRHYIETTIKEAEKFGFKVLYADTDGFFATIPNEKPETIKSKAKKFLKHINEKLPGMLELEYEGFYLRGFFVTKKKYALIDEDGHITTRGLEVVRRDWSEIAKETQAKVLEVILREGSIEKAAGIVKKVVEDLANYRVPVEKLIIHEQITRELKRYKATGPHVAIAKRLQARGIKVKPGTIISYVVLKGSKKISDRVILFDEYDSSRHKYDPDYYIHNQVLPAVLRILEAFGYKEKDLEYQRMKQTGLGAWLKMGKK

SEQ ID NO: 315 - protein, 773 aa, unidentified
  REGION 1..773: note = Description of Unknown: Synthetic polypeptide
MILDTDYITENGKPVIRIFKKEKGEFKIEYDRNFEPYIYALLEDDESIEDIKKITGERHGKKVRIIRVEKVKKKFLGEPIEVWKLVFEHPQDYPAIRDAIRSHPAVREIFEYDIPFAKRYLIDKGLVPMEGGEELKLLAFAIATFYHEGDEFAEGEILMISYADESGAKVITWKKIDLPYVEVVSTEREAIKRFLQVLREKDPDVLLTYNGDNFDFAYIKKRCEKLGLKFTIGRDGSEPKIQRMGDRFAVEVKGRIHLDLAPVVRHTIRLPTYTLEAVYEAVFGKKKEKVYAEEIAEAWKSEEGLKRVAQYSMEDARATYELGREFFPMEVELAKLIGQSVWDVSRSSTGNLVEWYLLRVAYERNELAPNKPGGEEYQRRMRSSYIGGYVKEPEKGLWESIAYLDFRSSAGSIIVTHNVSPDTLEKECKNYDVAPIVGYRFCKDFKGFIPSILEDLIETRQKVKRKMKATIDPIEKKMLDYRQRALKILANSYYGYQGYPKARWYSKECAESVTAWGRHYIETTIKEAEKFGFKVLYADTDGFFATIPNEKPETIKSKAKKFLKHINEKLPGMLELEYEGFYLRGFFVTKKKYALIDEDGHITTRGLEVVRRDWSEIAKETQAKVLEVILREGSIEKAAGIVKKVVEDLANYRVPVEKLIIHEQITRELKRYKATGPHVAIAKRLQARGITVKPGTIISYVVLKGSKKISDRVILFDEYDSSRHKYDPDYYIHNQVLPAVLRILEAFGYKEKDLEYQRMKQTGLGAWLKMGKK

SEQ ID NO: 316 - protein, 773 aa, unidentified
  REGION 1..773: note = Description of Unknown: Synthetic polypeptide
MILDTDYITENGKPVIRIFKKEKGEFKIEYDRNFEPYIYALLEDDESIEDIKKITGERHGKKVRIIRVEKVKKKFLGEPIEVWKLVFEHPQDEPAIRDAIRSHPAVREIFEYDIPFAKRYLIDKGLVPMEGGEELKLLAFNIATFYHEGDEFAEGEILMISYADESGAKVITWKKIDLPYVEVVSTEREAIKRFLQVLREKDPDVLLTYNGDNFDFAYIKKRCEKLGLKFTIGRDGSEPKIQRMGDRFAVEVKGRIHLDLAPVVRHTIRLPTYTLEAVYEAVFGKKKEKVYAEEIAEAWKSEEGLKRVAQYSMEDARATYELGREFFPLEVELAKLIGQSVWDVSRSSTGNLVEWYLLRVAYERNELAPNKPGGEEYQRRMRSSYIGGYVKEPEKGLWESIAYLDFRSSAGSIIVTHNVSPDTLEKECKNYDVAPIVGYRFCKDFKGFIPSILEDLIETRQKVKRKMKATIDPIEKKMLDYRQRALKILANSYYGYQGYPKARWYSKECAESVTAWGRHYIETTIKEAEKFGFKVLYADTDGFFATIPNEKPETIKSKAKKFLKHINEKLPGMLELEYEGFYLRGFFVTKKKYALIDEDGHITTRGLEVVRRDWSEIAKETQAKVLEVILREGSIEKAAGIVKKVVEDLANYRVPVEKLIIHEQITRELKRYKATGPHVAIAKRLQARGIKVKPGTIISYVVLKGSKKISDRVILFDEYDSSRHKYDPDYYIHNQVLPAVLRILEAFGYKEKDLEYQRMKQTGLGAWLKMGKK

SEQ ID NO: 317 - protein, 773 aa, unidentified
  REGION 1..773: note = Description of Unknown: Synthetic polypeptide
MILDTDYITENGKPVIRIFKKEKGEFKIEYDRNFEPYIYALLEDDESIEDIKKITGERHGKKVRIIRVEKVKKKFLGEPIEVWKLVFEHPQDVPAIRDAIRSHPAVREIFEYDIPFAKRYLIDKGLVPMEGGEELKLLAFNIATFYHEGDEFAEGEILMISYADESGAKVITWKKIDLPYVEVVSTEREAIKRFLQVLREKDPDVLLTYNGDNFDFAYIKKRCEKLGLKFTIGRDGSEPKIQRMGDRFAVEVKGRIHLDLAPVVRHTIRLPTYTLEAVYEAVFGKKKEKVYAEEIAEAWKSEEGLFRVAQYSMEDARATYELGREFFPLEVELAKLIGQSVWDVSRSSTGNLVEWYLLRVAYERNELAPNKPGGEEYQRRMRSSYIGGYVKEPEKGLWESIAYLDFRSSAGSIIVTHNVSPDTLEKECKNYDVAPIVGYRFCKDFKGFIPSILEDLIETRQKVKRKMKATIDPIEKKMLDYRQRALKILANSYYGYQGYPKARWYSKECAESVTAWGRHYIETTIKEAEKFGFKVLYADTDGFFATIPNEKPETIKSKAKKFLKHINEKLPGMLELEYEGFYLRGFFVTKKKYALIDEDGHITTRGLEVVRRDWSEIAKETQAKVLEVILREGSIEKAAGIVKKVVEDLANYRVPVEKLIIHEQITRELKRYKATGPHVAIAKRLQARGIKVKPGTIISYVVLKGSKKISDRVILFDEYDSSRHKYDPDYYIHNQVLPAVLRILEAFGYKEKDLEYQRMKQTGLGAWLKMGKK

SEQ ID NO: 318 - protein, 773 aa, unidentified
  REGION 1..773: note = Description of Unknown: Synthetic polypeptide
MILDTDYITENGKPVIRIFKKEKGEFKIEYDRNFEPYIYALLEDDESIEDIKKITGERHGKKVRIIRVEKVKKKFLGEPIEVWKLVFEHPQDYPAIRDAIRSHPAVREIFEYDIPFAKRYLIDKGLVPMEGGEELKLLAFAIATFYHEGDEFAEGEILMISYADESGAKVITWKKIDLPYVEVVSTEREAIKRFLQVLREKDPDVLLTYNGDNFDFAYIKKRCEKLGLKFTIGRDGSEPKIQRMGDRFAVEVKGRIHLDLAPVVRHTIRLPTYTLEAVYEAVFGKKKEKVYAEEIAEAWKSEEGLKRVAQYSMEDARATYELGREFFPMEVELAKLIGQSVWDVSRSSTGNLVEWYLLRVAYERNELAPNKPGGEEYQRRMRSSYIGGYVKEPEKGLWESIAYLDFRSSAGSIIVTHNISPDTLEKECKNYDVAPIVGYRFCKDFKGFIPSILEDLIETRQKVKRKMKATIDPIEKKMLDYRQRALKILANSYYGYNGYPKARWYSKEAAESVTAWGRHYIETTIKEAEKFGFKVLYADTDGFFATIPNEKPETIKSKAKKFLKHINEKLPGMLELEYEGFYLRGFFVTKKKYALIDEDGHITTRGLEVVRRDWSEIAKETQAKVLEVILREGSIEKAAGIVKKVVEDLANYRVPVEKLIIHEQITRELKRYKATGPHVAIAKRLQARGIKVKPGTIISYVVLKGSKKISDRVILFDEYDSSRHKYDPDYYIHNQVLPAVLRILEAFGYKEKDLEYQRMKQTGLGAWLKMGKK

SEQ ID NO: 319 - protein, 773 aa, unidentified; identical to SEQ ID NO: 49
  REGION 1..773: note = Description of Unknown: Synthetic polypeptide

SEQ ID NO: 320 - protein, 773 aa, unidentified
  REGION 1..773: note = Description of Unknown: Synthetic polypeptide
MILDTDYITENGKPVIRIFKKEKGEFKIEYDRNFEPYIYALLEDDESIEDIKKITGERHGKKVRIIRVEKVKKKFLGEPIEVWKLVFEHPQDYPAIRDAIRSHPAVREIFEYDIPFAKRYLIDKGLVPMEGGEELKLLAFAIATFYHEGDEFAEGEILMISYADESGAKVITWKKIDLPYVEVVSTEREAIKRFLQVLREKDPDVLLTYNGDNFDFAYIKKRCEKLGLKFTIGRDGSEPKIQRMGDRFAVEVKGRIHLDLAPVVRHTIRLPTYTLEAVYEAVFGKKKEKVYAEEIAEAQKSEEGLKRVAQYSMEDARATYELGREFFPMEVELAKLIGQSVWDVSRSSTGNLVEWYLLRVAYERNELAPNKPGGEEYQRRMRSSYIGGYVKEPEKGLWESIAYLDFRSSAGSIIVTHNVSPDTLEKECKNYDVAPIVGYRFCKDFKGFIPSILEDLIETRQKVKRKMKATIDPIEKKMLDYRQRALKILANSYYGYQGYPKARWYSKECAESVTAWGRHYIETTIKEAEKFGFKVLYADTDGFFATIPNEKPETIKSKAKKFLKHINEKLPGMLELEYEGFYLRGFFVTKKKYALIDEDGHITTRGLEVVRRDWSEIAKETQAKVLEVILREGSIEKAAGIVKKVVEDLANYRVPVEKLIIHEQITRELKRYKATGPHVAIAKRLQARGIKVKPGTIISYVVLKGSKKISDRVILFDEYDSSRHKYDPDYYIHNQVLPAVLRILEAFGYKEKDLEYQRMKQTGLGAWLKMGKK

SEQ ID NO: 321 - protein, 773 aa, unidentified
  REGION 1..773: note = Description of Unknown: Synthetic polypeptide
MILDTDYITENGKPVIRIFKKEKGEFKIEYDRNFEPYIYALLEDDESIEDIKKITGERHGKKVRIIRVEKVKKKFLGEPIEVWKLVFENPQDFPAIRDAIRSHPAVREIFEYDIPFAKRYLIDKGLVPMEGGEELKLLAFNIATFYHEGDEFAEGEILMISYADESGAKVITWKKIDLPYVEVVSTEREAIKRFLQVLREKDPDVLLTYNGDNFDFAYIKKRCEKLGLKFTIGRDGSEPKIQRMGDRFAVEVKGRIHLDLAPVVRHTIRLPTYTLEAVYEAVFGKKKEKVYAEEIAEAWKSEEGLKRVAQYSMEDARATYELGREFFPLEVELAKLIGQSVWDVSRSSTGNLVEWYLLRVAYERNELAPNKPGGEEYQRRMRSSYIGGYVKEPEKGLWESIAYLDFRSSAGSIIVTHNVSPDTLEKECKNYDVAPIVGYRFCKDFKGFIPSILEDLIETRQKVKRKMKATIDPIEKKMLDYRQRALKILANSYYGYQGYPKARWYSKECAESVTAWGRHYIETTIKEAEKFGFKVLYADTDGFFATIPNEKPETIKSKAKKFLKHINEKLPGMLELEYEGFYLRGFFVTKKKYALIDEDGHITTRGLEVVRRDWSEIAKETQAKVLEVILREGSIEKAAGIVKKVVEDLANYRVPVEKLIIHEQITRELKRYKATGPHVAIAKRLQARGIKVKPGTIISYVVLKGSKKISDRVILFDEYDSSRHKYDPDYYIHNQVLPAVLRILEAFGYKEKDLEYQRMKQTGLGAWLKMGKK

SEQ ID NO: 322 - protein, 773 aa, unidentified
  REGION 1..773: note = Description of Unknown: Synthetic polypeptide
MILDTDYITENGKPVIRIFKKEKGEFKIEYDRNFEPYIYALLEDDESIEDIKKITGERHGKKVRIIRVEKVKKKFLGEPIEVWKLVFEHPQDYPAIRDAIRSHPAVREIFEYDIPFAKRYLIDKGLVPSEGGEELKLLAFAIATFYHEGDEFAEGEILMISYADESGAKVITWKKIDLPYVEVVSTEREAIKRFLQVLREKDPDVLLTYNGDNFDFAYIKKRCEKLGLKFTIGRDGSEPKIQRMGDRFAVEVKGRIHLDLAPVVRHTIRLPTYTLEAVYEAVFGKKKEKVYAEEIAEAWKSEEGLKRVAQYSMEDARATYELGREFFPMEVELAKLIGQSVWDVSRSSTGNLVEWYLLRVAYERNELAPNKPGGEEYQRRMRSSYIGGYVKEPEKGLWESIAYLDFRSSAGSIIVTHNVSPDTLEKECKNYDVAPIVGYRFCKDFKGFIPSILEDLIETRQKVKRKMKATIDPIEKKMLDYRQRALKILANSYYGYQGYPKARWYSKECAESVTAWGRHYIETTIKEAEKFGFKVLYADTDGFFATIPNEKPETIKSKAKKFLKHINEKLPGMLELEYEGFYLRGFFVTKKKYALIDEDGHITTRGLEVVRRDWSEIAKETQAKVLEVILREGSIEKAAGIVKKVVEDLANYRVPVEKLIIHEQITRELKRYKATGPHVAIAKRLQARGIKVKPGTIISYVVLKGSKKISDRVILFDEYDSSRHKYDPDYYIHNQVLPAVLRILEAFGYKEKDLEYQRMKQTGLGAWLKMGKK

SEQ ID NO: 323 - protein, 757 aa, unidentified
  REGION 1..757: note = Description of Unknown: Synthetic polypeptide
MILDTDYITENGKPVIRIFKKEKGEFKIEYDRNFEPYIYALLEDDESIEDIKKITGERHGKKVRIIRVEKVKKKFLGEPIEVWKLVFEHPQDVPAIRDAIRSHPAVREIFEYDIPFAKRYLIDKGLVPMEGGEELKLLAFAIATFYHEGDEFAEGEILMISYADESGAKVITWKKIDLPYVEVVSTEREAIKRFLQVLREKDPDVLLTYNGDNFDFAYIKKRCEKLGLKFTIGRDGSEPKIQRMGDRFAVEVKGRIHLDLAPVVRHTIRLPTYTLEAVYEAVFGKKKEKVYAEEIAEAWKSEEGLKRVAQYSMEDARATYELGREFFPMEVELAKLIGQSVWDVSRSSTGNLVEWYLLRVAYERNELAPNKPGGEEYQRRMRSSYIGGYVKEPEKGLWESIAYLDFRSSAGSIIVTHNVSPDTLEKECKNYDVAPIVGYRFCKDFKGFIPSILEDLIETRQKVKRKMKATIDPIEKKMLDYRQRALKILANSYYGYQGYPKARWYSKECAESVTAWGRHYIETTIKEAEKFGFKVLYADTDGFFATIPNEKPETIKSKAKKFLKHINEKLPGMLELEYEGFYLRGFFVTKKKYALIDEDGHITTRGLEVVRRDWSEIAKETQAKVLEVILREGSIEKAAGIVKKVVEDLANYRVPVEKLIIHEFITRKLKDYKATGPHVAIAKRLQARGIKVKPGTIISYVVLKGSKKISDRVILFDEYDSSRHKYDPDYYIHNQVLPAVLRILEAFGYKEKDLEYQ

SEQ ID NO: 324 - protein, 773 aa, unidentified
  REGION 1..773: note = Description of Unknown: Synthetic polypeptide
IILDTDYITENGKPVIRIFKKEKGEFKIEYDRNFEPYIYALLEDDESIEDIKKITGERHGKKVRIIRVEKVKKKFLGEPIEVWKLVFEHPQDYPAIRDAIRSHPAVREIFEYDIPFAKRYLIDKGLVPMEGGEELKLLAFAIATFYHEGDEFAEGEILMISYADESGAKVITWKKIDLPYVEVVSTEREAIKRFLQVLREKDPDVLLTYNGDNFDFAYIKKRCEKLGLKFTIGRDGSEPKIQRMGDRFAVEVKGRIHLDLAPVVRHTIRLPTYTLEAVYEAVFGKKKEKVYAEEIAEAWKSEEGLKRVAQYSMEDARATYELGREFFPMEVELAKLIGQSVWDVSRSSTGNLVEWYLLRVAYERNELAPNKPGGEEYQRRMRSSYIGGYVKEPEKGLWESIAYLDFRSSAGSIIVTHNVSPDTLEKECKNYDVAPIVGYRFCKDFKGFIPSILEDLIETRQKVKRKMKATIDPIEKKMLDYRQRALKILANSYYGYQGYPKARWYSKECAESVTAWGRHYIETTIKEAEKFGFKVLYADTDGFFATIPNEKPETIKSKAKKFLKHINEKLPGMLELEYEGFYLRGFFVTKKKYALIDEDGHITTRGLEVVRRDWSEIAKETQAKVLEVILREGSIEKAAGIVKKVVEDLANYRVPVEKLIIHEQITRELKRYKATGPHVAIAKRLQARGIKVKPGTIISYVVLKGSKKISDRVILFDEYDSSRHKYDPDYYIHNQVLPAVLRILEAFGYKEKDLEYQRMKQTGLGAWLKMGKK

SEQ ID NO: 325 - protein, 773 aa, unidentified
  REGION 1..773: note = Description of Unknown: Synthetic polypeptide
MILDTDNITENGKPVIRIFKKEKGEFKIEYDRNFEPYIYALLEDDESIEDIKKITGERHGKKVRIIRVEKVKKKFLGEPIEVWKLVFEHPQDVPAIRDAIRSHPAVREIFEYDIPFAKRYLIDKGLVPMEGGEELKLLAFNIATFYHEGDEFAEGEILMISYADESGAKVITWKKIDLPYVEVVSTEREAIKRFLQVLREKDPDVLLTYNGDNFDFAYIKKRCEKLGLKFTIGRDGSEPKIQRMGDRFAVEVKGRIHLDLAPVVRHTIRLPTYTLEAVYEAVFGKKKEKVYAEEIAEAWKSEEGLKRVAQYSMEDARATYELGREFFPLEVELAKLIGQSVWDVSRSSTGNLVEWYLLRVAYERNELAPNKPGGEEYQRRMRSSYIGGYVKEPEKGLWESIAYLDFRSSAGSIIVTHNVSPDTLEKECKNYDVAPIVGYRFCKDFKGFIPSILEDLIETRQKVKRKMKATIDPIEKKMLDYRQRALKILANSYYGYQGYPKARWYSKECAESVTAWGRHYIETTIKEAEKFGFKVLYADTDGFFATIPNEKPETIKSKAKKFLKHINEKLPGMLELEYEGFYLRGFFVTKKKYALIDEDGHITTRGLEVVRRDWSEIAKETQAKVLEVILREGSIEKAAGIVKKVVEDLANYRVPVEKLIIHEQITRELKRYKATGPHVAIAKRLQARGIKVKPGTIISYVVLKGSKKISDRVILFDEYDSSRHKYDPDYYIHNQVLPAVLRILEAFGYKEKDLEYQRMKQTGLGAWLKMGKK

SEQ ID NO: 326 - protein, 773 aa, unidentified
  REGION 1..773: note = Description of Unknown: Synthetic polypeptide
MILDTDYITENGKPVIRIFKKEKGEFKIEYDRNFEPYIYALLEDDESIEDIKKITGERHGKKVRIIRVEKVKKKFLGEPIEVWKLVFEHPQDVPAIRDAIRSHPAVREIFEYDIPFAKRYLIDKGLVPMEGGEELKLLAFNIATFYHEGDEFAEGEILMISYADESGAKVITWKKIDLPYVEVVSTEREAIKRFLQVLREKDPDVLLTYNGDNFDFAYIKKRCEKLGLKFTIGRDGSEPKIQRMGDRFAVEVKGRIHLDLAPVVRHTIRLPTYTLEAVYEAVFGKKKEKVYAEEIAEAWKSEEGLKRVAQYSVEDARATYELGREFFPLEVELAKLIGQSVWDVSRSSTGNLVEWYLLRVAYERNELAPNKPGGEEYQRRMRSSYIGGYVKEPEKGLWESIAYLDFRSSAGSIIVTHNVSPDTLEKECKNYDVAPIVGYRFCKDFKGFIPSILEDLIETRQKVKRKMKATIDPIEKKMLDYRQRALKILANSYYGYQGYPKARWYSKECAESVTAWGRHYIETTIKEAEKFGFKVLYADTDGFFATIPNEKPETIKSKAKKFLKHINEKLPGMLELEYEGFYLRGFFVTKKKYALIDEDGHITTRGLEVVRRDWSEIAKETQAKVLEVILREGSIEKAAGIVKKVVEDLANYRVPVEKLIIHEQITRELKRYKATGPHVAIAKRLQARGIKVKPGTIISYVVLKGSKKISDRVILFDEYDSSRHKYDPDYYIHNQVLPAVLRILEAFGYKEKDLEYQRMKQTGLGAWLKMGKK

SEQ ID NO: 327 - protein, 773 aa, unidentified
  REGION 1..773: note = Description of Unknown: Synthetic polypeptide
MILDTDYITENGKPVIRIFKKEKGEFKIEYDRNFEPYIYALLEDDESIEDIKKITGERHGKKVRIIRVEKVKKKFLGEPIEVWKLVFEHPQDYPAIRDAIRSHPAVREIFEYDIPFAKRYLIDKGLVPMEGGEELKLLAFAIATFYHEGDEFAEGEILMISYADESGAKVITWKKIDLPYVEVVSTEREAIKRFLQVLREKDPDVLLTYNGDNFDFAYIKKRCEKLGLKFTIGRDGSEPKIQRMGDRFAVEVKGRIHLDLAPVVRHTIRLPTYTLEAVYEAVFGKKKEKVYAEEIAEAWKSEEGLKRVAQYSMEDARATYELGREFFPMEVELAKLIGQSVWDVSRSSTGNLVEWYLLRVAYERNELAPNKPGGEEYQRRMRSSYIGGYVKEPEKGLWESIAYLDFRSSAGSIIVTHNVSPDTLEKECKNYDVAPIVGYRFCKDFKGFIPSILEDLIETRQKVKRKMKATIDPIEKKMLDYRQRALKILANSYYGYQGYPKARWYSKECAESVTAWGRHYIETTIKEAEKFGFKVLYADTDGFFATIPNEKPETIKSKAKKFLKHINEKLPGMLELEYEGFYLRGFFVTKKKYALIDEDGHITTRGLEVVRRDWSEIAKETQAKVLEVILREGSIEKAAGIVKKVVEDLANYRVPVEKLIIHEQITRELKRYKATGPHVAIAKRLQARGIKVKPGTIISYVVLKGSKKISDRVILFDEYDSSRHKYDPDYYIHNQVLPAVLRILEAFGYKEKDLEYQRAKQTGLGAWLKMGKK

SEQ ID NO: 328 - protein, 773 aa, unidentified
  REGION 1..773: note = Description of Unknown: Synthetic polypeptide
MILDTDYITENGKPVIRIFKKEKGEFKIEYDRNFEPYIYALLEDDESIEDIKKITGERHGKKVRIIRVEKVKKKFLGEPIEVWKLVFNHPQDYPAIRDAIRSHPAVREIFEYDIPFAKRYLIDKGLVPMEGGEELKLLAFAIATFYHEGDEFAEGEILMISYADESGAKVITWKKIDLPYVEVVSTEREAIKRFLQVLREKDPDVLLTYNGDNFDFAYIKKRCEKLGLKFTIGRDGSEPKIQRMGDRFAVEVKGRIHLDLAPVVRHTIRLPTYTLEAVYEAVFGKKKEKVYAEEIAEAWKSEEGLKRVAQYSMEDARATYELGREFFPMEVELAKLIGQSVWDVSRSSTGNLVEWYLLRVAYERNELAPNKPGGEEYQRRMRSSYIGGYVKEPEKGLWESIAYLDFRSSAGSIIVTHNVSPDTLEKECKNYDVAPIVGYRFCKDFKGFIPSILEDLIETRQKVKRKMKATIDPIEKKMLDYRQRALKILANSYYGYQGYPKARWYSKECAESVTAWGRHYIETTIKEAEKFGFKVLYADTDGFFATIPNEKPETIKSKAKKFLKHINEKLPGMLELEYEGFYLRGFFVTKKKYALIDEDGHITTRGLEVVRRDWSEIAKETQAKVLEVILREGSIEKAAGIVKKVVEDLANYRVPVEKLIIHEQITRELKRYKATGPHVAIAKRLQARGIKVKPGTIISYVVLKGSKKISDRVILFDEYDSSRHKYDPDYYIHNQVLPAVLRILEAFGYKEKDLEYQRMKQTGLGAWLKMGKK

SEQ ID NO: 329 - protein, 773 aa, unidentified
  REGION 1..773: note = Description of Unknown: Synthetic polypeptide
MILDTDYITENGKPVIRIFKKEKGEFKIEYDRNFEPYIYALLEDDESIEDIKKITGERHGKKVRIIRVEKVKKKFLGEPIEVWKLVFEHPQDYPAIRDAIRSHPAVREIFEYDIPFAKRYLIDKGLVPMEGGEELKLLAFAIATFYHEGDEFAEGEILMISYADESGAKVITWKKIDLPYVEVVSTEREAIKRFLQVLREKDPDVLLTYNGDNFDFAYIKKRCEKLGLKFTIGRDGSEPKIQRMGDRFAVEVKGRIHLDLAPVVRHTIRLPTYTLEAVYEAVFGKKKEQVYAEEIAEAWKSEEGLKRVAQYSMEDARATYELGREFFPMEVELAKLIGQSVWDVSRSSTGNLVEWYLLRVAYERNELAPNKPGGEEYQRRMRSSYIGGYVKEPEKGLWESIAYLDFRSSAGSIIVTHNVSPDTLEKECKNYDVAPIVGYRFCKDFKGFIPSILEDLIETRQKVKRKMKATIDPIEKKMLDYRQRALKILANSYYGYQGYPKARWYSKECAEFVTAWGRHYIETTIKEAEKFGFKVLYADTDGFFATIPNEKPETIKSKAKKFLKHINEKLPGMLELEYEGFYLRGFFVTKKKYALIDEDGHITTRGLEVVRRDWSEIAKETQAKVLEVILREGSIEKAAGIVKKVVEDLANYRVPVEKLIIHEQITRELKRYKATGPHVAIAKRLQARGIKVKPGTIISYVVLKGSKKISDRVILFDEYDSSRHKYDPDYYIHNQVLPAVLRILEAFGYKEKDLEYQRMKQTGLGAWLKMGKK

SEQ ID NO: 330 - protein, 757 aa, unidentified
  REGION 1..757: note = Description of Unknown: Synthetic polypeptide
MILDTDYITENGKPVIRIFKKEKGEFKIEYDRNFEPYIYALLEDDESIEDIKKITGERHGKKVRIIRVEKVKKKFLGEPIEVWKLVFEHPQDVPAIRDAIRSHPAVREIFEYDIPFAKRYLIDKGLVPMEGGEELKLLAFAIATFYHEGDEFAEGEILMISYADESGAKVITWKKIDLPYVEVVSTEREAIKRFLQVLREKDPDVLLTYNGDNFDFAYIKKRCEKLGLKFTIGRDGSEPKIQRMGDRFAVEVKGRIHLDLAPVVRHTIRLPTYTLEAVYEAVFGKKKEKVYAEEIAEAWKSEEGLKRVAQYSMEDARATYELGREFFPLEVELAKLIGQSVWDVSRSSTGNLVEWYLLRVAYERNELAPNKPGGEEYQRRMRSSYIGGYVKEPEKGLWESIAYLDFRSSAGSIIVTHNVSPDTLEKECKNYDVAPIVGYRFCKDFKGFIPSILEDLIETRQKVKRKMKATIDPIEKKMLDYRQRALKILANSYYGYQGYPKARWYSKECAESVTAWGRHYIETTIKEAEKFGFKVLYADTDGFFATIPNEKPETIKSKAKKFLKHINEKLPGMLELEYEGFYLRGFFVTKKKYALIDEDGHITTRGLEVVRRDWSEIAKETQAKVLEVILREGSIEKAAGIVKKVVEDLANYRVPVEKLIIHEQITRELKRYKATGLHVAIAKRLQARGIKVKPGTIISYVVLKGSKKISDRVILFDEYDSSRHKYDPDYYIHNQVLPAVLRILEAFGYKEKDLEYQ

SEQ ID NO: 331 - protein, 773 aa, unidentified
  REGION 1..773: note = Description of Unknown: Synthetic polypeptide
MILDTDYITENGKPVIRIFKKEKGEFKIEYDRNFEPYIYALLEDDESIEDIKKITGERHGKKVRIIRVEKVKKKFLGEPIEVWKLVFEHPQDYPAIRDAIRSHPAVREIFEYDIPFAKRYLIDKGLVPMEGGEELKLLAFAIATFYHEGDEFAEGEILMISYADESGAKVITWKKIDLPYVEVVSTEREAIKRFLQVLREKDPDVLLTYNGDNFDFAYIKKRCEKLGLKFTIGRDGSEPKIQRMGDRFAVEVKGRIHLDLAPVVRHTIRLPTYTLEAVYEAVFGKKKEKVYAEEIAEAWKSEEGLKRVAQYSMEDARATYELGREFFPMEVELAKLIGQSVWDVSRSSTGNLVEWYLLRVAFERNELAPNKPGGEEYQRRMRSSYIGGYVKEPEKGLWESIAYLDFRSSAGSIIVTHNVSPDTLEKECKNYDVAPIVGYRFCKDFKGFIPSILEDLIETRQKVKRKMKATIDPIEKKMLDYRQRALKILANSYYGYQGYPKARWYSKECAESVTAWGRHYIETTIKEAEKFGFKVLYADTDGFFATIPNEKPETIKSKAKKFLKHINEKLPGMLELEYEGFYLRGFFVTKKKYALIDEDGHITTRGLEVVRRDWSEIAKETQAKVLEVILREGSIEKAAGIVKKVVEDLANYRVPVEKLIIHEQITRELKRYKATGPHVAIAKRLQARGIKVKPGTIISYVVLKGSKKISDRVILFDEYDSSRHKYDPDYYIHNQVLPAVLRILEAFGYKEKDLEYQRMKQTGLGAWLKMGKK

SEQ ID NO: 332 - protein, 773 aa, unidentified
  REGION 1..773: note = Description of Unknown: Synthetic polypeptide
MILDTDYITENGKPVIRIFKKEKGEFKIEYDRNFEPYIYALLEDDESIEDIKKITGERHGKKVRIIRVEKVKKKFLGEPIEVWKLVFEHPQDYPAIRDAIRSHPAVREIFEYDIPFAKRYLIDKGLVPMEGGEELKLLAFAIATFYHEGDEFAEGEILMISYADESGAKVITWKKIDLPYVEVVSTEREAIKRFLQVLREKDPDVLLTYNGDNFDFAYIKKRCEKLGLKFTIGRDGSEPKIQRMGDRFAVEVKGRIHLDLAPVVRHTIRLPTYTLEAVYEAVFGKKKEKVYAEEIAEAWKSEEGLKRVAQYSMEDARATYELGREFFPMEVELAKLIGQSVWDVSRSSTGNLVEWYLLRVAYERNELAPNKPGGEEYQRRMRSSYIGGYVKEPEKGLWESIAYLDFRSSAGSIIVTHNVSPDTLEKECKNYDVAPIVGYRFCKDFKGFIPSILEDLIETRQKVKRKMKATIDPIEKKMLDYRQRALKILANSYYGYQGYPKARWYSKECAESVTAWGRHYIETTIKEAEKFGFKVLYADTDGFFATIPNEKPETIKSKAKKFLKHINEKLPGMLELEYEGFYLRGFFVTKKRYALIDEDGHITTRGLEVVRRDWSEIAKETQAKVLEVILREGSIEKAAGIVKKVVEDLANYRVPVEKLIIHEQITRELKRYKATGPHVAIAKRLQARGIKVKPGTIISYVVLKGSKKISDRVILFDEYDSSRHKYDPDYYIHNQVLPAVLRILEAFGYKEKDLEYQRMKQTGLGAWLKMGKK

SEQ ID NO: 333 - protein, 757 aa, unidentified
  REGION 1..757: note = Description of Unknown: Synthetic polypeptide
MILDTDYITENGKPVIRIFKKEKGEFKIEYDRNFEPYIYALLEDDESIEDIKKITGERHGKKVRIIRVEKVKKKFLGEPIEVWKLVFEHPQDVPAIRDAIRSHPAVREIFEYDIPFAKRYLIDKGLVPMEGGEELKLLAFKIATFYHEGDEFAEGEILMISYADESGAKVITWKKIDLPYVEVVSTEREAIKRFLQVLREKDPDVLLTYNGDNFDFAYIKKRCEKLGLKFTIGRDGSEPKIQRMGDRFAVEVKGRIHLDLAPVVRHTIRLPTYTLEAVYEAVFGKKKEKVYAEEIAEAWKSEEGLKRVAQYSMEDARATYELGREFFPMEVELAKLIGQSVWDVSRSSTGNLVEWYLLRVAYERNELAPNKPGGEEYQRRMRSSYIGGYVKEPEKGLWESIAYLDFRSSAGSIIVTHNVSPDTLEKECKNYDVAPIVGYRFCKDFKGFIPSILEDLIETRQKVKRKMKATIDPIEKKMLDYRQRALKILANSYYGYQGYPKARWYSKECAESVTAWGRHYIETTIKEAEKFGFKVLYADTDGFFATIPNEKPETIKSKAKKFLKHINEKLPGMLELEYEGFYLRGFFVTKKKYALIDEDGHITTRGLEVVRRDWSEIAKETQAKVLEVILREGSIEKAAGIVKKVVEDLANYRVPVEKLIIHEQITRKLKDYKATGPHVAIAKRLQARGIKVKPGTIISYVVLKGSKKISDRVILFDEYDSSRHKYDPDYYIHNQVLPAVLRILEAFGYKEKDLEYQ

SEQ ID NO: 334 - protein, 773 aa, unidentified
  REGION 1..773: note = Description of Unknown: Synthetic polypeptide
MILDTDYITENGKPVIRIFKKEKGEFKIEYDRNFEPYIYALLEDDESIEDIKKITGERHGKKVRIIRVEKVKKKFLGEPIEVWKLVFEHPQDVPAIRDAIRSHPAVREIFEYDIPFAKRYLIDKGLVPMEGGEELKLLAFNIATFYHEGDEFAEGEILMISYADESGAKVITWKKIDLPYVEVVSTEREAIKRFLQVLREKDPDVLLTYNGDNFDFAYIKKRCEKLGLKFTIGRDGSEPKIQRMGDRFAVEVKGRIHLDLAPVVRHTIRLPTYTLEAVYEAVFGKKKEKVYAEEIAEAWKSEEGLARVAQYSMEDARATYELGREFFPLEVELAKLIGQSVWDVSRSSTGNLVEWYLLRVAYERNELAPNKPGGEEYQRRMRSSYIGGYVKEPEKGLWESIAYLDFRSSAGSIIVTHNVSPDTLEKECKNYDVAPIVGYRFCKDFKGFIPSILEDLIETRQKVKRKMKATIDPIEKKMLDYRQRALKILANSYYGYQGYPKARWYSKECAESVTAWGRHYIETTIKEAEKFGFKVLYADTDGFFATIPNEKPETIKSKAKKFLKHINEKLPGMLELEYEGFYLRGFFVTKKKYALIDEDGHITTRGLEVVRRDWSEIAKETQAKVLEVILREGSIEKAAGIVKKVVEDLANYRVPVEKLIIHEQITRELKRYKATGPHVAIAKRLQARGIKVKPGTIISYVVLKGSKKISDRVILFDEYDSSRHKYDPDYYIHNQVLPAVLRILEAFGYKEKDLEYQRDKQTGLGAWLKMGKK

SEQ ID NO: 335 - protein, 773 aa, unidentified
  REGION 1..773: note = Description of Unknown: Synthetic polypeptide
MILDTDYITENGKPVIRIFKKEKGEFKIEYDRNFEPYIYALLEDDESIEDIKKITGERHGKKVRIIRVEKVKKKFLGEPIEVWKLVFEHPLDVPAIQDAIRSHPAVREIFEYDIPFAKRYLIDKGLVPMEGGEELKLLAFNIATFYHEGDEFAEGEILMISYADESGAKVITWKKIDLPYVEVVSTEREAIKRFLQVLREKDPDVLLTYNGDNFDFAYIKKRCEKLGLKFTIGRDGSEPKIQRMGDRFAVEVKGRIHLDLAPVVRHTIRLPTYTLEAVYEAVFGKKKEKVYAEEIAEAWKSEEGLKRVAQYSMEDARATYELGREFFPLEVELAKLIGQSVWDVSRSSTGNLVEWYLLRVAYERNELAPNKPGGEEYQRRMRSSYIGGYVKEPEKGLWESIAYLDFRSSAGSIIVTHNVSPDTLEKECKNYDVAPIVGYRFCKDFKGFIPSILEDLIETRQKVKRKMKATIDPIEKKMLDYRQRALKILANSYYGYQGYPKARWYSKECAESVTAWGRHYIETTIKEAEKFGFKVLYADTDGFFATIPNEKPETIKSKAKKFLKHINEKLPGMLELEYEGFYLRGFFVTKKKYALIDEDGHITTRGLEVVRRDWSEIAKETQAKVLEVILREGSIEKAAGIVKKVVEDLANYRVPVEKLIIHEQITRELKRYKATGPHVAIAKRLQARGIKVKPGTIISYVVLKGSKKISDRVILFDEYDSSRHKYDPDYYIHNQVLPAVLRILEAFGYKEKDLEYQRMKQTGLGAWLKMGKK

SEQ ID NO: 336 - protein, 757 aa, unidentified
  REGION 1..757: note = Description of Unknown: Synthetic polypeptide
MILDTDYITENGKPVIRIFKKEKGEFKIEYDRNFEPYIYALLEDDESIEDIKKITGERHGKKVRIIRVEKVKKKFLGEPIEVWKLVFEHPQDVPAIRDAIRSHPAVREIFEYDIPFAKRYLIDKGLVPMEGGEELKLLAFAIATFYHEGDEFAEGEILMISYADESGAKVITWKKIDLPYVEVVSTEREAIKRFLQVLREKDPDVLLTYNGDNFDFAYIKKRCEKLGLKFTIGRDGSEPKIQRMGDRFAVEVKGRIHLDLAPVVRHTIRLPTYTLEAVYEAVFGKKKEKVYAEEIAEAWKSEEGLKRVAQYSMEDARATYELGREFFPMEVELAKLIGQSVWDVSRSSTGNLVEWYLLRVAYERNELAPNKPGGEEYQRRMRSSYIGGYVKEPEKGLWESIAYLDFRSSAGSIIVTHNVSPDTLEKECKNYDVAPIVGYRFCKDFKGFIPSILEDLIETRQKVKRKMKATIDPIEKKMLDYRQRALKILANSYYGYQGYPKARWYSKECAESVTAWGRHYIETTIKEAEKFGFKVLYADTDGFFATIPNEKPETIKSKAKKFLKHINEKLPGMLELEYEGFYLRGFFVTKKKYALIDEDGHITTRGLEVVRRDWSEIAKETQAKVLEVILREGSIEKAAGIVKKVVEDLANYRVPVEKLIIHENITRELKRYKATGPHVAIAKRLQARGIKVKPGTIISYVVLKGSKKISDRVILFDEYDSSRHKYDPDYYIHNQVLPAVLRILEAFGYKEKDLEYQ

SEQ ID NO: 337 - protein, 773 aa, unidentified
  REGION 1..773: note = Description of Unknown: Synthetic polypeptide
MILDTDYITENGKPVIRIFKKEKGEFKIEYDRNFEPYIYALLEDDESIEDIKKITGERHGKKVRIIRVEKVKKKFLGEPIEVWKLVFEHPQDVPAIRDAIRSHPAVREIFEYDIPFAKRYLIDKGLVPMEGGEELKLLAFNIATFYHEGDEFAEGEILMISYADESGAKVITWKKIDLPYVEVVSTEREAIKRFLQVLREKDPDVLLTYNGDNFDFAYIKKRCEKLGLKFTIGRDGSEPKIQRMGDRFAVEVKGRIHLDLAPVVRHTIRLPTYTLEAVYEAVFGKKKEKVYAEEIAEAWKSEEGLKRVAQYSMEDARATYELGREFFPLEVELAKLIGQSVWDVSRSSTGNLVEWYLLRVAYERNELAPNKPGGEEYQRRMRSSYIGGYVKEPEKGLWESIAYLDFRSSAGSIIVTHNVSPDTLEKECKNYDVAPIVGYRFCKDFKGFIPSILEDLIETRQKVKRKMKATIDPIEKKMLDYRQRALKILANSYYGYQGYPKARWYSKECAESVTAWGRHYIETTIKEAEKFGFKVLYADTDGFFATIPNEKPETIKSKAKKFLKHINEKLPGMLELEYEGFYLRGFFVTKKKYALIDEDGHITTRGLEVVRRDWSEIAKETQAKVLEVILREGSIEKAAGIVKKVVEDLANYRVPVEKLIIHEQITRELKRYKATGPHVAIAKRLQARGIKVKPGTIISYVVLKGSKKISDRVILFDEYDSSRHKYDPDYYIHNQVLPAVLRILEAFGYKEKDLEYQRMKQTGLGAWLKMGKK

SEQ ID NO: 338 - protein, 773 aa, unidentified
  REGION 1..773: note = Description of Unknown: Synthetic polypeptide
MILDTDYITENGKPVIRIFKKEKGEFKIEYDRNFEPYIYALLEDDESIEDIKKITGERHGKKVRIIRVEKVKKKFLGEPIEVWKLVFEHPQDYPAIRDAIRSHPAVREIFEYDIPFAKRYLIDKGLVPMEGGEELKLLAFAIATFYHEGDEFAEGEILMISYADESGAKVITWKKIDLPYVEVVSTEREAIKRFLQVLREKDPDVLLTYNGDNFDFAYIKKRCEKLGLKFTIGRDGSEPKIQRMGDRFAVEVKGRIHLDLAPVVRHTIRLPTYTLEAVYEAVFGKKKEKVYAEEIAEAWKSEEGLKRVAQYSMEDARATYELGREFFPMEVELAKLIGQSVWDVSRSSTGNLVEWYLLRVAYERNELAPNKPGGEEYQRRMRSSYIGGYVKEPEKGLWESIAYLDFRSSAGSIIVTHNVSPDTLEKECKNYDVAPIVGYRFCKDFKGFIPSILEDLIETRQKVKRKMKATIDPIEKKMLDYRQRALKILANSYYGYQGYPKARWYSKECAESVTAWGRHYIETTIKEAEKFGFKVLYADTDGFFATIPNEKPETIKSKAKKFLKHINEKLPGMLELEYEGFYLRGFFVTKKKYALIDEDGHITTRGLEVVRRDWSEIAKETQAKVLEVILREGSIEKAAGIVKKVVEDLANYRVPVEKLIIHEQITRELKRYKATGPHVAIAKRLQARGTKVKPGTIISYVVLKGSKKISDRVILFDEYDSSRHKYDPDYYIHNQVLPAVLRILEAFGYKEKDLEYQRMKQTGLGAWLKMGKK

SEQ ID NO: 339 - protein, 773 aa, unidentified
  REGION 1..773: note = Description of Unknown: Synthetic polypeptide
MILDTDYITENGKPVIRIFKKEKGEFKIEYDRNFEPYIYALLEDDESIEDIKKITGERHGKKVRIIRVEKVKKKFLGEPIEVWKLVFEHPQDYPAIRDAIRSHPAVREIFEYDIPFAKRYLIDKGLVPMEGGEELKLLAFAIATFYHEGDEFAEGEILMISYADESGAKVITWKKIDLPYVEVVSTEREAIKRFLQVLREKDPDVLLTYNGDNFDFAYIKKRCEKLGLKFTIGRDGSEPKIQRMGDRFAVEVKGRIHLDLAPVVRHTIRLPTYTLEAVYEAVFGKKKEKVYAEEIAEAWKSEEGLKRVAQYSMEDARATYELGREFFPMEVELAKLIGQSVWDVSRSSTGNLVEWYLLRVAYERNELAPNKPGGEEYQRRMRSSYIGGYVKEPEKGLWESIAYLDFRSSAGSIIVTHNVSPDTLEKECKNYDVAPIVGYRFCKDFKGFIPSILEDLIETRQKVKRKMKATIDPIEKKMLDYRQRALKILANSYYGYQGYPKARWYSKECAESVTAWGRHYIETTIKEAEKFGFKVLYADTDGFFATIPNEKPETIKSKAKKFLKHINEKLPGMLELEYEGFYLRGFFVTKKKYALIDEDGAITTRGLEVVRRDWSEIAKETQAKVLEVILREGSIEKAAGIVKKVVEDLANYRVPVEKLIIHEQITRELKRYKATGPHVAIAKRLQARGIKVKPGTIISYVVLKGSKKISDRVILFDEYDSSRHKYDPDYYIHNQVLPAVLRILEAFGYKEKDLEYQRMKQTGLGAWLKMGKK

SEQ ID NO: 340 - protein, 773 aa, unidentified
  REGION 1..773: note = Description of Unknown: Synthetic polypeptide
MILDTDYITENGKPVIRIFKKEKGEFKIEYDRNFEPYIYALLEDDESIEDIKKITGERHGKKVRIIRVEKVKKKFLGEPIEVWKLVFEHPQDVPAIRDAIRSHPAVREIFEYDIPFAKRYLIDKGLVPMEGGEELKLLAFNIATFYHEGDEFAEGEILMISYADESGAKVITWKKIDLPYVEVVSTEREAIKRFLQVLREKDPDVLLTYNGDNFDFAYIKKRCEKLGLKFTIGRDGSEPKIQRMGDRFAVEVKGRIHLDLAPVVRHTIRLPTYTLEAVYEAVFGKKKEKVYAEEIAEAWKSEEGLKRVAQYSMEDARATYELGREFFPLEVELAKLIGQSVWDVSRSSTGNLVEWYLLRVAYERNELAPNKPGGEEYQRRMRSSYIGGYVKEPEKGLWESIAYLDFRSSAGSIIVTHNVSPDTLEKECKNYDVAPIVGYRFCKDFKGFIPSILEDLIETRQKVKRKMKATIDPIEKKMLDYRQRALKILANSYYGYQGYPKARWYSKECAESVTAWGRHYIETTIKEAEKFGFKVLYADTDGFFATIPNEKPETIKSKAKKFLKHINEKLPGMLELEYEGFYLRGFFVTKKKYALIDEDGHITTRGLEVVRRDWSEIAKETQAKVLEVILREGSIEKAAGIVKKVVEDLANYRVPVEKLIIHEQITRRLKRYKATGLHVAIAKRLQARGIKVKPGTIISYVVLKGSKKISDRVILFDEYDSSRHKYDPDYYIHNQVLPAVLRILEAFGYKEKDLEYQRMKQTGLGAWLKMGKK

SEQ ID NO: 341 - protein, 773 aa, unidentified
  REGION 1..773: note = Description of Unknown: Synthetic polypeptide
MILDTDYITENGKPVIRIFKKEKGEFKIEYDRNFEPYIYALLEDDESIEDIKKITGERHGKKVRIIRVEKVKKKFLGEPIEVWKLVFEHPQDYPAIRDAIRSHPAVREIFEYDIPFAKRYLIDKGLVPMEGGEELKLLAFAIATFYHEGDEFAEGEILMISYADESGAKVITWKKIDLPYVEVVSTEREAIKRFLQVLREKDPDVLLTYNGDNFDFAYIKKRCEKLGLKFTIGRDGSEPKIQRMGDRFAVEVKGRIHLDLAPVVRHTIRLPTYTLEAVYEAVFGKKKEKVYAEEIAEAWKSEEGLKRVAQYSMEDARATYELGREFFPMEVELAKLIGQSVWDVSRSSTGNLVEWYLLRVAYERNELAPNKPGGEEYQRRMRSSYIGGYVKEPEKGLWESIAYLDFRSSAGSIIVTHNVSPDTLEKECKNYDVAPIVGYRFCKDFKGFIPSILEDLIETRQKVKRKMKATIDPIEKKMLDYRQRALKILANSYYGYQGYPKARWYSKECAESVTAWGRHYIETTIKEAEKFGFKVLYADTDGFFATIPNEKPETIKSKAKKFLKHINEKLPGILELEYEGFYLRGFFVTKKKYALIDEDGHITTRGLEVVRRDWSEIAKETQAKVLEVILREGSIEKAAGIVKKVVEDLANYRVPVEKLIIHEQITRELKRYKATGPHVAIAKRLQARGIKVKPGTIISYVVLKGSKKISDRVILFDEYDSSRHKYDPDYYIHNQVLPAVLRILEAFGYKEKDLEYQRMKQTGLGAWLKMGKK

SEQ ID NO: 342 - protein, 773 aa, unidentified
  REGION 1..773: note = Description of Unknown: Synthetic polypeptide
MILDTDYITENGKPVIRIFKKEKGEFKIEYDRNFEPYIYALLEDDESIEDIKKITGERHGKKVRIIRVEKVKKKFLGEPIEVWKLVFEHPQDYPAIRDAIRSHPAVREIFEYDIPFAKRYLIDKGLVPMEGGEELKLLAFAIATFYHEGDEFAEGEILMISYADESGAKVITWKKIDLPYVEVVSTEREAIKRFLQVLREKDPDVLLTYNGDNFDFAYIKKRCEKLGLKFTIGRDGSEPKIQRMGDRFAVEVKGRIHLDLAPVVRHTIRLPTYTLEAVYETVFGKKKEKVYAEEIAEAWKSEEGLKRVAQYSMEDARATYELGREFFPMEVELAKLIGQSVWDVSRSSTGNLVEWYLLRVAYERNELAPNKPGGEEYQRRMRSSYIGGYVKEPEKGLWESIAYLDFRSSAGSIIVTHNVSPDTLEKECKNYDVAPIVGYRFCKDFKGFIPSILEDLIETRQKVKRKMKATIDPIEKKMLDYRQRALKILANSYYGYQGYPKARWYSKECAESVTAWGRHYIETTIKEAEKFGFKVLYADTDGFFATIPNEKPETIKSKAKKFLKHINEKLPGMLELEYEGFYLRGFFVTKKKYALIDEDGHITTRGLEVVRRDWSEIAKETQAKVLEVILREGSIEKAAGIVKKVVEDLANYRVPVEKLIIHEQITRELKRYKATGPHVAIAKRLQARGIKVKPGTIISYVVLKGSKKISDRVILFDEYDSSRHKYDPDYYIHNQVLPAVLRILEAFGYKEKDLEYQRMKQTGLGAWLKMGKK

SEQ ID NO: 343 - protein, 773 aa, unidentified
  REGION 1..773: note = Description of Unknown: Synthetic polypeptide
MILDTDYITENGKPVIRIFKKEKGEFKIEYDRNFEPYIYALLEDDESIEDIKKITGERHGKKVRIIRVEKVKKKFLGEPIEVWKLVFEHPQDYPAIRDAIRSHPAVREIFEYDIPFAKRYLIDKGLVPMEGGEELKLLAFAIATFYHEGDEFAEGEILMISYADESGAKVITWKKIDLPYVEVVSTEREAIKRFLQVLREKDPDVLLTYNGDNFDFAYIKKRCEKLGLKFTIGRDGSEPKIQRMGDRFAVEVKGRIHLDLAPVVRHTIRLPTYDLEAVYEAVFGKKKEKVYAEEIAEAWKSEEGLKRVAQYSMEDARATYELGREFFPMEVELAKLIGQSVWDVSRSSTGNLVEWYLLRVAYERNELAPNKPGGEEYQRRMRSSYIGGYVKEPEKGLWESIAYLDFRSSAGSIIVTHNVSPDTLEKECKNYDVAPIVGYRFCKDFKGFIPSILEDLIETRQKVKRKMKATIDPIEKKMLDYRQRALKILANSYYGYQGYPKARWYSKECAESVTAWGRHYIETTIKEAEKFGFKVLYADTDGFFATIPNEKPETIKSKAKKFLKHINEKLPGMLELEYEGFYLRGFFVTKKKYALIDEDGHITTRGLEVVRRDWSEIAKETQAKVLEVILREGSIEKAAGIVKKVVEDLANYRVPVEKLIIHEQITRELKRYKATGPHVAIAKRLQARGIKVKPGTIISYVVLKGSKKISDRVILFDEYDSSRHKYDPDYYIHNQVLPAVLRILEAFGYKEKDLEYQRMKQTGLGAWLKMGKK

SEQ ID NO: 344 - protein, 773 aa, unidentified
  REGION 1..773: note = Description of Unknown: Synthetic polypeptide
MILDTDYITENGKPVIRIFKKEKGEFKIEYDRNFEPYIYALLEDDESIEDIKKITGERHGKKVRIIRVEKVKKKFLGEPIEVWKLVFEHPQDYPAIRDAIRSHPAVREIFEYDIPFAKRYLIDKGLVPMEGGEELKLLAFAIATFYHEGDEFAEGEILMISYADESGAKVITWKKIDLPYVEVVSTEREAIKRFLQVLREKDPDVLLTYNGDNFDFAYIKKRCEKLGLKFTIGRDGSEPKIQRMGDRFAVEVKGRIHLDLAPVVRHTIRLPTYTLEAVYEAVFGKKKEKVYAEEIAEAWKSEEGLKRVAQYSMEDARATYELGREFFPMEVELAKLIGQSVWDVSRSSTGNLVEWYLLRVAYERNELAPNKPGGEEYQRRMRSSYIGGYVKEPEKGLWESIAYLDFRSSAGSIIVTHNVSPDTLEKECKNYDVAPIVGYRFCKDFKGFIPSILEDLIETRQKVKRKMKATIDPIEKKMLDYRQRALKILANSYYGYQGYPKARWYSKECAESVTAWGRHYIETTIKEAEKFGFKVLYADTDGFFATIPNEKPETIKSKAKKFLKHINEKLPGMLELEYEGFYLRGFFVTKKKYALIDEDGHITTRGLEVVRRDWSEIAKETQAKVLEVILREGSIEKAAGIVKKVVEDLANYRVPVEKLIIHEQITRELKRYKATGPHVAIAKRLQARGIKVKPGTIISYVVLKGSKKISDRVILFDEYDSSRHKYDPDYYIHNQVLRAVLRILEAFGYKEKDLEYQRMKQTGLGAWLKMGKK

SEQ ID NO: 345 - protein, 757 aa, unidentified
  REGION 1..757: note = Description of Unknown: Synthetic polypeptide
MILDTDYITENGKPVIRIFKKEKGEFKIEYDRNFEPYIYALLEDDESIEDIKKITGERHGKKVRIIRVEKVKKKFLGEPIEVWKLVFEHPQDVPAIRDAIRSHPAVREIFEYDIPFAKRYLIDKGLVPMEGGEELKLLAFNIATFYHEGDEFAEGEILMISYADESGAKVITWKKIDLPYVEVVSTEREAIKRFLQVLREKDPDVLLTYNGDNFDFAYIKKRCEKLGLKFTIGRDGSEPKIQRMGDRFAVEVKGRIHLDLAPVVRHTIRLPTYTLEAVYEAVFGKKKEKVYAEEIAEAWKSEEGLKRVAQYSMEDARATYELGREFFPLEVELAKLIGQSVWDVSRSSTGNLVEWYLLRVAYERNELAPNKPGGEEYQRRMRSSYIGGYVKEPEKGLWESIAYLDFRSSAGSIIVTHNVSPDTLEKECKNYDVAPIVGYRFCKDFKGFIPSILEDLIETRQKVKRKMKATIDPIEKKMLDYRQRALKILANSYYGYQGYPKARWYSKECAESVTAWGRHYIETTIKEAEKFGFKVLYADTDGFFATIPNEKPETIKSKAKKFLKHINEKLPGMLELEYEGFYLRGFFVTKKKYALIDEDGHITTRGLEVVRRDWSEIAKETQAKVLEVILREGSIEKAAGIVKKVVEDLANYRVPVEKLIIHEQITRRLKRYKATGPHVAIAKRLQARGIKVKPGTIISYVVLKGSKKISDRVILFDEYDSSRHKYDPDYYIHNQVLPAVLRILEAFGYKEKDLEYQ

SEQ ID NO: 346 - protein, 773 aa, unidentified
  REGION 1..773: note = Description of Unknown: Synthetic polypeptide
MILDTDYITENGKPVIRIFKKEKGEFKIEYDRNFEPYIYALLEDDESIEDIKKITGERHGKKVRIIRVEKVKKKFLGEPIEVWKLVFEHPQDYPAIRDAIRSHPAVREIFEYDIPFAKRYLIDKGLVPMEGGEELKLLAFAIATFYHEGDEFAEGEILMISYADESGAKVITWKKIDLPYVEVVSTEREAIKRFLQVLREKDPDVLLTYNGDNFDFAYIKKRCEKLGLKFTIGRDGSEPKIQRMGDRFAVEVKGRIHLDLAPVVRHTIRLPTYTLEAVYEAVFGKKKEKVYAEEIAEAWKSEEGLKRVAQYSMEDARATYELGREFFPMEVELAKLIGQSVWDVSRSSTGNLVEWYLLRVAYERNELAPNKPGGEEYQRRMRSSYIGGYVKEPEKGLWESIAYLDFRSSAGSIIVTHNVSPDTLEKECKNYDVAPIVGYRFCKDFKGFIPSILEDLIETRQKVKRKTKATIDPIEKKMLDYRQRALKILANSYYGYQGYPKARWYSKECAESVTAWGRHYIETTIKEAEKFGFKVLYADTDGFFATIPNEKPETIKSKAKKFLKHINEKLPGMLELEYEGFYLRGFFVTKKKYALIDEDGHITTRGLEVVRRDWSEIAKETQAKVLEVILREGSIEKAAGIVKKVVEDLANYRVPVEKLIIHEQITRELKRYKATGPHVAIAKRLQARGIKVKPGTIISYVVLKGSKKISDRVILFDEYDSSRHKYDPDYYIHNQVLPAVLRILEAFGYKEKDLEYQRMKQTGLGAWLKMGKK

SEQ ID NO: 347 - protein, 773 aa, unidentified
  REGION 1..773: note = Description of Unknown: Synthetic polypeptide
MILDTDYITENGKPVIRIFKKEKGEFKIEYDRNFEPYIYALLEDDESIEDIKKITGERHGKKVRIIRVEKVKKKFLGEPIEVWKLVFEHPQDVPAIRDAIRSHPAVREIFEYDIPFAKRYLIDKGLVPMEGGEELKLLAFNIATFYHEGDEFAEGEILMISYADESGAKVITWKKIDLPYVEVVSTEREAIKRFLQVLREKDPDVLLTYNGDNFDFAYIKKRCEKLGLKFTIGRDGSEPKIQRMGDRFAVEVKGRIHLDLAPVVRHTIRLPTYTLEAVYEAVFGKKKEKVYAEEIAEAWKSEEGLKRVAQYSMEDARATYELGREFFPLEVELAKLIGQSVWDVSRSSTGNLVEWYLLRVAYERNELAPNQPGGEEYQRRMRSSYIGGYVKEPEKGLWESIAYLDFRSSAGSIIVTHNVSPDTLEKECKNYDVAPIVGYRFCKDFKGFIPSILEDLIETRQKVKRKMKATIDPIEKKMLDYRQRALKILANSYYGYQGYPKARWYSKECAESVTAWGRHYIETTIKEAEKFGFKVLYADTDGFFATIPNEKPETIKSKAKKFLKHINEKLPGMLELEYEGFYLRGFFVTKKKYALIDEDGHITTRGLEVVRRDWSEIAKETQAKVLEVILREGSIEKAAGIVKKVVEDLANYRVPVEKLIIHEQITRELKRYKATGPHVAIAKRLQARGIKVKPGTIISYVVLKGSKKISDRVILFDEYDSSRHKYDPDYYIHNQVLPAVLRILEAFGYKEKDLEYQRMKQTGLGAWLKMGKK

SEQ ID NO: 348 - protein, 757 aa, unidentified
  REGION 1..757: note = Description of Unknown: Synthetic polypeptide
MILDTDYITENGKPVIRIFKKEKGEFKIEYDRNFEPYIYALLEDDESIEDIKKITGERHGKKVRIIRVEKVKKKFLGEPIEVWKLVFEHPQDVPAIRDAIRSHPAVREIFEYDIPFAKRYLIDKGLVPMEGGEELKLLAFAIATFYHEGDEFAEGEILMISYADESGAKVITWKKIDLPYVEVVSTEREAIKRFLQVLREKDPDVLLTYNGDNFDFAYIKKRCEKLGLKFTIGRDGSEPKIQRMGDRFAVEVKGRIHLDLAPVVRHTIRLPTYTLEAVYEAVFGKKKEKVYAEEIAEAWKSEEGLKRVAQYSMEDARATYELGREFFPMEVELAKLIGQSVWDVSRSSTGNLVEWYLLRVAYERNELAPNKPGGEEYQRRMRSSYIGGYVKEPEKGLWESIAYLDFRSSAGSIIVTHNVSPDTLEKECKNYDVAPIVGYRFCKDFKGFIPSILEDLIETRQKVKRKMKATIDPIEKKMLDYRQRALKILANSYYGYQGYPKARWYSKECAESVTAWGRHYIETTIKEAEKFGFKVLYADTDGFFATIPNEKPETIKSKAKKFLKHINEKLPGMLELEYEGFYLRGFFVTKKKYALIDEDGHITTRGLEVVRRDWSEIAKETQAKVLEVILREGSIEKAAGIVKKVVEDLANYRVPVEKLIIHETITRELKRYKATGPHVAIAKRLQARGIKVKPGTIISYVVLKGSKKISDRVILFDEYDSSRHKYDPDYYIHNQVLPAVLRILEAFGYKEKDLEYQ

SEQ ID NO: 349 - protein, 773 aa, unidentified
  REGION 1..773: note = Description of Unknown: Synthetic polypeptide
MILDTDYITENGKPVIRIFKKEKGEFKIEYDRNFEPYIYALLEDDESIEDIKKITGERHGKKVRIIRVEKVKKKFLGEPIEVWKLVFEHPQDYPAIRDAIRSHPAVREIFEYDIPFAKRYLIDKGLVPMEGGEELKLLAFAIATFYHEGDEFAEGEILMISYADESGAKVITWKKIDLPYVEVVSTEREAIKRFLQVLREKDPDVLLTYNGDNFDFAYIKKRCEKLGLKFTIGRDGSEPKIQRMGDRFAVEVKGRIHLDLAPVVRHTIRLPTYTLEAVYEAVFGKKKEKVYAEEIAEAWKSEEGLKRVAQYSVEDARATYELGREFFPMEVELAKLIGQSVWDVSRSSTGNLVEWYLLRVAYERNELAPNKPGGEEYQRRMRSSYIGGYVKEPEKGLWESIAYLDFRSSAGSIIVTHNVSPDTLEKECKNYDVAPIVGYRFCKDFKGFIPSILEDLIETRQKVKRKMKATIDPIEFKMLDYRQRALKILANSYYGYQGYPKARWYSKECAESVTAWGRHYIETTIKEAEKFGFKVLYADTDGFFATIPNEKPETIKSKAKKFLKHINEKLPGMLELEYEGFYLRGFFVTKKKYALIDEDGLITTRGLEVVRRDWSEIAKETQAKVLEVILREGSIEKAAGIVKKVVEDLANYRVPVEKLIIHEQITRELKRYKATGPHVAIAKRLQARGIKVKPGTIISYVVLKGSKKISDRVILFDEYDSSRHKYDPDYYIHNQVLPAVLRILEAFGYKEKDLEYQRMKQTGLGAWLKMGKK

SEQ ID NO: 350 - protein, 773 aa, unidentified
  REGION 1..773: note = Description of Unknown: Synthetic polypeptide
MILDTDYITENGKPVIRIFKKEKGEFKIEYDRNFEPYIYALLEDDESIEDIKKITGERHGKKVRIIRVEKVKKKFLGEPIEVWKLVFEHPQDYPAIRDAIRSHPAVREIFEYDIPFAKRYLIDKGLVPMEGGEELKLLAFAIATFYHEGDEFAEGEILMISYADESGAKVITWKKIDLPYVEVVSTEREAIKRFLQVLREKDPDVLLTYNGDNFDFAYIKKRCEKLGLKFTIGRDGSEPKIQRMGDRFAVEVKGRIHLDLAPVVRHTIRLPTYTLEAVYEAVFGKKKEKVYAEEIAEAWKSEEGLKRVAQYSMEDARATYELGREFFPMEVELAKLIGQSVWDVSRSSTGNLVEWYLLRVAYERNELAPNKPGGEEYQRRMRSSYIGGYVKEPEKGLWESIAYLDFRSSAGSIIVTHNVSPDTLEKECKNYDVAPIVGYRFCKDFKGFIPSILEDLIETRQKVKRKMKATIDPIEKKMLDYRQRALKILANSYYGYRGYPKARWYSKECAESVTAWGRHYIETTIKEAEKFGFKVLYADTDGFFATIPNEKPETIKSKAKKFLKHINEKLPGMLELEYEGFYLRGFFVTKKKYALIDEDGHITTRGLEVVRRDWSEIAKETQAKVLEVILREGSIEKAAGIVKKVVEDLANYRVPVEKLIIHEQITRELKRYKATGPHVAIAKRLQARGIKVKPGTIISYVVLKGSKKISDRVILFDEYDSSRHKYDPDYYIHNQVLPAVLRILEAFGYKEKDLEYQRMKQTGLGAWLKMGKK

SEQ ID NO: 351 - protein, 757 aa, unidentified
  REGION 1..757: note = Description of Unknown: Synthetic polypeptide
MILDTDYITENGKPVIRIFKKEKGEFKIEYDRNFEPYIYALLEDDESIEDIKKITGERHGKKVRIIRVEKVKKKFLGEPIEVWKLVFEHPQDVPAIRDAIRSHPAVREIFEYDIPFAKRYLIDKGLVPMEGGEELKLLAFAIATFYHEGDEFAEGEILMISYADESGAKVITWKKIDLPYVEVVSTEREAIKRFLQVLREKDPDVLLTYNGDNFDFAYIKKRCEKLGLKFTIGRDGSEPKIQRMGDRFAVEVKGRIHLDLAPVVRHTIRLPTYTLEAVYEAVFGKKKEKVYAEEIAEAWKSEEGLKRVAQYSMEDARATYELGREFFPMEVELAKLIGQSVWDVSRSSTGNLVEWYLLRVAYERNELAPNKPGGEEYQRRMRSSYIGGYVKEPEKGLWESIAYLDFRSSAGSIIVTHNVSPDTLEKECKNYDVAPIVGYRFCKDFKGFIPSILEDLIETRQKVKRKMKATIDPIEKKMLDYRQRALKILANSYYGYQGYPKARWYSKECAESVTAWGRHYIETTIKEAEKFGFKVLYADTDGFFATIPNEKPETIKSKAKKFLKHINEKLPGMLELEYEGFYLRGFFVTKKKYALIDEDGHITTRGLEVVRRDWSEIAKETQAKVLEVILREGSIEKAAGIVKKVVEDLANYRVPVEKLIIHEQITRKLKDYKATGPHVAIAKRLQARGNKVKPGTIISYVVLKGSKKISDRVILFDEYDSSRHKYDPDYYIHNQVLPAVLRILEAFGYKEKDLEYQ

SEQ ID NO: 352 - protein, 773 aa, unidentified
  REGION 1..773: note = Description of Unknown: Synthetic polypeptide
MILDTDYITENGKPVIRIFKKEKGEFKIEYDRNFEPYIYALLEDDESIEDIKKITGERHGKKVRIIRVEKVKKKFLGEPIEVWKLVFEHPQDYPAIRDAIRSHPAVREIFEYDIPFAKRYLIDKGLVPMEGGEELKLLAFAIATFYHEGDEFAEGEILMISYADESGAKVITWKKIDLPYVEVVSTEREAIKRFLQVLREKDPDVLLTYNGDNFDFAYIKKRCEKLGLKFTIGRDGSEPKIQRMGDRFAVEVKGRIHLDLAPVVRHTIRLPTYTLEAVYEAVFGKKKEKVYAEEIAEAWKSEEGLKRVAQYSMEDARATYELGREFFPQEVELAKLIGQSVWDVSRSSTGNLVEWYLLRVAYERNELAPNKPGGEEYQRRMRSSYIGGYVKEPEKGLWESIAYLDFRSSAGSIIVTHNVSPDTLEKECKNYDVAPIVGYRFCKDFKGFIPSILEDLIETRQKVKRKMKATIDPIEKKMLDYRQRALKILANSYYGYQGYPKARWYSKECAESVTAWGRHYIETTIKEAEKFGFKVLYADTDGFFATIPNEKPETIKSKAKKFLKHINEKLPGMLELEYEGFYLRGFFVTKKKYALIDEDGHITTRGLEVVRRDWSEIAKETQAKVLEVILREGSIEKAAGIVKKVVEDLANYRVPVEKLIIHEQITRELKRYKATGPHVAIAKRLQARGIKVKPGTIISYVVLKGSKKISDRVILFDEYDSSRHKYDPDYYIHNQVLPAVLRILEAFGYKEKDLEYQRMKQTGLGAWLKMGKK

SEQ ID NO: 353 - protein, 773 aa, unidentified
  REGION 1..773: note = Description of Unknown: Synthetic polypeptide
MILDTDYITENGKPVIRIFKKEKGEFKIEYDRNFEPYIYALLEDDESIEDIKKITGERHGKKVRIIRVEKVKKKFLGEPIEVWKLVFEHPQDYPAIRDAIRSHPAVREIFEYDIPFAKRYLIDKGLVPMEGGEELKLLAFAIATFYHEGDEFAEGEILMISYADESGAKVITWKKIDLPYVEVVSTEREAIKRFLQVLREKDPDVLLTYNGDNFDFAYIKKRCEKLGLKFTIGRDGSEPKIQRMGDRFAVEVKGRIHLDLAPVVRHTIRLPTYTLEAVYEAVFGKKKEKVYAEEIAEAWKSEEGLKRVAQYSMEDARATYELGREFFPMEVELAKLIGQSVWDVSRSSTGNLVEWYLLRVAYERNELAPNKPGGEEYQRRMRSSYIGGYVKEPEKGLWESIAYLDFRSSAGSIIVTHNISPDTLEKECKNYDVAPIVGYRFCKDFKGFIPSILEDLIETRQKVKRKMKATIDPIEKKMLDYRQRALKILANSYYGYLGYPKARWYLKEIAESVTAWGRHYIETTIKEAEKFGFKVLYADTDGFFATIPNEKPETIKSKAKKFLKHINEKLPGMLELEYEGFYLRGFFVTKKKYALIDEDGHITTRGLEVVRRDWSEIAKETQAKVLEVILREGSIEKAAGIVKKVVEDLANYRVPVEKLIIHEQITRELKRYKATGPHVAIAKRLQARGIKVKPGTIISYVVLKGSKKISDRVILFDEYDSSRHKYDPDYYIHNQVLPAVLRILEAFGYKEKDLEYQRMKQTGLGAWLKMGKK

SEQ ID NO: 354 - protein, 757 aa, unidentified
  REGION 1..757: note = Description of Unknown: Synthetic polypeptide
MILDTDYITENGKPVIRIFKKEKGEFKIEYDRNFEPYIYALLEDDESIEDIKKITGERHGKKVRIIRVEKVKKKFLGEPIEVWKLVFEHPQDVPAIRDAIRSHPAVREIFEYDIPFAKRYLIDKGLVPMEGGEELKLLAFAIATFYHEGDEFAEGEILMISYADESGAKVITWKKIDLPYVEVVSTEREAIKRFLQVLREKDPDVLLTYNGDNFDFAYIKKRCEKLGLKFTIGRDGSEPKIQRMGDRFAVEVKGRIHLDLAPVVRHTIRLPTYTLEAVYEAVFGKKKEKVYAEEIAEAWKSEEGLKRVAQYSMEDARATYELGREFFPMEVELAKLIGQSVWDVSRSSTGNLVEWYLLRVAYERNELAPNKPGGEEYQRRMRSSYIGGYVKEPEKGLWESIAYLDFRSSAGSIIVTHNVSPDTLEKECKNYDVAPIVGYRFCKDFKGFIPSILEDLIETRQKVKRKMKATIDPIEKKMLDYRQRALKILANSYYGYQGYPKARWYSKECAESVTAWGRHYIETTIKEAEKFGFKVLYADTDGFFATIPNEKPETIKSKAKKFLKHINEKLPGMLELEYEGFYLRGFFVTKKKYALIDEDGHITTRGLEVVRRDWSEIAKETQAKVLEVILREGSIEKAAGIVKKVVEDLANYRVPVEKLIIHENITRKLKDYKATGPHVAIAKRLQARGIKVKPGTIISYVVLKGSKKISDRVILFDEYDSSRHKYDPDYYIHNQVLPAVLRILEAFGYKEKDLEYQ

SEQ ID NO: 355 - protein, 773 aa, unidentified
  REGION 1..773: note = Description of Unknown: Synthetic polypeptide
MILDTDYITENGKPVIRIFKKEKGEFKIEYDRNFEPYIYALLEDDESIEDIKKITGERHGKKVRIIRVEKVKKKFLGEPIEVWKLVFEHPQDYPAIRDAIRSHPAVREIFEYDIPFAKRYLIDKGLVPMEGGEELKLLAFAIATFYHEGDEFAEGEILMISYADESGAKVITWKKIDLPYVEVVSTEREAIKRFLQVLREKDPDVLLTYNGDNFDFAYIKKRCEKLGLKFTIGRDGSEPKIQRMGDRFAVEVKGRIHLDLAPVVRHTIRLPTYTLEAVYEAVFGKKKEKVYAEEIAEAWKSEEGLKRVAQYSDEDARATYELGREFFPMEVELAKLIGQSVWDVSRSSTGNLVEWYLLRVAYERNELAPNKPGGEEYQRRMRSSYIGGYVKEPEKGLWESIAYLDFRSSAGSIIVTHNVSPDTLEKECKNYDVAPIVGYRFCKDFKGFIPSILEDLIETRQKVKRKMKATIDPIEKKMLDYRQRALKILANSYYGYQGYPKARWYSKECAESVTAWGRHYIETTIKEAEKFGFKVLYADTDGFFATIPNEKPETIKSKAKKFLKHINEKLPGMLELEYEGFYLRGFFVTKKKYALIDEDGHITTRGLEVVRRDWSEIAKETQAKVLEVILREGSIEKAAGIVKKVVEDLANYRVPVEKLIIHEQITRELKRYKATGPHVAIAKRLQARGIKVKPGTIISYVVLKGSKKISDRVILFDEYDSSRHKYDPDYYIHNQVLPAVLRILEAFGYKEKDLEYQRMKQTGLGAWLKMGKK

SEQ ID NO: 356 - protein, 773 aa, unidentified
  REGION 1..773: note = Description of Unknown: Synthetic polypeptide
MILDTDYITENGKPVIRIFKKEKGEFKIEYDRNFEPYIYALLEDDESIEDIKKITGERHGKKVRIIRVEKVKKKFLGEPIEVWKLVFEHPRDFPAIRDAIRSHPAVREIFEYDIPFAKRYLIDKGLVPMEGGEELKLLAFNIATFYHEGDEFAEGEILMISYADESGAKVITWKKIDLPYVEVVSTEREAIKRFLQVLREKDPDVLLTYNGDNFDFAYIKKRCEKLGLKFTIGRDGSEPKIQRMGDRFAVEVKGRIHLDLAPVVRHTIRLPTYTLEAVYEAVFGKKKEKVYAEEIAEAWKSEEGLKRVAQYSMEDARATYELGREFFPLEVELAKLIGQSVWDVSRSSTGNLVEWYLLRVAYERNELAPNKPGGEEYQRRMRSSYIGGYVKEPEKGLWESIAYLDFRSSAGSIIVTHNVSPDTLEKECKNYDVAPIVGYRFCKDFKGFIPSILEDLIETRQKVKRKMKATIDPIEKKMLDYRQRALKILANSYYGYQGYPKARWYSKECAESVTAWGRHYIETTIKEAEKFGFKVLYADTDGFFATIPNEKPETIKSKAKKFLKHINEKLPGMLELEYEGFYLRGFFVTKKKYALIDEDGHITTRGLEVVRRDWSEIAKETQAKVLEVILREGSIEKAAGIVKKVVEDLANYRVPVEKLIIHEQITRELKRYKATGPHVAIAKRLQARGIKVKPGTIISYVVLKGSKKISDRVILFDEYDSSRHKYDPDYYIHNQVLPAVLRILEAFGYKEKDLEYQRMKQTGLGAWLKMGKK

SEQ ID NO: 357 - protein, 757 aa, unidentified
  REGION 1..757: note = Description of Unknown: Synthetic polypeptide
MILDTDYITENGKPVIRIFKKEKGEFKIEYDRNFEPYIYALLEDDESIEDIKKITGERHGKKVRIIRVEKVKKKFLGEPIEVWKLVFEHPQDVPAIRDAIRSHPAVREIFEYDIPFAKRYLIDKGLVPMEGGEELKLLAFAIATFYHEGDEFAEGEILMISYADESGAKVITWKKIDLPYVEVVSTEREAIKRFLQVLREKDPDVLLTYNGDNFDFAYIKKRCEKLGLKFTIGRDGSEPKIQRMGDRFAVEVKGRIHLDLAPVVRHTIRLPTYTLEAVYEAVFGKKKEKVYAEEIAEAWKSEEGLKRVAQYSMEDARATYELGREFFPMEVELAKLIGQSVWDVSRSSTGNLVEWYLLRVAYERNELAPNKPGGEEYQRRMRSSYIGGYVKEPEKGLWESIAYLDFRSSAGSIIVTHNVSPDTLEKECKNYDVAPIVGYRFCKDFKGFIPSILEDLIETRQKVKRKMKATIDPIEKKMLDYRQRALKILANSYYGYQGYPKARWYSKECAESVTAWGRHYIETTIKEAEKFGFKVLYADTDGFFATIPNEKPETIKSKAKKFLKHINEKLPGMLELEYEGFYLRGFFVTKKKYALIDEDGHITTRGLEVVRRDWSEIAKETQAKVLEVILREGSIEKAAGIVKKVVEDLANYRVPVEKLIIHEQITRQLKDYKATGPHVAIAKRLQARGIKVRPGTIISYVVLKGSKKISDRVILFDEYDSSRHKYDPDYYIHNQVLPAVLRILEAFGYKEKDLEYQ

SEQ ID NO: 358 - protein, 773 aa, unidentified
  REGION 1..773: note = Description of Unknown: Synthetic polypeptide
MILDTDYITENGKPVIRIFKKEKGEFKIEYDRNFEPYIYALLEDDESIEDIKKITGERHGKKVRIIRVEKVKKKFLGEPIEVWKLVFEHPQDVPAIRDAIRSHPAVREIFEYDIPFAKRYLIDKGLVPMEGGEELKLLAFNIATFYHEGDEFAEGEILMISYADESGAKVITWKKIDLPYVEVVSTEREAIKRFLQVLREKDPDVLLTYNGDNFDFAYIKKRCEKLGLKFTIGRDGSEPAIQRMGDRFAVEVKGRIHLDLAPVVRHTIRLPTYTLEAVYEAVFGKKKEKVYAEEIAEAWKSEEGLARVAQYSMEDARATYELGREFFPLEVELAKLIGQSVWDVSRSSTGNLVEWYLLRVAYERNELAPNKPGGEEYQRRMRSSYIGGYVKEPEKGLWESIAYLDFRSSAGSIIVTHNVSPDTLEKECKNYDVAPIVGYRFCKDFKGFIPSILEDLIETRQKVKRKMKATIDPIEKKMLDYRQRALKILANSYYGYQGYPKARWYSKECAESVTAWGRHYIETTIKEAEKFGFKVLYADTDGFFATIPNEKPETIKSKAKKFLKHINEKLPGMLELEYEGFYLRGFFVTKKKYALIDEDGLITTRGLEVVRRDWSEIAKETQAKVLEVILREGSIEKAAGIVKKVVEDLANYRVPVEKLIIHEQITRELKRYKATGPHVAIAKRLQARGIKVKPGTIISYVVLKGSKKISDRVILFDEYDSSRHKYDPDYYIHNQVLPAVLRILEAFGYKEKDLEYQRMKQTGLGAWLKMGKK

SEQ ID NO: 359 - protein, 773 aa, unidentified
  REGION 1..773: note = Description of Unknown: Synthetic polypeptide
MILDTDYITENGKPVIRIFKKEKGEFKIEYDRNFEPYIYALLEDDESIEDIKKITGERHGKKVRIIRVEKVKKKFLGEPIEVWKLVFEHPQDYPAIRDAIRSHPAVREIFEYDIPFAKRYLIDKGLVPMEGGEELKLLAFAIATFYHEGDEFAEGEILMISYADESGAKVITWKKIDLPYVEVVSTEREAIKRFLQVLREKDPDVLLTYNGDNFDFAYIKKRCEKLGLKFTIGRDGSEPKIQRMGDRFAVEVKGRIHLDLAPVVRHTIRLETYTLEAVYEAVFGKKKEKVYAEEIAEAWKSEEGLKRVAQYSMEDARATYELGREFFPMEVELAKLIGQSVWDVSRSSTGNLVEWYLLRVAYERNELAPNKPGGEEYQRRMRSSYIGGYVKEPEKGLWESIAYLDFRSSAGSIIVTHNVSPDTLEKECKNYDVAPIVGYRFCKDFKGFIPSILEDLIETRQKVKRKMKATIDPIEKKMLDYRQRALKILANSYYGYQGYPKARWYSKECAESVTAWGRHYIETTIKEAEKFGFKVLYADTDGFFATIPNEKPETIKSKAKKFLKHINEKLPGMLELEYEGFYLRGFFVTKKKYALIDEDGHITTRGLEVVRRDWSEIAKETQAKVLEVILREGSIEKAAGIVKKVVEDLANYRVPVEKLIIHEQITRELKRYKATGPHVAIAKRLQARGIKVKPGTIISYVVLKGSKKISDRVILFDEYDSSRHKYDPDYYIHNQVLPAVLRILEAFGYKEKDLEYQRMKQTGLGAWLKMGKK

SEQ ID NO: 360 - protein, 773 aa, unidentified
  REGION 1..773: note = Description of Unknown: Synthetic polypeptide
MILDTDYITENGKPVIRIFKKEKGEFKIEYDRNFEPYIYALLEDDESIEDIKKITGERHGKKVRIIRVEKVKKKFLGEPIEVWKLVFEHPQDYPAIRDAIRSHPAVREIFEYDIPFAKRYLIDKGLVPMEGGEELKLLAFAIATFYHEGDEFAEGEILMISYADESGAKVITWKKIDLPYVEVVSTEREAIKRFLQVLREKDPDVLLTYNGDNFDFAYIKKRCEKLGLKFTIGRDGSEPKIQRMGDRFAVEVKGRIHLDLAPVVRHTIRLPTYTLEAVYEAVFGKKKEKVRAEEIAEAWKSEEGLKRVAQYSMEDARATYELGREFFPMEVELAKLIGQSVWDVSRSSTGNLVEWYLLRVAYERNELAPNKPGGEEYQRRMRSSYIGGYVKEPEKGLWESIAYLDFRSSAGSIIVTHNVSPDTLEKECKNYDVAPIVGYRFCKDFKGFIPSILEDLIETRQKVKRKMKATIDPIEKKMLDYRQRALKILANSYYGYQGYPKARWYSKECAESVTAWGRHYIETTIKEAEKFGFKVLYADTDGFFATIPNEKPETIKSKAKKFLKHINEKLPGMLELEYEGFYLRGFFVTKKKYALIDEDGHITTRGLEVVRRDWSEIAKETQAKVLEVILREGSIEKAAGIVKKVVEDLANYRVPVEKLIIHEQITRELKRYKATGPHVAIAKRLQARGIKVKPGTIISYVVLKGSKKISDRVILFDEYDSSRHKYDPDYYIHNQVLPAVLRILEAFGYKEKDLEYQRMKQTGLGAWLKMGKK

SEQ ID NO: 361 - protein, 773 aa, unidentified
  REGION 1..773: note = Description of Unknown: Synthetic polypeptide
MILDTDYITENGKPVIRIFKKEKGEFKIEYDRNFEPYIYALLEDDESIEDIKKITGERHGKKVRIIRVEKVKKKFLGEPIEVWKLVFEHPQDYPAIRDAIRSHPAVREIFEYDIPFAKRYLIDKGLVPMEGGEELKLLAFAIATFYHEGDEFAEGEILMISYADESGAKVITWKKIDLPYVEVVSTEREAIKRFLQVLREKDPDVLLTYNGDNFDFAYIKKRCEKLGLKFTIGRDGSEPKIQRMGDRFAVEVKGRIHLDLAPVVRHTIRLPTYTLEAVYEAVFGKKKEKVYAEEIAEAWKSEEGLKRVAQYSMEDARATYELGREFFPMEVELAKLIGQSVWDVSRSSTGNLVEWYLLRVAYERNELAPNKPGGEEYQRRMRSSYIGGYVKEPEKGLWESIAYLDFRSSAGSIIVTHNVSPDTLEKECKNYDVAPIVGYRFCKDFKGFIPSILEDLIETRQKVKRKMKATIDPIEKKMLDYRQRALKILANSYYGYTGYPKARWYSKECAESVTAWGRHYIETTIKEAEKFGFKVLYADTDGFFATIPNEKPETIKSKAKKFLKHINEKLPGMLELEYEGFYLRGFFVTKKKYALIDEDGHITTRGLEVVRRDWSEIAKETQAKVLEVILREGSIEKAAGIVKKVVEDLANYRVPVEKLIIHEQITRELKRYKATGPHVAIAKRLQARGIKVKPGTIISYVVLKGSKKISDRVILFDEYDSSRHKYDPDYYIHNQVLPAVLRILEAFGYKEKDLEYQRMKQTGLGAWLKMGKK

SEQ ID NO: 362 - protein, 773 aa, unidentified
  REGION 1..773: note = Description of Unknown: Synthetic polypeptide
MILDTDYITENGKPVIRIFKKEKGEFKIEYDRNFEPYIYALLEDDESIEDIKKITGERHGKKVRIIRVEKVKKKFLGEPIEVWKLVFEHPQDYPAIRDAIRSHPAVREIFEYDIPFAKRYLIDKGLVPMEGGEELKLLAFAIATFYHEGDEFAEGEILMISYADESGAKVITWKKIDLPYVEVVSTEREAIKRFLQVLREKDPDVLLTYNGDNFDFAYIKKRCEKLGLKFTIGRDGSEPKIQRMGQRFAVEVKGRIHLDLAPVVRHTIRLPTYTLEAVYEAVFGKKKEKVYAEEIAEAWKSEEGLKRVAQYSMEDARATYELGREFFPMEVELAKLIGQSVWDVSRSSTGNLVEWYLLRVAYERNELAPNKPGGEEYQRRMRSSYIGGYVKEPEKGLWESIAYLDFRSSAGSIIVTHNVSPDTLEKECKNYDVAPIVGYRFCKDFKGFIPSILEDLIETRQKVKRKMKATIDPIEKKMLDYRQRALKILANSYYGYQGYPKARWYSKECAESVTAWGRHYIETTIKEAEKFGFKVLYADTDGFFATIPNEKPETIKSKAKKFLKHINEKLPGMLELEYEGFYLRGFFVTKKKYALIDEDGHITTRGLEVVRRDWSEIAKETQAKVLEVILREGSIEKAAGIVKKVVEDLANYRVPVEKLIIHEQITRELKRYKATGPHVAIAKRLQARGIKVKPGTIISYVVLKGSKKISDRVILFDEYDSSRHKYDPDYYIHNQVLPAVLRILEAFGYKEKDLEYQRMKQTGLGAWLKMGKK

SEQ ID NO: 363 - protein, 773 aa, unidentified
  REGION 1..773: note = Description of Unknown: Synthetic polypeptide
KILDTDYITENGKPVIRIFKKEKGEFKIEYDRNFEPYIYALLEDDESIEDIKKITGERHGKKVRIIRVEKVKKKFLGEPIEVWKLVFEHPQDYPAIRDAIRSHPAVREIFEYDIPFAKRYLIDKGLVPFEGGEELKLLAFAIATFYHEGDEFAEGEILMISYADESGAKVITWKKIDLPYVEVVSTEREAIKRFLQVLREKDPDVLLTYNGDNFDFAYIKKRCEKLGLKFTIGRDGSEPKIQRMGDRFAVEVKGRIHLDLAPVVRHTIRLPTYTLEAVYEAVFGKKKEKVYAEEIAEAWKSEEGLKRVAQYSMEDARATYELGREFFPMEVELAKLIGQSVWDVSRSSTGNLVEWYLLRVAYERNELAPNKPGGEEYQRRMRSSYIGGYVKEPEKGLWESIAYLDFRSSAGSIIVTHNVSPDTLEKECKNYDVAPIVGYRFCKDFKGFIPSILEDLIETRQKVKRKMKATIDPIEKKMLDYRQRALKILANSYYGYQGYPKARWYSKECAESVTAWGRHYIETTIKEAEKFGFKVLYADTDGFFATIPNEKPETIKSKAKKFLKHINEKLPGMLELEYEGFYLRGFFVTKKKYALIDEDGHITTRGLEVVRRDWSEIAKETQAKVLEVILREGSIEKAAGIVKKVVEDLANYRVPVEKLIIHEQITRELKRYKATGPHVAIAKRLQARGIKVKPGTIISYVVLKGSKKISDRVILFDEYDSSRHKYDPDYYIHNQVLPAVLRILEAFGYKEKDLEYQRMKQTGLGAWLKMGKK

SEQ ID NO: 364 - protein, 773 aa, unidentified
  REGION 1..773: note = Description of Unknown: Synthetic polypeptide
MILDTDYITENGKPVIRIFKKEKGEFKIEYDRNFEPYIYALLEDDESIEDIKKITGERHGKKVRIIRVEKVKKKFLGEPIEVWKLVFEHPQDYPAIRDAIRSHPAVREIFEYDIPFAKRYLIDKGLVPMEGGEELKLLAFAIATFYHEGDEFAEGEILMISYADESGAKVITWKKIDLPYVEVVSTEREAIKRFLQVLREKDPDVLLTYNGDNFDFAYIKKRCEKLGLKFTIGRDGSEPKIQRMGDRFAVEVKGRIHLDLAPVVRHTIRLFTYTLEAVYEAVFGKKKEKVYAEEIAEAWKSEEGLKRVAQYSMEDARATYELGREFFPMEVELAKLIGQSVWDVSRSSTGNLVEWYLLRVAYERNELAPNKPGGEEYQRRMRSSYIGGYVKEPEKGLWESIAYLDFRSSAGSIIVTHNVSPDTLEKECKNYDVAPIVGYRFCKDFKGFIPSILEDLIETRQKVKRKMKATIDPIEKKMLDYRQRALKILANSYYGYQGYPKARWYSKECAESVTAWGRHYIETTIKEAEKFGFKVLYADTDGFFATIPNEKPETIKSKAKKFLKHINEKLPGMLELEYEGFYLRGFFVTKKKYALIDEDGHITTRGLEVVRRDWSEIAKETQAKVLEVILREGSIEKAAGIVKKVVEDLANYRVPVEKLIIHEQITRELKRYKATGPHVAIAKRLQARGIKVKPGTIISYVVLKGSKKISDRVILFDEYDSSRHKYDPDYYIHNQVLPAVLRILEAFGYKEKDLEYQRMKQTGLGAWLKMGKK

SEQ ID NO: 365 - protein, 773 aa, unidentified
  REGION 1..773: note = Description of Unknown: Synthetic polypeptide
MILDTDYITENGKPVIRIFKKEKGEFKIEYDRNFEPYIYALLEDDESIEDIKKITGERHGKKVRIIRVEKVKKKFLGEPIEVWKLVFEHPQDYPAIRDAIRSHPAVREIFEYDIPFAKRYLIDKGLVPMEGGEELKLLAFAIATFYHEGDEFAEGEILMISYADESGAKVITWKKIDLPYVEVVSTEREAIKRFLQVLREKDPDVLLTYNGDNFDFAYIKKRCEKLGLKFTIGRDGSEPKIQRMGDRFAVEVKGRIHLDLAPVVRHTIRLPTYTLEAVYEAVFGKKKEKVYAEEIAEAWKSEEGLKRVAQYSMEDARATYELGREFFPMEVELAKLIGQSVWDVSRSSTGNLVEWYLLRVAYERNELAPNKPGGEEYQRRMRSSYIGGYVKEPEKGLWESIAYLDFRSSAGSIIVTHNVSPDTLEKECKNYDVAPIVGYRFCKDFKGFIPSILEDLIETRQKVKRKMKATIDPIEKKMLDYRQRALKILANSYYGYQRYPKARWYSKECAESVTAWGRHYIETTIKEAEKFGFKVLYADTDGFFATIPNEKPETIKSKAKKFLKHINEKLPGMLELEYEGFYLRGFFVTKKKYALIDEDGHITTRGLEVVRRDWSEIAKETQAKVLEVILREGSIEKAAGIVKKVVEDLANYRVPVEKLIIHEQITRELKRYKATGPHVAIAKRLQARGIKVKPGTIISYVVLKGSKKISDRVILFDEYDSSRHKYDPDYYIHNQVLPAVLRILEAFGYKEKDLEYQRMKQTGLGAWLKMGKK

SEQ ID NO: 366 - protein, 773 aa, unidentified
  REGION 1..773: note = Description of Unknown: Synthetic polypeptide
MILDTDYITENGKPVIRIFKKEKGEFKIEYDRNFEPYIYALLEDDESIEDIKKITGERHGKKVRIIRVEKVKKKFLGEPIEVWKLVFEHPQDYPAIRDAIRSHPAVREIFEYDIPFAKRYLIDKGLVPMEGGEELKLLAFAIATFYHEGDEFAEGEILMISYADESGAKVITWKKIDLPYVEVVSTEREAIKRFLQVLREKDPDVLLTYNGDNFDFAYIKKRCEKLGLKFTIGRDGSEPKIQRMGDRFAVEVKGRIHLDLAPVVRHTIRRPTYTLEAVYEAVFGKKKEKVYAEEIAEAWKSEEGLKRVAQYSMEDARATYELGREFFPMEVELAKLIGQSVWDVSRSSTGNLVEWYLLRVAYERNELAPNKPGGEEYQRRMRSSYIGGYVKEPEKGLWESIAYLDFRSSAGSIIVTHNVSPDTLEKECKNYDVAPIVGYRFCKDFKGFIPSILEDLIETRQKVKRKMKATIDPIEKKMLDYRQRALKILANSYYGYQGYPKARWYSKECAESVTAWGRHYIETTIKEAEKFGFKVLYADTDGFFATIPNEKPETIKSKAKKFLKHINEKLPGMLELEYEGFYLRGFFVTKKKYALIDEDGHITTRGLEVVRRDWSEIAKETQAKVLEVILREGSIEKAAGIVKKVVEDLANYRVPVEKLIIHEQITRELKRYKATGPHVAIAKRLQARGIKVKPGTIISYVVLKGSKKISDRVILFDEYDSSRHKYDPDYYIHNQVLPAVLRILEAFGYKEKDLEYQRMKQTGLGAWLKMGKK

SEQ ID NO: 367 - protein, 773 aa, unidentified
  REGION 1..773: note = Description of Unknown: Synthetic polypeptide
MILDTDYITENGKPVIRIFKKEKGEFKIEYDRNFEPYIYALLEDDESIEDIKKITGERHGKKVRIIRVEKVKKKFLGEPIEVWKLVFEHPQDVPAIRDAIRSHPAVREIFEYDIPFAKRYLIDKGLVPMEGGEELKLLAFNIATFYHEGDEFAEGEILMISYADESGAKVITWKKIDLPYVEVVSTEREAIKRFLQVLREKDPDVLLTYNGDNFDFAYIKKRCEKLGLKFTIGRDGSEPKIQRMGDRFAVEVKGRIHLDLAPVVRHTIRLPTYTLEAVYEAVFGKKKEKVYAEEIAEAWKSEEGLKRVAQYSMEDARATYELGREFFPREVELAKLIGQSVWDVSRSSTGNLVEWYLLRVAYERNELAPNKPGGEEYQRRMRSSYIGGYVKEPEKGLWESIAYLDFRSSAGSIIVTHNVSPDTLEKECKNYDVAPIVGYRFCKDFKGFIPSILEDLIETRQKVKRKMKATIDPIEKKMLDYRQRALKILANSYYGYQGYPKARWYSKECAESVTAWGRHYIETTIKEAEKFGFKVLYADTDGFFATIPNEKPETIKSKAKKFLKHINEKLPGMLELEYEGFYLRGFFVTKKKYALIDEDGHITTRGLEVVRRDWSEIAKETQAKVLEVILREGSIEKAAGIVKKVVEDLANYRVPVEKLIIHEQITRELKRYKATGPHVAIAKRLQARGIKVKPGTIISYVVLKGSKKISDRVILFDEYDSSRHKYDPDYYIHNQVLPAVLRILEAFGYKEKDLEYQRMKQTGLGAWLKMGKK

SEQ ID NO: 368 - protein, 773 aa, unidentified
  REGION 1..773: note = Description of Unknown: Synthetic polypeptide
MILDTDYITENGKPVIRIFKKEKGEFKIEYDRNFEPYIYALLEDDESIEDIKKITGERHGKKVRIIRVEKVKKKFLGEPIEVWKLVFEHPQDYPAIRDAIRSHPAVREIFEYDIPFAKRYLIDKGLVPMEGGEELKLLAFAIATFYHEGDEFAEGEILMISYADESGAKVITWKKIDLPYVEVVSTEREAIKRFLQVLREKDPDVLLTYNGDNFDFAYIKKRCEKLGLKFTIGRDGSEPKIQRMGDRFAVEVKGRIHLDLAPVVRHTIRLPTYTLEAVYEAVFGKKKEQVYAEEIAEAWKSEEGLKRVAQYSMEDARATYELGREFFPMEVELAKLIGQSVWDVSRSSTGNLVEWYLLRVAYERNELAPNKPGGEEYQRRMRSSYIGGYVKEPEKGLWESIAYLDFRSSAGSIIVTHNVSPDTLEKECKNYDVAPIVGYRFCKDFKGFIPSILEDLIETRQKVKRKMKATIDPIEKKMLDYRQRALKILANSYYGYQGYPKARWYSKENAEHVTAWGRHYIETTIKEAEKFGFKVLYADTDGFFATIPNEKPETIKSKAKKFLKHINEKLPGMLELEYEGFYLRGFFVTKKKYALIDEDGHITTRGLEVVRRDWSEIAKETQAKVLEVILREGSIEKAAGIVKKVVEDLANYRVPVEKLIIHEQITRELKRYKATGPHVAIAKRLQARGIKVKPGTIISYVVLKGSKKISDRVILFDEYDSSRHKYDPDYYIHNQVLPAVLRILEAFGYKEKDLEYQRMKQTGLGAWLKMGKK

SEQ ID NO: 369 - protein, 757 aa, unidentified
  REGION 1..757: note = Description of Unknown: Synthetic polypeptide
MILDTDYITENGKPVIRIFKKEKGEFKIEYDRNFEPYIYALLEDDESIEDIKKITGERHGKKVRIIRVEKVKKKFLGEPIEVWKLVFEHPQDVPAIRDAIRSHPAVREIFEYDIPFAKRYLIDKGLVPMEGGEELKLLAFAIATFYHEGDEFAEGEILMISYADESGAKVITWKKIDLPYVEVVSTEREAIKRFLQVLREKDPDVLLTYNGDNFDFAYIKKRCEKLGLKFTIGRDGSEPKIQRMGDRFAVEVKGRIHLDLAPVVRHTIRLPTYTLEAVYEAVFGKKKEKVYAEEIAEAWKSEEGLKRVAQYSMEDARATYELGREFFPMEVELAKLIGQSVWDVSRSSTGNLVEWYLLRVAYERNELAPNKPGGEEYQRRMRSSYIGGYVKEPEKGLWESIAYLDFRSSAGSIIVTHNVSPDTLEKECKNYDVAPIVGYRFCKDFKGFIPSILEDLIETRQKVKRKMKATIDPIEKKMLDYRQRALKILANSYYGYQGYPKARWYSKECAESVTAWGRHYIETTIKEAEKFGFKVLYADTDGFFATIPNEKPETIKSKAKKFLKHINEKLPGMLELEYEGFYLRGFFVTKKKYALIDEDGHITTRGLEVVRRDWSEIAKETQAKVLEVILREGSIEKAAGIVKKVVEDLANYRVPVEKLIIHEQITRKLKDYKATGPHVAIAKRLQARGQKVKPGTIISYVVLKGSKKISDRVILFDEYDSSRHKYDPDYYIHNQVLPAVLRILEAFGYKEKDLEYQ

SEQ ID NO: 370 - protein, 773 aa, unidentified
  REGION 1..773: note = Description of Unknown: Synthetic polypeptide
MILDTDYITENGKPVIRIFKKEKGEFKIEYDRNFEPYIYALLEDDESIEDIKKITGERHGKKVRIIRVEKVKKKFLGEPIEVWKLVFEHPQDYPAIRDAIRSHPAVREIFEYDIPFAKRYLIDKGLVPMEGGEELKLLAFAIATFYHEGDEFAEGEILMISYADESGAKVITWKKIDLPYVEVVSTEREAIKRFLQVLREKDPDVLLTYNGDNFDFAYIKKRCEKLGLKFTIGRDGSEPKIQRMGDRFAVEVKGRIHLDLAPVVRHTIRLPTYTLEAVYEAVFGKKKEKVYAEEIAEAWKSEEGLKRVAQYSVEDARATYELGREFFPMEVELAKLIGQSVWDVSRSSTGNLVEWYLLRVAYERNELAPNKPGGEEYQRRMRSSYIGGYVKEPEKGLWESIAYLDFRSSAGSIIVTHNVSPDTLEKECKNYDVAPIVGYRFCKDFKGFIPSILEDLIETRQKVKRKMKATIDPIEKKMLDYRQRALKILANSYYGYQGYPKARWYSKECAESVTAWGRHYIETTIKEAEKFGFKVLYADTDGFFATIPNEKPETIKSKAKKFLKHINEKLPGMLELEYEGFYLRGFFVTKKKYALIDEDGLITTRGLEVVRRDWSEIAKETQAKVLEVILREGSIEKAAGIVKKVVEDLANYRVPVEKLIIHEQITRELKRYKATGPHVAIAKRLQARGIKVKPGTIISYVVLKGSKKISDRVILFDEYDSSRHKYDPDYYIHNQVLPAVLRILEAFGYKEKDLEYQRMKQTGLGAWLKMGKK

SEQ ID NO: 371 - protein, 773 aa, unidentified
  REGION 1..773: note = Description of Unknown: Synthetic polypeptide
MILDTDYITENGKPVIRIFKKEKGEFKIEYDRNFEPYIYALLEDDESIEDIKKITGERHGKKVRIIRVEKVKKKFLGEPIEVWKLVFEHPQDYPAIRDAIRSHPAVREIFEYDIPFAKRYLIDKGLVPMEGGEELKLLAFAIATFYHEGDEFAEGEILMISYADESGAKVITWKKIDLPYVEVVSTEREAIKRFLQVLREKDPDVLLTYNGDNFDFAYIKKRCEKLGLKFTIGRDGSEPKIQRMGDRFAVEVKGRIHLDLAPVVRHTIRLPTYTLEAVYEAVFGKKKEKVYAEEIAEAWKSEEGLKRVAQYSMEDARATYELGREFFPMEVELAKLIGQSVWDVSRSSTGNLVEWYLLRVADERNELAPNKPGGEEYQRRMRSSYIGGYVKEPEKGLWESIAYLDFRSSAGSIIVTHNVSPDTLEKECKNYDVAPIVGYRFCKDFKGFIPSILEDLIETRQKVKRKMKATIDPIEKKMLDYRQRALKILANSYYGYQGYPKARWYSKECAESVTAWGRHYIETTIKEAEKFGFKVLYADTDGFFATIPNEKPETIKSKAKKFLKHINEKLPGMLELEYEGFYLRGFFVTKKKYALIDEDGHITTRGLEVVRRDWSEIAKETQAKVLEVILREGSIEKAAGIVKKVVEDLANYRVPVEKLIIHEQITRELKRYKATGPHVAIAKRLQARGIKVKPGTIISYVVLKGSKKISDRVILFDEYDSSRHKYDPDYYIHNQVLPAVLRILEAFGYKEKDLEYQRMKQTGLGAWLKMGKK

SEQ ID NO: 372 - protein, 757 aa, unidentified
  REGION 1..757: note = Description of Unknown: Synthetic polypeptide
MILDTDYITENGKPVIRIFKKEKGEFKIEYDRNFEPYIYALLEDDESIEDIKKITGERHGKKVRIIRVEKVKKKFLGEPIEVWKLVFEHPQDVPAIRDAIRSHPAVREIFEYDIPFAKRYLIDKGLVPMEGGEELKLLAFNIATFYHEGDEFAEGEILMISYADESGAKVITWKKIDLPYVEVVSTEREAIKRFLQVLREKDPDVLLTYNGDNFDFAYIKKRCEKLGLKFTIGRDGSEPKIQRMGDRFAVEVKGRIHLDLAPVVRHTIRLPTYTLEAVYEAVFGKKKEKVYAEEIAEAWKSEEGLKRVAQYSMEDARATYELGREFFPLEVELAKLIGQSVWDVSRSSTGNLVEWYLLRVAYERNELAPNKPGGEEYQRRMRSSYIGGYVKEPEKGLWESIAYLDFRSSAGSIIVTHNVSPDTLEKECKNYDVAPIVGYRFCKDFKGFIPSILEDLIETRQKVKRKMKATIDPIEKKMLDYRQRALKILANSYYGYQGYPKARWYSKECAESVTAWGRHYIETTIKEAEKFGFKVLYADTDGFFATIPNEKPETIKSKAKKFLKHINEKLPGMLELEYEGFYLRGFFVTKKKYALIDEDGHITTRGLEVVRRNWSEIAKETQAKVLEVILREGSIEKAAGIVKKVVEDLANYRVPVEKLIIHEFITRELKRYKATGPHVAIAKRLQARGIKVKPGTIISYVVLKGSKKISDRVILFDEYDSSRHKYDPDYYIHNQVLPAVLRILEAFGYKEKDLEYQ

SEQ ID NO: 373 - protein, 773 aa, unidentified
  REGION 1..773: note = Description of Unknown: Synthetic polypeptide
MILDTDYITENGKPVIRIFKKEKGEFKIEYDRNFEPYIYALLEDDESIEDIKKITGERHGKKVRIIRVEKVKKKFLGEPIEVWKLVFEHPQDYPAIRDAIRSHPAVREIFEYDIPFAKRYLIDKGLVPMEGGEELKLLAFAIATFYHEGDEFAEGEILMISYADESGAKVITWKKIDLPYVEVVSTEREAIKRFLQVLREKDPDVLLTYNGDNFDFAYIKKRCEKLGLKFTIGRDGSEPKIQRMGDRFAVEVKGRIHLDLAPVVRHTIRLPTYTLEAVYEAVFGKKKEKVYAEEIAEAWKSEEGLKRVAQYSMEDARATYELGREFFPMEVELAKLIGQSVWDVSRSSTGNLVEWYLLRVAYERNELAPNKPGGEEYQRRMRSSYIGGYVKEPEKGLWESIAYLDFRSSAGSIIVTHNVSPDTLEKECKNYDVAPIVGYRFCKDFKGFIPSILEDLIETRQKVKRKMKATIDPIEKKMLDYRQRALKILANSYYGYQGYPKARWYSTECAESVTAWGRHYIETTIKEAEKFGFKVLYADTDGFFATIPNEKPETIKSKAKKFLKHINEKLPGMLELEYEGFYLRGFFVTKKKYALIDEDGHITTRGLEVVRRDWSEIAKETQAKVLEVILREGSIEKAAGIVKKVVEDLANYRVPVEKLIIHEQITRELKRYKATGPHVAIAKRLQARGIKVKPGTIISYVVLKGSKKISDRVILFDEYDSSRHKYDPDYYIHNQVLPAVLRILEAFGYKEKDLEYQRMKQTGLGAWLKMGKK

SEQ ID NO: 374 - protein, 773 aa, unidentified
  REGION 1..773: note = Description of Unknown: Synthetic polypeptide
MILDTDYITENGKPVIRIFKKEKGEFKIEYDRNFEPYIYALLEDDESIEDIKKITGERHGKKVRIIRVEKVKKKFLGEPIEVWKLVFEHPQDVPAIRDAIRSHPAVREIFEYDIPFAKRYLIDKGLVPMEGGEELKLLAFNIATFYHEGDEFAEGEILMISYADESGAKVITWKKIDLPYVEVVSTEREAIKRFLQVLREKDPDVLLTYNGDNFDFAYIKKRCEKLGLKFTIGRDGSEPKIQRMGDRFAVEVKGRIHLDLAPVVRHTIRLPTYTLEAVYEAVFGKKKEKVYAEEIAEAWKSEEGLARVAQYSMEDARATYELGREFFPLEVELAKLIGQSVWDVSRSSTGNLVEWYLLRVAYERNELAPNQPGGEEYQRRMRSSYIGGYVKEPEKGLWESIAYLDFRSSAGSIIVTHNVSPDTLEKECKNYDVAPIVGYRFCKDFKGFIPSILEDLIETRQKVKRKMKATIDPIEKKMLDYRQRALKILANSYYGYQGYPKARWYSKECAESVTAWGRHYIETTIKEAEKFGFKVLYADTDGFFATIPNEKPETIKSKAKKFLKHINEKLPGMLELEYEGFYLRGFFVTKKKYALIDEDGHITTRGLEVVRRDWSEIAKETQAKVLEVILREGSIEKAAGIVKKVVEDLANYRVPVEKLIIHEQITRELKRYKATGPHVAIAKRLQARGIKVKPGTIISYVVLKGSKKISDRVILFDEYDSSRHKYDPDYYIHNQVLPAVLRILEAFGYKEKDLEYQRMKQTGLGAWLKMGKK

SEQ ID NO: 375 - protein, 773 aa, unidentified
  REGION 1..773: note = Description of Unknown: Synthetic polypeptide
MILDTDYITENGKPVIRIFKKEKGEFKIEYDRNFEPYIYALLEDDESIEDIKKITGERHGKKVRIIRVEKVKKKFLGEPIEVWKLVFEHPQDVPAIRDAIRSHPAVREIFEYDIPFAKRYLIDKGLVPMEGGEELKLLAFAIATFYHEGDEFAEGEILMISYADESGAKVITWKKIDLPYVEVVSTEREAIKRFLQVLREKDPDVLLTYNGDNFDFAYIKKRCEKLGLKFTIGRDGSEPKIQRMGDRFAVEVKGRIHLDLAPVVRHTIRLPTYTLEAVYEAVFGKKKEKVYAEEIAEAWKSEEGLKRVAQYSMEDARATYELGREFFPMEVELAKLIGQSVWDVSRSSTGNLVEWYLLRVAYERNELAPNKPGGEEYQRRMRSSYIGGYVKEPEKGLWESIAYLDFRSSAGSIIVTHNVSPDTLEKECKNYDVAPIVGYRFCKDFKGFIPSILEDLIETRQKVKRKMKATIDPIEKKMLDYRQRALKILANSYYGYQGYPKARWYSKENAEWVTAWGRHYIETTIKEAEKFGFKVLYADTDGFFATIPNEKPETIKSKAKKFLKHINEKLPGMLELEYEGFYLRGFFVTKKKYALIDEDGHITTRGLEVVRRDWSEIAKETQAKVLEVILREGSIEKAAGIVKKVVEDLANYRVPVEKLIIHEQITRELKDYKATGPHVAIAKRLQARGIKVKPGTIISYVVLKGSKKISDRVILFDEYDSSRHKYDPDYYIHNQVLPAVLRILEAFGYKEKDLEYQRMKQTGLGAWLKMGKK

SEQ ID NO: 376 - protein, 773 aa, unidentified
  REGION 1..773: note = Description of Unknown: Synthetic polypeptide
MILDTDYITENGKPVIRIFKKEKGEFKIEYDRNFEPYIYALLEDDESIEDIKKITGERHGKKVRIIRVEKVKKKFLGEPIEVWKLVFEHPQDYPAIRDAIRSHPAVREIFEYDIPFAKRYLIDKGLVPMEGGEELKLLAFAIATFYHEGDEFAEGEILMISYADESGAKVITWKKIDLPYVEVVSTEREAIKRFLQVLREKDPDVLLTYNGDNFDFAYIKKRCEKLGLKFTIGRDGSEPKIQRMGDRFAVEVKGRIHLDLAPVVRHTIRLPTYTLEAVYEAVFGKKKEQVYAEEIAEAWKSEEGLKRVAQYSMEDARATYELGREFFPMEVELAKLIGQSVWDVSRSSTGNLVEWYLLRVAYERNELAPNKPGGEEYQRRMRSSYIGGYVKEPEKGLWESIAYLDFRSSAGSIIVTHNVSPDTLEKECKNYDVAPIVGYRFCKDFKGFIPSILEDLIETRQKVKRKMKATIDPIEKKMLDYRQRALKILANSYYGYQGYPKARWYSKEDAEHVTAWGRHYIETTIKEAEKFGFKVLYADTDGFFATIPNEKPETIKSKAKKFLKHINEKLPGMLELEYEGFYLRGFFVTKKKYALIDEDGHITTRGLEVVRRDWSEIAKETQAKVLEVILREGSIEKAAGIVKKVVEDLANYRVPVEKLIIHEQITRELKRYKATGPHVAIAKRLQARGIKVKPGTIISYVVLKGSKKISDRVILFDEYDSSRHKYDPDYYIHNQVLPAVLRILEAFGYKEKDLEYQRMKQTGLGAWLKMGKK

SEQ ID NO: 377 - protein, 757 aa, unidentified
  REGION 1..757: note = Description of Unknown: Synthetic polypeptide
MILDTDYITENGKPVIRIFKKEKGEFKIEYDRNFEPYIYALLEDDESIEDIKKITGERHGKKVRIIRVEKVKKKFLGEPIEVWKLVFEHPQDVPAIRDAIRSHPAVREIFEYDIPFAKRYLIDKGLVPMEGGEELKLLAFAIATFYHEGDEFAEGEILMISYADESGAKVITWKKIDLPYVEVVSTEREAIKRFLQVLREKDPDVLLTYNGDNFDFAYIKKRCEKLGLKFTIGRDGSEPKIQRMGDRFAVEVKGRIHLDLAPVVRHTIRLPTYTLEAVYEAVFGKKKEKVYAEEIAEAWKSEEGLKRVAQYSMEDARATYELGREFFPMEVELAKLIGQSVWDVSRSSTGNLVEWYLLRVAYERNELAPNKPGGEEYQRRMRSSYIGGYVKEPEKGLWESIAYLDFRSSAGSIIVTHNVSPDTLEKECKNYDVAPIVGYRFCKDFKGFIPSILEDLIETRQKVKRKMKATIDPIEKKMLDYRQRALKILANSYYGYMGYPKARWYSKECAESVTAWGRHYIETTIKEAEKFGFKVLYADTDGFFATIPNEKPETIKSKAKKFLKHINEKLPGMLELEYEGFYLRGFFVTKKKYALIDEDGHITTRGLEVVRRDWSEIAKETQAKVLEVILREGSIEKAAGIVKKVVEDLANYRVPVEKLIIHEQITRKLKRYKATGPHVAIAKRLQARGIKVKPGTIISYVVLKGSKKISDRVILFDEYDSSRHKYDPDYYIHNQVLPAVLRILEAFGYKEKDLEYQ

SEQ ID NO: 378 - protein, 773 aa, unidentified
  REGION 1..773: note = Description of Unknown: Synthetic polypeptide
MILDTDYITENGKPVIRIFKKEKGEFKIEYDRNFEPYIYALLEDDESIEDIKKITGERHGKKVRIIRVEKVKKKFLGEPIEVWKLVFEHPQDKPAIRDAIRSHPAVREIFEYDIPFAKRYLIDKGLVPMEGGEELKLLAFNIATFYHEGDEFAEGEILMISYADESGAKVITWKKIDLPYVEVVSTEREAIKRFLQVLREKDPDVLLTYNGDNFDFAYIKKRCEKLGLKFTIGRDGSEPKIQRMGDRFAVEVKGRIHLDLAPVVRHTIRLPTYTLEAVYEAVFGKKKEKVYAEEIAEAWKSEEGLKRVAQYSMEDARATYELGREFFPLEVELAKLIGQSVWDVSRSSTGNLVEWYLLRVAYERNELAPNKPGGEEYQRRMRSSYIGGYVKEPEKGLWESIAYLDFRSSAGSIIVTHNVSPDTLEKECKNYDVAPIVGYRFCKDFKGFIPSILEDLIETRQKVKRKMKATIDPIEKKMLDYRQRALKILANSYYGYQGYPKARWYSKECAESVTAWGRHYIETTIKEAEKFGFKVLYADTDGFFATIPNEKPETIKSKAKKFLKHINEKLPGMLELEYEGFYLRGFFVTKKKYALIDEDGHITTRGLEVVRRDWSEIAKETQAKVLEVILREGSIEKAAGIVKKVVEDLANYRVPVEKLIIHEQITRELKRYKATGPHVAIAKRLQARGIKVKPGTIISYVVLKGSKKISDRVILFDEYDSSRHKYDPDYYIHNQVLPAVLRILEAFGYKEKDLEYQRMKQTGLGAWLKMGKK

SEQ ID NO: 379 - protein, 773 aa, unidentified
  REGION 1..773: note = Description of Unknown: Synthetic polypeptide
MILDTDYITENGKPVIRIFKKEKGEFKIEYDRNFEPYIYALLEDDESIEDIKKITGERHGKKVRIIRVEKVKKKFLGEPIEVWKLVFEHPQDVPAIRDAIRSHPAVREIFEYDIPFAKRYLIDKGLVPMEGGEELKLLAFAIATFYHEGDEFAEGEILMISYADESGAKVITWKKIDLPYVEVVSTEREAIKRFLQVLREKDPDVLLTYNGDNFDFAYIKKRCEKLGLKFTIGRDGSEPKIQRMGDRFAVEVKGRIHLDLAPVVRHTIRLPTYTLEAVYEAVFGKKKEKVYAEEIAEAWKSEEGLKRVAQYSMEDARATYELGREFFPMEVELAKLIGQSVWDVSRSSTGNLVEWYLLRVAYERNELAPNKPGGEEYQRRMRSSYIGGYVKEPEKGLWESIAYLDFRSSAGSIIVTHNVSPDTLEKECKNYDVAPIVGYRFCKDFKGFIPSILEDLIETRQKVKRKMKATIDPIEKKMLDYRQRALKILANSYYGYMGYPKARWYSKETAESVTAWGRHYIETTIKEAEKFGFKVLYADTDGFFATIPNEKPETIKSKAKKFLKHINEKLPGMLELEYEGFYLRGFFVTKKKYALIDEDGHITTRGLEVVRRDWSEIAKETQAKVLEVILREGSIEKAAGIVKKVVEDLANYRVPVEKLIIHEQITRELKRYKATGPHVAIAKRLQARGIKVKPGTIISYVVLKGSKKISDRVILFDEYDSSRHKYDPDYYIHNQVLPAVLRILEAFGYKEKDLEYQRMKQTGLGAWLKMGKK

SEQ ID NO: 380 - protein, 773 aa, unidentified
  REGION 1..773: note = Description of Unknown: Synthetic polypeptide
MILDTDYITENGKPVIRIFKKEKGEFKIEYDRNFEPYIYALLEDDESIEDIKKITGERHGKKVRIIRVEKVKKKFLGEPIEVWKLVFEHPQDVPAIRDAIRSHPAVREIFEYDIPFAKRYLIDKGLVPMEGGEELKLLAFNIATFYHEGDEFAEGEILMISYADESGAKVITWKKIDLPYVEVVSTEREAIKRFLQVLREKDPDVLLTYNGDNFDFAYIKKRCEKLGLKFTIGRDGSEPKIQRMGDRFAVEVKGRIHLDLAPVVRHTIRLPTYTLEAVYEAVFGKKKEKVYAEEIAEAWKSEEGLARVAQYSMEDARATYELGREFFPLEVELAKLIGQSVWDVSRSSTGNLVEWYLLRVAYERNELAPNKPGGEEYQRRMRSSYIGGYVKEPEKGLWESIAYLDFRSSAGSIIVTHNVSPDTLEKECKNYDVAPIVGYRFCKDFKGFIPSILEDLIETRQKVKRKMKATIDPIEKKMLDYRQRALKILANSYYGYQGYPKARWYSKECAESVTAWGRHYIETTIKEAEKFGFKVLYADTDGFFATIPNEKPETIKSKAKKFLKHINEKLPGMLELEYEGFYLRGFFVTKKKYALIDEDGIITTRGLEVVRRDWSEIAKETQAKVLEVILREGSIEKAAGIVKKVVEDLANYRVPVEKLIIHEQITRELKRYKATGPHVAIAKRLQARGIKVKPGTIISYVVLKGSKKISDRVILFDEYDSSRHKYDPDYYIHNQVLPAVLRILEAFGYKEKDLEYQRMKQTGLGAWLKMGKK

SEQ ID NO: 381 - protein, 773 aa, unidentified
  REGION 1..773: note = Description of Unknown: Synthetic polypeptide
MILDTDYITENGKPVIRIFKKEKGEFKIEYDRNFEPYIYALLEDDESIEDIKKITGERHGKKVRIIRVEKVKKKFLGEPIEVWKLVFEHPQDVPAIRDAIRSHPAVREIFEYDIPFAKRYLIDKGLVPMEGGEELKLLAFAIATFYHEGDEFAEGEILMISYADESGAKVITWKKIDLPYVEVVSTEREAIKRFLQVLREKDPDVLLTYNGDNFDFAYIKKRCEKLGLKFTIGRDGSEPKIQRMGDRFAVEVKGRIHLDLAPVVRHTIRLPTYTLEAVYEAVFGKKKEKVYAEEIAEAWKSEEGLKRVAQYSMEDARATYELGREFFPMEVELAKLIGQSVWDVSRSSTGNLVEWYLLRVAYERNELAPNKPGGEEYQRRMRSSYIGGYVKEPEKGLWESIAYLDFRSSAGSIIVTHNVSPDTLEKECKNYDVAPIVGYRFCKDFKGFIPSILEDLIETRQKVKRKMKATIDPIEKKMLDYRQRALKILANSYYGYMGYPKARWYSKEQAESVTAWGRHYIETTIKEAEKFGFKVLYADTDGFFATIPNEKPETIKSKAKKFLKHINEKLPGMLELEYEGFYLRGFFVTKKKYALIDEDGHITTRGLEVVRRDWSEIAKETQAKVLEVILREGSIEKAAGIVKKVVEDLANYRVPVEKLIIHEQITRELKRYKATGPHVAIAKRLQARGIKVKPGTIISYVVLKGSKKISDRVILFDEYDSSRHKYDPDYYIHNQVLPAVLRILEAFGYKEKDLEYQRMKQTGLGAWLKMGKK

SEQ ID NO: 382 - protein, 773 aa, unidentified
  REGION 1..773: note = Description of Unknown: Synthetic polypeptide
MILDTDYITENGKPVIRIFKKEKGEFKIEYDRNFEPYIYALLEDDESIEDIKKITGERHGKKVRIIRVEKVKKKFLGEPIEVWKLVFEHPQDVPAIRDAIRSHPAVREIFEYDIPFAKRYLIDKGLVPMEGGEELKLLAFTIATFYHEGDEFAEGEILMISYADESGAKVITWKKIDLPYVEVVSTEREAIKRFLQVLREKDPDVLLTYNGDNFDFAYIKKRCEKLGLKFTIGRDGSEPKIQRMGDRFAVEVKGRIHLDLAPVVRHTIRLPTYTLEAVYEAVFGKKKEKVYAEEIAEAWKSEEGLKRVAQYSMEDARATYELGREFFPLEVELAKLIGQSVWDVSRSSTGNLVEWYLLRVAYERNELAPNKPGGEEYQRRMRSSYIGGYVKEPEKGLWESIAYLDFRSSAGSIIVTHNVSPDTLEKECKNYDVAPIVGYRFCKDFKGFIPSILEDLIETRQKVKRKMKATIDPIEKKMLDYRQRALKILANSYYGYQGYPKARWYSKECAESVTAWGRHYIETTIKEAEKFGFKVLYADTDGFFATIPNEKPETIKSKAKKFLKHINEKLPGMLELEYEGFYLRGFFVTKKKYALIDEDGHITTRGLEVVRRDWSEIAKETQAKVLEVILREGSIEKAAGIVKKVVEDLANYRVPVEKLIIHEQITRELKRYKATGLHVAIAKRLQARGIKVKPGTIISYVVLKGSKKISDRVILFDEYDSSRHKYDPDYYIHNQVLPAVLRILEAFGYKEKDLEYQRMKQTGLGAWLKMGKK

SEQ ID NO: 383 - protein, 773 aa, unidentified
  REGION 1..773: note = Description of Unknown: Synthetic polypeptide
MILDTDYITENGKPVIRIFKKEKGEFKIEYDRNFEPYIYALLEDDESIEDIKKITGERHGKKVRIIRVEKVKKKFLGEPIEVWKLVFEHPQDVPAIRDAIRSHPAVREIFEYDIPFAKRYLIDKGLVPMEGGEELKLLAFNIATFYHEGDEFAEGEILMISYADESGAKVITWKKIDLPYVEVVSTEREAIKRFLQVLREKDPDVLLTYNGDNFDFAYIKKRCEKLGLKFTIGRDGSEPKIQRMGDRFAVEVKGRIHLDLAPVVRHTIRLPTYTLEAVYEAVFGKKKEKVYAEEIAEAWKSEEGLKRVAQYSMEDARATYELGREFFPLEVELAKLIGQSVWDVSRSSTGNLVEWYLLRVAYERNELAPNKPGGEEYQRRMRSSYIGGYVKEPEKGLWESIAYLDFRSSAGSIIVTHNVSPDTLEKECKNYDVAPIVGYRFCKDFKGFIPSILEDLIETRQKVKRKMKATIDPIEKKMLDYRQRALKILANSYYGYQGYPKARWYSKECAESVTAWGRHYIETTIKEAEKFGFKVLYADTDGFFATIPNEKPETIKSKAKKFLKHINEKLPGMLELEYEGFYLRGFFVTKKRYALIDEDGHITTRGLEVVRRDWSEIAKETQAKVLEVILREGSIEKAAGIVKKVVEDLANYRVPVEKLIIHEQITRELKRYKATGPHVAIAKRLQARGIKVKPGTIISYVVLKGSKKISDRVILFDEYDSSRHKYDPDYYIHNQVLPAVLRILEAFGYKEKDLEYQRMKQTGLGAWLKMGKK

SEQ ID NO: 384 - protein, 773 aa, unidentified
  REGION 1..773: note = Description of Unknown: Synthetic polypeptide
MILDTDYITENGKPVIRIFKKEKGEFKIEYDRNFEPYIYALLEDDESIEDIKKITGERHGKKVRIIRVEKVKKKFLGEPIEVWKLVFEHPQDYPAIRDAIRSHPAVREIFEYDIPFAKRYLIDKGLVPMEGGEELKLLAFAIATFYHEGDEFAEGEILMISYADESGAKVITWKKIDLPYVEVVSTEREAIKRFLQVLREKDPDVLLTYNGDNFDFAYIKKRCEKLGLKFTIGRDGSEPKIQRMGDRFAVEVKGRIHLDLAPVVRHTIRLPTYTLEAVYEAVFGKKKEKVYAEEIAEAWKSEEGLKRVAQYSMEDARATYELGREFFPMEVELAKLIGQSVWDVSRSSTGNLVEWYLLRVAYERNELAPNKPGGEEYQRRMRSSYIGGYVKEPEKGLWESIAYLDFRSSAGSIIVTHNVSPDTLEKECKNYDVAPIVGYRFCKDFKGFIPSILEDLIETRQKVKRKMKATIDPIEKKMLDYRQRALKILANSYYGYQGYPKARWYSKESAESVTAWGRHYIETTIKEAEKFGFKVLYADTDGFFATIPNEKPETIKSKAKKFLKHINEKLPGMLELEYEGFYLRGFFVTKKKYALIDEDGHITTRGLEVVRRDWSEIAKETQAKVLEVILREGSIEKAAGIVKKVVEDLANYRVPVEKLIIHEQITRELKRYKATGPHVAIAKRLQARGIKVKPGTIISYVVLKGSKKISDRVILFDEYDSSRHKYDPDYYIHNQVLPAVLRILEAFGYKEKDLEYQRMKQTGLGAWLKMGKK

SEQ ID NO: 385 - protein, 773 aa, unidentified
  REGION 1..773: note = Description of Unknown: Synthetic polypeptide
MILDTDYITENGKPVIRIFKKEKGEFKIEYDRNFEPYIYALLEDDESIEDIKKITGERHGKKVRIIRVEKVKKKFLGEPIEVWKLVFERPQDVPAIRDAIRSHPAVREIFEYDIPFAKRYLIDKGLVPMEGGEELKLLAFNIATFYHEGDEFAEGEILMISYADESGAKVITWKKIDLPYVEVVSTEREAIKRFLQVLREKDPDVLLTYNGDNFDFAYIKKRCEKLGLKFTIGRDGSEPKIQRMGDRFAVEVKGRIHLDLAPVVRHTIRLPTYTLEAVYEAVFGKKKEKVYAEEIAEAWKSEEGLKRVAQYSMEDARATYELGREFFPLEVELAKLIGQSVWDVSRSSTGNLVEWYLLRVAYERNELAPNKPGGEEYQRRMRSSYIGGYVKEPEKGLWESIAYLDFRSSAGSIIVTHNVSPDTLEKECKNYDVAPIVGYRFCKDFKGFIPSILEDLIETRQKVKRKMKATIDPIEKKMLDYRQRALKILANSYYGYQGYPKARWYSKECAESVTAWGRHYIETTIKEAEKFGFKVLYADTDGFFATIPNEKPETIKSKAKKFLKHINEKLPGMLELEYEGFYLRGFFVTKKKYALIDEDGHITTRGLEVVRRDWSEIAKETQAKVLEVILREGSIEKAAGIVKKVVEDLANYRVPVEKLIIHEQITRELKRYKATGPHVAIAKRLQARGIKVKPGTIISYVVLKGSKKISDRVILFDEYDSSRHKYDPDYYIHNQVLPAVLRILEAFGYKEKDLEYQRMKQTGLGAWLKMGKK

SEQ ID NO: 386 - protein, 757 aa, unidentified
  REGION 1..757: note = Description of Unknown: Synthetic polypeptide
MILDTDYITENGKPVIRIFKKEKGEFKIEYDRNFEPYIYALLEDDESIEDIKKITGERHGKKVRIIRVEKVKKKFLGEPIEVWKLVFEHPQDVPAIRDAIRSHPAVREIFEYDIPFAKRYLIDKGLVPMEGGEELKLLAFRIATFYHEGDEFAEGEILMISYADESGAKVITWKKIDLPYVEVVSTEREAIKRFLQVLREKDPDVLLTYNGDNFDFAYIKKRCEKLGLKFTIGRDGSEPKIQRMGDRFAVEVKGRIHLDLAPVVRHTIRLPTYTLEAVYEAVFGKKKEKVYAEEIAEAWKSEEGLKRVAQYSMEDARATYELGREFFPMEVELAKLIGQSVWDVSRSSTGNLVEWYLLRVAYERNELAPNKPGGEEYQRRMRSSYIGGYVKEPEKGLWESIAYLDFRSSAGSIIVTHNVSPDTLEKECKNYDVAPIVGYRFCKDFKGFIPSILEDLIETRQKVKRKMKATIDPIEKKMLDYRQRALKILANSYYGYQGYPKARWYSKECAESVTAWGRHYIETTIKEAEKFGFKVLYADTDGFFATIPNEKPETIKSKAKKFLKHINEKLPGMLELEYEGFYLRGFFVTKKKYALIDEDGHITTRGLEVVRRDWSEIAKETQAKVLEVILREGSIEKAAGIVKKVVEDLANYRVPVEKLIIHEQITRKLKDYKATGPHVAIAKRLQARGIKVKPGTIISYVVLKGSKKISDRVILFDEYDSSRHKYDPDYYIHNQVLPAVLRILEAFGYKEKDLEYQ

SEQ ID NO: 387 - protein, 757 aa, unidentified
  REGION 1..757: note = Description of Unknown: Synthetic polypeptide
MILDTDYITENGKPVIRIFKKEKGEFKIEYDRNFEPYIYALLEDDESIEDIKKITGERHGKKVRIIRVEKVKKKFLGEPIEVWKLVFEHPQDVPAIRDAIRSHPAVREIFEYDIPFAKRYLIDKGLVPMEGGEELKLLAFAIATFYHEGDEFAEGEILMISYADESGAKVITWKKIDLPYVEVVSTEREAIKRFLQVLREKDPDVLLTYNGDNFDFAYIKKRCEKLGLKFTIGRDGSEPKIQRMGDRFAVEVKGRIHLDLAPVVRHTIRLPTYTLEAVYEAVFGKKKEQVYAEEIAEAWKSEEGLKRVAQYSMEDARATYELGREFFPMEVELAKLIGQSVWDVSRSSTGNLVEWYLLRVAYERNELAPNKPGGEEYQRRMRSSYIGGYVKEPEKGLWESIAYLDFRSSAGSIIVTHNVSPDTLEKECKNYDVAPIVGYRFCKDFKGFIPSILEDLIETRQKVKRKMKATIDPIEKKMLDYRQRALKILANSYYGYQGYPKARWYSKECAESVTAWGRHYIETTIKEAEKFGFKVLYADTDGFFATIPNEKPETIKSKAKKFLKHINEKLPGMLELEYEGFYLRGFFVTKKKYALIDEDGHITTRGLEVVRRDWSEIAKETQAKVLEVILREGSIEKAAGIVKKVVEDLANYRVPVEKLIIHEQITRKLKDYKATGPHVAIAKRLQARGIKVKPGTIISYVVLKGSKKISDRVILFDEYDSSRHKYDPDYYIHNQVLPAVLRILEAFGYKEKDLEYQ

SEQ ID NO: 388 - protein, 773 aa, unidentified
  REGION 1..773: note = Description of Unknown: Synthetic polypeptide
MILDTDYITENGKPVIRIFKKEKGEFKIEYDRNFEPYIYALLEDDESIEDIKKITGERHGKKVRIIRVEKVKKKFLGEPIEVWKLVFEHPQDYPAIRDAIRSHPAVREIFEYDIPFAKRYLIDKGLVPMEGGEELKLLAFAIATFYHEGDEFAEGEILMISYADESGAKVITWKKIDLPYVEVVSTEREAIKRFLQVLREKDPDVLLTYNGDNFDFAYIKKRCEKLGLKFTIGRDGSEPKIQRMGDRFAVEVKGRIHLDLAPVVRHTIRLPTYTLEAVYEAVFGKKKEKVYAEEIAEAWKSEEGLKRVAQYSMEDARATYELGREFFPMEVELAKLIGQSVWDVSRSSTGNLVEWYLLRVAYERNELAPNKPGGEEYQRRMRSSYIGGYVKEPEKGLWESIAYLDFRSSAGSIIVTHNVSPDTLEKECKNYDVAPIVGYRFCKDFKGFIPSILEDLIETRQKVKRKMKATIDPIEKKMLDYRQRALKILANSYYGYQGYPKARWYSKECAESVTAWGRHYIETTIKEAEKFGFKVLYADTDGFFATIPNEKPETIKSKAKKFLKHINEKLPGMLELEYEGFYLRGFFVTKKKYALIDEDGHITTRDLEVVRRDWSEIAKETQAKVLEVILREGSIEKAAGIVKKVVEDLANYRVPVEKLIIHEQITRELKRYKATGPHVAIAKRLQARGIKVKPGTIISYVVLKGSKKISDRVILFDEYDSSRHKYDPDYYIHNQVLPAVLRILEAFGYKEKDLEYQRMKQTGLGAWLKMGKK

SEQ ID NO: 389 - protein, 773 aa, unidentified
  REGION 1..773: note = Description of Unknown: Synthetic polypeptide
MILDTDYITENGKPVIRIFKKEKGEFKIEYDRNFEPYIYALLEDDESIEDIKKITGERHGKKVRIIRVEKVKKKFLGEPIEVWKLVFEHPQDYPAIRDAIRSHPAVREIFEYDIPFAKRYLIDKGLVPMEGGEELKLLAFAIATFYHEGDEFAEGEILMISYADESGAKVITWKKIDLPYVEVVSTEREAIKRFLQVLREKDPDVLLTYNGDNFDFAYIKKRCEKLGLKFTIGRDGSEPKIQRMGDRFAVEVKGRIHLDLAPVVRHTIRLPTYTLEAVYEAVFGKKKEKVYAEEIAEAWKSEEGLKRVAQYSLEDARATYELGREFFPMEVELAKLIGQSVWDVSRSSTGNLVEWYLLRVAYERNELAPNKPGGEEYQRRMRSSYIGGYVKEPEKGLWESIAYLDFRSSAGSIIVTHNVSPDTLEKECKNYDVAPIVGYRFCKDFKGFIPSILEDLIETRQKVKRKMKATIDPIEKKMLDYRQRALKILANSYYGYQGYPKARWYSKECAESVTAWGRHYIETTIKEAEKFGFKVLYADTDGFFATIPNEKPETIKSKAKKFLKHINEKLPGMLELEYEGFYLRGFFVTKKKYALIDEDGHITTRGLEVVRRDWSEIAKETQAKVLEVILREGSIEKAAGIVKKVVEDLANYRVPVEKLIIHEQITRELKRYKATGPHVAIAKRLQARGIKVKPGTIISYVVLKGSKKISDRVILFDEYDSSRHKYDPDYYIHNQVLPAVLRILEAFGYKEKDLEYQRMKQTGLGAWLKMGKK

SEQ ID NO: 390 - protein, 773 aa, unidentified
  REGION 1..773: note = Description of Unknown: Synthetic polypeptide
MILDTDYITENGKPVIRIFKKEKGEFKIEYDRNFEPYIYALLEDDESIEDIKKITGERHGKKVRIIRVEKVKKKFLGEPIEVWKLVFEHPQDYPAIRDAIRSHPAVREIFEYDIPFAKRYLIDKGLVPMEGGEELKLLAFAIATFYHEGDEFAEGEILMISYADESGAKVITWKKIDLPYVEVVSTEREAIKRFLQVLREKDPDVLLTYNGDNFDFAYIKKRCEKLGLKFTIGRDGSEPKIQRMGDRFAVEVKGRIHLDLAPVVRHTIRLPTYTLEAVYEAVFGKKKEKVYAEEIAEAWKSEEGLKRVAQYSMEDARATYELGREFFPMEVELAKLIGQSVWDVSRSSTGNLVEWYLLRVAYERNELAPNKPGGEEYQRRMRSSYIGGYVKEPEKGLWESIAYLDFRSSAGSIIVTHNISPDTLEKECKNYDVAPIVGYRFCKDFKGFIPSILEDLIETRQKVKRKMKATIDPIEKKMLDYRQRALKILANSYYGYLGYPKARWYSKESAESVTAWGRHYIETTIKEAEKFGFKVLYADTDGFFATIPNEKPETIKSKAKKFLKHINEKLPGMLELEYEGFYLRGFFVTKKKYALIDEDGHITTRGLEVVRRDWSEIAKETQAKVLEVILREGSIEKAAGIVKKVVEDLANYRVPVEKLIIHEQITRELKRYKATGPHVAIAKRLQARGIKVKPGTIISYVVLKGSKKISDRVILFDEYDSSRHKYDPDYYIHNQVLPAVLRILEAFGYKEKDLEYQRMKQTGLGAWLKMGKK

SEQ ID NO: 391 - protein, 773 aa, unidentified
  REGION 1..773: note = Description of Unknown: Synthetic polypeptide
MILDTDYITENGKPVIRIFKKEKGEFKIEYDRNFEPYIYALLEDDESIEDIKKITGERHGKKVRIIRVEKVKKKFLGEPIEVWKLVFEHPQDYPAIRDAIRSHPAVREIFEYDIPFAKRYLIDKGLVPMEGGEELKLLAFAIATFYHEGDEFAEGEILMISYADESGAKVITWKKIDLPYVEVVSTEREAIKRFLQVLREKDPDVLLTYNGDNFDFAYIKKRCEKLGLKFTIGRDGSEPKIQRMGDRFAVEVKGRIHLDLAPVVRHTIRLPTYTLEAVYEAVFGKKKEKVYAEEIAEAWKSEEGLKRVAQYSMEDARATYELGREFFPMEVELAKLIGQSVWDVSRSSTGNLVEWYLLRVAYERNELAPNKPGGEEYQRRMRSSYIGGYVKEPEKGLWESIAYLDFRSSAGSIIVTHNISPDTLEKECKNYDVAPIVGYRFCKDFKGFIPSILEDLIETRQKVKRKMKATIDPIEKKMLDYRQRALKILANSYYGYLGYPKARWYSKEAAESVTAWGRHYIETTIKEAEKFGFKVLYADTDGFFATIPNEKPETIKSKAKKFLKHINEKLPGMLELEYEGFYLRGFFVTKKKYALIDEDGHITTRGLEVVRRDWSEIAKETQAKVLEVILREGSIEKAAGIVKKVVEDLANYRVPVEKLIIHEQITRELKRYKATGPHVAIAKRLQARGIKVKPGTIISYVVLKGSKKISDRVILFDEYDSSRHKYDPDYYIHNQVLPAVLRILEAFGYKEKDLEYQRMKQTGLGAWLKMGKK

SEQ ID NO: 392 - protein, 773 aa, unidentified
  REGION 1..773: note = Description of Unknown: Synthetic polypeptide
MILDTDYITENGKPVIRIFKKEKGEFKIEYDRNFEPYIYALLEDDESIEDIKKITGERHGKKVRIIRVEKVKKKFLGEPIEVWKLVFEHPQDYPAIRDAIRSHPAVREIFEYDIPFAKRYLIDKGLVPMEGGEELKLLAFAIATFYHEGDEFAEGEILMISYADESGAKVITWKKIDLPYVEVVSTEREAIKRFLQVLREKDPDVLLTYNGDNFDFAYIKKRCEKLGLKFTIGRDGSEPKIQRMGDRFAVEVKGRIHLDLAPVVRHTIRLPTYTLEAVYEAVFGKKKEKVYAEEIAEAWKSEEGLKRVAQYSEEDARATYELGREFFPMEVELAKLIGQSVWDVSRSSTGNLVEWYLLRVAYERNELAPNKPGGEEYQRRMRSSYIGGYVKEPEKGLWESIAYLDFRSSAGSIIVTHNVSPDTLEKECKNYDVAPIVGYRFCKDFKGFIPSILEDLIETRQKVKRKMKATIDPIEKKMLDYRQRALKILANSYYGYQGYPKARWYSKECAESVTAWGRHYIETTIKEAEKFGFKVLYADTDGFFATIPNEKPETIKSKAKKFLKHINEKLPGMLELEYEGFYLRGFFVTKKKYALIDEDGHITTRGLEVVRRDWSEIAKETQAKVLEVILREGSIEKAAGIVKKVVEDLANYRVPVEKLIIHEQITRELKRYKATGPHVAIAKRLQARGIKVKPGTIISYVVLKGSKKISDRVILFDEYDSSRHKYDPDYYIHNQVLPAVLRILEAFGYKEKDLEYQRMKQTGLGAWLKMGKK

SEQ ID NO: 393 - protein, 773 aa, unidentified
  REGION 1..773: note = Description of Unknown: Synthetic polypeptide
MILDTDYITENGKPVIRIFKKEKGEFKIEYDRNFEPYIYALLEDDESIEDIKKITGERHGKKVRIIRVEKVKKKFLGEPIEVWKLVFEHPQDYPAIRDAIRSHPAVREIFEYDIPFAKRYLIDKGLVPMEGGEELKLLAFAIATFYHEGDEFAEGEILMISYADESGAKVITWKKIDLPYVEVVSTEREAIKRFLQVLREKDPDVLLTYNGDNFDFAYIKKRCEKLGLKFTIGRDGSEPKIQRMGDRFAVEVKGRIHLDLAPVVRHTIRLPTYTLEAVYEAVFGKKKEKVYAEEIAEAWKSEEGLKRVAQYSMEDARATYELGREFFPMEVELAKLIGQSVWDVSRSSTGNLVEWYLLRVAYERNELAPNKPGGEEYQRRMRSSYTGGYVKEPEKGLWESIAYLDFRSSAGSIIVTHNVSPDTLEKECKNYDVAPIVGYRFCKDFKGFIPSILEDLIETRQKVKRKMKATIDPIEKKMLDYRQRALKILANSYYGYQGYPKARWYSKECAESVTAWGRHYIETTIKEAEKFGFKVLYADTDGFFATIPNEKPETIKSKAKKFLKHINEKLPGMLELEYEGFYLRGFFVTKKKYALIDEDGHITTRGLEVVRRDWSEIAKETQAKVLEVILREGSIEKAAGIVKKVVEDLANYRVPVEKLIIHEQITRELKRYKATGPHVAIAKRLQARGIKVKPGTIISYVVLKGSKKISDRVILFDEYDSSRHKYDPDYYIHNQVLPAVLRILEAFGYKEKDLEYQRMKQTGLGAWLKMGKK

SEQ ID NO: 394 - protein, 773 aa, unidentified
  REGION 1..773: note = Description of Unknown: Synthetic polypeptide
MILDTDYITENGKPVIRIFKKEKGEFKIEYDRNFEPYIYALLEDDESIEDIKKITGERHGKKVRIIRVEKVKKKFLGEPIEVWKLVFEHPQDYPAIRDAIRSHPAVREIFEYDIPFAKRYLIDKGLVPMEGGEELKLLAFAIATFYHEGDEFAEGEILMISYADESGAKVITWKKIDLPYVEVVSTEREAIKRFLQVLREKDPDVLLTYNGDNFDFAYIKKRCEKLGLKFTIGRDGSEPKIQRMGDRFAVEVKGRIHLDLAPVVRHTIRLPTYTLEAVYEAVFGKKKEQVYAEEIAEAWKSEEGLKRVAQYSMEDARATYELGREFFPMEVELAKLIGQSVWDVSRSSTGNLVEWYLLRVAYERNELAPNKPGGEEYQRRMRSSYIGGYVKEPEKGLWESIAYLDFRSSAGSIIVTHNVSPDTLEKECKNYDVAPIVGYRFCKDFKGFIPSILEDLIETRQKVKRKMKATIDPIEKKMLDYRQRALKILANSYYGYQGYPKARWYSKEDAEWVTAWGRHYIETTIKEAEKFGFKVLYADTDGFFATIPNEKPETIKSKAKKFLKHINEKLPGMLELEYEGFYLRGFFVTKKKYALIDEDGHITTRGLEVVRRDWSEIAKETQAKVLEVILREGSIEKAAGIVKKVVEDLANYRVPVEKLIIHEQITRELKRYKATGPHVAIAKRLQARGIKVKPGTIISYVVLKGSKKISDRVILFDEYDSSRHKYDPDYYIHNQVLPAVLRILEAFGYKEKDLEYQRMKQTGLGAWLKMGKK

SEQ ID NO: 395 - protein, 773 aa, unidentified
  REGION 1..773: note = Description of Unknown: Synthetic polypeptide
MILDTDYITENGKPVIRIFKKEKGEFKIEYDRNFEPYIYALLEDDESIEDIKKITGERHGKKVRIIRVEKVKKKFLGEPIEVWKLVFEQPQDVPAIQDAIRSHPAVREIFEYDIPFAKRYLIDKGLVPMEGGEELKLLAFNIATFYHEGDEFAEGEILMISYADESGAKVITWKKIDLPYVEVVSTEREAIKRFLQVLREKDPDVLLTYNGDNFDFAYIKKRCEKLGLKFTIGRDGSEPKIQRMGDRFAVEVKGRIHLDLAPVVRHTIRLPTYTLEAVYEAVFGKKKEKVYAEEIAEAWKSEEGLKRVAQYSMEDARATYELGREFFPLEVELAKLIGQSVWDVSRSSTGNLVEWYLLRVAYERNELAPNKPGGEEYQRRMRSSYIGGYVKEPEKGLWESIAYLDFRSSAGSIIVTHNVSPDTLEKECKNYDVAPIVGYRFCKDFKGFIPSILEDLIETRQKVKRKMKATIDPIEKKMLDYRQRALKILANSYYGYQGYPKARWYSKECAESVTAWGRHYIETTIKEAEKFGFKVLYADTDGFFATIPNEKPETIKSKAKKFLKHINEKLPGMLELEYEGFYLRGFFVTKKKYALIDEDGHITTRGLEVVRRDWSEIAKETQAKVLEVILREGSIEKAAGIVKKVVEDLANYRVPVEKLIIHEQITRELKRYKATGPHVAIAKRLQARGIKVKPGTIISYVVLKGSKKISDRVILFDEYDSSRHKYDPDYYIHNQVLPAVLRILEAFGYKEKDLEYQRMKQTGLGAWLKMGKK

SEQ ID NO: 396 - protein, 773 aa, unidentified
  REGION 1..773: note = Description of Unknown: Synthetic polypeptide
MILDTDYITENGKPVIRIFKKEKGEFKIEYDRNFEPYIYALLEDDESIEDIKKITGERHGKKVRIIRVEKVKKKFLGEPIEVWKLVFEHPQDYPAIRDAIRSHPAVREIFEYDIPFAKRYLIDKGLVPMEGGEELKLLAFAIATFYHEGDEFAEGEILMISYADESGAKVITWKKIDLPYVEVVSTEREAIKRFLQVLREKDPDVLLTYNGDNFDFAYIKKRCEKLGLKFTIGRDGSEPKIQRMGDRFAVEVKGRIHLDLAPVVRHTIRLPTYTLEAVYEAVFGKKKEKVYAEEIAEAWKSEEGLKRVAQYSMEDARATYELGREFFPMEVELAKLIGQSVWDVSRSSTGNLVEWYLLRVAYERNELAPNKPGGEEYQRRMRSSYIGGYVKEPEKGLWESIAYLDFRSSAGSIIVTHNVSPDTLEKECKNYDVAPIVGYRFCKDFKGFIPSILEDLIETRQKVKRKMKATIDPIEKKMLDYRQRALKILANSYYGYQSYPKARWYSKECAESVTAWGRHYIETTIKEAEKFGFKVLYADTDGFFATIPNEKPETIKSKAKKFLKHINEKLPGMLELEYEGFYLRGFFVTKKKYALIDEDGHITTRGLEVVRRDWSEIAKETQAKVLEVILREGSIEKAAGIVKKVVEDLANYRVPVEKLIIHEQITRELKRYKATGPHVAIAKRLQARGIKVKPGTIISYVVLKGSKKISDRVILFDEYDSSRHKYDPDYYIHNQVLPAVLRILEAFGYKEKDLEYQRMKQTGLGAWLKMGKK

SEQ ID NO: 397 - protein, 773 aa, unidentified
  REGION 1..773: note = Description of Unknown: Synthetic polypeptide
MILDTDYITENGKPVIRIFKKEKGEFKIEYDRNFEPYIYALLEDDESIEDIKKITGERHGKKVRIIRVEKVKKKFLGEPIEVWKLVFEHPQDYPAIRDAIRSHPAVREIFEYDIPFAKRYLIDKGLVPMEGGEELKLLAFAIATFYHEGDEFAEGEILMISYADESGAKVITWKKIDLPYVEVVSTEREAIKRFLQVLREKDPDVLLTYNGDNFDFAYIKKRCEKLGLKFTIGRDGSEPKIQRMGDRFAVEVKGRIHLDLAPVVRHTIRLPTYTLEAVYEAVFGKKKEKVYAEEIAEAWKSEEGLKRVAQYSMEDARATYELGREFFPMEVELAKLIGQSVWDVSRSSTGNLVEWYLLRVAYERNELAPNTPGGEEYQRRMRSSYIGGYVKEPEKGLWESIAYLDFRSSAGSIIVTHNVSPDTLEKECKNYDVAPIVGYRFCKDFKGFIPSILEDLIETRQKVKRKMKATIDPIEKKMLDYRQRALKILANSYYGYQGYPKARWYSKECAESVTAWGRHYIETTIKEAEKFGFKVLYADTDGFFATIPNEKPETIKSKAKKFLKHINEKLPGMLELEYEGFYLRGFFVTKKKYALIDEDGHITTRGLEVVRRDWSEIAKETQAKVLEVILREGSIEKAAGIVKKVVEDLANYRVPVEKLIIHEQITRELKRYKATGPHVAIAKRLQARGIKVKPGTIISYVVLKGSKKISDRVILFDEYDSSRHKYDPDYYIHNQVLPAVLRILEAFGYKEKDLEYQRMKQTGLGAWLKMGKK

SEQ ID NO: 398 - protein, 773 aa, unidentified
  REGION 1..773: note = Description of Unknown: Synthetic polypeptide
MILDTDYITENGKPVIRIFKKEKGEFKIEYDRNFEPYIYALLEDDESIEDIKKITGERHGKKVRIIRVEKVKKKFLGEPIEVWKLVFEHPQDYPAIRDAIRSHPAVREIFEYDIPFAKRYLIDKGLVPMEGGEELKLLAFAIATFYHEGDEFAEGEILMISYADESGAKVITWQKIDLPYVEVVSTEREAIKRFLQVLREKDPDVLLTYNGDNFDFAYIKKRCEKLGLKFTIGRDGSEPKIQRMGDRFAVEVKGRIHLDLAPVVRHTIRLPTYTLEAVYEAVFGKKKEKVYAEEIAEAWKSEEGLKRVAQYSMEDARATYELGREFFPMEVELAKLIGQSVWDVSRSSTGNLVEWYLLRVAYERNELAPNKPGGEEYQRRMRSSYIGGYVKEPEKGLWESIAYLDFRSSAGSIIVTHNVSPDTLEKECKNYDVAPIVGYRFCKDFKGFIPSILEDLIETRQKVKRKMKATIDPIEKKMLDYRQRALKILANSYYGYQGYPKARWYSKECAESVTAWGRHYIETTIKEAEKFGFKVLYADTDGFFATIPNEKPETIKSKAKKFLKHINEKLPGMLELEYEGFYLRGFFVTKKKYALIDEDGHITTRGLEVVRRDWSEIAKETQAKVLEVILREGSIEKAAGIVKKVVEDLANYRVPVEKLIIHEQITRELKRYKATGPHVAIAKRLQARGIKVKPGTIISYVVLKGSKKISDRVILFDEYDSSRHKYDPDYYIHNQVLPAVLRILEAFGYKEKDLEYQRMKQTGLGAWLKMGKK

SEQ ID NO: 399 - protein, 773 aa, unidentified
  REGION 1..773: note = Description of Unknown: Synthetic polypeptide
MILDTDYITENGKPVIRIFKKEKGEFKIEYDRNFEPYIYALLEDDESIEDIKKITGERHGKKVRIIRVEKVKKKFLGEPIEVWKLVFEHPQDVPAIRDAIRSHPAVREIFEYDIPFAKRYLIDKGLVPMEGGEELKLLAFNIATFYHEGDEFAEGEILMISYADESGAKVITWKKIDLPYVEVVSTEREAIKRFLQVLREKDPDVLLTYNGDNFDFAYIKKRCEKLGLKFTIGRDGSEPKIQRMGDRFAVEVKGRIHLDLAPVVRHTIRLPTYTLEAVYEAVFGKKKEKVYAEEIAEAWKSEEGLKRVAQYSMEDARATYELGREFFPLEVELAKLIGQSVWDVSRSSTGNLVEWYLLRVAYERNELAPNKPGGEEYQRRMRSSYIGGYVKEPEKGLWESIAYLDFRSSAGSIIVTHNVSPDTLEKECKNYDVAPIVGYRFCKDFKGFIPSILEDLIETRQKVKRKMKATIDPIEKKMLDYRQRALKILANSYYGYQGYPKARWYSKECAESVTAWGRHYIETTIKEAEKFGFKVLYADTDGFFATIPNEKPETIKSKAKKFLKHINEKLPGMLELEYEGFYLRGFFVTKKKYALIDEDGHITTRGLEVVRRNWSEIAKETQAKVLEVILREGSIEKAAGIVKKVVEDLANYRVPVEKLIIHELITRELKRYKATGLHVAIAKRLQARGIKVKPGTIISYVVLKGSKKISDRVILFDEYDSSRHKYDPDYYIHNQVLPAVLRILEAFGYKEKDLEYQRMKQTGLGAWLKMGKK

SEQ ID NO: 400 - protein, 773 aa, unidentified
  REGION 1..773: note = Description of Unknown: Synthetic polypeptide
MILDTDYITENGKPVIRIFKKEKGEFKIEYDRNFEPYIYALLEDDESIEDIKKITGERHGKKVRIIRVEKVKKKFLGEPIEVWKLVFEHPQDYPAIRDAIRSHPAVREIFEYDIPFAKRYLIDKGLVPMEGGEELKLLAFAIATFYHEGDEFAEGEILMISYADESGAKVITWKKIDLPYVEVVSTEREAIKRFLQVLREKDPDVLLTYNGDNFDFAYIKKRCEKLGLKFTIGRDGSEPKIQRMGDRFAVEVKGRIHLDLAPVVRHTIRLNTYTLEAVYEAVFGKKKEKVYAEEIAEAWKSEEGLKRVAQYSMEDARATYELGREFFPMEVELAKLIGQSVWDVSRSSTGNLVEWYLLRVAYERNELAPNKPGGEEYQRRMRSSYIGGYVKEPEKGLWESIAYLDFRSSAGSIIVTHNVSPDTLEKECKNYDVAPIVGYRFCKDFKGFIPSILEDLIETRQKVKRKMKATIDPIEKKMLDYRQRALKILANSYYGYQGYPKARWYSKECAESVTAWGRHYIETTIKEAEKFGFKVLYADTDGFFATIPNEKPETIKSKAKKFLKHINEKLPGMLELEYEGFYLRGFFVTKKKYALIDEDGHITTRGLEVVRRDWSEIAKETQAKVLEVILREGSIEKAAGIVKKVVEDLANYRVPVEKLIIHEQITRELKRYKATGPHVAIAKRLQARGIKVKPGTIISYVVLKGSKKISDRVILFDEYDSSRHKYDPDYYIHNQVLPAVLRILEAFGYKEKDLEYQRMKQTGLGAWLKMGKK

SEQ ID NO: 401 - protein, 773 aa, unidentified
  REGION 1..773: note = Description of Unknown: Synthetic polypeptide
MILDTDYITENGKPVIRIFKKEKGEFKIEYDRNFEPYIYALLEDDESIEDIKKITGERHGKKVRIIRVEKVKKKFLGEPIEVWKLVFEHPQDVPAIRDAIRSHPAVREIFEYDIPFAKRYLIDKGLVPMEGGEELKLLAFAIATFYHEGDEFAEGEILMISYADESGAKVITWKKIDLPYVEVVSTEREAIKRFLQVLREKDPDVLLTYNGDNFDFAYIKKRCEKLGLKFTIGRDGSEPKIQRMGDRFAVEVKGRIHLDLAPVVRHTIRLPTYTLEAVYEAVFGKKKEKVYAEEIAEAWKSEEGLKRVAQYSMEDARATYELGREFFPMEVELAKLIGQSVWDVSRSSTGNLVEWYLLRVAYERNELAPNKPGGEEYQRRMRSSYIGGYVKEPEKGLWESIAYLDFRSSAGSIIVTHNVSPDTLEKECKNYDVAPIVGYRFCKDFKGFIPSILEDLIETRQKVKRKMKATIDPIEKKMLDYRQRALKILANSYYGYQGYPKARWYSKECAESVTAWGRHYIETTIKEAEKFGFKVLYADTDGFFATIPNEKPETIKSKAKKFLKHINEKLPGMLELEYEGFYLRGFFVTKKKYALIDEDGHITTRGLEVTRRDWSEIAKETQAKVLEVILREGSIEKAAGIVKKVVEDLANYRVPVEKLIIHEQITRELKRYKATGPHVAIAKRLQARGIKVKPGTIISYVVLKGSKKISDRVILFDEYDSSRHKYDPDYYIHNQVLPAVLRILEAFGYKEKDLEYQRMKQTGLGAWLKMGKK

SEQ ID NO: 402 - protein, 773 aa, unidentified
  REGION 1..773: note = Description of Unknown: Synthetic polypeptide
MILDTDYITENGKPVIRIFKKEKGEFKIEYDRNFEPYIYALLEDDESIEDIKKITGERHGKKVRIIRVEKVKKKFLGEPIEVWKLVFEHPQDVPAIRDAIRSHPAVREIFEYDIPFAKRYLIDKGLVPMEGGEELKLLAFAIATFYHEGDEFAEGEILMISYADESGAKVITWKKIDLPYVEVVSTEREAIKRFLQVLREKDPDVLLTYNGDNFDFAYIKKRCEKLGLKFTIGRDGSEPKIQRMGDRFAVEVKGRIHLDLAPVVRHTIRLPTYTLEAVYEAVFGKKKEKVYAEEIAEAWKSEEGLKRVAQYSMEDARATYELGREFFPMEVELAKLIGQSVWDVSRSSTGNLVEWYLLRVAYERNELAPNKPGGEEYQRRMRSSYIGGYVKEPEKGLWESIAYLDFRSSAGSIIVTHNVSPDTLEKECKNYDVAPIVGYRFCKDFKGFIPSILEDLIETRQKVKRKMKATIDPIEKKMLDYRQRALKILANSYYGYQGYPKARWYLKECAESVTAWGRHYIETTIKEAEKFGFKVLYADTDGFFATIPNEKPETIKSKAKKFLKHINEKLPGMLELEYEGFYLRGFFVTKKKYALIDEDGHITTRGLEVVRRDWSEIAKETQAKVLEVILREGSIEKAAGIVKKVVEDLANYRVPVEKLIIHEQITRELKDYKATGPHVAIAKRLQARGIKVKPGTIISYVVLKGSKKISDRVILFDEYDSSRHKYDPDYYIHNQVLPAVLRILEAFGYKEKDLEYQRMKQTGLGAWLKMGKK

SEQ ID NO: 403 - protein, 773 aa, unidentified
  REGION 1..773: note = Description of Unknown: Synthetic polypeptide
MILDTDYITENGKPVIRIFKKEKGEFKIEYDRNFEPYIYALLEDDESIEDIKKITGERHGKKVRIIRVEKVKKKFLGEPIEVWKLVFEHPQDYPAIRDAIRSHPAVREIFEYDIPFAKRYLIDKGLVPMEGGEELKLLAFAIATFYHEGDEFAEGEILMISYADESGAKVITWKKIDLPYVEVVSTEREAIKRFLQVLREKDPDVLLTYNGDNFDFAYIKKRCEKLGLKFTIGRDGSEPKIQRMGDRFAVEVKGRIHLDLAPVVRHTIRLPTYTLEAVYEAVFGKKKEKVYAEEIAEAWKSEEGLKRVAQYSMEDARATYELGREFFPMEVELAKLIGQSVWDVSRSSTGNLVEWYLLRVAYERNELAPNKPGGEEYQRRMRSSYIGGYVKEPEKGLWESIAYLDFRSSAGSIIVTHNVSPDTLEKECKNYDVAPAVGYRFCKDFKGFIPSILEDLIETRQKVKRKMKATIDPIEKKMLDYRQRALKILANSYYGYQGYPKARWYSKECAESVTAWGRHYIETTIKEAEKFGFKVLYADTDGFFATIPNEKPETIKSKAKKFLKHINEKLPGMLELEYEGFYLRGFFVTKKKYALIDEDGHITTRGLEVVRRDWSEIAKETQAKVLEVILREGSIEKAAGIVKKVVEDLANYRVPVEKLIIHEQITRELKRYKATGPHVAIAKRLQARGIKVKPGTIISYVVLKGSKKISDRVILFDEYDSSRHKYDPDYYIHNQVLPAVLRILEAFGYKEKDLEYQRMKQTGLGAWLKMGKK

SEQ ID NO: 404 - protein, 766 aa, unidentified
  REGION 1..766: note = Description of Unknown: Synthetic polypeptide
MILDTDYITENGKPVIRIFKKEKGEFKIEYDRNFEPYIYALLEDDESIEDIKKITGERHGKKVRIIRVEKVKKKFLGEPIEVWKLVFEHPQDVPAIRDAIRSHPAVREIFEYDIPFAKRYLIDKGLVPMEGGEELKLLAFNIATFYHEGDEFAEGEILMISYADESGAKVITWKKIDLPYVEVVSTEREAIKRFLQVLREKDPDVLLTYNGDNFDFAYIKKRCEKLGLKFTIGRDGSEPKIQRMGDRFAVEVKGRIHLDLAPVVRHTIRLPTYTLEAVYEAVFGKKKEKVYAEEIAEAWKSEEGLARVAQYSMEDARATYELGREFFPLEVELAKLIGQSVWDVSRSSTGNLVEWYLLRVAYERNELAPNKPGGEEYQRRMRSSYIGGYVKEPEKGLWESIAYLDFRSSAGSIIVTHNVSPDTLEKECKNYDVAPIVGYRFCKDFKGFIPSILEDLIETRQKVKRKMKATIDPIEKKMLDYRQRALKILANSYYGYQGYPKARWYSKECAESVTAWGRHYIETTIKEAEKFGFKVLYADTDGFFATIPNEKPETIKSKAKKFLKHINEKLPGMLELEYEGFYLRGFFVTKKKYALIDEDGHITTRGLEVVRRDWSEIAKETQAKVLEVILREGSIEKAAGIVKKVVEDLANYRVPVEKLIIHEQITRELKRYKATGPHVAIAKRLQARGIKVKPGTIISYVVLKGSKKISDRVILFDEYDSSRHKYDPDYYIHNQVLPAVLRILEAFGYKEKDLEYQRDKQTGLGA

SEQ ID NO: 405 - protein, 773 aa, unidentified
  REGION 1..773: note = Description of Unknown: Synthetic polypeptide
MILDTDYITENGKPVIRIFKKEKGEFKIEYDRNFEPYIYALLEDDESIEDIKKITGERHGKKVRIIRVEKVKKKFLGEPIEVWKLVFEHPQDVPAIRDAIRSHPAVREIFEYDIPFAKRYLIDKGLVPMEGGEELKLLAFNIATFYHEGDEFAEGEILMISYADESGAKVITWKKIDLPYVEVVSTEREAIKRFLQVLREKDPDVLLTYNGDNFDFAYIKKRCEKLGLKFTIGRDGSEPKQQRMGDRFAVEVKGRIHLDLAPVVRHTIRLPTYTLEAVYEAVFGKKKEKVYAEEIAEAWKSEEGLKRVAQYSMEDARATYELGREFFPLEVELAKLIGQSVWDVSRSSTGNLVEWYLLRVAYERNELAPNKPGGEEYQRRMRSSYIGGYVKEPEKGLWESIAYLDFRSSAGSIIVTHNVSPDTLEKECKNYDVAPIVGYRFCKDFKGFIPSILEDLIETRQKVKRKMKATIDPIEKKMLDYRQRALKILANSYYGYQGYPKARWYSKECAESVTAWGRHYIETTIKEAEKFGFKVLYADTDGFFATIPNEKPETIKSKAKKFLKHINEKLPGMLELEYEGFYLRGFFVTKKKYALIDEDGHITTRGLEVVRRDWSEIAKETQAKVLEVILREGSIEKAAGIVKKVVEDLANYRVPVEKLIIHEQITRELKRYKATGPHVAIAKRLQARGIKVKPGTIISYVVLKGSKKISDRVILFDEYDSSRHKYDPDYYIHNQVLPAVLRILEAFGYKEKDLEYQRMKQTGLGAWLKMGKK

SEQ ID NO: 406 - protein, 773 aa, unidentified
  REGION 1..773: note = Description of Unknown: Synthetic polypeptide
MILDTDYITENGKPVIRIFKKEKGEFKIEDDRNFEPYIYALLEDDESIEDIKKITGERHGKKVRIIRVEKVKKKFLGEPIEVWKLVFEHPQDYPAIRDAIRSHPAVREIFEYDIPFAKRYLIDKGLVPMEGGEELKLLAFAIATFYHEGDEFAEGEILMISYADESGAKVITWKKIDLPYVEVVSTEREAIKRFLQVLREKDPDVLLTYNGDNFDFAYIKKRCEKLGLKFTIGRDGSEPKIQRMGDRFAVEVKGRIHLDLAPVVRHTIRLPTYTLEAVYEAVFGKKKEKVYAEEIAEAWKSEEGLKRVAQYSMEDARATYELGREFFPMEVELAKLIGQSVWDVSRSSTGNLVEWYLLRVAYERNELAPNKPGGEEYQRRMRSSYIGGYVKEPEKGLWESIAYLDFRSSAGSIIVTHNVSPDTLEKECKNYDVAPIVGYRFCKDFKGFIPSILEDLIETRQKVKRKMKATIDPIEKKMLDYRQRALKILANSYYGYQGYPKARWYSKECAESVTAWGRHYIETTIKEAEKFGFKVLYADTDGFFATIPNEKPETIKSKAKKFLKHINEKLPGMLELEYEGFYLRGFFVTKKKYALIDEDGHITTRGLEVVRRDWSEIAKETQAKVLEVILREGSIEKAAGIVKKVVEDLANYRVPVEKLIIHEQITRELKRYKATGPHVAIAKRLQARGIKVKPGTIISYVVLKGSKKISDRVILFDEYDSSRHKYDPDYYIHNQVLPAVLRILEAFGYKEKDLEYQRMKQTGLGAWLKMGKK

SEQ ID NO: 407 - protein, 773 aa, unidentified
  REGION 1..773: note = Description of Unknown: Synthetic polypeptide
MILDTDYITENGKPVIRIFKKEKGEFKIEYDRNFEPYIYALLEDDESIEDIKKITGERHGKKVRIIRVEKVKKKFLGEPIEVWKLVFEHPQDVPAIRDAIRSHPAVREIFEYDIPFAKRYLIDKGLVPMEGGEELKLLAFAIITFYHEGDEFAEGEILFISYADESGAKVITWKKIDLPYVEVVSTEREAIKRFLQVLREKDPDVLLTYNGDNFDFAYIKKRCEKLGLKFTIGRDGSEPKIQRMGDRFAVEVKGRIHLDLAPVVRHTIRLPTYTLEAVYEAVFGKKKEKVYAEEIAEAWKSEEGLKRVAQYSMEDARATYELGREFFPMEVELAKLIGQSVWDVSRSSTGNLVEWYLLRVAYERNELAPNKPGGEEYQRRMRSSYIGGYVKEPEKGLWESIAYLDFRSSAGSIIVTHNVSPDTLEKECKNYDVAPIVGYRFCKDFKGFIPSILEDLIETRQKVKRKMKATIDPIEKKMLDYRQRALKILANSYYGYQGYPKARWYSKECAESVTAWGRHYIETTIKEAEKFGFKVLYADTDGFFATIPNEKPETIKSKAKKFLKHINEKLPGMLELEYEGFYLRGFFVTKKKYALIDEDGHITTRGLEVVRRDWSEIAKETQAKVLEVILREGSIEKAAGIVKKVVEDLANYRVPVEKLIIHEQITRELKDYKATGPHVAIAKRLQARGIKVKPGTIISYVVLKGSKKISDRVILFDEYDSSRHKYDPDYYIHNQVLPAVLRILEAFGYKEKDLEYQRMKQTGLGAWLKMGKK

SEQ ID NO: 408 - protein, 757 aa, unidentified
  REGION 1..757: note = Description of Unknown: Synthetic polypeptide
MILDTDYITENGKPVIRIFKKEKGEFKIEYDRNFEPYIYALLEDDESIEDIKKITGERHGKKVRIIRVEKVKKKFLGEPIEVWKLVFEHPQDVPAIRDAIRSHPAVREIFEYDIPFAKRYLIDKGLVPMEGGEELKLLAFAIATFYHEGDEFAEGEILMISYADESGAKVITWKKIDLPYVEVVSTEREAIKRFLQVLREKDPDVLLTYNGDNFDFAYIKKRCEKLGLKFTIGRDGSEPKIQRMGDRFAVEVKGRIHLDLAPVVRHTIRLPTYTLEAVYEAVFGKKKEKVYAEEIAEAWKSEEGLKRVAQYSMEDARATYELGREFFPMEVELAKLIGQSVWDVSRSSTGNLVEWYLLRVAYERNELAPNKPGGEEYQRRMRSSYIGGYVKEPEKGLWESIAYLDFRSSAGSIIVTHNVSPDTLEKECKNYDVAPIVGYRFCKDFKGFIPSILEDLIETRQKVKRKMKATIDPIEKKMLDYRQRALKILANSYYGYQGYPKARWYSKEAAESVTAWGRHYIETTIKEAEKFGFKVLYADTDGFFATIPNEKPETIKSKAKKFLKHINEKLPGMLELEYEGFYLRGFFVTKKKYALIDEDGHITTRGLEVVRRDWSEIAKETQAKVLEVILREGSIEKAAGIVKKVVEDLANYRVPVEKLIIHEQITRKLKDYKATGPHVAIAKRLQARGIKVKPGTIISYVVLKGSKKISDRVILFDEYDSSRHKYDPDYYIHNQVLPAVLRILEAFGYKEKDLEYQ

SEQ ID NO: 409 - protein, 773 aa, unidentified
  REGION 1..773: note = Description of Unknown: Synthetic polypeptide
MILDTDYITENGKPVIRIFKKEKGEFKIEYDRNFEPYIYALLEDDESIEDIKKITGERHGKKVRIIRVEKVKKKFLGEPIEVWKLVFEHPKDFPAIRDAIRSHPAVREIFEYDIPFAKRYLIDKGLVPMEGGEELKLLAFNIATFYHEGDEFAEGEILMISYADESGAKVITWKKIDLPYVEVVSTEREAIKRFLQVLREKDPDVLLTYNGDNFDFAYIKKRCEKLGLKFTIGRDGSEPKIQRMGDRFAVEVKGRIHLDLAPVVRHTIRLPTYTLEAVYEAVFGKKKEKVYAEEIAEAWKSEEGLKRVAQYSMEDARATYELGREFFPLEVELAKLIGQSVWDVSRSSTGNLVEWYLLRVAYERNELAPNKPGGEEYQRRMRSSYIGGYVKEPEKGLWESIAYLDFRSSAGSIIVTHNVSPDTLEKECKNYDVAPIVGYRFCKDFKGFIPSILEDLIETRQKVKRKMKATIDPIEKKMLDYRQRALKILANSYYGYQGYPKARWYSKECAESVTAWGRHYIETTIKEAEKFGFKVLYADTDGFFATIPNEKPETIKSKAKKFLKHINEKLPGMLELEYEGFYLRGFFVTKKKYALIDEDGHITTRGLEVVRRDWSEIAKETQAKVLEVILREGSIEKAAGIVKKVVEDLANYRVPVEKLIIHEQITRELKRYKATGPHVAIAKRLQARGIKVKPGTIISYVVLKGSKKISDRVILFDEYDSSRHKYDPDYYIHNQVLPAVLRILEAFGYKEKDLEYQRMKQTGLGAWLKMGKK

SEQ ID NO: 410 - protein, 773 aa, unidentified
  REGION 1..773: note = Description of Unknown: Synthetic polypeptide
MILDTDYITENGKPVIRIFKKEKGEFKIEYDRNFEPYIYALLEDDESIEDIKKITGERHGKKVRIIRVEKVKKKFLGEPIEVWKLVFEHPQDYPAIRDAIRSHPAVREIFEYDIPFAKRYLIDKGLVPMEGGEELKLLAFAIATFYHEGDEFAEGEILMISYADESGAKVITWKKIDLPYVEVVSTEREAIKRFLQVLREKDPDVLLTYNGDNFDFAYIKKRCEKLGLKFTIGRDGSEPKIQRMGDRFAVEVKGRIHLDLAPVVRHTIRLPTYTLEAVYEAVFGKKKEKVYAEEIAEAWKSEEGLFRVAQYSMEDARATYELGREFFPMEVELAKLIGQSVWDVSRSSTGNLVEWYLLRVAYERNELAPNKPGGEEYQRRMRSSYIGGYVKEPEKGLWESIAYLDFRSSAGSIIVTHNVSPDTLEKECKNYDVAPIVGYRFCKDFKGFIPSILEDLIETRQKVKRKMKATIDPIEKKMLDYRQRALKILANSYYGYQGYPKARWYSKECAESVTAWGRHYIETTIKEAEKFGFKVLYADTDGFFATIPNEKPETIKSKAKKFLKHINEKLPGMLELEYEGFYLRGFFVTKKKYALIDEDGHITTRGLEVVRRDWSEIAKETQAKVLEVILREGSIEKAAGIVKKVVEDLANYRVPVEKLIIHEQITRELKRYKATGPHVAIAKRLQARGIKVKPGTIISYVVLKGSKKISDRVILFDEYDSSRHKYDPDYYIHNQVLPAVLRILEAFGYKEKDLEYQRMKQTGLGAWLKMGKK

SEQ ID NO: 411 - protein, 773 aa, unidentified; identical to SEQ ID NO: 75
  REGION 1..773: note = Description of Unknown: Synthetic polypeptide

SEQ ID NO: 412 - protein, 773 aa, unidentified
  REGION 1..773: note = Description of Unknown: Synthetic polypeptide
MILDTDYITENGKPVIRIFKKEKGEFKIEYDRNFEPYIYALLEDDESIEDIKKITGERHGKKVRIIRVEKVKKKFLGEPIEVWKLVFEHPQDYPAIRDAIRSHPAVREIFEYDIPFAKRYLIDKGLVPMEGGEELKLLAFAIATFYHEGDEFAEGEILMISYADESGAKVITWKKIDLPYVEVVSTEREAIKRFLQVLREKDPDVLLTYNGDNFDFAYIKKRCEKLGLKFTIGRDGSEPKIQRMGDRFAVEVKGRIHLDLAPVVRHTIRLPTYTLEAVYEAVFGKKKEKVYAEEIAEAWKSEEGLKRVAQYSMEDARATYELGREFFPMEVELAKLIGQSVWDVSRSSTGNLVEWYLLRVAYERNELAPNKPGGEEYQRRMRSSYIGGYVKEPEKGLWESIAYLDFRSSAGSIIVTHNVSPDTLEKECKNYDVAPIVGYRFCKDFKGFIPSILEDLIETRQKVKRKMKATIDPIEKKMLDYRQRALKILANSYYGYQGYPKARWYSKECAESVTAWGRHYIETTIKEAEKFGFKVLYADTDGFFATIPNEKPETIKSKAKKFLKHINEKLPGMLELEYEGFYLRGFFVTKKKYALIDEDGHITTRGLEVVRRDWSEIAKETQAKVLEVILREGSIEKAAGIVKKVVEDLANYRVPVEKLIIHEQITRELKRYKATLPHVAIAKRLQARGIKVKPGTIISYVVLKGSKKISDRVILFDEYDSSRHKYDPDYYIHNQVLPAVLRILEAFGYKEKDLEYQRMKQTGLGAWLKMGKK

SEQ ID NO: 413 - protein, 757 aa, unidentified
  REGION 1..757: note = Description of Unknown: Synthetic polypeptide
MILDTDYITENGKPVIRIFKKEKGEFKIEYDRNFEPYIYALLEDDESIEDIKKITGERHGKKVRIIRVEKVKKKFLGEPIEVWKLVFEHPQDVPAIRDAIRSHPAVREIFEYDIPFAKRYLIDKGLVPMEGGEELKLLAFAIATFYHEGDEFAEGEILMISYADESGAKVITWKKIDLPYVEVVSTEREAIKRFLQVLREKDPDVLLTYNGDNFDFAYIKKRCEKLGLKFTIGRDGSEPKIQRMGDRFAVEVKGRIHLDLAPVVRHTIRLPTYTLEAVYEAVFGKKKEKVYAEEIAEAWKSEEGLKRVAQYSMEDARATYELGREFFPMEVELAKLIGQSVWDVSRSSTGNLVEWYLLRVAYERNELAPNKPGGEEYQRRMRSSYIGGYVKEPEKGLWESIAYLDFRSSAGSIIVTHNVSPDTLEKECKNYDVAPIVGYRFCKDFKGFIPSILEDLIETRQKVKRKMKATIDPIEKKMLDYRQRALKILANSYYGYQGYPKARWYSKECAESVTAWGRHYIETTIKEAEKFGFKVLYADTDGFFATIPNEKPETIKSKAKKFLKHINEKLPGMLELEYEGFYLRGFFVTKKKYALIDEDGHITTRGLEVVRRDWSEIAKETQAKVLEVILREGSIEKAAGIVKKVVEDLANYRVPVEKLIIHEQITRRLKDYKATGPHVAIAKRLQARGIKVRPGTIISYVVLKGSKKISDRVILFDEYDSSRHKYDPDYYIHNQVLPAVLRILEAFGYKEKDLEYQ

SEQ ID NO: 414 - protein, 757 aa, unidentified
  REGION 1..757: note = Description of Unknown: Synthetic polypeptide
MILDTDYITENGKPVIRIFKKEKGEFKIEYDRNFEPYIYALLEDDESIEDIKKITGERHGKKVRIIRVEKVKKKFLGEPIEVWKLVFEHPQDVPAIRDAIRSHPAVREIFEYDIPFAKRYLIDKGLVPMEGGEELKLLAFAIATFYHEGDEFAEGEILMISYADESGAKVITWKKIDLPYVEVVSTEREAIKRFLQVLREKDPDVLLTYNGDNFDFAYIKKRCEKLGLKFTIGRDGSEPKIQRMGDRFAVEVKGRIHLDLAPVVRHTIRLPTYTLEAVYEAVFGKKKEKVYAEEIAEAWKSEEGLKRVAQYSMEDARATYELGREFFPMEVELAKLIGQSVWDVSRSSTGNLVEWYLLRVAYERNELAPNKPGGEEYQRRMRSSYIGGYVKEPEKGLWESIAYLDFRSSAGSIIVTHNISPDTLEKECKNYDVAPIVGYRFCKDFKGFIPSILEDLIETRQKVKRKMKATIDPIEKKMLDYRQRALKILANSYYGYQGYPKARWYSKECAESVTAWGRHYIETTIKEAEKFGFKVLYADTDGFFATIPNEKPETIKSKAKKFLKHINEKLPGMLELEYEGFYLRGFFVTKKKYALIDEDGHITTRGLEVVRRDWSEIAKETQAKVLEVILREGSIEKAAGIVKKVVEDLANYRVPVEKLIIHEQITRKLKDYKATGPHVAIAKRLQARGIKVKPGTIISYVVLKGSKKISDRVILFDEYDSSRHKYDPDYYIHNQVLPAVLRILEAFGYKEKDLEYQ

SEQ ID NO: 415 - protein, 773 aa, unidentified; identical to SEQ ID NO: 123
  REGION 1..773: note = Description of Unknown: Synthetic polypeptide

SEQ ID NO: 416 - protein, 773 aa, unidentified
  REGION 1..773: note = Description of Unknown: Synthetic polypeptide
FILDTDYITENGKPVIRIFKKEKGEFKIEYDRNFEPYIYALLEDDESIEDIKKITGERHGKKVRIIRVEKVKKKFLGEPIEVWKLVFEHPQDYPAIRDAIRSHPAVREIFEYDIPFAKRYLIDKGLVPLEGGEELKLLAFAIATFYHEGDEFAEGEILMISYADESGAKVITWKKIDLPYVEVVSTEREAIKRFLQVLREKDPDVLLTYNGDNFDFAYIKKRCEKLGLKFTIGRDGSEPKIQRMGDRFAVEVKGRIHLDLAPVVRHTIRLPTYTLEAVYEAVFGKKKEKVYAEEIAEAWKSEEGLKRVAQYSMEDARATYELGREFFPMEVELAKLIGQSVWDVSRSSTGNLVEWYLLRVAYERNELAPNKPGGEEYQRRMRSSYIGGYVKEPEKGLWESIAYLDFRSSAGSIIVTHNVSPDTLEKECKNYDVAPIVGYRFCKDFKGFIPSILEDLIETRQKVKRKMKATIDPIEKKMLDYRQRALKILANSYYGYQGYPKARWYSKECAESVTAWGRHYIETTIKEAEKFGFKVLYADTDGFFATIPNEKPETIKSKAKKFLKHINEKLPGMLELEYEGFYLRGFFVTKKKYALIDEDGHITTRGLEVVRRDWSEIAKETQAKVLEVILREGSIEKAAGIVKKVVEDLANYRVPVEKLIIHEQITRELKRYKATGPHVAIAKRLQARGIKVKPGTIISYVVLKGSKKISDRVILFDEYDSSRHKYDPDYYIHNQVLPAVLRILEAFGYKEKDLEYQRMKQTGLGAWLKMGKK

SEQ ID NO: 417 - protein, 773 aa, unidentified
  REGION 1..773: note = Description of Unknown: Synthetic polypeptide
MILDTDYITENGKPVIRIFKKEKGEFKIEYDRNFEPYIYALLEDDESIEDIKKITGERHGKKVRIIRVEKVKKKFLGEPIEVWKLVFEHPQDYPAIRDAIRSHPAVREIFEYDIPFAKRYLIDKGLVPMEGGEELKLLAFAIATFYHEGDEFAEGEILMISYADESGAKVITWKKIDLPYVEVVSTEREAIKRFLQVLREKDPDVLLTYNGDNFDFAYIKKRAEKLGLKFTIGRDGSEPKIQRMGDRFAVEVKGRIHLDLAPVVRHTIRLPTYTLEAVYEAVFGKKKEKVYAEEIAEAWKSEEGLKRVAQYSMEDARATYELGREFFPMEVELAKLIGQSVWDVSRSSTGNLVEWYLLRVAYERNELAPNKPGGEEYQRRMRSSYIGGYVKEPEKGLWESIAYLDFRSSAGSIIVTHNVSPDTLEKECKNYDVAPIVGYRFCKDFKGFIPSILEDLIETRQKVKRKMKATIDPIEKKMLDYRQRALKILANSYYGYQGYPKARWYSKECAESVTAWGRHYIETTIKEAEKFGFKVLYADTDGFFATIPNEKPETIKSKAKKFLKHINEKLPGMLELEYEGFYLRGFFVTKKKYALIDEDGHITTRGLEVVRRDWSEIAKETQAKVLEVILREGSIEKAAGIVKKVVEDLANYRVPVEKLIIHEQITRELKRYKATGPHVAIAKRLQARGIKVKPGTIISYVVLKGSKKISDRVILFDEYDSSRHKYDPDYYIHNQVLPAVLRILEAFGYKEKDLEYQRMKQTGLGAWLKMGKK

SEQ ID NO: 418 - protein, 772 aa, unidentified; identical to SEQ ID NO: 103
  REGION 1..772: note = Description of Unknown: Synthetic polypeptide

SEQ ID NO: 419 - protein, 773 aa, unidentified
  REGION 1..773: note = Description of Unknown: Synthetic polypeptide
MILDTDYITENGKPVIRIFKKEKGEFKIEYDRNFEPYIYALLEDDESIEDIKKITGERHGKKVRIIRVEKVKKKFLGEPIEVWKLVFEHPQDYPAIRDAIRSHPAVREIFEYDIPFAKRYLIDKGLVPMEGGEELKLLAFAIATFYHEGDEFAEGEILMISYADESGAKVITWKKIDLPYVEVVSTEREAIKRFLQVLREKDPDVLLTYNGDNFDFAYIKKRCEKLGLKFTIGRDGSEPKIQRMGDRFAVEVKGRIHLDLAPVVRHTIRLPTYTLEAVYEAVFGKKKEKVYAEEIAEAWKSEEGLKRVAQYSMEDARATYELGREFFPMEVELAKLIGQSVWDVSRSSTGNLVEWYLLRVAYERNELAPNKPGGEEYQRRMRSSYEGGYVKEPEKGLWESIAYLDFRSSAGSIIVTHNVSPDTLEKECKNYDVAPIVGYRFCKDFKGFIPSILEDLIETRQKVKRKMKATIDPIEKKMLDYRQRALKILANSYYGYQGYPKARWYSKECAESVTAWGRHYIETTIKEAEKFGFKVLYADTDGFFATIPNEKPETIKSKAKKFLKHINEKLPGMLELEYEGFYLRGFFVTKKKYALIDEDGHITTRGLEVVRRDWSEIAKETQAKVLEVILREGSIEKAAGIVKKVVEDLANYRVPVEKLIIHEQITRELKRYKATGPHVAIAKRLQARGIKVKPGTIISYVVLKGSKKISDRVILFDEYDSSRHKYDPDYYIHNQVLPAVLRILEAFGYKEKDLEYQRMKQTGLGAWLKMGKK

SEQ ID NO: 420 - protein, 773 aa, unidentified
  REGION 1..773: note = Description of Unknown: Synthetic polypeptide
MILDTDYITENGKPVIRIFKKEKGEFKIEYDRNFEPYIYALLEDDESIEDIKKITGERHGKKVRIIRVEKVKKKFLGEPIEVWKLVFEHPQDYPAIRDAIRSHPAVREIFEYDIPFAKRYLIDKGLVPMEGGEELKLLAFAIATFYHEGDEFAEGEILMISYADESGAKVITWKKIDLPYVEVVSTEREAIKRFLQVLREKDPDVLLTYNGDNFDFAYIKKRCEKLGLKFTIGRDGSEPKIQRMGDRFAVEVKGRIHLDLAPVVRHTIRLPTYTLEAVYEAVFGKKKEKVYAEEIAEAWKSEEGLKRVAQYSMEDARATYELGREFFPMEVELAKLIGQSVWDVSRSSTGNLVEWYLLRVAYERNELAPNKPGGEEYQRRMRSSYIGGYVKEPEKGLWESIAYLDFRSSAGSIIVTHNRSPDTLEKECKNYDVAPIVGYRFCKDFKGFIPSILEDLIETRQKVKRKMKATIDPIEKKMLDYRQRALKILANSYYGYMGYPKARWYSKECAESVTAWGRHYIETTIKEAEKFGFKVLYADTDGFFATIPNEKPETIKSKAKKFLKHINEKLPGMLELEYEGFYLRGFFVTKKKYALIDEDGHITTRGLEVVRRDWSEIAKETQAKVLEVILREGSIEKAAGIVKKVVEDLANYRVPVEKLIIHEQITRELKRYKATGPHVAIAKRLQARGIKVKPGTIISYVVLKGSKKISDRVILFDEYDSSRHKYDPDYYIHNQVLPAVLRILEAFGYKEKDLEYQRMKQTGLGAWLKMGKK

SEQ ID NO: 421 - protein, 773 aa, unidentified
  REGION 1..773: note = Description of Unknown: Synthetic polypeptide
MILDTDYITENGKPVIRIFKKEKGEFKIEYDRNFEPYIYALLEDDESIEDIKKITGERHGKKVRIIRVEKVKKKFLGEPIEVWKLVFEHPQDYPAIRDAIRSHPAVREIFEYDIPFAKRYLIDKGLVPMEGGEELKLLAFAIATFYHEGDEFAEGEILMISYADESGAKVITWKKIDLPYVEVVSTEREAIKRFLQVLREKDPDVLLTYNGDNFDFAYIKKRCEKLGLKFTIGRDGSEPKIQRMGDRFAVEVKGRIHLDLAPVVRHTIRLPTYTLEAVYEAVFGKKKEKVYAEEIAEAWKSEEGLKRVAQYSMEDARATYELGREFFPMEVELAKLIGQSVWDVSRSSTGNLVEWYLLRVAYERNELAPNKPGGEEYQRRMRSSYIGGYVKEPEKGLWESIAYLDFRSSAGSIIVTHNVSPDTLEKECKNYDVAPIVGYRFCKDFKGFIPSILEDLIETRQKVKRKMKATIDPIEKKMLDYRQRALKILANSYYGYQGYPKARWYSKECAESVTAWGRHYIETTIKEAEKFGFKVLYADTDGFFATIPNEKPETIKSKAKKFLKHINEKLPGMLELEYEGFYLRGFFVTKKKYALIDEDGHITTRGLEVVRRDWSEIAKETQAKVLEVILREGSIEKAAGIVKKVVEDLANYRVPVEKLIIHEQITRELKRYKATGPHVAIAKRLQARGIKVKPGTIISYVVLKGSKKISDRVILFDEYDSSRHKYDPDYYIHNQVLPAVLRILEAFGYKEKDLEYQRMKQTGLGADLKMGKK

SEQ ID NO: 422 - protein, 773 aa, unidentified
  REGION 1..773: note = Description of Unknown: Synthetic polypeptide
MILDTDYITENGKPVIRIFKKEKGEFKIEYDRNFEPYIYALLEDDESIEDIKKITGERHGKKVRIIRVEKVKKKFLGEPIEVWKLVFEHPQDYPAIRDAIRSHPAVREIFEYDIPFAKRYLIDKGLVPMEGGEELKLLAFAIATFYHEGDEFAEGEILMISYADESGAKVITWKKIDLPYVEVVSTEREAIKRFLQVLREKDPDVLLTYNGDNFDFAYIKKRCEKLGLKFTIGRDGSEPKIQRMGDRFAVEVKGRIHLDLAPVVRHTIRLPTYTLEAVYEAVFGKKKEKVYAEEIAEAWKSEEGLKRVAQYSMEDARATYELGREFFPMEVELAKLIGQSVWDVSRSSTGNLVEWYLLRVAYERNELAPNKPGGEEYQRRMRSSYIGGYVKEPEKGLWESIAYLDFRSSAGSIIVTHNVSPDTLEKECKNYDVAPIVGYRFCKDFKGFIPSILEDLIETRQKVKRKMKATIDPIEKKMLDYRQRALKILANSYYGYQGYPKARWYSKECAASVTAWGRHYIETTIKEAEKFGFKVLYADTDGFFATIPNEKPETIKSKAKKFLKHINEKLPGMLELEYEGFYLRGFFVTKKKYALIDEDGHITTRGLEVVRRDWSEIAKETQAKVLEVILREGSIEKAAGIVKKVVEDLANYRVPVEKLIIHEQITRELKRYKATGPHVAIAKRLQARGIKVKPGTIISYVVLKGSKKISDRVILFDEYDSSRHKYDPDYYIHNQVLPAVLRILEAFGYKEKDLEYQRMKQTGLGAWLKMGKK

SEQ ID NO: 423 - protein, 773 aa, unidentified
  REGION 1..773: note = Description of Unknown: Synthetic polypeptide
MILDTDYITEQGKPVIRIFKKEKGEFKIEYDRNFEPYIYALLEDDESIEDIKKITGERHGKKVRIIRVEKVKKKFLGEPIEVWKLVFEHPQDYPAIRDAIRSHPAVREIFEYDIPFAKRYLIDKGLVPMEGGEELKLLAFAIATFYHEGDEFAEGEILMISYADESGAKVITWKKIDLPYVEVVSTEREAIKRFLQVLREKDPDVLLTYNGDNFDFAYIKKRCEKLGLKFTIGRDGSEPKIQRMGDRFAVEVKGRIHLDLAPVVRHTIRLPTYTLEAVYEAVFGKKKEKVYAEEIAEAWKSEEGLKRVAQYSMEDARATYELGREFFPMEVELAKLIGQSVWDVSRSSTGNLVEWYLLRVAYERNELAPNKPGGEEYQRRMRSSYIGGYVKEPEKGLWESIAYLDFRSSAGSIIVTHNVSPDTLEKECKNYDVAPIVGYRFCKDFKGFIPSILEDLIETRQKVKRKMKATIDPIEKKMLDYRQRALKILANSYYGYQGYPKARWYSKECAESVTAWGRHYIETTIKEAEKFGFKVLYADTDGFFATIPNEKPETIKSKAKKFLKHINEKLPGMLELEYEGFYLRGFFVTKKKYALIDEDGHITTRGLEVVRRDWSEIAKETQAKVLEVILREGSIEKAAGIVKKVVEDLANYRVPVEKLIIHEQITRELKRYKATGPHVAIAKRLQARGIKVKPGTIISYVVLKGSKKISDRVILFDEYDSSRHKYDPDYYIHNQVLPAVLRILEAFGYKEKDLEYQRMKQTGLGAWLKMGKK

SEQ ID NO: 424 - protein, 773 aa, unidentified
  REGION 1..773: note = Description of Unknown: Synthetic polypeptide
MILDTDYITENGKPVIRIFKKEKGEFKIEYDRNFEPYIYALLEDDESIEDIKKITGERHGKKVRIIRVEKVKKKFLGEPIEVWKLVFEHPQDVPAIRDAIRSHPAVREIFEYDIPFAKRYLIDKGLVPMEGGEELKLLAFAIATFYHEGDEFAEGEILMISYADESGAKVITWKKIDLPYVEVVSTEREAIKRFLQVLREKDPDVLLTYNGDNFDFAYIKKRDEKLGLKFTIGRDGSEPKIQRMGDRFAVEVKGRIHLDLAPVVRHTIRLPTYTLEAVYEAVFGKKKEKVYAEEIAEAWKSEEGLKRVAQYSMEDARATYELGREFFPMEVELAKLIGQSVWDVSRSSTGNLVEWYLLRVAYERNELAPNKPGGEEYQRRMRSSYIGGYVKEPEKGLWESIAYLDFRSSAGSIIVTHNVSPDTLEKECKNYDVAPIVGYRFCKDFKGFIPSILEDLIETRQKVKRKMKATIDPIEKKMLDYRQRALKILANSYYGYQGYPKARWYSKECAESVTAWGRHYIETTIKEAEKFGFKVLYADTDGFFATIPNEKPETIKSKAKKFLKHINEKLPGMLELEYEGFYLRGFFVTKKKYALIDEDGHITTRGLEVVRRDWSEIAKETQAKVLEVILREGSIEKAAGIVKKVVEDLANYRVPVEKLIIHEQITRELKDYKATGPHVAIAKRLQARGIKVKPGTIISYVVLKGSKKISDRVILFDEYDSSRHKYDPDYYIHNQVLPAVLRILEAFGYKEKDLEYQRMKQTGLGAWLKMGKK

SEQ ID NO: 425 - protein, 773 aa, unidentified
  REGION 1..773: note = Description of Unknown: Synthetic polypeptide
MILDTDYITENGKPVIRIFKKEKGEFKIEYDRNFEPYIYALLEDDESIEDIKKITGERHGKKVRIIRVEKVKKKFLGEPIEVWKLVFEHPQDYPAIRDAIRSHPAVREIFEYDIPFAKRYLIDKGLVPMEGGEELKLLAFAIATFYHEGDEFAEGEILMISYADESGAKVITWKKIDLPYVEVVSTEREAIKRFLQVLREKDPDVLLTYNGDNFDFAYIKKRCEKLGLKFTIGRDGSEPKIQRMGDRFAVEVKGRIHLDLAPVVRHTIRLPTYTLEAVYEAVFGKKKEKVYAEEIAEAWKSEEGLKRVAQYSMEDARATYELGREFFPMEVELAKLIGQSVWDVSRSSTGNLVEWYLLRVAYERNELAPNKPGGEEYQRRMRSSYIGGYVKEPEKGLWESIAYLDFRSSAGSIIVTHNVSPDTLEKECKNYDVAPIVGYRFCKDFKGFIPSILEDLIETRQKVKRKDKATIDPIEKKMLDYRQRALKILANSYYGYQGYPKARWYSKECAESVTAWGRHYIETTIKEAEKFGFKVLYADTDGFFATIPNEKPETIKSKAKKFLKHINEKLPGMLELEYEGFYLRGFFVTKKKYALIDEDGHITTRGLEVVRRDWSEIAKETQAKVLEVILREGSIEKAAGIVKKVVEDLANYRVPVEKLIIHEQITRELKRYKATGPHVAIAKRLQARGIKVKPGTIISYVVLKGSKKISDRVILFDEYDSSRHKYDPDYYIHNQVLPAVLRILEAFGYKEKDLEYQRMKQTGLGAWLKMGKK

SEQ ID NO: 426 - protein, 773 aa, unidentified
  REGION 1..773: note = Description of Unknown: Synthetic polypeptide
MILDTDYITENGKPVIRIFKKEKGEFKIEYDRNFEPYIYALLEDDESIEDIKKITGERHGKKVRIIRVEKVKKKFLGEPIEVWKLVFEHPQDVPAIRDAIRSHPAVREIFEYDIPFAKRYLIDKGLVPMEGGEELKLLAFRIATFYHEGDEFAEGEILMISYADESGAKVITWKKIDLPYVEVVSTEREAIKRFLQVLREKDPDVLLTYNGDNFDFAYIKKRCEKLGLKFTIGRDGSEPKIQRMGDRFAVEVKGRIHLDLAPVVRHTIRLPTYTLEAVYEAVFGKKKEQVYAEEIAEAWKSEEGLKRVAQYSMEDARATYELGREFFPLEVELAKLIGQSVWDVSRSSTGNLVEWYLLRVAYERNELAPNKPGGEEYQRRMRSSYIGGYVKEPEKGLWESIAYLDFRSSAGSIIVTHNVSPDTLEKECKNYDVAPIVGYRFCKDFKGFIPSILEDLIETRQKVKRKMKATIDPIEKKMLDYRQRALKILANSYYGYQGYPKARWYSKECAESVTAWGRHYIETTIKEAEKFGFKVLYADTDGFFATIPNEKPETIKSKAKKFLKHINEKLPGMLELEYEGFYLRGFFVTKKKYALIDEDGHITTRGLEVVRRDWSEIAKETQAKVLEVILREGSIEKAAGIVKKVVEDLANYRVPVEKLIIHEQITRELKRYKATGPHVAIAKRLQARGIKVKPGTIISYVVLKGSKKISDRVILFDEYDSSRHKYDPDYYIHNQVLPAVLRILEAFGYKEKDLEYQRMKQTGLGAWLKMGKK

SEQ ID NO: 427 - protein, 773 aa, unidentified
  REGION 1..773: note = Description of Unknown: Synthetic polypeptide
MILDTDYITENGKPVIRIFKKEKGEFKIEYDRNFEPYIYALLEDDESIEDIKKITGERHGKKVRIIRVEKVKKKFLGEPIEVWKLVFEHPQDYPAIRDAIRSHPAVREIFEYDIPFAKRYLIDKGLVPMEGGEELKLLAFAIATFYHEGDEFAEGEILMISYADESGAKVITWKKIDLPYVEVVSTEREAIKRFLQVLREKDPDVLLTYNGDNFDFAYIKKRCEKLGLKFTIGRDGSEPKIQRMGDRFAVEVKGRIHLDLAPVVRHTIRLPTYTLEAVYEAVFGKKKEKVYAEEIAEAWKSEEGLARVAQYSVEDARATYELGREFFPMEVELAKLIGQSVWDVSRSSTGNLVEWYLLRVAYERNELAPNQPGGEEYQRRMRSSYIGGYVKEPEKGLWESIAYLDFRSSAGSIIVTHNVSPDTLEKECKNYDVAPIVGYRFCKDFKGFIPSILEDLIETRQKVKRKMKATIDPIEKKMLDYRQRALKILANSYYGYQGYPKARWYSKECAESVTAWGRHYIETTIKEAEKFGFKVLYADTDGFFATIPNEKPETIKSKAKKFLKHINEKLPGMLELEYEGFYLRGFFVTKKKYALIDEDGHITTRGLEVVRRDWSEIAKETQAKVLEVILREGSIEKAAGIVKKVVEDLANYRVPVEKLIIHEQITRELKRYKATGPHVAIAKRLQARGIKVKPGTIISYVVLKGSKKISDRVILFDEYDSSRHKYDPDYYIHNQVLPAVLRILEAFGYKEKDLEYQRMKQTGLGAWLKMGKK

SEQ ID NO: 428 - protein, 773 aa, unidentified
  REGION 1..773: note = Description of Unknown: Synthetic polypeptide
MILDTDYITENGKPVIRIFKKEKGEFKIEYDRNFEPYIYALLEDDESIEDIKKITGERHGKKVRIIRVEKVKKKFLGEPIEVWKLVFEHPQDVPAIRDAIRSHPAVREIFEYDIPFAKRYLIDKGLVPMEGGEELKLLAFNIATFYHEGDEFAEGEILMISYADESGAKVITWKKIDLPYVEVVSTEREAIKRFLQVLREKDPDVLLTYNGDNFDFAYIKKRCEKLGLKFTIGRDGSEPKIQRMGDRFAVEVKGRIHLDLAPVVRHTIRLPTYTLEAVYEAVFGKKKEKVYAEEIAEAAKSEEGLARVAQYSVEDARATYELGREFFPLEVELAKLIGQSVWDVSRSSTGNLVEWYLLRVAYERNELAPNKPGGEEYQRRMRSSYIGGYVKEPEKGLWESIAYLDFRSSAGSIIVTHNVSPDTLEKECKNYDVAPIVGYRFCKDFKGFIPSILEDLIETRQKVKRKMKATIDPIEKKMLDYRQRALKILANSYYGYQGYPKARWYSKECAESVTAWGRHYIETTIKEAEKFGFKVLYADTDGFFATIPNEKPETIKSKAKKFLKHINEKLPGMLELEYEGFYLRGFFVTKKKYALIDEDGHITTRGLEVVRRDWSEIAKETQAKVLEVILREGSIEKAAGIVKKVVEDLANYRVPVEKLIIHEQITRELKRYKATGPHVAIAKRLQARGIKVKPGTIISYVVLKGSKKISDRVILFDEYDSSRHKYDPDYYIHNQVLPAVLRILEAFGYKEKDLEYQRMKQTGLGAWLKMGKK

SEQ ID NO: 429 - protein, 773 aa, unidentified
  REGION 1..773: note = Description of Unknown: Synthetic polypeptide
MILDTDYITENGKPVIRIFKKEKGEFKIEYDRNFEPYIYALLEDDESIEDIKKITGERHGKKVRIIRVEKVKKKFLGEPIEVWKLVFEHPQDYPAIRDAIRSHPAVREIFEYDIPFAKRYLIDKGLVPMEGGEELKLLAFAIATFYHEGDEFAEGEILMISYADESGAKVITWKKIDLPYVEVVSTEREAIKRFLQVLREKDPDVLLTYNGDNFDFAYIKKRCEKLGLKFTIGRDGSEPKIQRMGDRFAVEVKGRIHLDLAPVVRHTIRLPTYTLEAVYEAVFGKKKEKVYAEEIAEAWKSEEGLKRVAQYSMEDARATYELGREFFPMEVELAKLIGQSVWDVSRSSTGNLVEWYLLRVAYERNELAPNKPGGEEYQRRMRSSYIGGYVKEPEKGLWESIAYLDFRSSAGSIIVTHNVSPDTLEKECKNYDVAPIVGYRFCKDFKGFIPSILEDLIETRQKVKRKMKATIDPIEKKMLDYRQRALKILANSYYGYQGYPKARWYSKECAESVTAWGRHYIETTIKEAEKFGFKVLYADTDGFFATIPNEKPETIKSKAKKFLKHINEKLPGVLELEYEGFYLRGFFVTKKKYALIDEDGHITTRGLEVVRRDWSEIAKETQAKVLEVILREGSIEKAAGIVKKVVEDLANYRVPVEKLIIHEQITRELKRYKATGPHVAIAKRLQARGIKVKPGTIISYVVLKGSKKISDRVILFDEYDSSRHKYDPDYYIHNQVLPAVLRILEAFGYKEKDLEYQRMKQTGLGAWLKMGKK

SEQ ID NO: 430 - protein, 773 aa, unidentified
  REGION 1..773: note = Description of Unknown: Synthetic polypeptide
MILDTDYITENGKPVIRIFKKEKGEFKIEYDRNFEPYIYALLEDDESIEDIKKITGERHGKKVRIIRVEKVKKKFLGEPIEVWKLVFEFPQDVPAIQDAIRSHPAVREIFEYDIPFAKRYLIDKGLVPMEGGEELKLLAFNIATFYHEGDEFAEGEILMISYADESGAKVITWKKIDLPYVEVVSTEREAIKRFLQVLREKDPDVLLTYNGDNFDFAYIKKRCEKLGLKFTIGRDGSEPKIQRMGDRFAVEVKGRIHLDLAPVVRHTIRLPTYTLEAVYEAVFGKKKEKVYAEEIAEAWKSEEGLKRVAQYSMEDARATYELGREFFPLEVELAKLIGQSVWDVSRSSTGNLVEWYLLRVAYERNELAPNKPGGEEYQRRMRSSYIGGYVKEPEKGLWESIAYLDFRSSAGSIIVTHNVSPDTLEKECKNYDVAPIVGYRFCKDFKGFIPSILEDLIETRQKVKRKMKATIDPIEKKMLDYRQRALKILANSYYGYQGYPKARWYSKECAESVTAWGRHYIETTIKEAEKFGFKVLYADTDGFFATIPNEKPETIKSKAKKFLKHINEKLPGMLELEYEGFYLRGFFVTKKKYALIDEDGHITTRGLEVVRRDWSEIAKETQAKVLEVILREGSIEKAAGIVKKVVEDLANYRVPVEKLIIHEQITRELKRYKATGPHVAIAKRLQARGIKVKPGTIISYVVLKGSKKISDRVILFDEYDSSRHKYDPDYYIHNQVLPAVLRILEAFGYKEKDLEYQRMKQTGLGAWLKMGKK

SEQ ID NO: 431 - protein, 773 aa, unidentified
  REGION 1..773: note = Description of Unknown: Synthetic polypeptide
MILDTDYITENGKPVIRIFKKEKGEFKIEYDRNFEPYIYALLEDDESIEDIKKITGERHGKKVRIIRVEKVKKKFLGEPIEVWKLVFEHPQDYPAIRDAIRSHPAVREIFEYDIPFAKRYLIDKGLVPMEGGEELKLLAFAIATFYHEGDEFAEGEILMISYADESGAKVITWKKIDLPYVEVVSTEREAIKRFLQVLREKDPDVLLTYNGDNFDFAYIKKRCEKLGLKFTIGRDGSEPKIQRMGDRFAVEVKGRIHLDLAPVVRHTIRLPTYTLEAVYEAVFGKKKEKVYAEEIAEAWKSEEGLKRVAQYSMEDARATYELGREFFPMEVELAKLIGQSVWDVSRSSTGNLVEWYLLRVAYERNELAPNKPGGEEYQRRMRSDYIGGYVKEPEKGLWESIAYLDFRSSAGSIIVTHNVSPDTLEKECKNYDVAPIVGYRFCKDFKGFIPSILEDLIETRQKVKRKMKATIDPIEKKMLDYRQRALKILANSYYGYQGYPKARWYSKECAESVTAWGRHYIETTIKEAEKFGFKVLYADTDGFFATIPNEKPETIKSKAKKFLKHINEKLPGMLELEYEGFYLRGFFVTKKKYALIDEDGHITTRGLEVVRRDWSEIAKETQAKVLEVILREGSIEKAAGIVKKVVEDLANYRVPVEKLIIHEQITRELKRYKATGPHVAIAKRLQARGIKVKPGTIISYVVLKGSKKISDRVILFDEYDSSRHKYDPDYYIHNQVLPAVLRILEAFGYKEKDLEYQRMKQTGLGAWLKMGKK

SEQ ID NO: 432 - protein, 773 aa, unidentified
  REGION 1..773: note = Description of Unknown: Synthetic polypeptide
MILDTDYITENGKPVIRIFKKEKGEFKIEYDRNFEPYIYALLEDDESIEDIKKITGERHGKKVRIIRVEKVKKKFLGEPIEVWKLVFEHPQDYPAIRDAIRSHPAVREIFEYDIPFAKRYLIDKGLVPMEGGEELKLLAFAIATFYHEGDEFAEGEILMISYADESGAKVITWKKIDLPYVEVVSTEREAIKRFLQVLREKDPDVLLTYNGDNFDFAYIKKRCEKLGLKFTIGRDGSEPKIQRMGDRFAVEVKGRIHLDLAPVVRHTIRLPTYTLEAVYEAVFGKKKEKVYAEEIAEAWKSEEGLKRVAQYSMEDARATYELGREFFPMEVELAKLIGQSVWDVSRSSTGNLVEWYLLRVAYERNELAPNKPGGEEYQRRMRSSYIGGYVKEPEKGLWESIAYLDFRSSAGSIIVTHNVSPDTLEKECQNYDVAPIVGYRFCKDFKGFIPSILEDLIETRQKVKRKMKATIDPIEKKMLDYRQRALKILANSYYGYQGYPKARWYSKECAESVTAWGRHYIETTIKEAEKFGFKVLYADTDGFFATIPNEKPETIKSKAKKFLKHINEKLPGMLELEYEGFYLRGFFVTKKKYALIDEDGHITTRGLEVVRRDWSEIAKETQAKVLEVILREGSIEKAAGIVKKVVEDLANYRVPVEKLIIHEQITRELKRYKATGPHVAIAKRLQARGIKVKPGTIISYVVLKGSKKISDRVILFDEYDSSRHKYDPDYYIHNQVLPAVLRILEAFGYKEKDLEYQRMKQTGLGAWLKMGKK

SEQ ID NO: 433 - protein, 773 aa, unidentified
  REGION 1..773: note = Description of Unknown: Synthetic polypeptide
MILDTDYITENGKPVIRIFKKEKGEFKIEYDRNFEPYIYALLEDDESIEDIKKITGERHGKKVRIIRVEKVKKKFLGEPIEVWKLVFEHPQDYPAIRDAIRSHPAVREIFEYDIPFAKRYLIDKGLVPMEGGEELKLLAFAIATFYHEGDEFAEGEILMISYADESGAKVITWKKIDLPYVEVVSTEREAIKRFLQVLREKDPDVLLTYNGDNFDFAYIKKRCEKLGLKFTIGRDGSEPKIQRMGDRFAVEVKGRIHLDLAPVVRHTIRLPTYTLEAVYEAVFGKKKEKVYAEEIAEAWKSEEGLKRVAQYSMEDARATYELGREFFPMEVELAKLIGQSVWDVSRSSTGNLVEWYLLRVAYERNELAPNKPGGEEYQRRMRSSYIGGYVKEPEKGLWESIAYLDFRSSAGSIIVTHNVSPDTLEKECKNYDVAPIVGYRFCKDFKGFIPSILEDLIETRQKVKRKMKATIDPIEKKMLDYRQRALKILANSYYGYQGYPKARWYSKECATSVTAWGRHYIETTIKEAEKFGFKVLYADTDGFFATIPNEKPETIKSKAKKFLKHINEKLPGMLELEYEGFYLRGFFVTKKKYALIDEDGHITTRGLEVVRRDWSEIAKETQAKVLEVILREGSIEKAAGIVKKVVEDLANYRVPVEKLIIHEQITRELKRYKATGPHVAIAKRLQARGIKVKPGTIISYVVLKGSKKISDRVILFDEYDSSRHKYDPDYYIHNQVLPAVLRILEAFGYKEKDLEYQRMKQTGLGAWLKMGKK

SEQ ID NO: 434 - protein, 773 aa, unidentified
  REGION 1..773: note = Description of Unknown: Synthetic polypeptide
MILDTDYITENGKPVIRIFKKEKGEFKIEYDRNFEPYIYALLEDDESIEDIKKITGERHGKKVRIIRVEKVKKKFLGEPIEVWKLVFEHPQDVPAIRDAIRSHPAVREIFEYDIPFAKRYLIDKGLVPMEGGEELKLLAFNIATFYHEGDEFAEGEILMISYADESGAKVITWKKIDLPYVEVVSTEREAIKRFLQVLREKDPDVLLTYNGDNFDFAYIKKRCEKLGLKFTIGRDGSEPAIQRMGDRFAVEVKGRIHLDLAPVVRHTIRLPTYTLEAVYEAVFGKKKEKVYAEEIAEAWKSEEGLARVAQYSMEDARATYELGREFFPLEVELAKLIGQSVWDVSRSSTGNLVEWYLLRVAYERNELAPNKPGGEEYQRRMRSSYIGGYVKEPEKGLWESIAYLDFRSSAGSIIVTHNVSPDTLEKECKNYDVAPIVGYRFCKDFKGFIPSILEDLIETRQKVKRKMKATIDPIEKKMLDYRQRALKILANSYYGYQGYPKARWYSKECAESVTAWGRHYIETTIKEAEKFGFKVLYADTDGFFATIPNEKPETIKSKAKKFLKHINEKLPGMLELEYEGFYLRGFFVTKKKYALIDEDGHITTRGLEVVRRDWSEIAKETQAKVLEVILREGSIEKAAGIVKKVVEDLANYRVPVEKLIIHEQITRELKRYKATGPHVAIAKRLQARGIKVKPGTIISYVVLKGSKKISDRVILFDEYDSSRHKYDPDYYIHNQVLPAVLRILEAFGYKEKDLEYQRDKQTGLGAWLKMGKK

SEQ ID NO: 435 - protein, 773 aa, unidentified
  REGION 1..773: note = Description of Unknown: Synthetic polypeptide
MILDTDYITENGKPVIRIFKKEKGEFKIEYDRNFEPYIYALLEDDESIEDIKKITGERHGKKVRIIRVEKVKKKFLGEPIEVWKLVFEHPQDYPAIRDAIRSHPAVREIFEYDIPFAKRYLIDKGLVPMEGGEELKLLAFAIATFYHEGDEFAEGEILMISYADESGAKVITWKKIDLPYVEVVSTEREAIKRFLQVLREKDPDVLLTYNGDNFDFAYIKKRCEKLGLKFTIGRDGSEPKIQRMGDRFAVEVKGRIHLDLAPVVRHTIRLPTYTLEAVYEAVFGKKKEKVYAEEIAEAWKSEEGLKRVAQYSIEDARATYELGREFFPMEVELAKLIGQSVWDVSRSSTGNLVEWYLLRVAYERNELAPNKPGGEEYQRRMRSSYIGGYVKEPEKGLWESIAYLDFRSSAGSIIVTHNVSPDTLEKECKNYDVAPIVGYRFCKDFKGFIPSILEDLIETRQKVKRKMKATIDPIEKKMLDYRQRALKILANSYYGYQGYPKARWYSKECAESVTAWGRHYIETTIKEAEKFGFKVLYADTDGFFATIPNEKPETIKSKAKKFLKHINEKLPGMLELEYEGFYLRGFFVTKKKYALIDEDGHITTRGLEVVRRDWSEIAKETQAKVLEVILREGSIEKAAGIVKKVVEDLANYRVPVEKLIIHEQITRELKRYKATGPHVAIAKRLQARGIKVKPGTIISYVVLKGSKKISDRVILFDEYDSSRHKYDPDYYIHNQVLPAVLRILEAFGYKEKDLEYQRMKQTGLGAWLKMGKK

SEQ ID NO: 436 - protein, 773 aa, unidentified
  REGION 1..773: note = Description of Unknown: Synthetic polypeptide
MILDTDYITENGKPVIRIFKKEKGEFKIEYDRNFEPYIYALLEDDESIEDIKKITGERHGKKVRIIRVEKVKKKFLGEPIEVWKLVFEHPQDYPAIRDAIRSHPAVREIFEYDIPFAKRYLIDKGLVPMEGGEELKLLAFAINTFYHEGDEFAEGEILMISYADESGAKVITWKKIDLPYVEVVSTEREAIKRFLQVLREKDPDVLLTYNGDNFDFAYIKKRCEKLGLKFTIGRDGSEPKIQRMGDRFAVEVKGRIHLDLAPVVRHTIRLPTYTLEAVYEAVFGKKKEKVYAEEIAEAWKSEEGLKRVAQYSMEDARATYELGREFFPMEVELAKLIGQSVWDVSRSSTGNLVEWYLLRVAYERNELAPNKPGGEEYQRRMRSSYIGGYVKEPEKGLWESIAYLDFRSSAGSIIVTHNVSPDTLEKECKNYDVAPIVGYRFCKDFKGFIPSILEDLIETRQKVKRKMKATIDPIEKKMLDYRQRALKILANSYYGYQGYPKARWYSKECAESVTAWGRHYIETTIKEAEKFGFKVLYADTDGFFATIPNEKPETIKSKAKKFLKHINEKLPGMLELEYEGFYLRGFFVTKKKYALIDEDGHITTRGLEVVRRDWSEIAKETQAKVLEVILREGSIEKAAGIVKKVVEDLANYRVPVEKLIIHEQITRELKRYKATGPHVAIAKRLQARGIKVKPGTIISYVVLKGSKKISDRVILFDEYDSSRHKYDPDYYIHNQVLPAVLRILEAFGYKEKDLEYQRMKQTGLGAWLKMGKK

SEQ ID NO: 437 - protein, 773 aa, unidentified
  REGION 1..773: note = Description of Unknown: Synthetic polypeptide
MILDTDYITENGKPVIRIFKKEKGEFKIEYDRNFEPYIYALLEDDESIEDIKKITGERHGKKVRIIRVEKVKKKFLGEPIEVWKLVFERPQDFPAIRDAIRSHPAVREIFEYDIPFAKRYLIDKGLVPMEGGEELKLLAFNIATFYHEGDEFAEGEILMISYADESGAKVITWKKIDLPYVEVVSTEREAIKRFLQVLREKDPDVLLTYNGDNFDFAYIKKRCEKLGLKFTIGRDGSEPKIQRMGDRFAVEVKGRIHLDLAPVVRHTIRLPTYTLEAVYEAVFGKKKEKVYAEEIAEAWKSEEGLKRVAQYSMEDARATYELGREFFPLEVELAKLIGQSVWDVSRSSTGNLVEWYLLRVAYERNELAPNKPGGEEYQRRMRSSYIGGYVKEPEKGLWESIAYLDFRSSAGSIIVTHNVSPDTLEKECKNYDVAPIVGYRFCKDFKGFIPSILEDLIETRQKVKRKMKATIDPIEKKMLDYRQRALKILANSYYGYQGYPKARWYSKECAESVTAWGRHYIETTIKEAEKFGFKVLYADTDGFFATIPNEKPETIKSKAKKFLKHINEKLPGMLELEYEGFYLRGFFVTKKKYALIDEDGHITTRGLEVVRRDWSEIAKETQAKVLEVILREGSIEKAAGIVKKVVEDLANYRVPVEKLIIHEQITRELKRYKATGPHVAIAKRLQARGIKVKPGTIISYVVLKGSKKISDRVILFDEYDSSRHKYDPDYYIHNQVLPAVLRILEAFGYKEKDLEYQRMKQTGLGAWLKMGKK

SEQ ID NO: 438 - protein, 773 aa, unidentified
  REGION 1..773: note = Description of Unknown: Synthetic polypeptide
MILDTDYITENGKPVIRIFKKEKGEFKIEYDRNFEPYIYALLEDDESIEDIKKITGERHGKKVRIIRVEKVKKKFLGEPIEVWKLVFEHPQDYPAIRDAIRSHPAVREIFEYDIPFAKRYLIDKGLVPMEGGEELKLLAFAIATFYHEGDEFAEGEILMISYADESGAKVITWKKIDLPYVEVVSTEREAIKRFLQVLREKDPDVLLTYNGDNFDFAYIKKRCEKLGLKFTIGRDGSEPKIQRMGDRFAVEVKGRIHLDLAPVVRHTIRLPTYTLEAVYEAVFGKKKEKVYAEEIAEAWKSEEGLKRVAQYSMEDARATYELGREFFPMEVELAKLIGQSVWDVSRSSTGNLVEWYLLRVAYERNELAPNKPGGEEYQRRMRSSYIGGYVKEPEKGLWESIAYLDFRSSAGSIIVTHNVSPDTLEKECKNYDVAPIVGYRFCKDFKGFIPSILEDLIETRQKVKRKMKATIDPIEKKMLDYRQRALKILANSYYGYQGYPKARWYSKECAESVTAWGRHYIETTIKEAEKFGFKVLYADTDGFFATIPNEKPETIKSKAKKFLKHINEKLPGMLELEYEGFYLRGFFVTKKKYALIDEDGHITTRELEVVRRDWSEIAKETQAKVLEVILREGSIEKAAGIVKKVVEDLANYRVPVEKLIIHEQITRELKRYKATGPHVAIAKRLQARGIKVKPGTIISYVVLKGSKKISDRVILFDEYDSSRHKYDPDYYIHNQVLPAVLRILEAFGYKEKDLEYQRMKQTGLGAWLKMGKK

SEQ ID NO: 439 - protein, 773 aa, unidentified
  REGION 1..773: note = Description of Unknown: Synthetic polypeptide
MILDTDYITENGKPVIRIFKKEKGEFKIEYDRNFEPYIYALLEDDESIEDIKKITGERHGKKVRIIRVEKVKKKFLGEPIEVWKLVFEHPQDYPAIRDAIRSHPAVREIFEYDIPFAKRYLIDKGLVPMEGGEELKLLAFAIATFYHEGDEFAEGEILMISYADESGAKVITWKKIDLPYVEVVSTEREAIKRFLQVLREKDPDVLLTYNGDNFDFAYIKKRCEKLGLKFTIGRDGSEPKIQRMGDRFAVEVKGRIHLDLAPVVRHTIRLPTYTLEAVYEAVFGKKKEKVYAEEIAEAWKSEEGLKRVAQYSMEDARATYELGREFFPMEVELAKLIGQSVWDVSRSSTGNLVEWYLLRVAYERNELAPNKPGGEEYQRRMRSSYIGGYVKEPEKGLWESIAYLDFRSSAGSIIVTHNVSPDTLEKECKNYDVAPIVGYRFCKDFKGFIPSILEDLIETRQKVKRKMKATIDPIEKKMLDYRQRALKILANSYYGYQGYPKARWYSKECAESVTAWGRHYIETTIKEAEKFGFKVLYADTDGFFATIPNEKPETIKSKAKKFLKHINEKLPGMLELEYEGFYLRGFFVTKKKYALIDEDGHITTRGLEVVRRDWSEIAKETQAKVLEVILREGSIEKAAGIVKKVVEDLANYRVPVEKLIIHEQITRELKRYKATGPHVAIAKRLQARGIKVTPGTIISYVVLKGSKKISDRVILFDEYDSSRHKYDPDYYIHNQVLPAVLRILEAFGYKEKDLEYQRMKQTGLGAWLKMGKK

SEQ ID NO: 440 - protein, 773 aa, unidentified
  REGION 1..773: note = Description of Unknown: Synthetic polypeptide
MILDTDYITENGKPVIRIFKKEKGEFKIEYDRNFEPYIYALLEDDESIEDIKKITGERHGKKVRIIRVEKVKKKFLGEPIEVWKLVFEHPQDYPAIRDAIRSHPAVREIFEYDIPFAKRYLIDKGLVPMEGGEELKLLAFAIATFYHEGDEFAEGEILMISYADESGAKVITWKKIDLPYVEVVSTEREAIKRFLQVLREKDPDVLLTYNGDNFDFAYIKKRAEKLGLKLTIGRDGSEPKIQRMGDRFAVEVKGRIHLDLAPVVRHTIRLPTYTLEAVYEAVFGKKKEKVYAEEIAEAWKSEEGLKRVAQYSMEDARATYELGREFFPMEVELAKLIGQSVWDVSRSSTGNLVEWYLLRVAYERNELAPNKPGGEEYQRRMRSSYIGGYVKEPEKGLWESIAYLDFRSSAGSIIVTHNVSPDTLEKECKNYDVAPIVGYRFCKDFKGFIPSILEDLIETRQKVKRKMKATIDPIEKKMLDYRQRALKILANSYYGYQGYPKARWYSKECAESVTAWGRHYIETTIKEAEKFGFKVLYADTDGFFATIPNEKPETIKSKAKKFLKHINEKLPGMLELEYEGFYLRGFFVTKKKYALIDEDGHITTRGLEVVRRDWSEIAKETQAKVLEVILREGSIEKAAGIVKKVVEDLANYRVPVEKLIIHEQITRELKRYKATGPHVAIAKRLQARGIKVKPGTIISYVVLKGSKKISDRVILFDEYDSSRHKYDPDYYIHNQVLPAVLRILEAFGYKEKDLEYQRMKQTGLGAWLKMGKK

SEQ ID NO: 441 - protein, 772 aa, unidentified; identical to SEQ ID NO: 103
  REGION 1..772: note = Description of Unknown: Synthetic polypeptide

SEQ ID NO: 442 - protein, 773 aa, unidentified
  REGION 1..773: note = Description of Unknown: Synthetic polypeptide
MILDTDYITENGKPVIRIFKKEKGEFKIEYDRNFEPYIYALLEDDESIEDIKKITGERHGKKVRIIRVEKVKKKFLGEPIEVWKLVFEHPQRYPAIRDAIRSHPAVREIFEYDIPFAKRYLIDKGLVPMEGGEELKLLAFAIATFYHEGDEFAEGEILMISYADESGAKVITWKKIDLPYVEVVSTEREAIKRFLQVLREKDPDVLLTYNGDNFDFAYIKKRCEKLGLKFTIGRDGSEPKIQRMGDRFAVEVKGRIHLDLAPVVRHTIRLPTYTLEAVYEAVFGKKKEKVYAEEIAEAWKSEEGLKRVAQYSMEDARATYELGREFFPMEVELAKLIGQSVWDVSRSSTGNLVEWYLLRVAYERNELAPNKPGGEEYQRRMRSSYIGGYVKEPEKGLWESIAYLDFRSSAGSIIVTHNVSPDTLEKECKNYDVAPIVGYRFCKDFKGFIPSILEDLIETRQKVKRKMKATIDPIEKKMLDYRQRALKILANSYYGYQGYPKARWYSKECAESVTAWGRHYIETTIKEAEKFGFKVLYADTDGFFATIPNEKPETIKSKAKKFLKHINEKLPGMLELEYEGFYLRGFFVTKKKYALIDEDGHITTRGLEVVRRDWSEIAKETQAKVLEVILREGSIEKAAGIVKKVVEDLANYRVPVEKLIIHEQITRELKRYKATGPHVAIAKRLQARGIKVKPGTIISYVVLKGSKKISDRVILFDEYDSSRHKYDPDYYIHNQVLPAVLRILEAFGYKEKDLEYQRMKQTGLGAWLKMGKK

SEQ ID NO: 443 - protein, 757 aa, unidentified
  REGION 1..757: note = Description of Unknown: Synthetic polypeptide
MILDTDYITENGKPVIRIFKKEKGEFKIEYDRNFEPYIYALLEDDESIEDIKKITGERHGKKVRIIRVEKVKKKFLGEPIEVWKLVFEHPQDVPAIRDAIRSHPAVREIFEYDIPFAKRYLIDKGLVPMEGGEELKLLAFTIATFYHEGDEFAEGEILMISYADESGAKVITWKKIDLPYVEVVSTEREAIKRFLQVLREKDPDVLLTYNGDNFDFAYIKKRCEKLGLKFTIGRDGSEPKIQRMGDRFAVEVKGRIHLDLAPVVRHTIRLPTYTLEAVYEAVFGKKKEKVYAEEIAEAWKSEEGLKRVAQYSMEDARATYELGREFFPMEVELAKLIGQSVWDVSRSSTGNLVEWYLLRVAYERNELAPNKPGGEEYQRRMRSSYIGGYVKEPEKGLWESIAYLDFRSSAGSIIVTHNVSPDTLEKECKNYDVAPIVGYRFCKDFKGFIPSILEDLIETRQKVKRKMKATIDPIEKKMLDYRQRALKILANSYYGYQGYPKARWYSKECAESVTAWGRHYIETTIKEAEKFGFKVLYADTDGFFATIPNEKPETIKSKAKKFLKHINEKLPGMLELEYEGFYLRGFFVTKKKYALIDEDGHITTRGLEVVRRDWSEIAKETQAKVLEVILREGSIEKAAGIVKKVVEDLANYRVPVEKLIIHEQITRKLKDYKATGPHVAIAKRLQARGIKVKPGTIISYVVLKGSKKISDRVILFDEYDSSRHKYDPDYYIHNQVLPAVLRILEAFGYKEKDLEYQ

SEQ ID NO: 444 - protein, 773 aa, unidentified
  REGION 1..773: note = Description of Unknown: Synthetic polypeptide
MILDTDYITENGKPVIRIFKKEKGEFKIEYDRNFEPYIYALLEDDESIEDIKKITGERHGKKVRIIRVEKVKKKFLGEPIEVWKLVFEHPQDYPAIRDAIRSHPAVREIFEYDIPFAKRYLIDKGLVPMEGGEELKLLAFAIATFYHEGDEFAEGEILMISYADESGAKVITWKKIDLPYVEVVSTEREAIKRFLQVLREKDPDVLLTYNGDNFDFAYIKKRCEKLGLKFTIGRDGSEPKIQRMGDRFAVEVKGRIHLDLAPVVRHTIRLPTYTLEAVYEAVFGKKKEKVYAEEIAEAWKSEEGLKRVAQYSMEDARATYELGREFFPMEVELAKLIGQSVWDVSRSSTGNLVEWYLLRVAYERNELAPNKPGGEEYQRRMRSSYIGGYVKEPEKGLWESIAYLDFRSSAGSIIVTHNVSPDTLEKECKNYDVAPIVGYRFCKDFKGFIPSILEDLIETRQKVKRKMKATIDPIEKKMLDYRQRALKILANSYYGYQGYPKARWYSKECAESVTAWGRHYIETTIKEAEKFGFKVLYADTDGFFATIPNEKPETIKSRAKKFLKHINEKLPGMLELEYEGFYLRGFFVTKKKYALIDEDGHITTRGLEVVRRDWSEIAKETQAKVLEVILREGSIEKAAGIVKKVVEDLANYRVPVEKLIIHEQITRELKRYKATGPHVAIAKRLQARGIKVKPGTIISYVVLKGSKKISDRVILFDEYDSSRHKYDPDYYIHNQVLPAVLRILEAFGYKEKDLEYQRMKQTGLGAWLKMGKK

SEQ ID NO: 445 - protein, 757 aa, unidentified
  REGION 1..757: note = Description of Unknown: Synthetic polypeptide
MILDTDYITENGKPVIRIFKKEKGEFKIEYDRNFEPYIYALLEDDESIEDIKKITGERHGKKVRIIRVEKVKKKFLGEPIEVWKLVFEHPQDVPAIRDAIRSHPAVREIFEYDIPFAKRYLIDKGLVPMEGGEELKLLAFNIATFYHEGDEFAEGEILMISYADESGAKVITWKKIDLPYVEVVSTEREAIKRFLQVLREKDPDVLLTYNGDNFDFAYIKKRCEKLGLKFTIGRDGSEPKIQRMGDRFAVEVKGRIHLDLAPVVRHTIRLPTYTLEAVYEAVFGKKKEKVYAEEIAEAWKSEEGLKRVAQYSMEDARATYELGREFFPLEVELAKLIGQSVWDVSRSSTGNLVEWYLLRVAYERNELAPNKPGGEEYQRRMRSSYIGGYVKEPEKGLWESIAYLDFRSSAGSIIVTHNVSPDTLEKECKNYDVAPIVGYRFCKDFKGFIPSILEDLIETRQKVKRKMKATIDPIEKKMLDYRQRALKILANSYYGYQGYPKARWYSKECAESVTAWGRHYIETTIKEAEKFGFKVLYADTDGFFATIPNEKPETIKSKAKKFLKHINEKLPGMLELEYEGFYLRGFFVTKKKYALIDEDGHITTRGLEVVRRNWSEIAKETQAKVLEVILREGSIEKAAGIVKKVVEDLANYRVPVEKLIIHEQITRELKRYKATGPHVAIAKRLQARGIKVKPGTIISYVVLKGSKKISDRVILFDEYDSSRHKYDPDYYIHNQVLPAVLRILEAFGYKEKDLEYQ

SEQ ID NO: 446 - protein, 757 aa, unidentified
  REGION 1..757: note = Description of Unknown: Synthetic polypeptide
MILDTDYITENGKPVIRIFKKEKGEFKIEYDRNFEPYIYALLEDDESIEDIKKITGERHGKKVRIIRVEKVKKKFLGEPIEVWKLVFEHPQDVPAIRDAIRSHPAVREIFEYDIPFAKRYLIDKGLVPMEGGEELKLLAFAIATFYHEGDEFAEGEILMISYADESGAKVITWKKIDLPYVEVVSTEREAIKRFLQVLREKDPDVLLTYNGDNFDFAYIKKRAEKLGLKFTIGRDGSEPKIQRMGDRFAVEVKGRIHLDLAPVVRHTIRLPTYTLEAVYEAVFGKKKEKVYAEEIAEAWKSEEGLKRVAQYSMEDARATYELGREFFPLEVELAKLIGQSVWDVSRSSTGNLVEWYLLRVAYERNELAPNKPGGEEYQRRMRSSYIGGYVKEPEKGLWESIAYLDFRSSAGSIIVTHNVSPDTLEKECKNYDVAPIVGYRFCKDFKGFIPSILEDLIETRQKVKRKMKATIDPIEKKMLDYRQRALKILANSYYGYQGYPKARWYSKEAAESVTAWGRHYIETTIKEAEKFGFKVLYADTDGFFATIPNEKPETIKSKAKKFLKHINEKLPGMLELEYEGFYLRGFFVTKKKYALIDEDGHITTRGLEVVRRDWSEIAKETQAKVLEVILREGSIEKAAGIVKKVVEDLANYRVPVEKLIIHEQITRELKRYKATGPHVAIAKRLQARGIKVKPGTIISYVVLKGSKKISDRVILFDEYDSSRHKYDPDYYIHNQVLPAVLRILEAFGYKEKDLEYQ

SEQ ID NO: 447 - protein, 773 aa, unidentified
  REGION 1..773: note = Description of Unknown: Synthetic polypeptide
MILDTDYITENGKPVIRIFKKEKGEFKIEYDRNFEPYIYALLEDDESIEDIKKITGERHGKKVRIIRVEKVKKKFLGEPIEVWKLVFEHPQDVPAIRDAIRSHPAVREIFEYDIPFAKRYLIDKGLVPMEGGEELKLLAFNIATFYHEGDEFAEGEILMISYADESGAKVITWKKIDLPYVEVVSTEREAIKRFLQVLREKDPDVLLTYNGDNFDFAYIKKRCEKLGLKFTIGRDGSEPKIQRMGDRFAVEVKGRIHLDLAPVVRHTIRLPTYTLEAVYEAVFGKKKEKVYAEEIAEAWKSEEGLKRVAQYSMEDARATYELGREFFPLEVELAKLIGQSVWDVSRSSTGNLVEWYLLRVAYERNELAPNKPGGEEYQRRMRSSYIGGYVKEPEKGLWESIAYLDFRSSAGSIIVTHNVSPDTLEKECKNYDVAPIVGYRFCKDFKGFIPSILEDLIETRQKVKRKTKATIDPIEKKMLDYRQRALKILANSYYGYQGYPKARWYSKECAESVTAWGRHYIETTIKEAEKFGFKVLYADTDGFFATIPNEKPETIKSKAKKFLKHINEKLPGMLELEYEGFYLRGFFVTKKKYALIDEDGHITTRGLEVVRRDWSEIAKETQAKVLEVILREGSIEKAAGIVKKVVEDLANYRVPVEKLIIHEQITRELKRYKATGPHVAIAKRLQARGIKVKPGTIISYVVLKGSKKISDRVILFDEYDSSRHKYDPDYYIHNQVLPAVLRILEAFGYKEKDLEYQRMKQTGLGAWLKMGKK

SEQ ID NO: 448 - protein, 773 aa, unidentified
  REGION 1..773: note = Description of Unknown: Synthetic polypeptide
MILDTDYITENGKPVIRIFKKEKGEFKIEYDRNFEPYIYALLEDDESIEDIKKITGERHGKKVRIIRVEKVKKKFLGEPIEVWKLVFEHPQDYPAIRDAIRSHPAVREIFEYDIPFAKRYLIDKGLVPMEGGEELKLLAFAIATFYHEGDEFAEGEILMISYADESGAKVITWKKIDLPYVEVVSTEREAIKRFLQVLREKDPDVLLTYNGDNFDFAYIKKRCEKLGLKFTIGRDGSEPKIQRMGDRFAVEVKGRIHLDLAPVVRHTIRLPTYTLEAVYEAVFGKKKEKVYAEEIAEAWKSEEGLKRVAQYSMEDARATYELGREFFPMEVELAKLIGQSVWDVSRSSTGNLVEWYLLRVAYERNELAPNKPGGEEYQRRMRSSYIGGYVKEPEKGLWESIAYLDFRSSAGSIIVTHNRSPDTLEKECKNYDVAPIVGYRFCKDFKGFIPSILEDLIETRQKVKRKMKATIDPIEKKMLDYRQRALKILANSYYGYQGYPKARWYSKEAAESVTAWGRHYIETTIKEAEKFGFKVLYADTDGFFATIPNEKPETIKSKAKKFLKHINEKLPGMLELEYEGFYLRGFFVTKKKYALIDEDGHITTRGLEVVRRDWSEIAKETQAKVLEVILREGSIEKAAGIVKKVVEDLANYRVPVEKLIIHEQITRELKRYKATGPHVAIAKRLQARGIKVKPGTIISYVVLKGSKKISDRVILFDEYDSSRHKYDPDYYIHNQVLPAVLRILEAFGYKEKDLEYQRMKQTGLGAWLKMGKK

SEQ ID NO: 449 - protein, 773 aa, unidentified
  REGION 1..773: note = Description of Unknown: Synthetic polypeptide
MILDTDYITENGKPVIRIFKKEKGEFKIEYDRNFEPYIYALLEDDESIEDIKKITGERHGKKVRIIRVEKVKKKFLGEPIEVWKLVFEHPQDYPAIRDAIRSHPAVREIFEYDIPFAKRYLIDKGLVPMEGGEELKLLAFAIATFYHEGDEFAEGEILMISYADESGAKVITWKKIDLPYVEVVSTEREALKRFLQVLREKDPDVLLTYNGDNFDFAYIKKRLEKLGLKFTIGRDGSEPKIQRMGDRFAVEVKGRIHLDLAPVVRHTIRLPTYTLEAVYEAVFGKKKEKVYAEEIAEAWKSEEGLKRVAQYSMEDARATYELGREFFPMEVELAKLIGQSVWDVSRSSTGNLVEWYLLRVAYERNELAPNKPGGEEYQRRMRSSYIGGYVKEPEKGLWESIAYLDFRSSAGSIIVTHNVSPDTLEKECKNYDVAPIVGYRFCKDFKGFIPSILEDLIETRQKVKRKMKATIDPIEKKMLDYRQRALKILANSYYGYQGYPKARWYSKECAESVTAWGRHYIETTIKEAEKFGFKVLYADTDGFFATIPNEKPETIKSKAKKFLKHINEKLPGMLELEYEGFYLRGFFVTKKKYALIDEDGHITTRGLEVVRRDWSEIAKETQAKVLEVILREGSIEKAAGIVKKVVEDLANYRVPVEKLIIHEQITRELKRYKATGPHVAIAKRLQARGIKVKPGTIISYVVLKGSKKISDRVILFDEYDSSRHKYDPDYYIHNQVLPAVLRILEAFGYKEKDLEYQRMKQTGLGAWLKMGKK

SEQ ID NO: 450 - protein, 757 aa, unidentified
  REGION 1..757: note = Description of Unknown: Synthetic polypeptide
MILDTDYITENGKPVIRIFKKEKGEFKIEYDRNFEPYIYALLEDDESIEDIKKITGERHGKKVRIIRVEKVKKKFLGEPIEVWKLVFEHPQDVPAIRDAIRSHPAVREIFEYDIPFAKRYLIDKGLVPMEGGEELKLLAFAIATFYHEGDEFAEGEILMISYADESGAKVITWKKIDLPYVEVVSTEREAIKRFLQVLREKDPDVLLTYNGDNFDFAYIKKRCEKLGLKFTIGRDGSEPKIQRMGDRFAVEVKGRIHLDLAPVVRHTIRLPTYTLEAVYEAVFGKKKEKVYAEEIAEAWKSEEGLKRVAQYSMEDARATYELGREFFPMEVELAKLIGQSVWDVSRSSTGNLVEWYLLRVAYERNELAPNKPGGEEYQRRMRSSYIGGYVKEPEKGLWESIAYLDFRSSAGSIIVTHNVSPDTLEKECKNYDVAPIVGYRFCKDFKGFIPSILEDLIETRQKVKRKMKATIDPIEKKMLDYRQRALKILANSYYGYQGYPKARWYSKECAESVTAWGRHYIETTIKEAEKFGFKVLYADTDGFFATIPNEKPETIKSKAKKFLKHINEKLPGMLELEYEGFYLRGFFVTKKKYALIDEDGHITTRGLEVVRRDWSEIAKETQAKVLEVILREGSIEKAAGIVKKVVEDLANYRVPVEKLIIHEQITRKLKDYKATGPHVAIAKRLQARGIKVAPGTIISYVVLKGSKKISDRVILFDEYDSSRHKYDPDYYIHNQVLPAVLRILEAFGYKEKDLEYQ

SEQ ID NO: 451 - protein, 757 aa, unidentified
  REGION 1..757: note = Description of Unknown: Synthetic polypeptide
MILDTDYITENGKPVIRIFKKEKGEFKIEYDRNFEPYIYALLEDDESIEDIKKITGERHGKKVRIIRVEKVKKKFLGEPIEVWKLVFEHPQDVPAIRDAIRSHPAVREIFEYDIPFAKRYLIDKGLVPMEGGEELKLLAFAIATFYHEGDEFAEGEILMISYADESGAKVITWKKIDLPYVEVVSTEREAIKRFLQVLREKDPDVLLTYNGDNFDFAYIKKRCEKLGLKFTIGRDGSEPKIQRMGDRFAVEVKGRIHLDLAPVVRHTIRLPTYTLEAVYEAVFGKKKEKVYAEEIAEAWKSEEGLKRVAQYSMEDARATYELGREFFPLEVELAKLIGQSVWDVSRSSTGNLVEWYLLRVAYERNELAPNKPGGEEYQRRMRSSYIGGYVKEPEKGLWESIAYLDFRSSAGSIIVTHNVSPDTLEKECKNYDVAPIVGYRFCKDFKGFIPSILEDLIETRQKVKRKMKATIDPIEKKMLDYRQRALKILANSYYGYQGYPKARWYSKECAESVTAWGRHYIETTIKEAEKFGFKVLYADTDGFFATIPNEKPETIKSKAKKFLKHINEKLPGMLELEYEGFYLRGFFVTKKKYALIDEDGHITTRGLEVVRRKWSEIAKETQAKVLEVILREGSIEKAAGIVKKVVEDLANYRVPVEKLIIHEQITRELKRYKATGPHVAIAKRLQARGIKVKPGTIISYVVLKGSKKISDRVILFDEYDSSRHKYDPDYYIHNQVLPAVLRILEAFGYKEKDLEYQ

SEQ ID NO: 452 - protein, 773 aa, unidentified
  REGION 1..773: note = Description of Unknown: Synthetic polypeptide
MILDTDYITENGKPVIRIFKKEKGEFKIEYDRNFEPYIYALLEDDESIEDIKKITGERHGKKVRIIRVEKVKKKFLGEPIEVWKLVFEHPQDYPAIRDAIRSHPAVREIFEYDIPFAKRYLIDKGLVPMEGGEELKLLAFAIATFYHEGDEFAEGEILMISYADESGAKVITWKKIDLPYVEVVSTEREAIKRFLQVLREKDPDVLLTYNGDNFDFAYIKKRCEKLGLKFTIGRDGSEPKIQRMGDRFAVEVKGRIHLDLAPVVRHTIRLPTYTLEAVYEAVFGKKKEKVYAEEIAEAWKSEEGLKRVAQYSMEDARATYELGREFFPMEVELAKLIGQSVWDVSRSSTGNLVEWYLLRVAYERNELAPNKPGGEEYQRRMRSSYIGGYVKEPEKGLWESIAYLDFRSSAGSIIVTHNVSPDTLEKECKNYDVAPIVGYRFCKDFKGFIPSILEDLIETRQKVKRKEKATIDPIEKKMLDYRQRALKILANSYYGYQGYPKARWYSKECAESVTAWGRHYIETTIKEAEKFGFKVLYADTDGFFATIPNEKPETIKSKAKKFLKHINEKLPGMLELEYEGFYLRGFFVTKKKYALIDEDGHITTRGLEVVRRDWSEIAKETQAKVLEVILREGSIEKAAGIVKKVVEDLANYRVPVEKLIIHEQITRELKRYKATGPHVAIAKRLQARGIKVKPGTIISYVVLKGSKKISDRVILFDEYDSSRHKYDPDYYIHNQVLPAVLRILEAFGYKEKDLEYQRMKQTGLGAWLKMGKK

SEQ ID NO: 453 - protein, 773 aa, unidentified
  REGION 1..773: note = Description of Unknown: Synthetic polypeptide
MILDTDYITENGKPVIRIFKKEKGEFKIEYDRNFEPYIYALLEDDESIEDIKKITGERHGKKVRIIRVEKVKKKFLGEPIEVWKLVFEHPQDYPAIRDAIRSHPAVREIFEYDIPFAKRYLIDKGLVPMEGGEELKLLAFAIATFYHEGDEFAEGEILMISYADESGAKVITWKKIDLPYVEVVSTEREAIKRFLQVLREKDPDVLLTYNGDNFDFAYIKKRCEKLGLKFTIGRDGSEPKIQRMGDRFAVEVKGRIHLDLAPVVRHTIRLPTYTLEAVYEAVFGKKKEKVYAEEIAEAWKSEEGLKRVAQYSMEDARATYELGREFFPMEVELAKLIGQSVWDVSRSSTGNLVEWYLLRVAYERNELAPNKPGGEEYQRRMRSSYIGGYVKEPEKGLWESIAYLDFRSSAGSIIVTHNVSPDTLEKECKNYDVAPIVGYRFCKDFKGFIPSILEDLIETRQKVKRKMKATIDPIEKKMLDYRQRALKILANSYYGYQGYPKARWYSKECAESVTAWGRHYIETTIKEAEKFGFKVLYADTDGFFATIPNEKPETIKSKAKKFLKHINEKLPGMLELEYEGFYLRGFFVTKKKYALIDEDGHITTRGLEVVRRDWSEIAKETQAKVLEVILREGSIEKAAGIVKKVVEDLANYRVPVEKLIIHEQITRELKRYKATQPHVAIAKRLQARGIKVKPGTIISYVVLKGSKKISDRVILFDEYDSSRHKYDPDYYIHNQVLPAVLRILEAFGYKEKDLEYQRMKQTGLGAWLKMGKK

SEQ ID NO: 454 - protein, 773 aa, unidentified
  REGION 1..773: note = Description of Unknown: Synthetic polypeptide
MILDTDYITENGKPVIRIFKKEKGEFKIEYDRNFEPYIYALLEDDESIEDIKKITGERHGKKVRIIRVEKVKKKFLGEPIEVWKLVFEHPQDYPAIRDAIRSHPAVREIFEYDIPFAKRYLIDKGLVPMEGGEELKLLAFAIATFYHEGDEFAEGEILMISYADESGAKVITWKKIDLPYVEVVSTEREAIKRFLQVLREKDPDVLLTYNGDNFDFAYIKKRCEKLGLKFTIGRDGSEPKIQRMGDRFAVEVKGRIHLDLAPVVRHTIRLPTYTLEAVYEAVFGKKKEKVYAEEIAEAWKSEEGLKRVAQYSMEDARATYELGREFFPMEVELAKLIGQSVWDVSRSSTGNLVEWYLLRVAYERNELAPNKPGGEEYQRRMRSSYIGGYVKEPEKGLWESIAYLDFRSSAGSIIVTHNISPDTLEKECKNYDVAPIVGYRFCKDFKGFIPSILEDLIETRQKVKRKMKATIDPIEKKMLDYRQRALKILANSYYGYFGYPKARWYLKEIAESVTAWGRHYIETTIKEAEKFGFKVLYADTDGFFATIPNEKPETIKSKAKKFLKHINEKLPGMLELEYEGFYLRGFFVTKKKYALIDEDGHITTRGLEVVRRDWSEIAKETQAKVLEVILREGSIEKAAGIVKKVVEDLANYRVPVEKLIIHEQITRELKRYKATGPHVAIAKRLQARGIKVKPGTIISYVVLKGSKKISDRVILFDEYDSSRHKYDPDYYIHNQVLPAVLRILEAFGYKEKDLEYQRMKQTGLGAWLKMGKK

SEQ ID NO: 455 - protein, 773 aa, unidentified
  REGION 1..773: note = Description of Unknown: Synthetic polypeptide
MILDTDYITENGKPVIRIFKKEKGEFKIEYDRNFEPYIYALLEDDESIEDIKKITGERHGKKVRIIRVEKVKKKFLGEPIEVWKLVFEHPQDVPAIRDAIRSHPAVREIFEYDIPFAKRYLIDKGLVPMEGGEELKLLAFAIATFYHEGDEFAEGEILMISYADESGAKVITWKKIDLPYVEVVSTEREAIKRFLQVLREKDPDVLLTYNGDNFDFAYIKKRCEKLGLKFTIGRDGSEPKIQRMGDRFAVEVKGRIHLDLAPVVRHTIRLPTYTLEAVYEAVFGKKKEKVYAEEIAEAWKSEEGLKRVAQYSMEDARATYELGREFFPMEVELAKLIGQSVWDVSRSSTGNLVEWYLLRVAYERNELAPNKPGGEEYQRRMRSSYIGGYVKEPEKGLWESIAYLDFRSSAGSIIVTHNVSPDTLEKECKNYDVAPIVGYRFCKDFKGFIPSILEDLIETRQKVKRKMKATIDPIEKKMLDYRQRALKILANSYYGYQGYPKARWYRKECAESVTAWGRHYIETTIKEAEKFGFKVLYADTDGFFATIPNEKPETIKSKAKKFLKHINEKLPGMLELEYEGFYLRGFFVTKKKYALIDEDGHITTRGLEVVRRDWSEIAKETQAKVLEVILREGSIEKAAGIVKKVVEDLANYRVPVEKLIIHEQITRELKDYKATGPHVAIAKRLQARGIKVKPGTIISYVVLKGSKKISDRVILFDEYDSSRHKYDPDYYIHNQVLPAVLRILEAFGYKEKDLEYQRMKQTGLGAWLKMGKK

SEQ ID NO: 456 - protein, 773 aa, unidentified
  REGION 1..773: note = Description of Unknown: Synthetic polypeptide
MILDTDYITENGKPVIRIFKKEKGEFKIEYDRNFEPYIYALLEDDESIEDIKKITGERHGKKVRIIRVEKVKKKFLGEPIEVWKLVFEHPQDVPAIRDAIRSHPAVREIFEYDIPFAKRYLIDKGLVPMEGGEELKLLAFNIATFYHEGDEFAEGEILMISYADESGAKVITWKKIDLPYVEVVSTEREAIKRFLQVLREKDPDVLLTYNGDNFDFAYIKKRCEKLGLKFTIGRDGSEPQIQRMGDRFAVEVKGRIHLDLAPVVRHTIRLPTYTLEAVYEAVFGKKKEKVYAEEIAEAWKSEEGLKRVAQYSVEDARATYELGREFFPLEVELAKLIGQSVWDVSRSSTGNLVEWYLLRVAYERNELAPNKPGGEEYQRRMRSSYIGGYVKEPEKGLWESIAYLDFRSSAGSIIVTHNVSPDTLEKECKNYDVAPIVGYRFCKDFKGFIPSILEDLIETRQKVKRKMKATIDPIEKKMLDYRQRALKILANSYYGYQGYPKARWYSKECAESVTAWGRHYIETTIKEAEKFGFKVLYADTDGFFATIPNEKPETIKSKAKKFLKHINEKLPGMLELEYEGFYLRGFFVTKKKYALIDEDGHITTRGLEVVRRDWSEIAKETQAKVLEVILREGSIEKAAGIVKKVVEDLANYRVPVEKLIIHEQITRELKRYKATGPHVAIAKRLQARGIKVKPGTIISYVVLKGSKKISDRVILFDEYDSSRHKYDPDYYIHNQVLPAVLRILEAFGYKEKDLEYQRMKQTGLGAWLKMGKK

SEQ ID NO: 457 - protein, 773 aa, unidentified
  REGION 1..773: note = Description of Unknown: Synthetic polypeptide
MILDTDYITENGKPVIRIFKKEKGEFKIEYDRNFEPYIYALLEDDESIEDIKKITGERHGKKVRIIRVEKVKKKFLGEPIEVWKLVFEHPQDYPAIRDAIRSHPAVREIFEYDIPFAKRYLIDKGLVPMEGGEELKLLAFAIATFYHEGDEFAEGEILMISYADESGAKVITWKKIDLPYVEVVSTEREAIKRFLQVLREKDPDVLLTYNGDNFDFAYIKKRCEKLGLKFTIGRDGSEPKIQRMGDRFAVEVKGRIHLDLAPVVRHTIRLPTYTLEAVYEAVFGKKKEKVYAEEIAEAWKSEEGLKRVAQYSMEDARATYELGREFFPMEVELAKLIGQSVWDVSRSSTGNLVEWYLLRVAYERNELAPNKPGGEEYQRRMRSSYIGGYVKEPEKGLWESIAYLDFRSSAGSIIVTHNVSPDTLEKECKNYDVAPIVGYRFCKDFKGFIPSILEDLIETRQKVKRKMKATIDPIEKKMLDYRQRALKILANSYYGYQGYPKARWYSKECAESVTAWGRHYIETTIKEAEKFGFKVLYADTDGFFATIPNEKPETIKSKAKKFLKHINEKLPGMLELEYEGFYLRGFFVTKKKYALIDEDGHITTRGLEVVRRDWSEIAKETQAKVLEVILREGSIEKAAGIVKKVVEDLANYRVPVEKLIIHEQITRELKRYKATGPHVAIAKRLQARGIKVKPGTIISYVVLKGSKKISDRVILFDEYDSSRHKYDPDYYIHNQVLPAVLRILEAFGYKEKDLEYQRMKQTGLDAWLKMGKK

SEQ ID NO: 458 - protein, 773 aa, unidentified
  REGION 1..773: note = Description of Unknown: Synthetic polypeptide
MILDTDYITENGKPVIRIFKKEKGEFKIEYDRNFEPYIYALLEDDESIEDIKKITGERHGKKVRIIRVEKVKKKFLGEPIEVWKLVFEHPQDYPAIRDAIRSHPAVREIFEYDIPFAKRYLIDKGLVPMEGGEELKLLAFAIATFYHEGDEFAEGEILMISYADESGAKVITWKKIDLPYVEVVSTEREAIKRFLQVLREKDPDVLLTYNGDNFDFAYIKKRCEKLGLKFTIGRDGSEPKIQRMGDRFAVEVKGRIHLDLAPVVRHTIRLPTYTLEAVYEAVFGKKKEKVYAEEIAEAWKSEEGLKRVAQYSMEDARATYELGREFFPMEVELAKLIGQSVWDVSRSSTGNLVEWYLLRVAYERNELAPNKPGGEEYQRRMRSSYIGGYVKEPEKGLWESIAYLDFRSSAGSIIVTHNVSPDTLEKECKNYDVAPIVGYRFCKDFKGFIPSILEDLIETRQKVKRKMKATIDPIEKKMLDYRQRALKILANSYYGYQGYPKARWYSKECAESVTAWGRHYIETTIKEAEKFGFKVLYADTDGFFATIPNEKPETIKSKAKKFLKHINEKLPGMLELEYEGFYLRGFFVTKKKYALIDEDGHITTRGLEVVRRDWSEIAKETQAKVLEVILREGSIEKAAGIVKKVVEDLANYRVPVEKLIIHEQITRELKRYKATGPHVAIAKRLQARGIKVEPGTIISYVVLKGSKKISDRVILFDEYDSSRHKYDPDYYIHNQVLPAVLRILEAFGYKEKDLEYQRMKQTGLGAWLKMGKK

SEQ ID NO: 459 - protein, 773 aa, unidentified
  REGION 1..773: note = Description of Unknown: Synthetic polypeptide
MILDTDYITENGKPVIRIFKKEKGEFKIEYDRNFEPYIYALLEDDESIEDIKKITGERHGKKVRIIRVEKVKKKFLGEPIEVWKLVFEHPQDYPAIRDAIRSHPAVREIFEYDIPFAKRYLIDKGLVPMEGGEELKLLAFAIATFYHEGDEFAEGEILMISYADESGAKVITWKKIDLPYVEVVSTEREAIKRFLQVLREKDPDVLLTYNGDNFDFAYIKKRCEKLGLKFTIGRDGSEPKIQRMGDRFAVEVKGRIHLDLAPVVRHTIRLPTYTLEAVYEAVFGKKKEKVYAEEIAEAWKSEEGLKRVAQYSMEDARATYELGREFFPMEVELAKLIGQSVWDVSRSSTGNLVEWYLLRVAYERNELAPNKPGGEEYQRRMRSAYIGGYVKEPEKGLWESIAYLDFRSSAGSIIVTHNVSPDTLEKECKNYDVAPIVGYRFCKDFKGFIPSILEDLIETRQKVKRKMKATIDPIEKKMLDYRQRALKILANSYYGYQGYPKARWYSKECAESVTAWGRHYIETTIKEAEKFGFKVLYADTDGFFATIPNEKPETIKSKAKKFLKHINEKLPGMLELEYEGFYLRGFFVTKKKYALIDEDGHITTRGLEVVRRDWSEIAKETQAKVLEVILREGSIEKAAGIVKKVVEDLANYRVPVEKLIIHEQITRELKRYKATGPHVAIAKRLQARGIKVKPGTIISYVVLKGSKKISDRVILFDEYDSSRHKYDPDYYIHNQVLPAVLRILEAFGYKEKDLEYQRMKQTGLGAWLKMGKK

SEQ ID NO: 460 - protein, 773 aa, unidentified
  REGION 1..773: note = Description of Unknown: Synthetic polypeptide
MILDTDYITENGKPVIRIFKKEKGEFKIEYDRNFEPYIYALLEDDESIEDIKKITGERHGKKVRIIRVEKVKKKFLGEPIEVWKLVFEHPQDYPAIRDAIRSHPAVREIFEYDIPFAKRYLIDKGLVPMEGGEELKLLAFAIATFYHEGDEFAEGEILMISYADESGAKVITWKKIDLPYVEVVSTEREAIKRFLQVLREKDPDVLLTYNGDNFDFAYIKKRCEKLGLKFTIGRDGSEPKIQRMGDRFAVEVKGRIHLDLAPVVRHTIRLPTYTLEAVYEAVFGKKKEKVYAEEIAEAWKSEEGLKRVAQYSMEDARATYELGREFFPMEVELAKLIGQSVWDVSRSSTGNLVEWYLLRVAYERNELAPNKPGGEEYQRRMRSSYIGGYVKEPEKGLWESIAYLDFRSSAGSIIVTHNVSPDTLEKECKNYDVAPIVGYRFCKDFKGFIPSILEDLIETRQKVKRKMKATIDPIEKKMLDYRQRALKILANSYYGYQGYPKARWYSKECAESVTAWGRHYIETTIKEAEKFGFKVLYADTDGFFATIPNEKPETIKSKAKKFLKHINEKLPGMLELEYEGFYLRGFFVTKKKYALIDEDGHITTRGLEVVRRDWSEIAKETQAKVLEVILREGSIEKAAGIVKKVVEDLANYRVPVEKLIIHEQITRELKRYKATGPHVAIAKRLQARGQKVKPGTIISYVVLKGSKKISDRVILFDEYDSSRHKYDPDYYIHNQVLPAVLRILEAFGYKEKDLEYQRMKQTGLGAWLKMGKK

SEQ ID NO: 461 - protein, 773 aa, unidentified
  REGION 1..773: note = Description of Unknown: Synthetic polypeptide
MILDTDYITENGKPVIRIFKKEKGEFKIEYDRNFEPYIYALLEDDESIEDIKKITGERHGKKVRIIRVEKVKKKFLGEPIEVWKLVFEHPQDYPAIRDAIRSHPAVREIFEYDIPFAKRYLIDKGLVPMEGGEELKLLAFAIATFYHEGDEFAEGEILMISYADESGAKVITWKKIDLPYVEVVSTEREAIKRFLQVLREKDPDVLLTYNGDNFDFAYIKKRCEKLGLKFTIGRDGSEPRIQRMGDRFAVEVKGRIHLDLAPVVRHTIRLPTYTLEAVYEAVFGKKKEKVYAEEIAEAWKSEEGLKRVAQYSMEDARATYELGREFFPMEVELAKLIGQSVWDVSRSSTGNLVEWYLLRVAYERNELAPNRPGGEEYQRRMRSSYIGGYVKEPEKGLWESIAYLDFRSSAGSIIVTHNVSPDTLEKECKNYDVAPIVGYRFCKDFKGFIPSILEDLIETRQKVKRKMKATIDPIEKKMLDYRQRALKILANSYYGYQGYPKARWYSKECAESVTAWGRHYIETTIKEAEKFGFKVLYADTDGFFATIPNEKPETIKSKAKKFLKHINEKLPGMLELEYEGFYLRGFFVTKKKYALIDEDGHITTRGLEVVRRDWSEIAKETQAKVLEVILREGSIEKAAGIVKKVVEDLANYRVPVEKLIIHEQITRELKRYKATGPHVAIAKRLQARGIKVKPGTIISYVVLKGSKKISDRVILFDEYDSSRHKYDPDYYIHNQVLPAVLRILEAFGYKEKDLEYQRMKQTGLGAWLKMGKK

SEQ ID NO: 462 - protein, 773 aa, unidentified
  REGION 1..773: note = Description of Unknown: Synthetic polypeptide
MILDTDYITENGKPVIRIFKKEKGEFKIEYDRNFEPYIYALLEDDESIEDIKKITGERHGKKVRIIRVEKVKKKFLGEPIEVWKLVFEVPQDVPAIQDAIRSHPAVREIFEYDIPFAKRYLIDKGLVPMEGGEELKLLAFNIATFYHEGDEFAEGEILMISYADESGAKVITWKKIDLPYVEVVSTEREAIKRFLQVLREKDPDVLLTYNGDNFDFAYIKKRCEKLGLKFTIGRDGSEPKIQRMGDRFAVEVKGRIHLDLAPVVRHTIRLPTYTLEAVYEAVFGKKKEKVYAEEIAEAWKSEEGLKRVAQYSMEDARATYELGREFFPLEVELAKLIGQSVWDVSRSSTGNLVEWYLLRVAYERNELAPNKPGGEEYQRRMRSSYIGGYVKEPEKGLWESIAYLDFRSSAGSIIVTHNVSPDTLEKECKNYDVAPIVGYRFCKDFKGFIPSILEDLIETRQKVKRKMKATIDPIEKKMLDYRQRALKILANSYYGYQGYPKARWYSKECAESVTAWGRHYIETTIKEAEKFGFKVLYADTDGFFATIPNEKPETIKSKAKKFLKHINEKLPGMLELEYEGFYLRGFFVTKKKYALIDEDGHITTRGLEVVRRDWSEIAKETQAKVLEVILREGSIEKAAGIVKKVVEDLANYRVPVEKLIIHEQITRELKRYKATGPHVAIAKRLQARGIKVKPGTIISYVVLKGSKKISDRVILFDEYDSSRHKYDPDYYIHNQVLPAVLRILEAFGYKEKDLEYQRMKQTGLGAWLKMGKK

SEQ ID NO: 463 - protein, 773 aa, unidentified
  REGION 1..773: note = Description of Unknown: Synthetic polypeptide
LILDTDYITENGKPVIRIFKKEKGEFKIEYDRNFEPYIYALLEDDESIEDIKKITGERHGKKVRIIRVEKVKKKFLGEPIEVWKLVFEHPQDYPAIRDAIRSHPAVREIFEYDIPFAKRYLIDKGLVPMEGGEELKLLAFAIATFYHEGDEFAEGEILMISYADESGAKVITWKKIDLPYVEVVSTEREAIKRFLQVLREKDPDVLLTYNGDNFDFAYIKKRCEKLGLKFTIGRDGSEPKIQRMGDRFAVEVKGRIHLDLAPVVRHTIRLPTYTLEAVYEAVFGKKKEKVYAEEIAEAWKSEEGLKRVAQYSMEDARATYELGREFFPMEVELAKLIGQSVWDVSRSSTGNLVEWYLLRVAYERNELAPNKPGGEEYQRRMRSSYIGGYVKEPEKGLWESIAYLDFRSSAGSIIVTHNVSPDTLEKECKNYDVAPIVGYRFCKDFKGFIPSILEDLIETRQKVKRKMKATIDPIEKKMLDYRQRALKILANSYYGYQGYPKARWYSKECAESVTAWGRHYIETTIKEAEKFGFKVLYADTDGFFATIPNEKPETIKSKAKKFLKHINEKLPGMLELEYEGFYLRGFFVTKKKYALIDEDGHITTRGLEVVRRDWSEIAKETQAKVLEVILREGSIEKAAGIVKKVVEDLANYRVPVEKLIIHEQITRELKRYKATGPHVAIAKRLQARGIKVKPGTIISYVVLKGSKKISDRVILFDEYDSSRHKYDPDYYIHNQVLPAVLRILEAFGYKEKDLEYQRMKQTGLGAWLKMGKK

SEQ ID NO: 464 - protein, 773 aa, unidentified
  REGION 1..773: note = Description of Unknown: Synthetic polypeptide
MILDTDYITENGKPVIRIFKKEKGEFKIEYDRNFEPYIYALLEDDESIEDIKKITGERHGKKVRIIRVEKVKKKFLGEPIEVWKLVFEHPQDVPAIRDAIRSHPAVREIFEYDIPFAKRYLIDKGLVPMEGGEELKLLAFNIATFYHEGDEFAEGEILMISYADESGAKVITWKKIDLPYVEVVSTEREAIKRFLQVLREKDPDVLLTYNGDNFDFAYIKKRCEKLGLKFTIGRDGSEPKIQRMGDRFAVEVKGRIHLDLAPVVRHTIRLPTYTLEAVYEAVFGKKKEKVYAEEIAEAWKSEEGLKRVAQYSMEDARATYELGREFFPLEVELAKLIGQSVWDVSRSSTGNLVEWYLLRVAYERNELAPNKPGGEEYQRRMRSSYIGGYVKEPEKGLWESIAYLDFRSSAGSIIVTHNVSPDTLEKECKNYDVAPIVGYRFCKDFKGFIPSILEDLIETRQKVKRKMKATIDPIEKKMLDYRQRALKILANSYYGYQGYPKARWYSKECAESVTAWGRHYIETTIKEAEKFGFKVLYADTDGFFATIPNEKPETIKSKAKKFLKHINEKLPGMLELEYEGFYLRGFFVTKKAYALIDEDGHITTRGLEVVRRDWSEIAKETQAKVLEVILREGSIEKAAGIVKKVVEDLANYRVPVEKLIIHEQITRELKRYKATGPHVAIAKRLQARGIKVKPGTIISYVVLKGSKKISDRVILFDEYDSSRHKYDPDYYIHNQVLPAVLRILEAFGYKEKDLEYQRMKQTGLGAWLKMGKK

SEQ ID NO: 465 - protein, 773 aa, unidentified
  REGION 1..773: note = Description of Unknown: Synthetic polypeptide
MILDTDYITENGKPVIRIFKKEKGEFKIEYDRNFEPYIYALLEDDESIEDIKKITGERHGKKVRIIRVEKVKKKFLGEPIEVWKLVFEHPQDVPAIRDAIRSHPAVREIFEYDIPFAKRYLIDKGLVPMEGGEELKLLAFNIATFYHEGDEFAEGEILMISYADESGAKVITWKKIDLPYVEVVSTEREAIKRFLQVLREKDPDVLLTYNGDNFDFAYIKKRCEKLGLKFTIGRDGSEPKEQRMGDRFAVEVKGRIHLDLAPVVRHTIRLPTYTLEAVYEAVFGKKKEKVYAEEIAEAWKSEEGLKRVAQYSMEDARATYELGREFFPLEVELAKLIGQSVWDVSRSSTGNLVEWYLLRVAYERNELAPNKPGGEEYQRRMRSSYIGGYVKEPEKGLWESIAYLDFRSSAGSIIVTHNVSPDTLEKECKNYDVAPIVGYRFCKDFKGFIPSILEDLIETRQKVKRKMKATIDPIEKKMLDYRQRALKILANSYYGYQGYPKARWYSKECAESVTAWGRHYIETTIKEAEKFGFKVLYADTDGFFATIPNEKPETIKSKAKKFLKHINEKLPGMLELEYEGFYLRGFFVTKKKYALIDEDGHITTRGLEVVRRDWSEIAKETQAKVLEVILREGSIEKAAGIVKKVVEDLANYRVPVEKLIIHEQITRELKRYKATGPHVAIAKRLQARGIKVKPGTIISYVVLKGSKKISDRVILFDEYDSSRHKYDPDYYIHNQVLPAVLRILEAFGYKEKDLEYQRMKQTGLGAWLKMGKK

SEQ ID NO: 466 - protein, 773 aa, unidentified
  REGION 1..773: note = Description of Unknown: Synthetic polypeptide
MILDTDYITENGKPVIRIFKKEKGEFKIEYDRNFEPYIYALLEDDESIEDIKKITGERHGKKVRIIRVEKVKKKFLGEPIEVWKLVFEHPQDVPAIRDAIRSHPAVREIFEYDIPFAKRYLIDKGLVPMEGGEELKLLAFNIATFEHEGDEFAEGEILMISYADESGAKVITWKKIDLPYVEVVSTEREAIKRFLQVLREKDPDVLLTYNGDNFDFAYIKKRCEKLGLKFTIGRDGSEPKIQRMGDRFAVEVKGRIHLDLAPVVRHTIRLPTYTLEAVYEAVFGKKKEKVYAEEIAEAWKSEEGLKRVAQYSMEDARATYELGREFFPLEVELAKLIGQSVWDVSRSSTGNLVEWYLLRVAYERNELAPNKPGGEEYQRRMRSSYIGGYVKEPEKGLWESIAYLDFRSSAGSIIVTHNVSPDTLEKECKNYDVAPIVGYRFCKDFKGFIPSILEDLIETRQKVKRKMKATIDPIEKKMLDYRQRALKILANSYYGYQGYPKARWYSKECAESVTAWGRHYIETTIKEAEKFGFKVLYADTDGFFATIPNEKPETIKSKAKKFLKHINEKLPGMLELEYEGFYLRGFFVTKKKYALIDEDGHITTRGLEVVRRDWSEIAKETQAKVLEVILREGSIEKAAGIVKKVVEDLANYRVPVEKLIIHEQITRELKRYKATGPHVAIAKRLQARGIKVKPGTIISYVVLKGSKKISDRVILFDEYDSSRHKYDPDYYIHNQVLPAVLRILEAFGYKEKDLEYQRMKQTGLGAWLKMGKK

SEQ ID NO: 467 - protein, 773 aa, unidentified
  REGION 1..773: note = Description of Unknown: Synthetic polypeptide
MILDTDYITENGKPVIRIFKKEKGEFKIEYDRNFEPYIYALLEDDESIEDIKKITGERHGKKVRIIRVEKVKKKFLGEPIEVWKLVFEHPQDYPAIRDAIRSHPAVREIFEYDIPFAKRYLIDKGLVPMEGGEELKLLAFAIATFYHEGDEFAEGEILMISYADESGAKVITWKKIDLPYVEVVSTEREAIKRFLQVLREKDPDVLLTYNGDNFDFAYIKKRCEKLGLKFTIGRDGSEPKIQRMGDRFAVEVKGRIHLDLAPVVRHTIRLPTYTLEAVYEAVFGKKKEKVYAEEIAEAWKSEEGLKRVAQYSMEDARATYELGREFFPMEVELAKLIGQSVWDVSRSSTGNLVEWYLLRVAYERNELAPNKPGGEEYQRRMRSSYIGGYVKEPEKGLWESIAYLDFRSSAGSIIVTHNVSPDTLEKECKNYDVAPIVGYRFCKDFKGFIPSILEDLIETRQKVKRKMKATIDPIEKKMLDYRQRALKILANSYYGYQGYPKARWYSKECAESVTAWGRHYIETTIKEAEKFGFKVLYADTDNFFATIPNEKPETIKSKAKKFLKHINEKLPGMLELEYEGFYLRGFFVTKKKYALIDEDGHITTRGLEVVRRDWSEIAKETQAKVLEVILREGSIEKAAGIVKKVVEDLANYRVPVEKLIIHEQITRELKRYKATGPHVAIAKRLQARGIKVKPGTIISYVVLKGSKKISDRVILFDEYDSSRHKYDPDYYIHNQVLPAVLRILEAFGYKEKDLEYQRMKQTGLGAWLKMGKK

SEQ ID NO: 468 - protein, 773 aa, unidentified
  REGION 1..773: note = Description of Unknown: Synthetic polypeptide
MILDTDYISENGKPVIRIFKKEKGEFKIEYDRNFEPYIYALLEDDESIEDIKKITGERHGKKVRIIRVEKVKKKFLGEPIEVWKLVFEHPQDYPAIRDAIRSHPAVREIFEYDIPFAKRYLIDKGLVPMEGGEELKLLAFAIATFYHEGDEFAEGEILMISYADESGAKVITWKKIDLPYVEVVSTEREAIKRFLQVLREKDPDVLLTYNGDNFDFAYIKKRCEKLGLKFTIGRDGSEPKIQRMGDRFAVEVKGRIHLDLAPVVRHTIRLPTYTLEAVYEAVFGKKKEKVYAEEIAEAWKSEEGLKRVAQYSMEDARATYELGREFFPMEVELAKLIGQSVWDVSRSSTGNLVEWYLLRVAYERNELAPNKPGGEEYQRRMRSSYIGGYVKEPEKGLWESIAYLDFRSSAGSIIVTHNVSPDTLEKECKNYDVAPIVGYRFCKDFKGFIPSILEDLIETRQKVKRKMKATIDPIEKKMLDYRQRALKILANSYYGYQGYPKARWYSKECAESVTAWGRHYIETTIKEAEKFGFKVLYADTDGFFATIPNEKPETIKSKAKKFLKHINEKLPGMLELEYEGFYLRGFFVTKKKYALIDEDGHITTRGLEVVRRDWSEIAKETQAKVLEVILREGSIEKAAGIVKKVVEDLANYRVPVEKLIIHEQITRELKRYKATGPHVAIAKRLQARGIKVKPGTIISYVVLKGSKKISDRVILFDEYDSSRHKYDPDYYIHNQVLPAVLRILEAFGYKEKDLEYQRMKQTGLGAWLKMGKK

SEQ ID NO: 469 - protein, 773 aa, unidentified
  REGION 1..773: note = Description of Unknown: Synthetic polypeptide
MILDTDYITENGKPVIRIFKKEKGEFKIEYDRNFEPYIYALLEDDESIEDIKKITGERHGKKVRIIRVEKVKKKFLGEPIEVWKLVFEHPQDVPAIRDAIRSHPAVREIFEYDIPFAKRYLIDKGLVPMEGGEELKLLAFNIATFTHEGDEFAEGEILMISYADESGAKVITWKKIDLPYVEVVSTEREAIKRFLQVLREKDPDVLLTYNGDNFDFAYIKKRCEKLGLKFTIGRDGSEPKIQRMGDRFAVEVKGRIHLDLAPVVRHTIRLPTYTLEAVYEAVFGKKKEKVYAEEIAEAWKSEEGLKRVAQYSMEDARATYELGREFFPLEVELAKLIGQSVWDVSRSSTGNLVEWYLLRVAYERNELAPNKPGGEEYQRRMRSSYIGGYVKEPEKGLWESIAYLDFRSSAGSIIVTHNVSPDTLEKECKNYDVAPIVGYRFCKDFKGFIPSILEDLIETRQKVKRKMKATIDPIEKKMLDYRQRALKILANSYYGYQGYPKARWYSKECAESVTAWGRHYIETTIKEAEKFGFKVLYADTDGFFATIPNEKPETIKSKAKKFLKHINEKLPGMLELEYEGFYLRGFFVTKKKYALIDEDGHITTRGLEVVRRDWSEIAKETQAKVLEVILREGSIEKAAGIVKKVVEDLANYRVPVEKLIIHEQITRELKRYKATGPHVAIAKRLQARGIKVKPGTIISYVVLKGSKKISDRVILFDEYDSSRHKYDPDYYIHNQVLPAVLRILEAFGYKEKDLEYQRMKQTGLGAWLKMGKK

SEQ ID NO: 470 - protein, 773 aa, unidentified
  REGION 1..773: note = Description of Unknown: Synthetic polypeptide
MILDTDYITENGKPVIRIFKKEKGEFKIEYDRNFEPYIYALLEDDESIEDIKKITGERHGKKVRIIRVEKVKKKFLGEPIEVWKLVFEHPQDYPAIRDAIRSHPAVREIFEYDIPFAKRYLIDKGLVPMEGGEELKLLAFAIATFYHEGDEFAEGEILMISYADESGAKVITWKKIDLPYVEVVSTEREAIKRFLQVLREKDPDVLLTYNGDNFDFAYIKKRCEKLGLKFTIGRDGSEPKIQRMGDRFAVEVKGRIHLDLAPVVRHTIRLPTYTLEAVYEAVFGKKKEKVYAEEIAEAWKSEEGLQRVAQYSMEDARATYELGREFFPMEVELAKLIGQSVWDVSRSSTGNLVEWYLLRVAYERNELAPNKPGGEEYQRRMRSSYIGGYVKEPEKGLWESIAYLDFRSSAGSIIVTHNVSPDTLEKECKNYDVAPIVGYRFCKDFKGFIPSILEDLIETRQKVKRKMKATIDPIEKKMLDYRQRALKILANSYYGYQGYPKARWYSKECAESVTAWGRHYIETTIKEAEKFGFKVLYADTDGFFATIPNEKPETIKSKAKKFLKHINEKLPGMLELEYEGFYLRGFFVTKKKYALIDEDGHITTRGLEVVRRDWSEIAKETQAKVLEVILREGSIEKAAGIVKKVVEDLANYRVPVEKLIIHEQITRELKRYKATGPHVAIAKRLQARGIKVKPGTIISYVVLKGSKKISDRVILFDEYDSSRHKYDPDYYIHNQVLPAVLRILEAFGYKEKDLEYQRMKQTGLGAWLKMGKK

SEQ ID NO: 471 - protein, 773 aa, unidentified
  REGION 1..773: note = Description of Unknown: Synthetic polypeptide
MILDTDYITENGKPVIRIFKKEKGEFKIEYDRNFEPYIYALLEDDESIEDIKKITGERHGKKVRIIRVEKVKKKFLGEPIEVWKLVFEHPQDVPAIRDAIRSHPAVREIFEYDIPFAKRYLIDKGLVPMEGGEELKLLAFNIATFYHEGDEFAEGEILMISYADESGAKVITWKKIDLPYVEVVSTEREAIKRFLQVLREKDPDVLLTYNGDNFDFAYIKKRCEKLGLKFTIGRDGSEPKIQRMGDRFAVEVKGRIHLDLAPVVRHTIRLPTYVLEAVYEAVFGKKKEKVYAEEIAEAWKSEEGLKRVAQYSMEDARATYELGREFFPLEVELAKLIGQSVWDVSRSSTGNLVEWYLLRVAYERNELAPNKPGGEEYQRRMRSSYIGGYVKEPEKGLWESIAYLDFRSSAGSIIVTHNVSPDTLEKECKNYDVAPIVGYRFCKDFKGFIPSILEDLIETRQKVKRKMKATIDPIEKKMLDYRQRALKILANSYYGYQGYPKARWYSKECAESVTAWGRHYIETTIKEAEKFGFKVLYADTDGFFATIPNEKPETIKSKAKKFLKHINEKLPGMLELEYEGFYLRGFFVTKKKYALIDEDGHITTRGLEVVRRDWSEIAKETQAKVLEVILREGSIEKAAGIVKKVVEDLANYRVPVEKLIIHEQITRELKRYKATGPHVAIAKRLQARGIKVKPGTIISYVVLKGSKKISDRVILFDEYDSSRHKYDPDYYIHNQVLPAVLRILEAFGYKEKDLEYQRMKQTGLGAWLKMGKK

SEQ ID NO: 472 - protein, 773 aa, unidentified
  REGION 1..773: note = Description of Unknown: Synthetic polypeptide
MILDTDYITENGKPVIRIFKKEKGEFKIEYDRNFEPYIYALLEDDESIEDIKKITGERHGKKVRIIRVEKVKKKFLGEPIEVWKLVFEHPQDVPAIRDAIRSHPAVREIFEYDIPFAKRYLIDKGLVPMEGGEELKLLAFNIATFYHEGDEFAEGEILMISYADESGAKVITWKKIDLPYVEVVSTEREAIKRFLQVLREKDPDVLLTYNGDNFDFAYIKKRCEKLGLKFTIGRDGSEPKIQRMGDRFAVEVKGRIHLDLAPVVRHTIRLPTYTLEAVYEAVFGKKKEKVYAEEIAEAWKSEEGLKRVAQYSMEDARATYELGREFFPLEVELAKLIGQSVWDVSRSSTGNLVEWYLLRVAYERNELAPNKPGGEEYQRRMRSSYIGGYVKEPEKGLWESIAYLDFRSSAGSIIVTHNISPDTLEKECKNYDVAPIVGYRFCKDFKGFIPSILEDLIETRQKVKRKMKATIDPIEKKMLDYRQRALKILANSYYGYQGYPKARWYSKECAESVTAWGRHYIETTIKEAEKFGFKVLYADTDGFFATIPNEKPETIKSKAKKFLKHINEKLPGMLELEYEGFYLRGFFVTKKKYALIDEDGHITTRGLEVVRRDWSEIAKETQAKVLEVILREGSIEKAAGIVKKVVEDLANYRVPVEKLIIHEFITRELKRYKATGLHVAIAKRLQARGIKVKPGTIISYVVLKGSKKISDRVILFDEYDSSRHKYDPDYYIHNQVLPAVLRILEAFGYKEKDLEYQRMKQTGLGAWLKMGKK

SEQ ID NO: 473 - protein, 757 aa, unidentified
  REGION 1..757: note = Description of Unknown: Synthetic polypeptide
MILDTDYITENGKPVIRIFKKEKGEFKIEYDRNFEPYIYALLEDDESIEDIKKITGERHGKKVRIIRVEKVKKKFLGEPIEVWKLVFEHPQDVPAIRDAIRSHPAVREIFEYDIPFAKRYLIDKGLVPMEGGEELKLLAFAIATFYHEGDEFAEGEILMISYADESGAKVITWKKIDLPYVEVVSTEREAIKRFLQVLREKDPDVLLTYNGDNFDFAYIKKRCEKLGLKFTIGRDGSEPKIQRMGDRFAVEVKGRIHLDLAPVVRHTIRLPTYTLEAVYEAVFGKKKEKVYAEEIAEAWKSEEGLKRVAQYSMEDARATYELGREFFPMEVELAKLIGQSVWDVSRSSTGNLVEWYLLRVAYERNELAPNKPGGEEYQRRMRSSYIGGYVKEPEKGLWESIAYLDFRSSAGSIIVTHNVSPDTLEKECKNYDVAPIVGYRFCKDFKGFIPSILEDLIETRQKVKRKMKATIDPIEKKMLDYRQRALKILANSYYGYQGYPKARWYSKECAESVTAWGRHYIETTIKEAEKFGFKVLYADTDGFFATIPNEKPETIKSKAKKFLKHINEKLPGMLELEYEGFYLRGFFVTKKKYALIDEDGHITTRGLEVVRRDWSEIAKETQAKVLEVILREGSIEKAAGIVKKVVEDLANYRVPVEKLIIHEQITRKLKDYKATGPHVAIAKRLQARGIRVKPGTIISYVVLKGSKKISDRVILFDEYDSSRHKYDPDYYIHNQVLPAVLRILEAFGYKEKDLEYQ

SEQ ID NO: 474 - protein, 773 aa, unidentified
  REGION 1..773: note = Description of Unknown: Synthetic polypeptide
MILDTDYITENGKPVIRIFKKEKGEFKIEYDRNFEPYIYALLEDDESIEDIKKITGERHGKKVRIIRVEKVKKKFLGEPIEVWKLVFEHPQDYPAIRDAIRSHPAVREIFEYDIPFAKRYLIDKGLVPMEGGEELKLLAFAIATFYHEGDEFAEGEILMISYADESGAKVITWKKIDLPYVEVVSTEREAIKRFLQVLREKDPDVLLTYNGDNFDFAYIKKRCEKLGLKFTIGRDGSEPKIQRMGDRFAVEVKGRIHLDLAPVVRHTIRLPTYTLEAVYEAVFGKKKEKVYAEEIAEAWKSEEGLKRVAQYSMEDARATYELGREFFPMEVELAKLIGQSVWDVSRSSTGNLVEWYLLRVAYERNELAPNNPGGEEYQRRMRSSYIGGYVKEPEKGLWESIAYLDFRSSAGSIIVTHNVSPDTLEKECKNYDVAPIVGYRFCKDFKGFIPSILEDLIETRQKVKRKMKATIDPIEKKMLDYRQRALKILANSYYGYQGYPKARWYSKECAESVTAWGRHYIETTIKEAEKFGFKVLYADTDGFFATIPNEKPETIKSKAKKFLKHINEKLPGMLELEYEGFYLRGFFVTKKKYALIDEDGHITTRGLEVVRRDWSEIAKETQAKVLEVILREGSIEKAAGIVKKVVEDLANYRVPVEKLIIHEQITRELKRYKATGPHVAIAKRLQARGIKVKPGTIISYVVLKGSKKISDRVILFDEYDSSRHKYDPDYYIHNQVLPAVLRILEAFGYKEKDLEYQRMKQTGLGAWLKMGKK

SEQ ID NO: 475 - protein, 773 aa, unidentified
  REGION 1..773: note = Description of Unknown: Synthetic polypeptide
MILDTDYITENGKPVIRIFKKEKGEFKIEYDRNFEPYIYALLEDDESIEDIKKITGERHGKKVRIIRVEKVKKKFLGEPIEVWKLVFEHPQDYPAIRDAIRSHPAVREIFEYDIPFAKRYLIDKGLVPMEGGEELKLLAFAIATFYHEGDEFAEGEILMISYADESGAKVITWKKIDLPYVEVVSTEREAIKRFLQVLREKDPDVLLTYNGDNFDFAYIKKRCEKLGLKFTIGRDGSEPKIQRMGDRFAVEVKGRIHLDLAPVVRHTIRLPTYTLEAVYEAVFGKKKEKVYAEEIAEAWKSEEGLKRVAQYSMEDARATYELGREFFPMEVELAKLIGQSVWDVSRSSTGNLVEWYLLRVAYERNELAPNKPGGEEYQRRMRSSYIGGYVKEPEKGLWESIAYLDFRSSAGSIIVTHNVSPDTLEKECKNYDVAPIVGYRFCKDFKGFIPSILEDLIETRQKVKRKMKATIDPIEKKMLDYRQRALKILANSYYGYQGYPKARWYSKECAESVTAWGRHYIETTIKEAEKFGFKVLYADTDGFFATIPNEKPETIKSKAKKFLKHINEKLPGMLELEYEGFYLRGFFVTKKKYALIDEDGHITTRGLEVVRRDWSEIAKETQAKVLEVILREGSIEKAAGIVKKVVEDLANYRVPVEKLIIHEQITRELKRYKATGPHVAIAKRLQARGIKVKPGTIISYVVLKGSKKISDRVILFDEYDSSRHKYDPDYYIHRQVLRAVLRILEAFGYKEKDLEYQRMKQTGLGAWLKMGKK

SEQ ID NO: 476 - protein, 773 aa, unidentified
  REGION 1..773: note = Description of Unknown: Synthetic polypeptide
IILDTDYITENGKPVIRIFKKEKGEFKIEYDRNFEPYIYALLEDDESIEDIKKITGERHGKKVRIIRVEKVKKKFLGEPIEVWKLVFEHPQDYPAIRDAIRSHPAVREIFEYDIPFAKRYLIDKGLVPFEGGEELKLLAFAIATFYHEGDEFAEGEILMISYADESGAKVITWKKIDLPYVEVVSTEREAIKRFLQVLREKDPDVLLTYNGDNFDFAYIKKRCEKLGLKFTIGRDGSEPKIQRMGDRFAVEVKGRIHLDLAPVVRHTIRLPTYTLEAVYEAVFGKKKEKVYAEEIAEAWKSEEGLKRVAQYSMEDARATYELGREFFPMEVELAKLIGQSVWDVSRSSTGNLVEWYLLRVAYERNELAPNKPGGEEYQRRMRSSYIGGYVKEPEKGLWESIAYLDFRSSAGSIIVTHNVSPDTLEKECKNYDVAPIVGYRFCKDFKGFIPSILEDLIETRQKVKRKMKATIDPIEKKMLDYRQRALKILANSYYGYQGYPKARWYSKECAESVTAWGRHYIETTIKEAEKFGFKVLYADTDGFFATIPNEKPETIKSKAKKFLKHINEKLPGMLELEYEGFYLRGFFVTKKKYALIDEDGHITTRGLEVVRRDWSEIAKETQAKVLEVILREGSIEKAAGIVKKVVEDLANYRVPVEKLIIHEQITRELKRYKATGPHVAIAKRLQARGIKVKPGTIISYVVLKGSKKISDRVILFDEYDSSRHKYDPDYYIHNQVLPAVLRILEAFGYKEKDLEYQRMKQTGLGAWLKMGKK

SEQ ID NO: 477 - protein, 773 aa, unidentified
  REGION 1..773: note = Description of Unknown: Synthetic polypeptide
MILDTDYITENGKPVIRIFKKEKGEFKIEYDRNFEPYIYALLEDDESIEDIKKITGERHGKKVRIIRVEKVKKKFLGEPIEVWKLVFEHPQDVPAIRDAIRSHPAVREIFEYDIPFAKRYLIDKGLVPMEGGEELKLLAFNIATFYHEGDEFAEGEILMISYADESGAKVITWKKIDLPYVEVVSTEREAIKRFLQVLREKDPDVLLTYNGDNFDFAYIKKRCEKLGLKFTIGRDGSEPKIQRMGDRFAVEVKGRIHLDLAPVVRHTIRLPTYTLEAVYEAVFGKKKEKVYAEEIAEAWKSEEGLKRVAQYSMEDARATYELGREFFPLEVELAKLIGQSVWDVSRSSTGNLVEWYLLRVAYERNELAPNKPGGEEYQRRMRSSYIGGYVKEPEKGLWESIAYLDFRSSAGSIIVTHNISPDTLEKECKNYDVAPIVGYRFCKDFKGFIPSILEDLIETRQKVKRKMKATIDPIEKKMLDYRQRALKILANSYYGYQGYPKARWYSKECAESVTAWGRHYIETTIKEAEKFGFKVLYADTDGFFATIPNEKPETIKSKAKKFLKHINEKLPGMLELEYEGFYLRGFFVTKKKYALIDEDGHITTRGLEVVRRDWSEIAKETQAKVLEVILREGSIEKAAGIVKKVVEDLANYRVPVEKLIIHEQITRELKRYKATGPHVAIAKRLQARGIKVKPGTIISYVVLKGSKKISDRVILFDEYDSSRHKYDPDYYIHNQVLPAVLRILEAFGYKEKDLEYQRMKQTGLGAWLKMGKK

SEQ ID NO: 478 - protein, 757 aa, unidentified
  REGION 1..757: note = Description of Unknown: Synthetic polypeptide
MILDTDYITENGKPVIRIFKKEKGEFKIEYDRNFEPYIYALLEDDESIEDIKKITGERHGKKVRIIRVEKVKKKFLGEPIEVWKLVFEHPQDVPAIRDAIRSHPAVREIFEYDIPFAKRYLIDKGLVPMEGGEELKLLAFTIATFYHEGDEFAEGEILMISYADESGAKVITWKKIDLPYVEVVSTEREAIKRFLQVLREKDPDVLLTYNGDNFDFAYIKKRCEKLGLKFTIGRDGSEPKIQRMGDRFAVEVKGRIHLDLAPVVRHTIRLPTYTLEAVYEAVFGKKKEKVYAEEIAEAWKSEEGLKRVAQYSMEDARATYELGREFFPLEVELAKLIGQSVWDVSRSSTGNLVEWYLLRVAYERNELAPNKPGGEEYQRRMRSSYIGGYVKEPEKGLWESIAYLDFRSSAGSIIVTHNVSPDTLEKECKNYDVAPIVGYRFCKDFKGFIPSILEDLIETRQKVKRKMKATIDPIEKKMLDYRQRALKILANSYYGYQGYPKARWYSKECAESVTAWGRHYIETTIKEAEKFGFKVLYADTDGFFATIPNEKPETIKSKAKKFLKHINEKLPGMLELEYEGFYLRGFFVTKKKYALIDEDGHITTRGLEVVRRDWSEIAKETQAKVLEVILREGSIEKAAGIVKKVVEDLANYRVPVEKLIIHEQITRELKRYKATGPHVAIAKRLQARGIKVKPGTIISYVVLKGSKKISDRVILFDEYDSSRHKYDPDYYIHNQVLPAVLRILEAFGYKEKDLEYQ

SEQ ID NO: 479 - protein, 757 aa, unidentified
  REGION 1..757: note = Description of Unknown: Synthetic polypeptide
MILDTDYITENGKPVIRIFKKEKGEFKIEYDRNFEPYIYALLEDDESIEDIKKITGERHGKKVRIIRVEKVKKKFLGEPIEVWKLVFEHPQDVPAIRDAIRSHPAVREIFEYDIPFAKRYLIDKGLVPMEGGEELKLLAFAIATFYHEGDEFAEGEILMISYADESGAKVITWKKIDLPYVEVVSTEREAIKRFLQVLREKDPDVLLTYNGDNFDFAYIKKRCEKLGLKFTIGRDGSEPKIQRMGDRFAVEVKGRIHLDLAPVVRHTIRLPTYTLEAVYEAVFGKKKEKVYAEEIAEAWKSEEGLKRVAQYSMEDARATYELGREFFPMEVELAKLIGQSVWDVSRSSTGNLVEWYLLRVAYERNELAPNKPGGEEYQRRMRSSYIGGYVKEPEKGLWESIAYLDFRSSAGSIIVTHNVSPDTLEKECKNYDVAPIVGYRFCKDFKGFIPSILEDLIETRQKVKRKMKATIDPIEKKMLDYRQRALKILANSYYGYQGYPKARWYSKECAESVTAWGRHYIETTIKEAEKFGFKVLYADTDGFFATIPNEKPETIKSKAKKFLKHINEKLPGMLELEYEGFYLRGFFVTKKKYALIDEDGHITTRGLEVVRRDWSEIAKETQAKVLEVILREGSIEKAAGIVKKVVEDLANYRVPVEKLIIHEQITRYLKDYKATGPHVAIAKRLQARGIKVRPGTIISYVVLKGSKKISDRVILFDEYDSSRHKYDPDYYIHNQVLPAVLRILEAFGYKEKDLEYQ

SEQ ID NO: 480 - protein, 773 aa, unidentified
  REGION 1..773: note = Description of Unknown: Synthetic polypeptide
MILDTDYITENGKPVIRIFKKEKGEFKIEYDRNFEPYIYALLEDDESIEDIKKITGERHGKKVRIIRVEKVKKKFLGEPIEVWKLVFEHPQDYPAIRDAIRSHPAVREIFEYDIPFAKRYLIDKGLVPMEGGEELKLLAFAIATFYHEGDEFAEGEILMISYADESGAKVITWKKIDLPYVEVVSTEREAIKRFLQVLREKDPDVLLTYNGDNFDFAYIKKRCEKLGLKFTIGRDGSEPKIQRMGDRFAVEVKGRIHLDLAPVVRHTIRLPTYTLEAVYEAVFGKKKEKVYAEEIAEAWKSEEGLKRVAQYSMEDARATYELGREFFPMEVELAKLIGQSVWDVSRSSTGNLVEWYLLRVAYERNELAPNKPGGEEYQRRMRSSYIGGYVKEPEKGLWESIAYLDFRSSAGSIIVTHNVSPDTLEKECNNYDVAPIVGYRFCKDFKGFIPSILEDLIETRQKVKRKMKATIDPIEKKMLDYRQRALKILANSYYGYQGYPKARWYSKECAESVTAWGRHYIETTIKEAEKFGFKVLYADTDGFFATIPNEKPETIKSKAKKFLKHINEKLPGMLELEYEGFYLRGFFVTKKKYALIDEDGHITTRGLEVVRRDWSEIAKETQAKVLEVILREGSIEKAAGIVKKVVEDLANYRVPVEKLIIHEQITRELKRYKATGPHVAIAKRLQARGIKVKPGTIISYVVLKGSKKISDRVILFDEYDSSRHKYDPDYYIHNQVLPAVLRILEAFGYKEKDLEYQRMKQTGLGAWLKMGKK

SEQ ID NO: 481 - protein, 773 aa, unidentified
  REGION 1..773: note = Description of Unknown: Synthetic polypeptide
MILDTDYITENGKPVIRIFKKEKGEFKIEYDRNFEPYIYALLEDDESIEDIKKITGERHGKKVRIIRVEKVKKKFLGEPIEVWKLVFEHPQDYPAIRDAIRSHPAVREIFEYDIPFAKRYLIDKGLVPMEGGEELKLLAFAIATFYHEGDEFAEGEILMISYADESGAKVITWKKIDLPYVEVVSTEREAIKRFLQVLREKDPDVLLTYNGDNFDFAYIKKRCEKLGLKFTIGRDGSEPKIQRMGDRFAVEVKGRIHLDLAPVVRHTIRLPTYTLEAVYEAVFGKKKEKVYAEEIAEAWKSEEGLKRVAQYSMEDARATYELGREFFPMEVELAKLIGQSVWDVSRSSTGNLVEWYLLRVAYERNELAPNKPGGEEYQRRMRSSYIGGYVKEPEKGLWESIAYLDFRSSAGSIIVTHNVSPDTLEKECKNYDVAPIVGYRFCKDFKGFIPSILEDLIETRQKVKRKMKATIDPIEKKMLDYRQRALKILANSYYGYQGYPKARWYSKECAESVTAWGRHYIETTIKEAEKFGFKVLYADTDTFFATIPNEKPETIKSKAKKFLKHINEKLPGMLELEYEGFYLRGFFVTKKKYALIDEDGHITTRGLEVVRRDWSEIAKETQAKVLEVILREGSIEKAAGIVKKVVEDLANYRVPVEKLIIHEQITRELKRYKATGPHVAIAKRLQARGIKVKPGTIISYVVLKGSKKISDRVILFDEYDSSRHKYDPDYYIHNQVLPAVLRILEAFGYKEKDLEYQRMKQTGLGAWLKMGKK

SEQ ID NO: 482 - protein, 773 aa, unidentified
  REGION 1..773: note = Description of Unknown: Synthetic polypeptide
MILDTDYITENGKPVIRIFKKEKGEFKIEYDRNFEPYIYALLEDDESIEDIKKITGERHGKKVRIIRVEKVKKKFLGEPIEVWKLVFEHPQDVPAIRDAIRSHPAVREIFEYDIPFAKRYLIDKGLVPMEGGEELKLLAFNIATFYHEGDEFAEGEILMISYADESGAKVITWKKIDLPYVEVVSTEREAIKRFLQVLREKDPDVLLTYNGDNFDFAYIKKRCEKLGLKFTIGRDGSEPKIQRMGDRFAVEVKGRIHLDLAPVVRHTIRLPTYTLEAVYEAVFGKKKEKVYAEEIAEAWKSEEGLKRVAQYSMEDARATYELGREFFPLEVELAKLIGQSVWDVSRSSTGNLVEWYLLRVAYERNELAPNKPGGEEYQRRMRSSYIGGYVKEPEKGLWESIAYLDFRSSAGSIIVTHNVSPDTLEKECKNYDVAPIVGYRFCKDFKGFIPSILEDLIETRQKVKRKMKATIDPIEKKMLDYRQRALKILANSYYGYQGYPKARWYSKECAESVTAWGRHYIETTIKEAEKFGFKVLYADTDGFFATIPNEKPETIKSKAKKFLKHINEKLPGMLELEYEGFYLRGFFVTKKKYALIDEDGHITTRGLEVVRRDWSEIAKETQAKVLEVILREGSIEKAAGIVKKVVEDLANYRVPVEKLIIHEFITRELKRYKATGLHVAIAKRLQARGIKVKPGTIISYVVLKGSKKISDRVILFDEYDSSRHKYDPDYYIHNQVLPAVLRILEAFGYKEKDLEYQRMKQTGLGAWLKMGKK

SEQ ID NO: 483 - protein, 773 aa, unidentified
  REGION 1..773: note = Description of Unknown: Synthetic polypeptide
MILDTDYITENGKPVIRIFKKEKGEFKIEYDRNFEPYIYALLEDDESIEDIKKITGERHGKKVRIIRVEKVKKKFLGEPIEVWKLVFEHPQDVPAIRDAIRSHPAVREIFEYDIPFAKRYLIDKGLVPMEGGEELKLLAFNIATFYHEGDEFAEGEILMISYADESGAKVITWKKIDLPYVEVVSTEREAIKRFLQVLREKDPDVLLTYNGDNFDFAYIKKRCEKLGLKFTIGRDGSEPKIQRMGDRFAVEVKGRIHLDLAPVVRHTIRLPTYTLEAVYEAVFGKKKEKVYAEEIAEAWKSEEGLKRVAQYSMEDARATYELGREFFPLEVELAKLIGQSVWDVSRSSTGNLVEWYLLRVAYERNELAPNKPGGEEYQRRMRSSYIGGYVKEPEKGLWESIAYLDFRSSAGSIIVTHNVSPDTLEKECKNYDVAPIVGYRFCKDFKGFIPSILEDLIETRQKVKRKMKATIDPIEKKMLDYRQRALKILANSYYGYQGYPKARWYSKECAESVTAWGRHYIETTIKEAEKFGFKVLYADTDGFFATIPNEKPETIKSKAKKFLKHINEKLPGMLELEYEGFYLRGFFVTKKWYALIDEDGHITTRGLEVVRRDWSEIAKETQAKVLEVILREGSIEKAAGIVKKVVEDLANYRVPVEKLIIHEQITRELKRYKATGPHVAIAKRLQARGIKVKPGTIISYVVLKGSKKISDRVILFDEYDSSRHKYDPDYYIHNQVLPAVLRILEAFGYKEKDLEYQRMKQTGLGAWLKMGKK

SEQ ID NO: 484 - protein, 773 aa, unidentified
  REGION 1..773: note = Description of Unknown: Synthetic polypeptide
MILDTDYITENGKPVIRIFKKEKGEFKIEYDRNFEPYIYALLEDDESIEDIKKITGERHGKKVRIIRVEKVKKKFLGEPIEVWKLVFEHPQDYPAIRDAIRSHPAVREIFEYDIPFAKRYLIDKGLVPMEGGEELKLLAFAIATFYHEGDEFAEGEILMISYADESGAKVITWKKIDLPYVEVVSTEREAIKRFLQVLREKDPDVLLTYNGDNFDFAYIKKRCEKLGLKFTIGRDGSEPKIQRMGDRFAVEVKGRIHLDLAPVVRHTIRLPTYTLEAVYEAVFGKKKEKVYAEEIAEAWKSEEGLKRVAQYSMEDARATYELGREFFPMEVELAKLIGQSVWDVSRSSTGNLVEWYLLRVAYERNELAPNKPGGEEYQRRMRSSYIGGYVKEPEKGLWESIAYLDFRSSAGSIIVTHNVSPDTLEKECKNYDVAPIVGYRFCKDFKGFIPSILEDLIETRQKVKRKMKATIDPIEKKMLDYRQLALKILANSYYGYQGYPKARWYSKECAESVTAWGRHYIETTIKEAEKFGFKVLYADTDGFFATIPNEKPETIKSKAKKFLKHINEKLPGMLELEYEGFYLRGFFVTKKKYALIDEDGHITTRGLEVVRRDWSEIAKETQAKVLEVILREGSIEKAAGIVKKVVEDLANYRVPVEKLIIHEQITRELKRYKATGPHVAIAKRLQARGIKVKPGTIISYVVLKGSKKISDRVILFDEYDSSRHKYDPDYYIHNQVLPAVLRILEAFGYKEKDLEYQRMKQTGLGAWLKMGKK

SEQ ID NO: 485 - protein, 773 aa, unidentified
  REGION 1..773: note = Description of Unknown: Synthetic polypeptide
MILDTDYITENGKPVIRIFKKEKGEFKIEYDRNFEPYIYALLEDDESIEDIKKITGERHGKKVRIIRVEKVKKKFLGEPIEVWKLVFEHPQDYPAIRDAIRSHPAVREIFEYDIPFAKRYLIDKGLVPMEGGEELKLLAFAIATFYHEGDEFAEGEILMISYADESGAKVITWKKIDLPYVEVVSTEREAIKRFLQVLREKDPDVLLTYNGDNFDFAYIKKRCEKLGLKFTIGRDGSEPKIQRMGDRFAVEVKGRIHLDLAPVVRHTIRLPTYTLEAVYEAVFGKKKEKVYAEEIAEAWKSEEGLKRVAQYSMEDARATYELGREFFPMEVELAKLIGQSVWDVSRSSTGNLVEWYLLRVAYERNELAPNKPGGEEYQRRMRSRYIGGYVKEPEKGLWESIAYLDFRSSAGSIIVTHNVSPDTLEKECKNYDVAPIVGYRFCKDFKGFIPSILEDLIETRQKVKRKMKATIDPIEKKMLDYRQRALKILANSYYGYQGYPKARWYSKECAESVTAWGRHYIETTIKEAEKFGFKVLYADTDGFFATIPNEKPETIKSKAKKFLKHINEKLPGMLELEYEGFYLRGFFVTKKKYALIDEDGHITTRGLEVVRRDWSEIAKETQAKVLEVILREGSIEKAAGIVKKVVEDLANYRVPVEKLIIHEQITRELKRYKATGPHVAIAKRLQARGIKVKPGTIISYVVLKGSKKISDRVILFDEYDSSRHKYDPDYYIHNQVLPAVLRILEAFGYKEKDLEYQRMKQTGLGAWLKMGKK

SEQ ID NO: 486 - protein, 773 aa, unidentified
  REGION 1..773: note = Description of Unknown: Synthetic polypeptide
MILDTDYITENGKPVIRIFKKEKGEFKIEYDRNFEPYIYALLEDDESIEDIKKITGERHGKKVRIIRVEKVKKKFLGEPIEVWKLVFEHPQDVPAIRDAIRSHPAVREIFEYDIPFAKRYLIDKGLVPMEGGEELKLLAFNIATFYHEGDEFAEGEILMISYADESGAKVITWKKIDLPYVEVVSTEREAIKRFLQVLREKDPDVLLTYNGDNFDFAYIKKRCEKLGLKFTIGRDGSEPKIQRMGDRFAVEVKGRIHLDLAPVVRHTIRLPTYTLEAVYEAVFGKKKEKVYAEEIAEAWKSEEGLKRVAQYSMEDARATYELGREFFPEEVELAKLIGQSVWDVSRSSTGNLVEWYLLRVAYERNELAPNKPGGEEYQRRMRSSYIGGYVKEPEKGLWESIAYLDFRSSAGSIIVTHNVSPDTLEKECKNYDVAPIVGYRFCKDFKGFIPSILEDLIETRQKVKRKMKATIDPIEKKMLDYRQRALKILANSYYGYQGYPKARWYSKECAESVTAWGRHYIETTIKEAEKFGFKVLYADTDGFFATIPNEKPETIKSKAKKFLKHINEKLPGMLELEYEGFYLRGFFVTKKKYALIDEDGHITTRGLEVVRRDWSEIAKETQAKVLEVILREGSIEKAAGIVKKVVEDLANYRVPVEKLIIHEQITRELKRYKATGPHVAIAKRLQARGIKVKPGTIISYVVLKGSKKISDRVILFDEYDSSRHKYDPDYYIHNQVLPAVLRILEAFGYKEKDLEYQRMKQTGLGAWLKMGKK

SEQ ID NO: 487 - protein, 757 aa, unidentified
  REGION 1..757: note = Description of Unknown: Synthetic polypeptide
MILDTDYITENGKPVIRIFKKEKGEFKIEYDRNFEPYIYALLEDDESIEDIKKITGERHGKKVRIIRVEKVKKKFLGEPIEVWKLVFEHPQDVPAIRDAIRSHPAVREIFEYDIPFAKRYLIDKGLVPMEGGEELKLLAFNIATFYHEGDEFAEGEILMISYADESGAKVITWKKIDLPYVEVVSTEREAIKRFLQVLREKDPDVLLTYNGDNFDFAYIKKRCEKLGLKFTIGRDGSEPKIQRMGDRFAVEVKGRIHLDLAPVVRHTIRLPTYTLEAVYEAVFGKKKEKVYAEEIAEAWKSEEGLKRVAQYSMEDARATYELGREFFPLEVELAKLIGQSVWDVSRSSTGNLVEWYLLRVAYERNELAPNKPGGEEYQRRMRSSYIGGYVKEPEKGLWESIAYLDFRSSAGSIIVTHNVSPDTLEKECKNYDVAPIVGYRFCKDFKGFIPSILEDLIETRQKVKRKMKATIDPIEKKMLDYRQRALKILANSYYGYQGYPKARWYSKECAESVTAWGRHYIETTIKEAEKFGFKVLYADTDGFFATIPNEKPETIKSKAKKFLKHINEKLPGMLELEYEGFYLRGFFVTKKKYALIDEDGHITTRGLEVVRRDWSEIAKETQAKVLEVILREGSIEKAAGIVKKVVEDLANYRVPVEKLIIHEFITRRLKRYKATGPHVAIAKRLQARGIKVKPGTIISYVVLKGSKKISDRVILFDEYDSSRHKYDPDYYIHNQVLPAVLRILEAFGYKEKDLEYQ

SEQ ID NO: 488 - protein, 757 aa, unidentified
  REGION 1..757: note = Description of Unknown: Synthetic polypeptide
MILDTDYITENGKPVIRIFKKEKGEFKIEYDRNFEPYIYALLEDDESIEDIKKITGERHGKKVRIIRVEKVKKKFLGEPIEVWKLVFEHPQDVPAIRDAIRSHPAVREIFEYDIPFAKRYLIDKGLVPMEGGEELKLLAFAIATFYHEGDEFAEGEILMISYADESGAKVITWKKIDLPYVEVVSTEREAIKRFLQVLREKDPDVLLTYNGDNFDFAYIKKRCEKLGLKFTIGRDGSEPKIQRMGDRFAVEVKGRIHLDLAPVVRHTIRLPTYTLEAVYEAVFGKKKEKVYAEEIAEAWKSEEGLKRVAQYSMEDARATYELGREFFPMEVELAKLIGQSVWDVSRSSTGNLVEWYLLRVAYERNELAPNKPGGEEYQRRMRSSYIGGYVKEPEKGLWESIAYLDFRSSAGSIIVTHNVSPDTLEKECKNYDVAPIVGYRFCKDFKGFIPSILEDLIETRQKVKRKMKATIDPIEKKMLDYRQRALKILANSYYGYQGYPKARWYSKECAESVTAWGRHYIETTIKEAEKFGFKVLYADTDGFFATIPNEKPETIKSKAKKFLKHINEKLPGMLELEYEGFYLRGFFVTKKKYALIDEDGHITTRGLEVVRRDWSEIAKETQAKVLEVILREGSIEKAAGIVKKVVEDLANYRVPVEKLIIHEQITRRLKDYKATGPHVAIAKRLQARGIKVEPGTIISYVVLKGSKKISDRVILFDEYDSSRHKYDPDYYIHNQVLPAVLRILEAFGYKEKDLEYQ

SEQ ID NO: 489 - protein, 773 aa, unidentified
  REGION 1..773: note = Description of Unknown: Synthetic polypeptide
MILDTDYITENGKPVIRIFKKEKGEFKIEYDRNFEPYIYALLEDDESIEDIKKITGERHGKKVRIIRVEKVKKKFLGEPIEVWKLVFEHPQDYPAIRDAIRSHPAVREIFEYDIPFAKRYLIDKGLVPMEGGEELKLLAFAIATFYHEGDEFAEGEILMISYADESGAKVITWKKIDLPYVEVVSTEREAIKRFLQVLREKDPDVLLTYNGDNFDFAYIKKRCEKLGLKFTIGRDGSEPKIQRMGDRFAVEVKGRIHLDLAPVVRHTIRLPTYTLEAVYEAVFGKKKEKVYAEEIAEAWKSEEGLKRVAQYSMEDARATYELGREFFPMEVELAKLIGQSVWDVSRSSTGNLVEWYLLRVAYERNELAPNKPGGEEYQRRMRSSYIGGYVKEPEKGLWESIAYLDFRSSAGSIIVTHNVSPDTLEKECKNYDVAPIVGYRFCKDFKGFIPSILEDLIETRQKVKRKMKATIDPIEKKMLDYRQRALKILANSYYGYNGYPKARWYSKECAESVTAWGRHYIETTIKEAEKFGFKVLYADTDGFFATIPNEKPETIKSKAKKFLKHINEKLPGMLELEYEGFYLRGFFVTKKKYALIDEDGHITTRGLEVVRRDWSEIAKETQAKVLEVILREGSIEKAAGIVKKVVEDLANYRVPVEKLIIHEQITRELKRYKATGPHVAIAKRLQARGIKVKPGTIISYVVLKGSKKISDRVILFDEYDSSRHKYDPDYYIHNQVLPAVLRILEAFGYKEKDLEYQRMKQTGLGAWLKMGKK

SEQ ID NO: 490 - protein, 773 aa, unidentified
  REGION 1..773: note = Description of Unknown: Synthetic polypeptide
MILDTDYITENGKPVIRIFKKEKGEFKIEYDRNFEPYIYALLEDDESIEDIKKITGERHGKKVRIIRVEKVKKKFLGEPIEVWKLVFEHPQDYPAIRDAIRSHPAVREIFEYDIPFAKRYLIDKGLVPMEGGEELKLLAFAIATFYHEGDEFAEGEILMISYADESGAKVITWKKIDLPYVEVVSTEREAIKRFLQVLREKDPDVLLTYNGDNFDFAYIKKRCEKLGLKFTIGRDGSEPKIQRMGDRFAVEVKGRIHLDLAPVVRHTIRLPTYTLEAVYEAVFGKKKEKVYAEEIAEAWKSEEGLKRVAQYSMEDARATYELGREFFPMEVELAKLIGQSVWDVSRSSTGNLVEWYLLRVAYERNELAPNKPGGEEYQRRMRSSYIGGYVKEPEKGLWESIAYLDFRSSAGSIIVTHNVSPDTLEKECKNYDVAPIVGYRFCKDFKGFIPSILEDLIETRQKVKRKMKATIDPIEKKMLDYRQRALKILANSYYGYQGYPKARWYSKECAESVTAWGRHYIETTIKEAEKFGFKVLYADTDGFFATIPNEKPETIKSKAKKFLKHINEKLPGMLELEYEGFYLRGFFVTKKKYALIDEDGHITTRGLEVVRRDWSEIAKETQAKVLEVILREGSIEKAAGIVKKVVEDLANYRVPVEKLIIHEQITRELKRYKATGPHVAIAKRLQARGINVKPGTIISYVVLKGSKKISDRVILFDEYDSSRHKYDPDYYIHNQVLPAVLRILEAFGYKEKDLEYQRMKQTGLGAWLKMGKK

SEQ ID NO: 491 - protein, 773 aa, unidentified
  REGION 1..773: note = Description of Unknown: Synthetic polypeptide
MILDTDFITENGKPVIRIFKKEKGEFKIEYDRNFEPYIYALLEDDESIEDIKKITGERHGKKVRIIRVEKVKKKFLGEPIEVWKLVFEHPQDVPAIQDAIRSHPAVREIFEYDIPFAKRYLIDKGLVPMEGGEELKLLAFNIATFYHEGDEFAEGEILMISYADESGAKVITWKKIDLPYVEVVSTEREAIKRFLQVLREKDPDVLLTYNGDNFDFAYIKKRCEKLGLKFTIGRDGSEPKIQRMGDRFAVEVKGRIHLDLAPVVRHTIRLPTYTLEAVYEAVFGKKKEKVYAEEIAEAWKSEEGLKRVAQYSMEDARATYELGREFFPLEVELAKLIGQSVWDVSRSSTGNLVEWYLLRVAYERNELAPNKPGGEEYQRRMRSSYIGGYVKEPEKGLWESIAYLDFRSSAGSIIVTHNVSPDTLEKECKNYDVAPIVGYRFCKDFKGFIPSILEDLIETRQKVKRKMKATIDPIEKKMLDYRQRALKILANSYYGYQGYPKARWYSKECAESVTAWGRHYIETTIKEAEKFGFKVLYADTDGFFATIPNEKPETIKSKAKKFLKHINEKLPGMLELEYEGFYLRGFFVTKKKYALIDEDGHITTRGLEVVRRDWSEIAKETQAKVLEVILREGSIEKAAGIVKKVVEDLANYRVPVEKLIIHEQITRELKRYKATGPHVAIAKRLQARGIKVKPGTIISYVVLKGSKKISDRVILFDEYDSSRHKYDPDYYIHNQVLPAVLRILEAFGYKEKDLEYQRMKQTGLGAWLKMGKK

SEQ ID NO: 492 - protein, 773 aa, unidentified
  REGION 1..773: note = Description of Unknown: Synthetic polypeptide
MILDTDYITENGKPVIRIFKKEKGEFKIEYDRNFEPYIYALLEDDESIEDIKKITGERHGKKVRIIRVEKVKKKFLGEPIEVWKLVFEHPQDYPAIRDAIRSHPAVREIFEYDIPFAKRYLIDKGLVPMEGGEELKLLAFAIATFYHEGDEFAEGEILMISYADESGAKVITWKKIDLPYVEVVSTEREAIKRFLQVLREKDPDVLLTYNGDNFDFAYIKKRCEKLGLKFTIGRDGSEPKIQRMGDRFAVEVKGRIHLDLAPVVRHTIRLPTYTLEAVYEAVFGKKKEKVYAEEIAEAWKSEEGLKRVAQYSMEDARATYELGREFFPMEVELAKLIGQSVWDVSRSSTGNLVEWYLLRVAYERNELAPNKPGGEEYQRRMRSSYIGGYVKEPEKGLWESIAYLDFRSSAGSIIVTHNVSPDTLEKECKNYDVAPIVGYRFCKDFKGFIPSILEDLIETRQKVKRKMKATIDPIEKKMLDYRQRALKILANSYYGYQGYPKARWYSKECAESVTAWGRHYIETTIKEAEKFGFKVLYADTDGFFATIPNEKPETIKSKAKKFLKHINEKLPGMLELEYEGFYLRGFFVTKKYYALIDEDGHITTRGLEVVRRDWSEIAKETQAKVLEVILREGSIEKAAGIVKKVVEDLANYRVPVEKLIIHEQITRELKRYKATGPHVAIAKRLQARGIKVKPGTIISYVVLKGSKKISDRVILFDEYDSSRHKYDPDYYIHNQVLPAVLRILEAFGYKEKDLEYQRMKQTGLGAWLKMGKK

SEQ ID NO: 493 - protein, 773 aa, unidentified
  REGION 1..773: note = Description of Unknown: Synthetic polypeptide
MILDTDYITENGKPVIRIFKKEKGEFKIEYDRNFEPYIYALLEDDESIEDIKKITGERHGKKVRIIRVEKVKKKFLGEPIEVWKLVFEHPQDYPAIRDAIRSHPAVREIFEYDIPFAKRYLIDKGLVPMEGGEELKLLAFAIATFYHEGDEFAEGEILMISYADESGAKVITWKKIDLPYVEVVSTEREAIKRFLQVLREKDPDVLLTYNGDNFDFAYIKKRCEKLGLKFTIGRDGSEPKIQRMGDRFAVEVKGRIHLDLAPVVRHTIRLPTYTLEAVYEAVFGKKKEKVYAEEIAEAWKSEEGLKRVAQYSMEDARATYELGREFFPMEVELAKLIGQSVWDVSRSSTGNLVEWYLLRVAYERNELAPNKPGGEEYQRRMRSSYIGGYVKEPEKGLWESIAYLDFRSSAGSIIVTHNVSPDTLEKECKNYDVAPIVGYRFCKDFKGFIPSILEDLIETRQKVKRKMKATIDPIEKKMLDYRQRALKILANSYYGYQGYPKARWYSKECAESVTAWGRHYIETTIKEAEKFGFKVLYADTDGFFATIPNEKPETIKSKAKKFLKHINEKLPGMLELEYEGFYLRGFFVTKKKYALIDEDGHITTRGLEVVRRDWSEIAKETQAKVLEVILREGSIEKAAGIVKKVVEDLANYRVPVEKLIIHEQITRELKRYKATGPHVAIAKRLQARGIKVKPGTIISSVVLKGSKKISDRVILFDEYDSSRHKYDPDYYIHNQVLPAVLRILEAFGYKEKDLEYQRMKQTGLGAWLKMGKK

SEQ ID NO: 494 - protein, 773 aa, unidentified
  REGION 1..773: note = Description of Unknown: Synthetic polypeptide
MILDTDYITENGKPVIRIFKKEKGEFKIEYDRNFEPYIYALLEDDESIEDIKKITGERHGKKVRIIRVEKVKKKFLGEPIEVWKLVFEHPQDYPAIRDAIRSHPAVREIFEYDIPFAKRYLIDKGLVPMEGGEELKLLAFAIATFYHEGDEFAEGEILMISYADESGAKVITWKKIDLPYVEVVSTEREAIKRFLQVLREKDPDVLLTYNGDNFDFAYIKKRCEKLGLKFTIGRDGSEPKIQRMGDRFAVEVKGRIHLDLAPVVRHTIRLPTYTLEAVYEAVFGKKKEKVYAEEIAEAWKSEEGLKRVAQYSMEDARATYELGREFFPMEVELAKLIGQSVWDVSRSSTGNLVEWYLLRVAYERNELAPNKPGGEEYQRRMRSSYIGGYVKEPEKGLWESIAYLDFRSSAGSIIVTHNVSPDTLEKECKNYDVAPIVGYRFCKDFKGFIPSILEDLIETRQKVKRKRKATIDPIEKKMLDYRQRALKILANSYYGYQGYPKARWYSKECAESVTAWGRHYIETTIKEAEKFGFKVLYADTDGFFATIPNEKPETIKSKAKKFLKHINEKLPGMLELEYEGFYLRGFFVTKKKYALIDEDGHITTRGLEVVRRDWSEIAKETQAKVLEVILREGSIEKAAGIVKKVVEDLANYRVPVEKLIIHEQITRELKRYKATGPHVAIAKRLQARGIKVKPGTIISYVVLKGSKKISDRVILFDEYDSSRHKYDPDYYIHNQVLPAVLRILEAFGYKEKDLEYQRMKQTGLGAWLKMGKK

SEQ ID NO: 495 - protein, 773 aa, unidentified
  REGION 1..773: note = Description of Unknown: Synthetic polypeptide
MILDTDYITENGKPVIRIFKKEKGEFKIEYDRNFEPYIYALLEDDESIEDIKKITGERHGKKVRIIRVEKVKKKFLGEPIEVWKLVFEHPQDVPAIRDAIRSHPAVREIFEYDIPFAKRYLIDKGLVPMEGGEELKLLAFNIATFYHEGDEFAEGEILMISYADESGAKVITWKKIDLPYVEVVSTEREAIKRFLQVLREKDPDVLLTYNGDNFDFAYIKKRCEKLGLKFTIGRDGSEPKIQRMGDRFAVEVKGRIHLDLAPVVRHTIRLPTYTLEAVYEAVFGKKKEKVYAEEIAEAWKSEEGLKRVAQYSMEDARATYELGREFFPLEVELAKLIGQSVWDVSRSSTGNLVEWYLLRVAYERNELAPNKPGGEEYQRRMRSSYIGGYVKEPEKGLWESIAYLDFRSSAGSIIVTHNISPDTLEKECKNYDVAPIVGYRFCKDFKGFIPSILEDLIETRQKVKRKMKATIDPIEKKMLDYRQRALKILANSYYGYQGYPKARWYSKECAESVTAWGRHYIETTIKEAEKFGFKVLYADTDGFFATIPNEKPETIKSKAKKFLKHINEKLPGMLELEYEGFYLRGFFVTKKKYALIDEDGHITTRGLEVVRRDWSEIAKETQAKVLEVILREGSIEKAAGIVKKVVEDLANYRVPVEKLIIHEFITRELKRYKATGPHVAIAKRLQARGIKVKPGTIISYVVLKGSKKISDRVILFDEYDSSRHKYDPDYYIHNQVLPAVLRILEAFGYKEKDLEYQRMKQTGLGAWLKMGKK

SEQ ID NO: 496 - protein, 773 aa, unidentified
  REGION 1..773: note = Description of Unknown: Synthetic polypeptide
MILDTDYITENGKPVIRIFKKEKGEFKIEYDRNFEPYIYALLEDDESIEDIKKITGERHGKKVRIIRVEKVKKKFLGEPIEVWKLVFEHPQDYPAIRDAIRSHPAVREIFEYDIPFAKRYLIDKGLVPMEGGEELKLLAFAIATFYHEGDEFAEGEILMISYADESGAKVITWKKIDLPYVEVVSTEREAIKRFLQVLREKDPDVLLTYNGDNFDFAYIKKRCEKLGLKFTIGRDGSEPKIQRMGDRFAVEVKGRIHLDLAPVVRHTIRLPTYTLEAVYEAVFGKKKEKVYAEEIAEAWKSEEGLKRVAQYSMEDARATYELGREFFPMEVELAKLIGQSVWDVSRSSTGNLVEWYLLRVAYERNELAPNKPGGEEYQRRMRSSYIGGYVKEPEKGLWESIAYLDFRSSAGSIIVTHNVSPDTLEKECKNYDVAPIVGYRFCKDFKGFIPSILEDLIETRQKVKRKMKATIDPIEKKMLDYRQRALKILANSYYGYQGYPKARWYSKECAESVTAWGRHYIETTIKEAEKFGFKVLYADTDGFFATIPNEKPETIKSKAKKFLKHINEKLPGMLELEYEGFYLRGFFVTKKKYALIDEDGHITTRGLEVVRRDWSEIAKETQAKVLEVILREGSIEKAAGIVKKVVEDLANYRVPVEKLIIHEQITRELKRYKATGPHVAIAKRLQARGIKVKPGTIISYVVLKGSKKISDRVILFDEYDSSRHKYDPDYYIHNQVLPAVLRILEAFGYKEKDLEYQREKQTGLGAWLKMGKK

SEQ ID NO: 497 - protein, 773 aa, unidentified
  REGION 1..773: note = Description of Unknown: Synthetic polypeptide
MILDTDYITENGKPVIRIFKKEKGEFKIEYDRNFEPYIYALLEDDESIEDIKKITGERHGKKVRIIRVEKVKKKFLGEPIEVWKLVFEHPQDYPAIRDAIRSHPAVREIFEYDIPFAKRYLIDKGLVPMEGGEELKLLAFAIATFYHEGDEFAEGEILMISYADESGAKVITWKKIDLPYVEVVSTEREAIKRFLQVLREKDPDVLLTYNGDNFDFAYIKKRCEKLGLKFTIGRDGSEPKIQRMGDRFAVEVKGRIHLDLAPVVRHTIRLPTYTLEAVYEAVFGKKKEKVYAEEIAEAWKSEEGLKRVAQYSMEDARATYELGREFFPMEVELAKLIGQSVWDVSRSSTGNLVEWYLLRVAYERNELAPNKPGGEEYQRRMRSSYIGGYVKEPEKGLWESIAYLDFRSSAGSIIVTHNVSPDTLEKECKNYDVAPIVGYRFCKDFKGFIPSILEDLIETRQKVKRKMKATIDPIEKKMLDYRQRALKILANSYYGYQGYPKARWYSKECAESVTAWGRHYIETTIKEAEKFGFKVLYADTDGFFATIPNEKPETIKSKAKKFLKHINEKLPGMLELEYEGFYLRGFFVTKKKYALIDEDGHITTRGLEVVRRDWSEIAKETQAKVLEVILREGSIEKAAGIVKKVVEDLANYRVPVEKLIIHEQITRELKRYKATGPHVAIAKRLQARGIKVKPGTIISYVVLKGSKKISDRVILFDEYDSSRHKYDPDYYIHNQVLPAVLRILEAFGYKEKDLEYQRMKQTGLEAWLKMGKK

SEQ ID NO: 498 - protein, 773 aa, unidentified
  REGION 1..773: note = Description of Unknown: Synthetic polypeptide
MILDTDYITENGKPVIRIFKKEKGEFKIEYDRNFEPYIYALLEDDESIEDIKKITGERHGKKVRIIRVEKVKKKFLGEPIEVWKLVFEHPQDVPAIRDAIRSHPAVREIFEYDIPFAKRYLIDKGLVPMEGGEELKLLAFAIATFYHEGDEFAEGEILMISYADESGAKVITWKKIDLPYVEVVSTEREAIKRFLQVLREKDPDVLLTYNGDNFDFAYIKKRCEKLGLKFTIGRDGSEPKIQRMGDRFAVEVKGRIHLDLAPVVRHTIRLPTYTLEAVYEAVFGKKKEIVYAEEIAEAWKSEEGLKRVAQYSMEDARATYELGREFFPMEVELAKLIGQSVWDVSRSSTGNLVEWYLLRVAYERNELAPNKPGGEEYQRRMRSSYIGGYVKEPEKGLWESIAYLDFRSSAGSIIVTHNVSPDTLEKECKNYDVAPIVGYRFCKDFKGFIPSILEDLIETRQKVKRKMKATIDPIEKKMLDYRQRALKILANSYYGYQGYPKARWYSKECAESVTAWGRHYIETTIKEAEKFGFKVLYADTDGFFATIPNEKPETIKSKAKKFLKHINEKLPGMLELEYEGFYLRGFFVTKKKYALIDEDGHITTRGLEVVRRDWSEIAKETQAKVLEVILREGSIEKAAGIVKKVVEDLANYRVPVEKLIIHEQITRELKRYKATGPHVAIAKRLQARGIKVKPGTIISYVVLKGSKKISDRVILFDEYDSSRHKYDPDYYIHNQVLPAVLRILEAFGYKEKDLEYQRMKQTGLGAWLKMGKK

SEQ ID NO: 499 - protein, 773 aa, unidentified
  REGION 1..773: note = Description of Unknown: Synthetic polypeptide
MILDTDYITENGKPVIRIFKKEKGEFKIEYDRNFEPYIYALLEDDESIEDIKKITGERHGKKVRIIRVEKVKKKFLGEPIEVWKLVFEHPQDYPAIRDAIRSHPAVREIFEYDIPFAKRYLIDKGLVPMEGGEELKLLAFAIATFYHEGDEFAEGEILMISYADESGAKVITWKKIDLPYVEVVSTEREAIKRFLQVLREKDPDVLLTYNGDNFDFAYIKKRCEKLGLKFTIGRDGSEPKIQRMGDRFAVEVKGRIHLDLAPVVRHTIRLPTYTLEAVYEAVFGKKKEKVYAEEIAEAWKSEEGLKRVAQYSMEDARATYELGREFFPMEVELAKLIGQSVWDVSRSSTGNLVEWYLLRVAYERNELAPNKPGGEEYQRRMRSSYIGGYVKEPEKGLWESIAYLDFRSSAGSIIVTHNVSPDTLEKECKNYDVAPIVGYRFCKDFKGFIPSILEDLIETRQKVKRKMKATIDPIEKKMLDYRQRALKILANSYYGYQGYPKARWYSKECAESVTAWGRHYIETTIKEAEKFGFKVLYADTDSFFATIPNEKPETIKSKAKKFLKHINEKLPGMLELEYEGFYLRGFFVTKKKYALIDEDGHITTRGLEVVRRDWSEIAKETQAKVLEVILREGSIEKAAGIVKKVVEDLANYRVPVEKLIIHEQITRELKRYKATGPHVAIAKRLQARGIKVKPGTIISYVVLKGSKKISDRVILFDEYDSSRHKYDPDYYIHNQVLPAVLRILEAFGYKEKDLEYQRMKQTGLGAWLKMGKK

SEQ ID NO: 500 - protein, 773 aa, unidentified
  REGION 1..773: note = Description of Unknown: Synthetic polypeptide
MILDTDYITENGKPVIRIFKKEKGEFKIEYDRNFEPYIYALLEDDESIEDIKKITGERHGKKVRIIRVEKVKKKFLGEPIEVWKLVFEHPQDYPAIRDAIRSHPAVREIFEYDIPFAKRYLIDKGLVPMEGGEELKLLAFAIATFYHEGDEFAEGEILMISYADESGAKVITWKKIDLPYVEVVSTEREAIKRFLQVLREKDPDVLLTYNGDNFDFAYIKKRCEKLGLKFTIGRDGSEPKIQRMGDRFAVEVKGRIHLDLAPVVRHTIRLPTYTLEAVYEAVFGKKKEKVYAEEIAEAWKSEEGLKRVAQYSMEDARATYELGREFFPMEVELAKLIGQSVWDVSRSSTGNLVEWYLLRVAYERNELAPNKPGGEEYQRRMRSSYIGGYVKEPEKGLWESIAYLDFRSSAGSIIVTHNVSPDTLEKECKNYDVAPIVGYRFCKDFKGFIPSILEDLIETRQKVKRKMKATIDPIEKKMLDYRQRALKILANSYYGYQGYPKARWYSKECAESVTAWGRHYIETTIKEAEKFGFKVLYADTDGFFATIPNEKPETIKSKAKKFLKHINEKLPGMLELEYEGFYLRGFFVTKKKYALIDEDGHITTRGLEVVRRDWSEIAKETQAKVLEVILREGSIEKAAGIVKKVVEDLANYRVPVEKLIIHEQITRELKRYKATGPFVAIAKRLQARGIKVKPGTIISYVVLKGSKKISDRVILFDEYDSSRHKYDPDYYIHNQVLPAVLRILEAFGYKEKDLEYQRMKQTGLGAWLKMGKK

SEQ ID NO: 501 - protein, 773 aa, unidentified
  REGION 1..773: note = Description of Unknown: Synthetic polypeptide
MILDTDYITEKGKPVIRIFKKEKGEFKIEYDRNFEPYIYALLEDDESIEDIKKITGERHGKKVRIIRVEKVKKKFLGEPIEVWKLVFEHPQDYPAIRDAIRSHPAVREIFEYDIPFAKRYLIDKGLVPMEGGEELKLLAFAIATFYHEGDEFAEGEILMISYADESGAKVITWKKIDLPYVEVVSTEREAIKRFLQVLREKDPDVLLTYNGDNFDFAYIKKRCEKLGLKFTIGRDGSEPKIQRMGDRFAVEVKGRIHLDLAPVVRHTIRLPTYTLEAVYEAVFGKKKEKVYAEEIAEAWKSEEGLKRVAQYSMEDARATYELGREFFPMEVELAKLIGQSVWDVSRSSTGNLVEWYLLRVAYERNELAPNKPGGEEYQRRMRSSYIGGYVKEPEKGLWESIAYLDFRSSAGSIIVTHNVSPDTLEKECKNYDVAPIVGYRFCKDFKGFIPSILEDLIETRQKVKRKMKATIDPIEKKMLDYRQRALKILANSYYGYQGYPKARWYSKECAESVTAWGRHYIETTIKEAEKFGFKVLYADTDGFFATIPNEKPETIKSKAKKFLKHINEKLPGMLELEYEGFYLRGFFVTKKKYALIDEDGHITTRGLEVVRRDWSEIAKETQAKVLEVILREGSIEKAAGIVKKVVEDLANYRVPVEKLIIHEQITRELKRYKATGPHVAIAKRLQARGIKVKPGTIISYVVLKGSKKISDRVILFDEYDSSRHKYDPDYYIHNQVLPAVLRILEAFGYKEKDLEYQRMKQTGLGAWLKMGKK

SEQ ID NO: 502 - protein, 773 aa, unidentified
  REGION 1..773: note = Description of Unknown: Synthetic polypeptide
MILDTDYITENGKPVIRIFKKEKGEFKIEYDRNFEPYIYALLEDDESIEDIKKITGERHGKKVRIIRVEKVKKKFLGEPIEVWKLVFEHPQDYPAIRDAIRSHPAVREIFEYDIPFAKRYLIDKGLVPMEGGEELKLLAFAIATFYHEGDEFAEGEILMISYADESGAKVITWKKIDLPYVEVVSTEREAIKRFLQVLREKDPDVLLTYNGDNFDFAYIKKRCEKLGLKFTIGRDGSEPKIQRMGDRFAVEVKGRIHLDLAPVVRHTIRLPTYTLEAVYEAVFGKKKEKVYAEEIAEAWKSEEGLKRVAQYSMEDARATYELGREFFPMEVELAKLIGQSVWDVSRSSTGNLVEWYLLRVAYERNELAPNKPGGEEYQRRMRSSYIGGYVKEPEKGLWESIAYLDFRSSAGSIIVTHNLSPDTLEKECKNYDVAPIVGYRFCKDFKGFIPSILEDLIETRQKVKRKMKATIDPIEKKMLDYRQRALKILANSYYGYMGYPKARWYSKECAESVTAWGRHYIETTIKEAEKFGFKVLYADTDGFFATIPNEKPETIKSKAKKFLKHINEKLPGMLELEYEGFYLRGFFVTKKKYALIDEDGHITTRGLEVVRRDWSEIAKETQAKVLEVILREGSIEKAAGIVKKVVEDLANYRVPVEKLIIHEQITRELKRYKATGPHVAIAKRLQARGIKVKPGTIISYVVLKGSKKISDRVILFDEYDSSRHKYDPDYYIHNQVLPAVLRILEAFGYKEKDLEYQRMKQTGLGAWLKMGKK

SEQ ID NO: 503 - protein, 773 aa, unidentified
  REGION 1..773: note = Description of Unknown: Synthetic polypeptide
MILDTDYITENGKPVIRIFKKEKGEFKIEYDRNFEPYIYALLEDDESIEDIKKITGERHGKKVRIIRVEKVKKKFLGEPIEVWKLVFEHPQDYPAIRDAIRSHPAVREIFEYDIPFAKRYLIDKGLVPMEGGEELKLLAFAIATFYHEGDEFAEGEILMISYADESGAKVITWKKIDLPYVEVVSTEREAIKRFLQVLREKDPDVLLTYNGDNFDFAYIKKRCEKLGLKFTIGRDGSEPKIQRMGDRFAVEVKGRIHLDLAPVVRHTIRLPTYTLEAVYEAVFGKKKEQVYAEEIAEAWKSEEGLKRVAQYSMEDARATYELGREFFPMEVELAKLIGQSVWDVSRSSTGNLVEWYLLRVAYERNELAPNKPGGEEYQRRMRSSYIGGYVKEPEKGLWESIAYLDFRSSAGSIIVTHNVSPDTLEKECKNYDVAPIVGYRFCKDFKGFIPSILEDLIETRQKVKRKMKATIDPIEKKMLDYRQRALKILANSYYGYQGYPKARWYSKENAEFVTAWGRHYIETTIKEAEKFGFKVLYADTDGFFATIPNEKPETIKSKAKKFLKHINEKLPGMLELEYEGFYLRGFFVTKKKYALIDEDGHITTRGLEVVRRDWSEIAKETQAKVLEVILREGSIEKAAGIVKKVVEDLANYRVPVEKLIIHEQITRELKRYKATGPHVAIAKRLQARGIKVKPGTIISYVVLKGSKKISDRVILFDEYDSSRHKYDPDYYIHNQVLPAVLRILEAFGYKEKDLEYQRMKQTGLGAWLKMGKK

SEQ ID NO: 504 - protein, 773 aa, unidentified
  REGION 1..773: note = Description of Unknown: Synthetic polypeptide
MILDTDYITENGKPVIRIFKKEKGEFKIEYDRNFEPYIYALLEDDESIEDIKKITGERHGKKVRIIRVEKVKKKFLGEPIEVWKLVFEHPQDYPAIRDAIRSHPAVREIFEYDIPFAKRYLIDKGLVPMEGGEELKLLAFAIATFYHEGDEFAEGEILMISYADESGAKVITWKKIDLPYVEVVSTEREAIKRFLQVLREKDPDVLLTYNGDNFDFAYIKKRCEKLGLKFTIGRDGSEPKIQRMGDRFAVEVKGRIHLDLAPVVRHTIRLPTYTLEAVYEAVFGKKKEKVYAEEIAEAWKSEEGLKRVAQYSMEDARATYELGREFFPMEVELAKLIGQSVWDVSRSSTGNLVEWYLLRVAYERNELAPNKPGGEEYQRRMRSSYIGGYVKEPEKGLWESIAYLDFRSSAGSIIVTHNVSPDTLEKECKNYDVAPIVGYRFCKDFKGFIPSILEDLIETRQKVKRKMKATIDPIEKKMLDYRQRALKILANSYYGYQGYPKARWYSKECAESVTAWGRHYIETTIKEAEKFGFKVLYADTDGFFATIPNEKPETIKSKAKKFLKHINEKLPGMLELEYEGFYLRGFFVTKKKYALIDEDGHITTRGLEVVRRDWSEIAKETQAKVLEVILREGSIEKAAGIVKKVVEDLANYRVPVEKLIIHEQITRELKRYKATGRHVAIAKRLQARGIKVKPGTIISYVVLKGSKKISDRVILFDEYDSSRHKYDPDYYIHNQVLPAVLRILEAFGYKEKDLEYQRMKQTGLGAWLKMGKK

SEQ ID NO: 505 - protein, 773 aa, unidentified
  REGION 1..773: note = Description of Unknown: Synthetic polypeptide
MILDTDYITENGKPVIRIFKKEKGEFKIEYDRNFEPYIYALLEDDESIEDIKKITGERHGKKVRIIRVEKVKKKFLGEPIEVWKLVFEHPQDYPAIRDAIRSHPAVREIFEYDIPFAKRYLIDKGLVPMEGGEELKLLAFAIATFYHEGDEFAEGEILMISYADESGAKVITWKKIDLPYVEVVSTEREAIKRFLQVLREKDPDVLLTYNGDNFDFAYIKKRCEKLGLKFTIGRDGSEPKIQRMGDRFAVEVKGRIHLDLAPVVRHTIRLPTYTLEAVYEAVFGKKKEKVYAEEIAEAWKSEEGLNRVAQYSMEDARATYELGREFFPMEVELAKLIGQSVWDVSRSSTGNLVEWYLLRVAYERNELAPNKPGGEEYQRRMRSSYIGGYVKEPEKGLWESIAYLDFRSSAGSIIVTHNVSPDTLEKECKNYDVAPIVGYRFCKDFKGFIPSILEDLIETRQKVKRKMKATIDPIEKKMLDYRQRALKILANSYYGYQGYPKARWYSKECAESVTAWGRHYIETTIKEAEKFGFKVLYADTDGFFATIPNEKPETIKSKAKKFLKHINEKLPGMLELEYEGFYLRGFFVTKKKYALIDEDGHITTRGLEVVRRDWSEIAKETQAKVLEVILREGSIEKAAGIVKKVVEDLANYRVPVEKLIIHEQITRELKRYKATGPHVAIAKRLQARGIKVKPGTIISYVVLKGSKKISDRVILFDEYDSSRHKYDPDYYIHNQVLPAVLRILEAFGYKEKDLEYQRMKQTGLGAWLKMGKK

SEQ ID NO: 506 - protein, 773 aa, unidentified
  REGION 1..773: note = Description of Unknown: Synthetic polypeptide
MILDTDYITENGKPVIRIFKKEKGEFKIEYDRNFEPYIYALLEDDESIEDIKKITGERHGKKVRIIRVEKVKKKFLGEPIEVWKLVFEHPQDYPAIRDAIRSHPAVREIFEYDIPFAKRYLIDKGLVPMEGGEELKLLAFAIATFYHEGDEFAEGEILMISYADESGAKVITWKKIDLPYVEVVSTEREAIKRFLQVLREKDPDVLLTYNGDNFDFAYIKKRCEKLGLKFTIGRDGSEPKIQRMGDRFAVEVKGRIHLDLAPVVRHTIRLPTYTLEAVYEAVFGKKKEKVYAEEIAEAWKSEEGLKRVAQYSMEDARATYELGREFFPMEVELAKLIGQSVWDVSRSSTGNLVEWYLLRVAYERNELAPNKPGGEEYQRRMRSSYIGGYVKEPEKGLWESIAYLDFRSSAGSIIVTHNVSPDTLEKECKNYDVAPIVGYRFCKDFKGFIPSILEDLIETRQKVKRKMKATIDPIEKKMLDYRQRALKILANSYYGYQGYPKARWYSKECAESVTAWGRHYIETTIKEAEKFGFKVLYADTDGFFATIPNEKPETIKSKAKKFLQSINEKLPGMLELEYEGFYLRGFFVTKKKYALIDEDGHITTRGLEVVRRDWSEIAKETQAKVLEVILREGSIEKAAGIVKKVVEDLANYRVPVEKLIIHEQITRELKRYKATGPHVAIAKRLQARGIKVKPGTIISYVVLKGSKKISDRVILFDEYDSSRHKYDPDYYIHNQVLPAVLRILEAFGYKEKDLEYQRMKQTGLGAWLKMGKK

SEQ ID NO: 507 - protein, 773 aa, unidentified
  REGION 1..773: note = Description of Unknown: Synthetic polypeptide
MILDTDYITENGKPVIRIFKKEKGEFKIEYDRNFEPYIYALLEDDESIEDIKKITGERHGKKVRIIRVEKVKKKFLGEPIEVWKLVFEHPQDYPAIRDAIRSHPAVREIFEYDIPFAKRYLIDKGLVPFEGGEELKLLAFAIATFYHEGDEFAEGEILMISYADESGAKVITWKKIDLPYVEVVSTEREAIKRFLQVLREKDPDVLLTYNGDNFDFAYIKKRCEKLGLKFTIGRDGSEPKIQRMGDRFAVEVKGRIHLDLAPVVRHTIRLPTYTLEAVYEAVFGKKKEKVYAEEIAEAWKSEEGLKRVAQYSMEDARATYELGREFFPMEVELAKLIGQSVWDVSRSSTGNLVEWYLLRVAYERNELAPNKPGGEEYQRRMRSSYIGGYVKEPEKGLWESIAYLDFRSSAGSIIVTHNVSPDTLEKECKNYDVAPIVGYRFCKDFKGFIPSILEDLIETRQKVKRKMKATIDPIEKKMLDYRQRALKILANSYYGYQGYPKARWYSKECAESVTAWGRHYIETTIKEAEKFGFKVLYADTDGFFATIPNEKPETIKSKAKKFLKHINEKLPGMLELEYEGFYLRGFFVTKKKYALIDEDGHITTRGLEVVRRDWSEIAKETQAKVLEVILREGSIEKAAGIVKKVVEDLANYRVPVEKLIIHEQITRELKRYKATGPHVAIAKRLQARGIKVKPGTIISYVVLKGSKKISDRVILFDEYDSSRHKYDPDYYIHNQVLPAVLRILEAFGYKEKDLEYQRMKQTGLGAWLKMGKK

SEQ ID NO: 508 - protein, 773 aa, unidentified
  REGION 1..773: note = Description of Unknown: Synthetic polypeptide
MILDTDYITENGKPVIRIFKKEKGEFKIENDRNFEPYIYALLEDDESIEDIKKITGERHGKKVRIIRVEKVKKKFLGEPIEVWKLVFEHPQDYPAIRDAIRSHPAVREIFEYDIPFAKRYLIDKGLVPMEGGEELKLLAFAIATFYHEGDEFAEGEILMISYADESGAKVITWKKIDLPYVEVVSTEREAIKRFLQVLREKDPDVLLTYNGDNFDFAYIKKRCEKLGLKFTIGRDGSEPKIQRMGDRFAVEVKGRIHLDLAPVVRHTIRLPTYTLEAVYEAVFGKKKEKVYAEEIAEAWKSEEGLKRVAQYSMEDARATYELGREFFPMEVELAKLIGQSVWDVSRSSTGNLVEWYLLRVAYERNELAPNKPGGEEYQRRMRSSYIGGYVKEPEKGLWESIAYLDFRSSAGSIIVTHNVSPDTLEKECKNYDVAPIVGYRFCKDFKGFIPSILEDLIETRQKVKRKMKATIDPIEKKMLDYRQRALKILANSYYGYQGYPKARWYSKECAESVTAWGRHYIETTIKEAEKFGFKVLYADTDGFFATIPNEKPETIKSKAKKFLKHINEKLPGMLELEYEGFYLRGFFVTKKKYALIDEDGHITTRGLEVVRRDWSEIAKETQAKVLEVILREGSIEKAAGIVKKVVEDLANYRVPVEKLIIHEQITRELKRYKATGPHVAIAKRLQARGIKVKPGTIISYVVLKGSKKISDRVILFDEYDSSRHKYDPDYYIHNQVLPAVLRILEAFGYKEKDLEYQRMKQTGLGAWLKMGKK

SEQ ID NO: 509 - protein, 773 aa, unidentified
  REGION 1..773: note = Description of Unknown: Synthetic polypeptide
LILDTDYITENGKPVIRIFKKEKGEFKIEYDRNFEPYIYALLEDDESIEDIKKITGERHGKKVRIIRVEKVKKKFLGEPIEVWKLVFEHPQDYPAIRDAIRSHPAVREIFEYDIPFAKRYLIDKGLVPVEGGEELKLLAFAIATFYHEGDEFAEGEILMISYADESGAKVITWKKIDLPYVEVVSTEREAIKRFLQVLREKDPDVLLTYNGDNFDFAYIKKRCEKLGLKFTIGRDGSEPKIQRMGDRFAVEVKGRIHLDLAPVVRHTIRLPTYTLEAVYEAVFGKKKEKVYAEEIAEAWKSEEGLKRVAQYSMEDARATYELGREFFPMEVELAKLIGQSVWDVSRSSTGNLVEWYLLRVAYERNELAPNKPGGEEYQRRMRSSYIGGYVKEPEKGLWESIAYLDFRSSAGSIIVTHNVSPDTLEKECKNYDVAPIVGYRFCKDFKGFIPSILEDLIETRQKVKRKMKATIDPIEKKMLDYRQRALKILANSYYGYQGYPKARWYSKECAESVTAWGRHYIETTIKEAEKFGFKVLYADTDGFFATIPNEKPETIKSKAKKFLKHINEKLPGMLELEYEGFYLRGFFVTKKKYALIDEDGHITTRGLEVVRRDWSEIAKETQAKVLEVILREGSIEKAAGIVKKVVEDLANYRVPVEKLIIHEQITRELKRYKATGPHVAIAKRLQARGIKVKPGTIISYVVLKGSKKISDRVILFDEYDSSRHKYDPDYYIHNQVLPAVLRILEAFGYKEKDLEYQRMKQTGLGAWLKMGKK

SEQ ID NO: 510 - protein, 773 aa, unidentified
  REGION 1..773: note = Description of Unknown: Synthetic polypeptide
MILDTDYITENGKPVIRIFKKEKGEFKIEYDRNFEPYIYALLEDDESIEDIKKITGERHGKKVRIIRVEKVKKKFLGEPIEVWKLVFEHPQDYPAIRDAIRSHPAVREIFEYDIPFAKRYLIDKGLVPMEGGEELKLLAFAIATFYHEGDEFAEGEILMISYADESGAKVITWKKIDLPYVEVVSTEREAIKRFLQVLREKDPDVLLTYNGDNFDFAYIKKRCEKLGLKFTIGRDGSEPKIQRMGDRFAVEVKGRIHLDLAPVVRHTIRLPTYTLEAVYEAVFGKKKEKVYAEEIAEAWKSEEGLKRVAQYSMEDARATYELGREFFPMEVELAKLIGQSVWDVSRSSTGNLVEWYLLRVAYERNELAPNKPGGEEYQRRMRSSYIGGKVKEPEKGLWESIAYLDFRSSAGSIIVTHNVSPDTLEKECKNYDVAPIVGYRFCKDFKGFIPSILEDLIETRQKVKRKMKATIDPIEKKMLDYRQRALKILANSYYGYQGYPKARWYSKECAESVTAWGRHYIETTIKEAEKFGFKVLYADTDGFFATIPNEKPETIKSKAKKFLKHINEKLPGMLELEYEGFYLRGFFVTKKKYALIDEDGHITTRGLEVVRRDWSEIAKETQAKVLEVILREGSIEKAAGIVKKVVEDLANYRVPVEKLIIHEQITRELKRYKATGPHVAIAKRLQARGIKVKPGTIISYVVLKGSKKISDRVILFDEYDSSRHKYDPDYYIHNQVLPAVLRILEAFGYKEKDLEYQRMKQTGLGAWLKMGKK

SEQ ID NO: 511 - protein, 773 aa, unidentified
  REGION 1..773: note = Description of Unknown: Synthetic polypeptide
MILDTDYITENGKPVIRIFKKEKGEFKIEYDRNFEPYIYALLEDDESIEDIKKITGERHGKKVRIIRVEKVKKKFLGEPIEVWKLVFEHPQDYPAIRDAIRSHPAVREIFEYDIPFAKRYLIDKGLVPMEGGEELKLLAFAIATFYHEGDEFAEGEILMISYADESGAKVITWKKIDLPYVEVVSTEREAIKRFLQVLREKDPDVLLTYNGDNFDFAYIKKRCEKLGLKFTIGRDGSEPKIQRMGDRFAVEVKGRIHLDLAPVVRHTIRLPTYTLEAVYEAVFGKKKEKVYAEEIAEANKSEEGLKRVAQYSMEDARATYELGREFFPMEVELAKLIGQSVWDVSRSSTGNLVEWYLLRVAYERNELAPNKPGGEEYQRRMRSSYIGGYVKEPEKGLWESIAYLDFRSSAGSIIVTHNVSPDTLEKECKNYDVAPIVGYRFCKDFKGFIPSILEDLIETRQKVKRKMKATIDPIEKKMLDYRQRALKILANSYYGYQGYPKARWYSKECAESVTAWGRHYIETTIKEAEKFGFKVLYADTDGFFATIPNEKPETIKSKAKKFLKHINEKLPGMLELEYEGFYLRGFFVTKKKYALIDEDGHITTRGLEVVRRDWSEIAKETQAKVLEVILREGSIEKAAGIVKKVVEDLANYRVPVEKLIIHEQITRELKRYKATGPHVAIAKRLQARGIKVKPGTIISYVVLKGSKKISDRVILFDEYDSSRHKYDPDYYIHNQVLPAVLRILEAFGYKEKDLEYQRMKQTGLGAWLKMGKK

SEQ ID NO: 512 - protein, 773 aa, unidentified
  REGION 1..773: note = Description of Unknown: Synthetic polypeptide
MILDTDYITENGKPVIRIFKKEKGEFKIEYDRNFEPYIYALLEDDESIEDIKKITGERHGKKVRIIRVEKVKKKFLGEPIEVWKLVFEHPQDVPAIRDAIRSHPAVREIFEYDIPFAKRYLIDKGLVPMEGGEELKLLAFAIATFYHEGDEFAEGEILMISYADESGAKVITWKKIDLPYVEVVSTEREAIKRFLQVLREKDPDVLLTYNGDNFDFAYIKKRCEKLGLKFTIGRDGSEPKIQRMGDRFAVEVKGRIHLDLAPVVRHTIRLPTYTLEAVYEAVFGKKKEKVYAEEIAEAWKSEEGLKRVAQYSMEDARATYELGREFFPMEVELAKLIGQSVWDVSRSSTGNLVEWYLLRVAYERNELAPNKPGGEEYQRRMRSSYIGGYVKEPEKGLWESIAYLDFRSSAGSIIVTHNVSPDTLEKECKNYDVAPIVGYRFCKDFKGFIPSILEDLIETRQKVKRKMKATIDPIEKKMLDYRQRALKILANSYYGYQGYPKARWYSKECAEEVTAWGRHYIETTIKEAEKFGFKVLYADTDGFFATIPNEKPETIKSKAKKFLKHINEKLPGMLELEYEGFYLRGFFVTKKKYALIDEDGHITTRGLEVVRRDWSEIAKETQAKVLEVILREGSIEKAAGIVKKVVEDLANYRVPVEKLIIHEQITRELKDYKATGPHVAIAKRLQARGIKVKPGTIISYVVLKGSKKISDRVILFDEYDSSRHKYDPDYYIHNQVLPAVLRILEAFGYKEKDLEYQRMKQTGLGAWLKMGKK

SEQ ID NO: 513 - protein, 773 aa, unidentified
  REGION 1..773: note = Description of Unknown: Synthetic polypeptide
MILDTDYITENGKPVIRIFKKEKGEFKIEYDRNFEPYIYALLEDDESIEDIKKITGERHGKKVRIIRVEKVKKKFLGEPIEVWKLVFEHPQDYPAIRDAIRSHPAVREIFEYDIPFAKRYLIDKGLVPMEGGEELKLLAFAIATFYHEGDEFAEGEILMISYADESGAKVITWKKIDLPYVEVVSTEREAIKRFLQVLREKDPDVLLTYNGDNFDFAYIKKRCEKLGLKFTIGRDGSEPKIQRMGDRFAVEVKGRIHLDLAPVVRHTIRLPTYTLEAVYEAVFGKKKEKVYAEEIAEAWKSEEGLKRVAQYSMEDARATYELGREFFPMEVELAKLIGQSVWDVSRSSTGNLVEWYLLRVAYERNELAPNKPGGEEYQRRMRSSYIGGYVKEPEKGLWESIAYLDFRSSAGSIIVTHNVSPDTLEKECKNYDVAPIVGYRFCKDFKGFIPSILEDLIETRQKVKRKKKATIDPIEKKMLDYRQRALKILANSYYGYQGYPKARWYSKECAESVTAWGRHYIETTIKEAEKFGFKVLYADTDGFFATIPNEKPETIKSKAKKFLKHINEKLPGMLELEYEGFYLRGFFVTKKKYALIDEDGHITTRGLEVVRRDWSEIAKETQAKVLEVILREGSIEKAAGIVKKVVEDLANYRVPVEKLIIHEQITRELKRYKATGPHVAIAKRLQARGIKVKPGTIISYVVLKGSKKISDRVILFDEYDSSRHKYDPDYYIHNQVLPAVLRILEAFGYKEKDLEYQRMKQTGLGAWLKMGKK

SEQ ID NO: 514 - protein, 773 aa, unidentified
  REGION 1..773: note = Description of Unknown: Synthetic polypeptide
MILDTDYITENGKPVIRIFKKEKGEFKIEYDRNFEPYIYALLEDDESIEDIKKITGERHGKKVRIIRVEKVKKKFLGEPIEVWKLVFEHPQDAPAIRDAIRSHPAVREIFEYDIPFAKRYLIDKGLVPMEGGEELKLLAFNIATFYHEGDEFAEGEILMISYADESGAKVITWKKIDLPYVEVVSTEREAIKRFLQVLREKDPDVLLTYNGDNFDFAYIKKRCEKLGLKFTIGRDGSEPKIQRMGDRFAVEVKGRIHLDLAPVVRHTIRLPTYTLEAVYEAVFGKKKEKVYAEEIAEAWKSEEGLKRVAQYSMEDARATYELGREFFPLEVELAKLIGQSVWDVSRSSTGNLVEWYLLRVAYERNELAPNKPGGEEYQRRMRSSYIGGYVKEPEKGLWESIAYLDFRSSAGSIIVTHNVSPDTLEKECKNYDVAPIVGYRFCKDFKGFIPSILEDLIETRQKVKRKMKATIDPIEKKMLDYRQRALKILANSYYGYQGYPKARWYSKECAESVTAWGRHYIETTIKEAEKFGFKVLYADTDGFFATIPNEKPETIKSKAKKFLKHINEKLPGMLELEYEGFYLRGFFVTKKKYALIDEDGHITTRGLEVVRRDWSEIAKETQAKVLEVILREGSIEKAAGIVKKVVEDLANYRVPVEKLIIHEQITRELKRYKATGPHVAIAKRLQARGIKVKPGTIISYVVLKGSKKISDRVILFDEYDSSRHKYDPDYYIHNQVLPAVLRILEAFGYKEKDLEYQRMKQTGLGAWLKMGKK

SEQ ID NO: 515 - protein, 773 aa, unidentified
  REGION 1..773: note = Description of Unknown: Synthetic polypeptide
MILDTDYITEAGKPVIRIFKKEKGEFKIEYDRNFEPYIYALLEDDESIEDIKKITGERHGKKVRIIRVEKVKKKFLGEPIEVWKLVFEHPQDYPAIRDAIRSHPAVREIFEYDIPFAKRYLIDKGLVPMEGGEELKLLAFAIATFYHEGDEFAEGEILMISYADESGAKVITWKKIDLPYVEVVSTEREAIKRFLQVLREKDPDVLLTYNGDNFDFAYIKKRCEKLGLKFTIGRDGSEPKIQRMGDRFAVEVKGRIHLDLAPVVRHTIRLPTYTLEAVYEAVFGKKKEKVYAEEIAEAWKSEEGLKRVAQYSMEDARATYELGREFFPMEVELAKLIGQSVWDVSRSSTGNLVEWYLLRVAYERNELAPNKPGGEEYQRRMRSSYIGGYVKEPEKGLWESIAYLDFRSSAGSIIVTHNVSPDTLEKECKNYDVAPIVGYRFCKDFKGFIPSILEDLIETRQKVKRKMKATIDPIEKKMLDYRQRALKILANSYYGYQGYPKARWYSKECAESVTAWGRHYIETTIKEAEKFGFKVLYADTDGFFATIPNEKPETIKSKAKKFLKHINEKLPGMLELEYEGFYLRGFFVTKKKYALIDEDGHITTRGLEVVRRDWSEIAKETQAKVLEVILREGSIEKAAGIVKKVVEDLANYRVPVEKLIIHEQITRELKRYKATGPHVAIAKRLQARGIKVKPGTIISYVVLKGSKKISDRVILFDEYDSSRHKYDPDYYIHNQVLPAVLRILEAFGYKEKDLEYQRMKQTGLGAWLKMGKK

SEQ ID NO: 516 - protein, 773 aa, unidentified
  REGION 1..773: note = Description of Unknown: Synthetic polypeptide
MILDTDYITENGKPVIRIFKKEKGEFKIEYDRNFEPYIYALLEDDESIEDIKKITGERHGKKVRIIRVEKVKKKFLGEPIEVWKLVFEHPQDYPAIRDAIRSHPAVREIFEYDIPFAKRYLIDKGLVPMEGGEELKLLAFAIATFYHEGDEFAEGEILMISYADESGAKVITWKKIDLPYVEVVSTEREAIKRFLQVLREKDPDVLLTYNGDNFDFAYIKKRCEKLGLKFTIGRDGSEPKIQRMGDRFAVEVKGRIHLDLAPVVRHTIRLPTYTLEAVYEAVFGKKKEKVYAEEIAEAWKSEEGLKRVAQYSMEDARATYELGREFFPMEVELAKLIGQSVWDVSRSSTGNLVEWYLLRVAYERNELAPNKPGGEEYQRRMRSSYIGGYVKEPEKGLWESIAYLDFRSSAGSIIVTHNVSPDTLEKECKNYDVAPIVGYRFCKDFKGFIPSILEDLIETRQKVKRKMKATIDPIEKKMLDYRQRALKILANSYYGYQGYPKARWYSKECAESVTAWGRHYIETTIKEAEKFGFKVLYADTDGFFATIPNEKPETIKSKAKKFLKHINEKLPGMLELEYEGFYLRGFFVTKKKYALIDEDGHITTRGLEVVRRDWSEIAKETQAKVLEVILREGSIEKAAGIVKKVVEDLANYRVPVEKLIIHEQITRELKRYKATGPHVAIAKRLQARGIKVKPGTIISYVVLKGSKKISDRVILFDEYDSSRHKYDPDYYIHKQVLPAVLRILEAFGYKEKDLEYQRMKQTGLGAWLKMGKK

SEQ ID NO: 517 - protein, 773 aa, unidentified
  REGION 1..773: note = Description of Unknown: Synthetic polypeptide
MILDTDYITENGKPVIRIFKKEKGEFKIEYDRNFEPYIYALLEDDESIEDIKKITGERHGKKVRIIRVEKVKKKFLGEPIEVWKLVFEHPQDYPAIRDAIRSHPAVREIFEYDIPFAKRYLIDKGLVPLEGGEELKLLAFAIATFYHEGDEFAEGEILMISYADESGAKVITWKKIDLPYVEVVSTEREAIKRFLQVLREKDPDVLLTYNGDNFDFAYIKKRCEKLGLKFTIGRDGSEPKIQRMGDRFAVEVKGRIHLDLAPVVRHTIRLPTYTLEAVYEAVFGKKKEKVYAEEIAEAWKSEEGLKRVAQYSMEDARATYELGREFFPMEVELAKLIGQSVWDVSRSSTGNLVEWYLLRVAYERNELAPNKPGGEEYQRRMRSSYIGGYVKEPEKGLWESIAYLDFRSSAGSIIVTHNVSPDTLEKECKNYDVAPIVGYRFCKDFKGFIPSILEDLIETRQKVKRKMKATIDPIEKKMLDYRQRALKILANSYYGYQGYPKARWYSKECAESVTAWGRHYIETTIKEAEKFGFKVLYADTDGFFATIPNEKPETIKSKAKKFLKHINEKLPGMLELEYEGFYLRGFFVTKKKYALIDEDGHITTRGLEVVRRDWSEIAKETQAKVLEVILREGSIEKAAGIVKKVVEDLANYRVPVEKLIIHEQITRELKRYKATGPHVAIAKRLQARGIKVKPGTIISYVVLKGSKKISDRVILFDEYDSSRHKYDPDYYIHNQVLPAVLRILEAFGYKEKDLEYQRMKQTGLGAWLKMGKK

SEQ ID NO: 518 - protein, 773 aa, unidentified
  REGION 1..773: note = Description of Unknown: Synthetic polypeptide
MILDTDYITENGKPVIRIFKKEKGEFKIEYDRNFEPYIYALLEDDESIEDIKKITGERHGKKVRIIRVEKVKKKFLGEPIEVWKLVFEHPQDVPAIRDAIRSHPAVREIFEYDIPFAKRYLIDKGLVPMEGGEELKLLAFNIATFYHEGDEFAEGEILMISYADESGAKVITWKKIDLPYVEVVSTEREAIKRFLQVLREKDPDVLLTYNGDNFDFAYIKKRCEKLGLKFTIGRDGSEPRIQRMGDRFAVEVKGRIHLDLAPVVRHTIRLPTYTLEAVYEAVFGKKKEKVYAEEIAEAWKSEEGLKRVAQYSMEDARATYELGREFFPLEVELAKLIGQSVWDVSRSSTGNLVEWYLLRVAYERNELAPNKPGGEEYQRRMRSSYIGGYVKEPEKGLWESIAYLDFRSSAGSIIVTHNVSPDTLEKECKNYDVAPIVGYRFCKDFKGFIPSILEDLIETRQKVKRKMKATIDPIEKKMLDYRQRALKILANSYYGYQGYPKARWYSKECAESVTAWGRHYIETTIKEAEKFGFKVLYADTDGFFATIPNEKPETIKSKAKKFLKHINEKLPGMLELEYEGFYLRGFFVTKKKYALIDEDGHITTRGLEVVRRDWSEIAKETQAKVLEVILREGSIEKAAGIVKKVVEDLANYRVPVEKLIIHEQITRELKRYKATGPHVAIAKRLQARGIKVKPGTIISYVVLKGSKKISDRVILFDEYDSSRHKYDPDYYIHNQVLPAVLRILEAFGYKEKDLEYQRMKQTGLGAWLKMGKK

SEQ ID NO: 519 - protein, 773 aa, unidentified
  REGION 1..773: note = Description of Unknown: Synthetic polypeptide
MILDTDYITENGKPVIRIFKKEKGEFKIEYDRNFEPYIYALLEDDESIEDIKKITGERHGKKVRIIRVEKVKKKFLGEPIEVWKLVFEHPRDVPAIRDAIRSHPAVREIFEYDIPFAKRYLIDKGLVPMEGGEELKLLAFNIATFYHEGDEFAEGEILMISYADESGAKVITWKKIDLPYVEVVSTEREAIKRFLQVLREKDPDVLLTYNGDNFDFAYIKKRCEKLGLKFTIGRDGSEPKIQRMGDRFAVEVKGRIHLDLAPVVRHTIRLPTYTLEAVYEAVFGKKKEKVYAEEIAEAWKSEEGLKRVAQYSMEDARATYELGREFFPLEVELAKLIGQSVWDVSRSSTGNLVEWYLLRVAYERNELAPNKPGGEEYQRRMRSSYIGGYVKEPEKGLWESIAYLDFRSSAGSIIVTHNVSPDTLEKECKNYDVAPIVGYRFCKDFKGFIPSILEDLIETRQKVKRKMKATIDPIEKKMLDYRQRALKILANSYYGYQGYPKARWYSKECAESVTAWGRHYIETTIKEAEKFGFKVLYADTDGFFATIPNEKPETIKSKAKKFLKHINEKLPGMLELEYEGFYLRGFFVTKKKYALIDEDGHITTRGLEVVRRDWSEIAKETQAKVLEVILREGSIEKAAGIVKKVVEDLANYRVPVEKLIIHEQITRELKRYKATGPHVAIAKRLQARGIKVKPGTIISYVVLKGSKKISDRVILFDEYDSSRHKYDPDYYIHNQVLPAVLRILEAFGYKEKDLEYQRMKQTGLGAWLKMGKK

SEQ ID NO: 520 - protein, 773 aa, unidentified; identical to SEQ ID NO: 123
  REGION 1..773: note = Description of Unknown: Synthetic polypeptide

SEQ ID NO: 521 - protein, 773 aa, unidentified
  REGION 1..773: note = Description of Unknown: Synthetic polypeptide
MILDTDYITENGKPVIRIFKKEKGEFKIEYDRNFEPYIYALLEDDESIEDIKKITGERHGKKVRIIRVEKVKKKFLGEPIEVWKLVFEHPQDYPAIRDAIRSHPAVREIFEYDIPFAKRYLIDKGLVPMEGGEELKLLAFAIATFYHEGDEFAEGEILMISYADESGAKVITWKKIDLPYVEVVSTEREAIKRFLQVLREKDPDVLLTYNGDNFDFAYIKKRCEKLGLKFTIGRDGSEPKIQRMGDRFAVEVKGRIHLDLAPVVRHTIRLPTYTLEAVYEAVFGKKKEKVYAEEIAEAWKSEEGLKRVAQYSMEDARATYELGREFFPMEVELAKLIGQSVWDVSRSSTGNLVEWYLLRVAYERNELAPNKPGGEEYQRRMRSSYIGGYVKEPEKGLWESIAYLDFRSSAGSIIVTHNVSPDTLEKECKNYDVAPIVGYRFCKDFKGFIPSILEDLIETRQKVKRKMKATIDPIEKKMLDYRQRALKILANSYYGYQGYPKARWYSQECAESVTAWGRHYIETTIKEAEKFGFKVLYADTDGFFATIPNEKPETIKSKAKKFLKHINEKLPGMLELEYEGFYLRGFFVTKKKYALIDEDGHITTRGLEVVRRDWSEIAKETQAKVLEVILREGSIEKAAGIVKKVVEDLANYRVPVEKLIIHEQITRELKRYKATGPHVAIAKRLQARGIKVKPGTIISYVVLKGSKKISDRVILFDEYDSSRHKYDPDYYIHNQVLPAVLRILEAFGYKEKDLEYQRMKQTGLGAWLKMGKK

SEQ ID NO: 522 - protein, 773 aa, unidentified
  REGION 1..773: note = Description of Unknown: Synthetic polypeptide
MILDTDYITENGKPVIRIFKKEKGEFKIEYDRNFEPYIYALLEDDESIEDIKKITGERHGKKVRIIRVEKVKKKFLGEPIEVWKLVFEHPQDYPAIRDAIRSHPAVREIFEYDIPFAKRYLIDKGLVPMEGGEELKLLAFAIATFYHEGDEFAEGEILMISYADESGAKVITWKKIDLPYVEVVSTEREAIKRFLQVLREKDPDVLLTYNGDNFDFAYIKKRCEKLGLKFTIGRDGSEPKIQRMGDRFAVEVKGRIHLDLAPVVRHTIRLPTYTLEAVYEAVFGKKKEKVYAEEIAEAWKSEEGLARVAQYSMEDARATYELGREFFPMEVELAKLIGQSVWDVSRSSTGNLVEWYLLRVAYERNELAPNKPGGEEYQRRMRSSYIGGYVKEPEKGLWESIAYLDFRSSAGSIIVTHNVSPDTLEKECKNYDVAPIVGYRFCKDFKGFIPSILEDLIETRQKVKRKMKATIDPIEKKMLDYRQRALKILANSYYGYQGYPKARWYSKECAESVTAWGRHYIETTIKEAEKFGFKVLYADTDGFFATIPNEKPETIKSKAKKFLKHINEKLPGMLELEYEGFYLRGFFVTKKKYALIDEDGLITTRGLEVVRRDWSEIAKETQAKVLEVILREGSIEKAAGIVKKVVEDLANYRVPVEKLIIHEQITRELKRYKATGPHVAIAKRLQARGIKVKPGTIISYVVLKGSKKISDRVILFDEYDSSRHKYDPDYYIHNQVLPAVLRILEAFGYKEKDLEYQRDKQTGLGAWLKMGKK

SEQ ID NO: 523 - protein, 773 aa, unidentified
  REGION 1..773: note = Description of Unknown: Synthetic polypeptide
MILDTDYITENGKPVIRIFKKEKGEFKIEYDRNFEPYIYALLEDDESIEDIKKITGERHGKKVRIIRVEKVKKKFLGEPIEVWKLVFEHPQDVPAIRDAIRSHPAVREIFEYDIPFAKRYLIDKGLVPMEGGEELKLLAFAIATFYHEGDEFAEGEILMISYADESGAKVITWKKIDLPYVEVVSTEREAIKRFLQVLREKDPDVLLTYNGDNFDFAYIKKRCEKLGLKFTIGRDGSEPKIQRMGDRFAVEVKGRIHLDLAPVVRHTIRLPTYTLEAVYEAVFGKKKEKVYAEEIAEAWKSEEGLKRVAQYSMEDARATYELGREFFPMEVELAKLIGQSVWDVSRSSTGNLVEWYLLRVAYERNELAPNKPGGEEYQRRMRSSYIGGYVKEPEKGLWESIAYLDFRSSAGSIIVTHNVSPDTLEKECKNYDVAPIVGYRFCKDFKGFIPSILEDLIETRQKVKRKMKATIDPIEKKMLDYRQRALKILANSYYGYQGYPKARWYSKECAESVTAWGRHYIETTIKEAEKFGFKVLYADTDGFFATIPNEKPETIKSKAKKFLKHINEKLPGMLELEYEGFYLRGFFVTKKKYALIDEDGHITTRGLEVVRRDWSEIAKETQAKVLEVILREGSIEKAAGIVKKVVEDLANYRVPVEKLIIHETITRELKRYKATGPHVAIAKRLQARGIKVKPGTIISYVVLKGSKKISDRVILFDEYDSSRHKYDPDYYIHNQVLPAVLRILEAFGYKEKDLEYQRMKQTGLGAWLKMGKK

SEQ ID NO: 524 - protein, 773 aa, unidentified
  REGION 1..773: note = Description of Unknown: Synthetic polypeptide
MILDTDYITENGKPVIRIFKKEKGEFKIEYDRNFEPYIYALLEDDESIEDIKKITGERHGKKVRIIRVEKVKKKFLGEPIEVWKLVFEHPQDYPAIRDAIRSHPAVREIFEYDIPFAKRYLIDKGLVPMEGGEELKLLAFAIATFYHEGDEFAEGEILMISYADESGAKVITWKKIDLPYVEVVSTEREAIKRFLQVLREKDPDVLLTYNGDNFDFAYIKKRCEKLGLKFTIGRDGSEPKIQRMGDRFAVEVKGRIHLDLAPVVRHTIRLPTYTLEAVYEAVFGKKKEKVYAEEIAEAWKSEEGLKRVAQYSMEDARATYELGREFFPMEVELAKLIGQSVWDVSRSSTGNLVEWYLLRVAYERNELAPNKPGGEEYQRRMRSSYIGGYVKEPEKGLWESIAYLDFRSSAGSIIVTHNVSPDTLEKECKNYDVAPIVGYRFCKDFKGFIPSILEDLIETRQKVKRKMKATIDPIEKKMLDYRQRALKILANSYYGYQGYPKARWYSKECAESVTAWGRHYIETTIKEAEKFGFKVLYADTDGFFATIPNEKPETIKSKAKKFLKHINEKLPGMLELEYEGFYLRGFFVTKKKYALIDEDGHITTRGLEVVRRDWSEIAKETQAKVLEVILREGSIEKAAGIVKKVVEDLANYRVPVEKLIIHEQITRELKRYKATGPHVAIAKRLQARGIKVKPGTIISYVVLKGSKKISDRVILFDEYDSSRHKYDPDYYIHNQVLPAVLRILEAFGYKEKDLEYQRRKQTGLGAWLKMGKK

SEQ ID NO: 525 - protein, 773 aa, unidentified
  REGION 1..773: note = Description of Unknown: Synthetic polypeptide
MILDTDYITENGKPVIRIFKKEKGEFKIEYDRNFEPYIYALLEDDESIEDIKKITGERHGKKVRIIRVEKVKKKFLGEPIEVWKLVFEHPQDYPAIRDAIRSHPAVREIFEYDIPFAKRYLIDKGLVPMEGGEELKLLAFAIATFYHEGDEFAEGEILMISYADESGAKVITWKKIDLPYVEVVSTEREAIKRFLQVLREKDPDVLLTYNGDNFDFAYIKKRCEKLGLKFTIGRDGSEPKIQRMGDRFAVEVKGRIHLDLAPVVRHTIRLPTYTLEAVYEAVFGKKKEKVYAEEIAEAWKSEEGLKRVAQYSMEDARATYELGREFFPMEVELAKLIGQSVWDVSRSSTGNLVEWYLLRVAYERNELAPNKPGGEEYQRRMRSSYIGGYVKEPEKGLWESIAYLDFRSSAGSIIVTHNVSPDTLEKECKNYDVAPIVGYRFCKDFKGFIPSILEDLIETRQKVKRKMKATIDPIEKKMLDYRQRALKRLANSYYGYQGYPKARWYSKECAESVTAWGRHYIETTIKEAEKFGFKVLYADTDGFFATIPNEKPETIKSKAKKFLKHINEKLPGMLELEYEGFYLRGFFVTKKKYALIDEDGHITTRGLEVVRRDWSEIAKETQAKVLEVILREGSIEKAAGIVKKVVEDLANYRVPVEKLIIHEQITRELKRYKATGPHVAIAKRLQARGIKVKPGTIISYVVLKGSKKISDRVILFDEYDSSRHKYDPDYYIHNQVLPAVLRILEAFGYKEKDLEYQRMKQTGLGAWLKMGKK

SEQ ID NO: 526 - protein, 773 aa, unidentified
  REGION 1..773: note = Description of Unknown: Synthetic polypeptide
MILDTDYITENGKPVIRIFKKEKGEFKIEYDRNFEPYIYALLEDDESIEDIKKITGERHGKKVRIIRVEKVKKKFLGEPIEVWKLVFEHPQDYPAIRDAIRSHPAVREIFEYDIPFAKRYLIDKGLVPMEGGEELKLLAFAIATFYHEGDEFAEGEILMISYADESGAKVITWKKIDLPYVEVVSTEREAIKRFLQVLREKDPDVLLTYNGDNFDFAYIKKRCEKLGLKFTIGRDGSEPKIQRMGDRFAVEVKGRIHLDLAPVVRHTIRLPTYTLEAVYEAVFGKKKEKVYAEEIAEAWKSEEGLKRVAQYSMEDARATYELGREFFPMEVELAKLIGQSVWDVSRSSTGNLVEWYLLRVAYERNELAPNKPGGEEYQRRMRSSYIGGYVKEPEKGLWESIAYLDFRSSAGSIIVTHNVSPDTLEKECKNYDVAPIVGYRFCKDFKGFIPSILEDLIETRQKVKRKMKATIDPIEKKMLDYRQRALKILANSYYGYQGYPKARWYSKECAESVTAWGRHYIETTIKEAEKFGFKVLYADTDGFFATIPNEKPETIKSKAKKFLKHINEKLPGMLELEYEGFYLRGFFVTKKKYALIDEDGHITTRGLEVVRRDWSEIAKETQAKVLEVILREGSIEKAAGIVKKVVEDLANYRVPVEKLIIHEQITRELKRYKATGAHVAIAKRLQARGIKVKPGTIISYVVLKGSKKISDRVILFDEYDSSRHKYDPDYYIHNQVLPAVLRILEAFGYKEKDLEYQRMKQTGLGAWLKMGKK

SEQ ID NO: 527 - protein, 773 aa, unidentified
  REGION 1..773: note = Description of Unknown: Synthetic polypeptide
AILDTDYITENGKPVIRIFKKEKGEFKIEYDRNFEPYIYALLEDDESIEDIKKITGERHGKKVRIIRVEKVKKKFLGEPIEVWKLVFEHPQDVPAIRDAIRSHPAVREIFEYDIPFAKRYLIDKGLVPMEGGEELKLLAFNIATFYHEGDEFAEGEILMISYADESGAKVITWKKIDLPYVEVVSTEREAIKRFLQVLREKDPDVLLTYNGDNFDFAYIKKRCEKLGLKFTIGRDGSEPKIQRMGDRFAVEVKGRIHLDLAPVVRHTIRLPTYTLEAVYEAVFGKKKEKVYAEEIAEAWKSEEGLKRVAQYSMEDARATYELGREFFPLEVELAKLIGQSVWDVSRSSTGNLVEWYLLRVAYERNELAPNKPGGEEYQRRMRSSYIGGYVKEPEKGLWESIAYLDFRSSAGSIIVTHNVSPDTLEKECKNYDVAPIVGYRFCKDFKGFIPSILEDLIETRQKVKRKMKATIDPIEKKMLDYRQRALKILANSYYGYQGYPKARWYSKECAESVTAWGRHYIETTIKEAEKFGFKVLYADTDGFFATIPNEKPETIKSKAKKFLKHINEKLPGMLELEYEGFYLRGFFVTKKKYALIDEDGIITTRGLEVVRRDWSEIAKETQAKVLEVILREGSIEKAAGIVKKVVEDLANYRVPVEKLIIHEQITRELKRYKATGPHVAIAKRLQARGIKVKPGTIISYVVLKGSKKISDRVILFDEYDSSRHKYDPDYYIHNQVLPAVLRILEAFGYKEKDLEYQRMKQTGLGAWLKMGKK

SEQ ID NO: 528 - protein, 773 aa, unidentified
  REGION 1..773: note = Description of Unknown: Synthetic polypeptide
MILDTDYITENGKPVIRIFKKEKGEFKIEYDRNFEPYIYALLEDDESIEDIKKITGERHGKKVRIIRVEKVKKKFLGEPIEVWKLVFEHPQDVPAIRDAIRSHPAVREIFEYDIPFAKRYLIDKGLVPMEGGEELKLLAFNIATFYHEGDEFAEGEILMISYADESGAKVITWKKIDLPYVEVVSTEREAIKRFLQVLREKDPDVLLTYNGDNFDFAYIKKRCEKLGLKFTIGRDGSEPKIQRMGDRFAVEVKGRIHLDLAPVVRHTIRLPTYTLEAVYEAVFGKKKEKVYAEEIAEAWKSEEGLARVAQYSVEDARATYELGREFFPLEVELAKLIGQSVWDVSRSSTGNLVEWYLLRVAYERNELAPNKPGGEEYQRRMRSSYIGGYVKEPEKGLWESIAYLDFRSSAGSIIVTHNVSPDTLEKECKNYDVAPIVGYRFCKDFKGFIPSILEDLIETRQKVKRKMKATIDPIEFKMLDYRQRALKILANSYYGYQGYPKARWYSKECAESVTAWGRHYIETTIKEAEKFGFKVLYADTDGFFATIPNEKPETIKSKAKKFLKHINEKLPGMLELEYEGFYLRGFFVTKKKYALIDEDGHITTRGLEVVRRDWSEIAKETQAKVLEVILREGSIEKAAGIVKKVVEDLANYRVPVEKLIIHEQITRELKRYKATGPHVAIAKRLQARGIKVKPGTIISYVVLKGSKKISDRVILFDEYDSSRHKYDPDYYIHNQVLPAVLRILEAFGYKEKDLEYQRMKQTGLGAWLKMGKK

SEQ ID NO: 529 - protein, 773 aa, unidentified
  REGION 1..773: note = Description of Unknown: Synthetic polypeptide
VILDTDYITENGKPVIRIFKKEKGEFKIEYDRNFEPYIYALLEDDESIEDIKKITGERHGKKVRIIRVEKVKKKFLGEPIEVWKLVFEHPQDYPAIRDAIRSHPAVREIFEYDIPFAKRYLIDKGLVPFEGGEELKLLAFAIATFYHEGDEFAEGEILMISYADESGAKVITWKKIDLPYVEVVSTEREAIKRFLQVLREKDPDVLLTYNGDNFDFAYIKKRCEKLGLKFTIGRDGSEPKIQRMGDRFAVEVKGRIHLDLAPVVRHTIRLPTYTLEAVYEAVFGKKKEKVYAEEIAEAWKSEEGLKRVAQYSMEDARATYELGREFFPMEVELAKLIGQSVWDVSRSSTGNLVEWYLLRVAYERNELAPNKPGGEEYQRRMRSSYIGGYVKEPEKGLWESIAYLDFRSSAGSIIVTHNVSPDTLEKECKNYDVAPIVGYRFCKDFKGFIPSILEDLIETRQKVKRKMKATIDPIEKKMLDYRQRALKILANSYYGYQGYPKARWYSKECAESVTAWGRHYIETTIKEAEKFGFKVLYADTDGFFATIPNEKPETIKSKAKKFLKHINEKLPGMLELEYEGFYLRGFFVTKKKYALIDEDGHITTRGLEVVRRDWSEIAKETQAKVLEVILREGSIEKAAGIVKKVVEDLANYRVPVEKLIIHEQITRELKRYKATGPHVAIAKRLQARGIKVKPGTIISYVVLKGSKKISDRVILFDEYDSSRHKYDPDYYIHNQVLPAVLRILEAFGYKEKDLEYQRMKQTGLGAWLKMGKK

SEQ ID NO: 530 - protein, 773 aa, unidentified
  REGION 1..773: note = Description of Unknown: Synthetic polypeptide
MILDTDYITENGKPVIRIFKKEKGEFKIEYDRNFEPYIYALLEDDESIEDIKKITGERHGKKVRIIRVEKVKKKFLGEPIEVWKLVFEHPQDYPAIRDAIRSHPAVREIFEYDIPFAKRYLIDKGLVPMEGGEELKLLAFAIATFYHEGDEFAEGEILMISYADESGAKVITWKKIDLPYVEVVSTEREAIKRFLQVLREKDPDVLLTYNGDNFDFAYIKKRCEKLGLKFTIGRDGSEPKIQRMGDRFAVEVKGRIHLDLAPVVRHTIRLPTYTLEAVYEAVFGKKKEKVYAEEIAEAWKSEEGLKRVAQYSMEDARATYELGREFFPMEVELAKLIGQSVWDVSRSSTGNLVEWYLLRVAYERNELAPNKPGGEEYQRRMRSSYIGGYVKEPEKGLWESIAYLDFRSSAGSIIVTHNVSPDTLEKECKNYDVAPIVGYRFCKDFKGFIPSILEDLIETRQKVKRKMYATIDPIEKKMLDYRQRALKILANSYYGYQGYPKARWYSKECAESVTAWGRHYIETTIKEAEKFGFKVLYADTDGFFATIPNEKPETIKSKAKKFLKHINEKLPGMLELEYEGFYLRGFFVTKKKYALIDEDGHITTRGLEVVRRDWSEIAKETQAKVLEVILREGSIEKAAGIVKKVVEDLANYRVPVEKLIIHEQITRELKRYKATGPHVAIAKRLQARGIKVKPGTIISYVVLKGSKKISDRVILFDEYDSSRHKYDPDYYIHNQVLPAVLRILEAFGYKEKDLEYQRMKQTGLGAWLKMGKK

SEQ ID NO: 531 - protein, 773 aa, unidentified
  REGION 1..773: note = Description of Unknown: Synthetic polypeptide
MILDTDYITENGKPVIRIFKKEKGEFKIEYDRNFEPYIYALLEDDESIEDIKKITGERHGKKVRIIRVEKVKKKFLGEPIEVWKLVFEHPQDYPAIRDAIRSHPAVREIFEYDIPFAKRYLIDKGLVPMEGGEELKLLAFAIATFYHEGDEFAEGEILMISYADESGAKVITWKKIDLPYVEVVSTEREAIKRFLQVLREKDPDVLLTYNGDNFDFAYIKKRVEKLGLKFTIGRDGSEPKIQRMGDRFAVEVKGRIHLDLAPVVRHTIRLPTYTLEAVYEAVFGKKKEQVYAEEIAEAWKSEEGLKRVAQYSMEDARATYELGREFFPMEVELAKLIGQSVWDVSRSSTGNLVEWYLLRVAYERNELAPNKPGGEEYQRRMRSSYIGGYVKEPEKGLWESIAYLDFRSSAGSIIVTHNVSPDTLEKECKNYDVAPIVGYRFCKDFKGFIPSILEDLIETRQKVKRKMKATIDPIEKKMLDYRQRALKILANSYYGYQGYPKARWYSKECAESVTAWGRHYIETTIKEAEKFGFKVLYADTDGFFATIPNEKPETIKSKAKKFLKHINEKLPGMLELEYEGFYLRGFFVTKKKYALIDEDGHITTRGLEVVRRDWSEIAKETQAKVLEVILREGSIEKAAGIVKKVVEDLANYRVPVEKLIIHEQITRELKRYKATGPHVAIAKRLQARGIKVKPGTIISYVVLKGSKKISDRVILFDEYDSSRHKYDPDYYIHNQVLPAVLRILEAFGYKEKDLEYQRMKQTGLGAWLKMGKK

SEQ ID NO: 532 - protein, 757 aa, unidentified
  REGION 1..757: note = Description of Unknown: Synthetic polypeptide
MILDTDYITENGKPVIRIFKKEKGEFKIEYDRNFEPYIYALLEDDESIEDIKKITGERHGKKVRIIRVEKVKKKFLGEPIEVWKLVFEHPQDVPAIRDAIRSHPAVREIFEYDIPFAKRYLIDKGLVPMEGGEELKLLAFAIATFYHEGDEFAEGEILMISYADESGAKVITWKKIDLPYVEVVSTEREAIKRFLQVLREKDPDVLLTYNGDNFDFAYIKKRCEKLGLKFTIGRDGSEPKIQRMGDRFAVEVKGRIHLDLAPVVRHTIRLPTYTLEAVYEAVFGKKKEKVYAEEIAEAWKSEEGLKRVAQYSMEDARATYELGREFFPLEVELAKLIGQSVWDVSRSSTGNLVEWYLLRVAYERNELAPNKPGGEEYQRRMRSSYIGGYVKEPEKGLWESIAYLDFRSSAGSIIVTHNVSPDTLEKECKNYDVAPIVGYRFCKDFKGFIPSILEDLIETRQKVKRKMKATIDPIEKKMLDYRQRALKILANSYYGYMGYPKARWYSKECAESVTAWGRHYIETTIKEAEKFGFKVLYADTDGFFATIPNEKPETIKSKAKKFLKHINEKLPGMLELEYEGFYLRGFFVTKKKYALIDEDGHITTRGLEVVRRDWSEIAKETQAKVLEVILREGSIEKAAGIVKKVVEDLANYRVPVEKLIIHEQITRELKRYKATGPHVAIAKRLQARGIKVKPGTIISYVVLKGSKKISDRVILFDEYDSSRHKYDPDYYIHNQVLPAVLRILEAFGYKEKDLEYQ

SEQ ID NO: 533 - protein, 773 aa, unidentified; identical to SEQ ID NO: 49
  REGION 1..773: note = Description of Unknown: Synthetic polypeptide

SEQ ID NO: 534 - protein, 773 aa, unidentified
  REGION 1..773: note = Description of Unknown: Synthetic polypeptide
MILDTDYITENGKPVIRIFKKEKGEFKIEYDRNFEPYIYALLEDDESIEDIKKITGERHGKKVRIIRVEKVKKKFLGEPIEVWKLVFEHPQDYPAIRDAIRSHPAVREIFEYDIPFAKRYLIDKGLVPMEGGEELKLLAFAIATFYHEGDEFAEGEILMISYADESGAKVITWKKIDLPYVEVVSTEREAIKRFLQVLREKDPDVLLTYNGDNFDFAYIKKRCEKLGLKFTIGRDGSEPKIQRMGDRFAVEVKGRIHLDLAPVVRHTIRLPTYTLEAVYEAVFGKKKEKVYAEEIAEAWKSEEGLKRVAQYSMEDARATYELGREFFPMEVELAKLIGQSVWDVSRSSTGNLVEWYLLRVAYERNELAPNKPGGEEYQRRMRSSYIGGYVKEPEKGLWESIAYLDFRSSAGSIIVTHNVSPDTLEKECKNYDVAPIVGYRFCKDFKGFIPSILEDLIETRQKVKRKMLATIDPIEKKMLDYRQRALKILANSYYGYQGYPKARWYSKECAESVTAWGRHYIETTIKEAEKFGFKVLYADTDGFFATIPNEKPETIKSKAKKFLKHINEKLPGMLELEYEGFYLRGFFVTKKKYALIDEDGHITTRGLEVVRRDWSEIAKETQAKVLEVILREGSIEKAAGIVKKVVEDLANYRVPVEKLIIHEQITRELKRYKATGPHVAIAKRLQARGIKVKPGTIISYVVLKGSKKISDRVILFDEYDSSRHKYDPDYYIHNQVLPAVLRILEAFGYKEKDLEYQRMKQTGLGAWLKMGKK

SEQ ID NO: 535 - protein, 773 aa, unidentified
  REGION 1..773: note = Description of Unknown: Synthetic polypeptide
MILDTDYITENGKPVIRIFKKEKGEFKIEYDRNFEPYIYALLEDDESIEDIKKITGERHGKKVRIIRVEKVKKKFLGEPIEVWKLVFEHPQDYPAIRDAIRSHPAVREIFEYDIPFAKRYLIDKGLVPMEGGEELKLLAFAIATFYHEGDEFAEGEILMISYADESGAKVITWKKIDLPYVEVVSTEREAIKRFLQVLREKDPDVLLTYNGDNFDFAYIKKRDEKLGLKFTIGRDGSEPKIQRMGDRFAVEVKGRIHLDLAPVVRHTIRLPTYTLEAVYEAVFGKKKEQVYAEEIAEAWKSEEGLKRVAQYSMEDARATYELGREFFPMEVELAKLIGQSVWDVSRSSTGNLVEWYLLRVAYERNELAPNKPGGEEYQRRMRSSYIGGYVKEPEKGLWESIAYLDFRSSAGSIIVTHNVSPDTLEKECKNYDVAPIVGYRFCKDFKGFIPSILEDLIETRQKVKRKMKATIDPIEKKMLDYRQRALKILANSYYGYQGYPKARWYSKECAESVTAWGRHYIETTIKEAEKFGFKVLYADTDGFFATIPNEKPETIKSKAKKFLKHINEKLPGMLELEYEGFYLRGFFVTKKKYALIDEDGHITTRGLEVVRRDWSEIAKETQAKVLEVILREGSIEKAAGIVKKVVEDLANYRVPVEKLIIHEQITRELKRYKATGPHVAIAKRLQARGIKVKPGTIISYVVLKGSKKISDRVILFDEYDSSRHKYDPDYYIHNQVLPAVLRILEAFGYKEKDLEYQRMKQTGLGAWLKMGKK

SEQ ID NO: 536 - protein, 773 aa, unidentified
  REGION 1..773: note = Description of Unknown: Synthetic polypeptide
YILDTDYITENGKPVIRIFKKEKGEFKIEYDRNFEPYIYALLEDDESIEDIKKITGERHGKKVRIIRVEKVKKKFLGEPIEVWKLVFEHPQDYPAIRDAIRSHPAVREIFEYDIPFAKRYLIDKGLVPYEGGEELKLLAFAIATFYHEGDEFAEGEILMISYADESGAKVITWKKIDLPYVEVVSTEREAIKRFLQVLREKDPDVLLTYNGDNFDFAYIKKRCEKLGLKFTIGRDGSEPKIQRMGDRFAVEVKGRIHLDLAPVVRHTIRLPTYTLEAVYEAVFGKKKEKVYAEEIAEAWKSEEGLKRVAQYSMEDARATYELGREFFPMEVELAKLIGQSVWDVSRSSTGNLVEWYLLRVAYERNELAPNKPGGEEYQRRMRSSYIGGYVKEPEKGLWESIAYLDFRSSAGSIIVTHNVSPDTLEKECKNYDVAPIVGYRFCKDFKGFIPSILEDLIETRQKVKRKMKATIDPIEKKMLDYRQRALKILANSYYGYQGYPKARWYSKECAESVTAWGRHYIETTIKEAEKFGFKVLYADTDGFFATIPNEKPETIKSKAKKFLKHINEKLPGMLELEYEGFYLRGFFVTKKKYALIDEDGHITTRGLEVVRRDWSEIAKETQAKVLEVILREGSIEKAAGIVKKVVEDLANYRVPVEKLIIHEQITRELKRYKATGPHVAIAKRLQARGIKVKPGTIISYVVLKGSKKISDRVILFDEYDSSRHKYDPDYYIHNQVLPAVLRILEAFGYKEKDLEYQRMKQTGLGAWLKMGKK

SEQ ID NO: 537 - protein, 773 aa, unidentified
  REGION 1..773: note = Description of Unknown: Synthetic polypeptide
MILDTDYITENGKPVIRIFKKEKGEFKIEYDRNFEPYIYALLEDDESIEDIKKITGERHGKKVRIIRVEKVKKKFLGEPIEVWKLVFEHPQDYPAIRDAIRSHPAVREIFEYDIPFAKRYLIDKGLVPMEGGEELKLLAFAIATFYHEGDEFAEGEILMISYADESGAKVITWKKIDLPYVEVVSTEREAIKRFLQVLREKDPDVLLTYNGDNFDFAYIKKRCEKLGLKFTIGRDGSEPKIQRMGDRFAVEVKGRIHLDLAPVVRHTIRLPTYTLEAVYEAVFGKKKEKVYAEEIAEAWKSEEGLKRVAQYSMEDARATYELGREFFPMEVELAKLIGQSVWDVSRSSTGNLVEWYLLRVAYERNELAPNKPGGEEYQRRMRSSYIGGYVKEPEKGLWESIAYLDFRSSAGSIIVTHNVSPDTLEKECKNYDVAPIVGYRFCKDFKGFIPSILEDLIETRQKVKRKMKATIDPIEKKMLDYRQRALKILANSYYGYQGYPKARWYSKECAESVTAWGRHYIETTIKEAEKFGFKVLYADTDGFFATIPNEKPETIKSKAKKFLKHINEKLPGMLELEYEGFYLRGFFVTKKKYALIDEDGVITTRGLEVVRRDWSEIAKETQAKVLEVILREGSIEKAAGIVKKVVEDLANYRVPVEKLIIHEQITRELKRYKATGPHVAIAKRLQARGIKVKPGTIISYVVLKGSKKISDRVILFDEYDSSRHKYDPDYYIHNQVLPAVLRILEAFGYKEKDLEYQRMKQTGLGAWLKMGKK

SEQ ID NO: 538 - protein, 773 aa, unidentified
  REGION 1..773: note = Description of Unknown: Synthetic polypeptide
MILDTDYITENGKPVIRIFKKEKGEFKIEYDRNFEPYIYALLEDDESIEDIKKITGERHGKKVRIIRVEKVKKKFLGEPIEVWKLVFEHPQDYPAIRDAIRSHPAVREIFEYDIPFAKRYLIDKGLVPMEGGEELKLLAFAIATFYHEGDEFAEGEILMISYADESGAKVITWKKIDLPYVEVVSTEREAIKRFLQVLREKDPDVLLTYNGDNFDFAYIKKRCEKLGLKFTIGRDGSEPKIQRMGDRFAVEVKGRIHLDLAPVVRHTIRLPTYTLEAVYEAVFGKKKEKVYAEEIAEAWKSEEGLKRVAQYSMEDARATYELGREFFPMEVELAKLIGQSVWDVSRSSLGNLVEWYLLRVAYERNELAPNKPGGEEYQRRMRSSYIGGYVKEPEKGLWESIAYLDFRSSAGSIIVTHNVSPDTLEKECKNYDVAPIVGYRFCKDFKGFIPSILEDLIETRQKVKRKMKATIDPIEKKMLDYRQRALKILANSYYGYQGYPKARWYSKECAESVTAWGRHYIETTIKEAEKFGFKVLYADTDGFFATIPNEKPETIKSKAKKFLKHINEKLPGMLELEYEGFYLRGFFVTKKKYALIDEDGHITTRGLEVVRRDWSEIAKETQAKVLEVILREGSIEKAAGIVKKVVEDLANYRVPVEKLIIHEQITRELKRYKATGPHVAIAKRLQARGIKVKPGTIISYVVLKGSKKISDRVILFDEYDSSRHKYDPDYYIHNQVLPAVLRILEAFGYKEKDLEYQRMKQTGLGAWLKMGKK

SEQ ID NO: 539 - protein, 757 aa, unidentified
  REGION 1..757: note = Description of Unknown: Synthetic polypeptide
MILDTDYITENGKPVIRIFKKEKGEFKIEYDRNFEPYIYALLEDDESIEDIKKITGERHGKKVRIIRVEKVKKKFLGEPIEVWKLVFEHPQDVPAIRDAIRSHPAVREIFEYDIPFAKRYLIDKGLVPMEGGEELKLLAFAIATFYHEGDEFAEGEILMISYADESGAKVITWKKIDLPYVEVVSTEREAIKRFLQVLREKDPDVLLTYNGDNFDFAYIKKRCEKLGLKFTIGRDGSEPKIQRMGDRFAVEVKGRIHLDLAPVVRHTIRLPTYTLEAVYEAVFGKKKEKVYAEEIAEAWKSEEGLKRVAQYSMEDARATYELGREFFPMEVELAKLIGQSVWDVSRSSTGNLVEWYLLRVAYERNELAPNKPGGEEYQRRMRSSYIGGYVKEPEKGLWESIAYLDFRSSAGSIIVTHNVSPDTLEKECKNYDVAPIVGYRFCKDFKGFIPSILEDLIETRQKVKRKMKATIDPIEKKMLDYRQRALKILANSYYGYQGYPKARWYSKECAESVTAWGRHYIETTIKEAEKFGFKVLYADTDGFFATIPNEKPETIKSKAKKFLKHINEKLPGMLELEYEGFYLRGFFVTKKKYALIDEDGHITTRGLEVVRRDWSEIAKETQAKVLEVILREGSIEKAAGIVKKVVEDLANYRVPVEKLIIHEQITRKLKDYKATGPHVAIAKRLQARGITVKPGTIISYVVLKGSKKISDRVILFDEYDSSRHKYDPDYYIHNQVLPAVLRILEAFGYKEKDLEYQ

SEQ ID NO: 540 - protein, 773 aa, unidentified
  REGION 1..773: note = Description of Unknown: Synthetic polypeptide
MILDTDYITENGKPVIRIFKKEKGEFKIEYDRNFEPYIYALLEDDESIEDIKKITGERHGKKVRIIRVEKVKKKFLGEPIEVWKLVFEHPLDFPAIRDAIRSHPAVREIFEYDIPFAKRYLIDKGLVPMEGGEELKLLAFNIATFYHEGDEFAEGEILMISYADESGAKVITWKKIDLPYVEVVSTEREAIKRFLQVLREKDPDVLLTYNGDNFDFAYIKKRCEKLGLKFTIGRDGSEPKIQRMGDRFAVEVKGRIHLDLAPVVRHTIRLPTYTLEAVYEAVFGKKKEKVYAEEIAEAWKSEEGLKRVAQYSMEDARATYELGREFFPLEVELAKLIGQSVWDVSRSSTGNLVEWYLLRVAYERNELAPNKPGGEEYQRRMRSSYIGGYVKEPEKGLWESIAYLDFRSSAGSIIVTHNVSPDTLEKECKNYDVAPIVGYRFCKDFKGFIPSILEDLIETRQKVKRKMKATIDPIEKKMLDYRQRALKILANSYYGYQGYPKARWYSKECAESVTAWGRHYIETTIKEAEKFGFKVLYADTDGFFATIPNEKPETIKSKAKKFLKHINEKLPGMLELEYEGFYLRGFFVTKKKYALIDEDGHITTRGLEVVRRDWSEIAKETQAKVLEVILREGSIEKAAGIVKKVVEDLANYRVPVEKLIIHEQITRELKRYKATGPHVAIAKRLQARGIKVKPGTIISYVVLKGSKKISDRVILFDEYDSSRHKYDPDYYIHNQVLPAVLRILEAFGYKEKDLEYQRMKQTGLGAWLKMGKK

SEQ ID NO: 541 - protein, 773 aa, unidentified
  REGION 1..773: note = Description of Unknown: Synthetic polypeptide
MILDTDYITENGKPVIRIFKKEKGEFKIEYDRNFEPYIYALLEDDESIEDIKKITGERHGKKVRIIRVEKVKKKFLGEPIEVWKLVFEHPQDVPAIRDAIRSHPAVREIFEYDIPFAKRYLIDKGLVPMEGGEELKLLAFNIATFYHEGDEFAEGEILMISYADESGAKVITWKKIDLPYVEVVSTEREAIKRFLQVLREKDPDVLLTYNGDNFDFAYIKKRCEKLGLKFTIGRDGSEPKIQRMGDRFAVEVKGRIHLDLAPVVRHTIRLPTYTLEAVYEAVFGKKKEKVYAEEIAEAWKSEEGLKRVAQYSMEDARATYELGREFFPLEVELAKLIGQSVWDVSRSSTGNLVEWYLLRVAYERNELAPNKPGGEEYQRRMRSSYIGGYVKEPEKGLWESIAYLDFRSSAGSIIVTHNVSPDTLEKECKNYDVAPIVGYRFCKDFKGFIPSILEDLIETRQKVKRKMKATIDPIEKKMLDYRQRALKILANSYYGYQGYPKARWYSKECAESVTAWGRHYIETTIKEAEKFGFKVLYADTDGFFATIPNEKPETIKSKAKKFLKHINEKLPGMLELEYEGFYLRGFFVTKKKYALIDEDGHITTRELEVVRRDWSEIAKETQAKVLEVILREGSIEKAAGIVKKVVEDLANYRVPVEKLIIHEQITRELKRYKATGPHVAIAKRLQARGIKVKPGTIISYVVLKGSKKISDRVILFDEYDSSRHKYDPDYYIHNQVLPAVLRILEAFGYKEKDLEYQRMKQTGLGAWLKMGKK

SEQ ID NO: 542 - protein, 773 aa, unidentified
  REGION 1..773: note = Description of Unknown: Synthetic polypeptide
FILDTDYITENGKPVIRIFKKEKGEFKIEYDRNFEPYIYALLEDDESIEDIKKITGERHGKKVRIIRVEKVKKKFLGEPIEVWKLVFEHPQDYPAIRDAIRSHPAVREIFEYDIPFAKRYLIDKGLVPIEGGEELKLLAFAIATFYHEGDEFAEGEILMISYADESGAKVITWKKIDLPYVEVVSTEREAIKRFLQVLREKDPDVLLTYNGDNFDFAYIKKRCEKLGLKFTIGRDGSEPKIQRMGDRFAVEVKGRIHLDLAPVVRHTIRLPTYTLEAVYEAVFGKKKEKVYAEEIAEAWKSEEGLKRVAQYSMEDARATYELGREFFPMEVELAKLIGQSVWDVSRSSTGNLVEWYLLRVAYERNELAPNKPGGEEYQRRMRSSYIGGYVKEPEKGLWESIAYLDFRSSAGSIIVTHNVSPDTLEKECKNYDVAPIVGYRFCKDFKGFIPSILEDLIETRQKVKRKMKATIDPIEKKMLDYRQRALKILANSYYGYQGYPKARWYSKECAESVTAWGRHYIETTIKEAEKFGFKVLYADTDGFFATIPNEKPETIKSKAKKFLKHINEKLPGMLELEYEGFYLRGFFVTKKKYALIDEDGHITTRGLEVVRRDWSEIAKETQAKVLEVILREGSIEKAAGIVKKVVEDLANYRVPVEKLIIHEQITRELKRYKATGPHVAIAKRLQARGIKVKPGTIISYVVLKGSKKISDRVILFDEYDSSRHKYDPDYYIHNQVLPAVLRILEAFGYKEKDLEYQRMKQTGLGAWLKMGKK

SEQ ID NO: 543 - protein, 773 aa, unidentified
  REGION 1..773: note = Description of Unknown: Synthetic polypeptide
MILDTDYITENGKPVIRIFKKEKGEFKIEYDRNFEPYIYALLEDDESIEDIKKITGERHGKKVRIIRVEKVKKKFLGEPIEVWKLVFEHPQDVPAIRDAIRSHPAVREIFEYDIPFAKRYLIDKGLVPMEGGEELKLLAFAIATFYHEGDEFAEGEILMISYADESGAKVITWKKIDLPYVEVVSTEREAIKRFLQVLREKDPDVLLTYNGDNFDFAYIKKRCEKLGLKFTIGRDGSEPKIQRMGDRFAVEVKGRIHLDLAPVVRHTIRLPTYTLEAVYEAVFGKKKEKVYAEEIAEAWKSEEGLKRVAQYSMEDARATYELGREFFPMEVELAKLIGQSVWDVSRSSTGNLVEWYLLRVAYERNELAPNKPGGEEYQRRMRSSYIGGYVKEPEKGLWESIAYLDFRSSAGSIIVTHNVSPDTLEKECKNYDVAPIVGYRFCKDFKGFIPSILEDLIETRQKVKRKMKATIDPIEKKMLDYRQRALKILANSYYGYQGYPKARWYSKEDAERVTAWGRHYIETTIKEAEKFGFKVLYADTDGFFATIPNEKPETIKSKAKKFLKHINEKLPGMLELEYEGFYLRGFFVTKKKYALIDEDGHITTRGLEVVRRDWSEIAKETQAKVLEVILREGSIEKAAGIVKKVVEDLANYRVPVEKLIIHEQITRELKDYKATGPHVAIAKRLQARGIKVKPGTIISYVVLKGSKKISDRVILFDEYDSSRHKYDPDYYIHNQVLPAVLRILEAFGYKEKDLEYQRMKQTGLGAWLKMGKK

SEQ ID NO: 544 - protein, 773 aa, unidentified
  REGION 1..773: note = Description of Unknown: Synthetic polypeptide
MILDTDYITENGKPVIRIFKKEKGEFKIEYDRNFEPYIYALLEDDESIEDIKKITGERHGKKVRIIRVEKVKKKFLGEPIEVWKLVFEHPQDYPAIRDAIRSHPAVREIFEYDIPFAKRYLIDKGLVPMEGGEELKLLAFAIATFYHEGDEFAEGEILMISYADESGAKVITWKKIDLPYVEVVSTEREAIKRFLQVLREKDPDVLLTYNGDNFDFAYIKKRCEKLGLKFTIGRDGSEPKIQRMGDRFAVEVKGRIHLDLAPVVRHTIRLPTYTLEAVYEAVFGKKKEKVYAEEIAEAWKSEEGLKRVAQYSMEDARATYELGREFFPEEVELAKLIGQSVWDVSRSSTGNLVEWYLLRVAYERNELAPNKPGGEEYQRRMRSSYIGGYVKEPEKGLWESIAYLDFRSSAGSIIVTHNVSPDTLEKECKNYDVAPIVGYRFCKDFKGFIPSILEDLIETRQKVKRKMKATIDPIEKKMLDYRQRALKILANSYYGYQGYPKARWYSKECAESVTAWGRHYIETTIKEAEKFGFKVLYADTDGFFATIPNEKPETIKSKAKKFLKHINEKLPGMLELEYEGFYLRGFFVTKKKYALIDEDGHITTRGLEVVRRDWSEIAKETQAKVLEVILREGSIEKAAGIVKKVVEDLANYRVPVEKLIIHEQITRELKRYKATGPHVAIAKRLQARGIKVKPGTIISYVVLKGSKKISDRVILFDEYDSSRHKYDPDYYIHNQVLPAVLRILEAFGYKEKDLEYQRMKQTGLGAWLKMGKK

SEQ ID NO: 545 - protein, 773 aa, unidentified
  REGION 1..773: note = Description of Unknown: Synthetic polypeptide
MILDTDYITENGKPVIRIFKKEKGEFKIEYDRNFEPYIYALLEDDESIEDIKKITGERHGKKVRIIRVEKVKKKFLGEPIEVWKLVFEHPQDYPAIRDAIRSHPAVREIFEYDIPFAKRYLIDKGLVPMEGGEELKLLAFAIATFYHEGDEFAEGEILMISYADESGAKVITWKKIDLPYVEVVSTEREAIKRFLQVLREKDPDVLLTYNGDNFDFAYIKKRCEKLGLKFTIGRDGSEPKIQRMGDRFAVEVKGRIHLDLAPVVRHTIRLPTYTLEAVYEAVFGKKKEKVYAEEIAEAWKSEEGLKRVAQYSMEDARATYELGREFFPMEVELAKLIGQSVWDVSRSSTGNLVEWYLLRVAYERNELAPNKPGGEEYQRRMRSSYIGGYVKEPEKGLWESIAYLDFRSSAGSIIVTHNVSPDTLEKECKNYDVAPIVGYRFCKDFKGFIPSILEDLIETRQKVKRKMKATIDPIEKKMLDYRQRALKILANSYYGYRGYPKARWYNKEAAESVTAWGRHYIETTIKEAEKFGFKVLYADTDGFFATIPNEKPETIKSKAKKFLKHINEKLPGMLELEYEGFYLRGFFVTKKKYALIDEDGHITTRGLEVVRRDWSEIAKETQAKVLEVILREGSIEKAAGIVKKVVEDLANYRVPVEKLIIHEQITRELKRYKATGPHVAIAKRLQARGIKVKPGTIISYVVLKGSKKISDRVILFDEYDSSRHKYDPDYYIHNQVLPAVLRILEAFGYKEKDLEYQRMKQTGLGAWLKMGKK

SEQ ID NO: 546 - protein, 773 aa, unidentified
  REGION 1..773: note = Description of Unknown: Synthetic polypeptide
MILDTDYITENGKPVIRIFKKEKGEFKIEYDRNFEPYIYALLEDDESIEDIKKITGERHGKKVRIIRVEKVKKKFLGEPIEVWKLVFEHPQDYPAIRDAIRSHPAVREIFEYDIPFAKRYLIDKGLVPMEGGEELKLLAFAIATFYHEGDEFAEGEILMISYADESGAKVITWKKIDLPYVEVVSTEREAIKRFLQVLREKDPDVLLTYNGDNFDFAYIKKRCEKLGLKFTIGRDGSEPKIQRMGDRFAVEVKGRIHLDLAPVVRHTIRLPTYTLEAVYEAVFGKKKEKVYAEEIAEAWKSEEGLKRVAQYSMEDARATYELGREFFPMEVELAKLIGQSVWDVSRSSTGNLVEWYLLRVAYERNELAPNKPGGEEYQRRMRSSYIGGYVKEPEKGLWESIAYLDFRSSAGSIIVTHNVSPDTLEKECKNYDVAPIVGYRFCKDFKGFIPSILEDLIETRQKVKRKMKATIDPIEKKMLDYRQRALKILANSYYGYFGYPKARWYNKELAESVTAWGRHYIETTIKEAEKFGFKVLYADTDGFFATIPNEKPETIKSKAKKFLKHINEKLPGMLELEYEGFYLRGFFVTKKKYALIDEDGHITTRGLEVVRRDWSEIAKETQAKVLEVILREGSIEKAAGIVKKVVEDLANYRVPVEKLIIHEQITRELKRYKATGPHVAIAKRLQARGIKVKPGTIISYVVLKGSKKISDRVILFDEYDSSRHKYDPDYYIHNQVLPAVLRILEAFGYKEKDLEYQRMKQTGLGAWLKMGKK

SEQ ID NO: 547 - protein, 773 aa, unidentified
  REGION 1..773: note = Description of Unknown: Synthetic polypeptide
MILDTDYITENGKPVIRIFKKEKGEFKIEYDRNFEPYIYALLEDDESIEDIKKITGERHGKKVRIIRVEKVKKKFLGEPIEVWKLVFEHPQDVPAIRDAIRSHPAVREIFEYDIPFAKRYLIDKGLVPMEGGEELKLLAFAIATFYHEGDEFAEGEILMISYADESGAKVITWKKIDLPYVEVVSTEREAIKRFLQVLREKDPDVLLTYNGDNFDFAYIKKRCEKLGLKFTIGRDGSEPKIQRMGDRFAVEVKGRIHLDLAPVVRHTIRLPTYTLEAVYEAVFGKKKEKVYAEEIAEAWKSEEGLKRVAQYSMEDARATYELGREFFPMEVELAKLIGQSVWDVSRSSTGNLVEWYLLRVAYERNELAPNKPGGEEYQRRMRSSYIGGYVKEPEKGLWESIAYLDFRSSAGSIIVTHNVSPDTLEKECKNYDVAPIVGYRFCKDFKGFIPSILEDLIETRQKVKRKMKATIDPIEKKMLDYRQRALKILANSYYGYQGYPKARWYSKECAESVTAWGRHYIETTIKEAEKFGFKVLYADTDGFFATIPNEKPETIKSKAKKFLKHINEKLPGMLELEYEGFYLRGFFVTKKKYALIDEDGHITTRGLEVSRRDWSEIAKETQAKVLEVILREGSIEKAAGIVKKVVEDLANYRVPVEKLIIHEQITRELKRYKATGPHVAIAKRLQARGIKVKPGTIISYVVLKGSKKISDRVILFDEYDSSRHKYDPDYYIHNQVLPAVLRILEAFGYKEKDLEYQRMKQTGLGAWLKMGKK

SEQ ID NO: 548 - protein, 773 aa, unidentified
  REGION 1..773: note = Description of Unknown: Synthetic polypeptide
MILDTDYITENGKPVIRIFKKEKGEFKIEYDRNFEPYIYALLEDDESIEDIKKITGERHGKKVRIIRVEKVKKKFLGEPIEVWKLVFEHPQDYPAIRDAIRSHPAVREIFEYDIPFAKRYLIDKGLVPMEGGEELKLLAFAIATFYHEGDEFAEGEILMISYADESGAKVITWKKIDLPYVEVVSTEREAIKRFLQVLREKDPDVLLTYNGDNFDFAYIKKRCEKLGLKFTIGRDGSEPKIQRMGDRFAVEVKGRIHLDLAPVVRHTIRLPTYTLEAVYEAVFGKKKEKVYAEEIAEAWKSEEGLKRVAQYSMEDARATYELGREFFPMEVELAKLIGQSVWDVSRSSTGNLVEWYLLRVAYERNELAPNKPGGEEYQRRMRSSYNGGYVKEPEKGLWESIAYLDFRSSAGSIIVTHNVSPDTLEKECKNYDVAPIVGYRFCKDFKGFIPSILEDLIETRQKVKRKMKATIDPIEKKMLDYRQRALKILANSYYGYQGYPKARWYSKECAESVTAWGRHYIETTIKEAEKFGFKVLYADTDGFFATIPNEKPETIKSKAKKFLKHINEKLPGMLELEYEGFYLRGFFVTKKKYALIDEDGHITTRGLEVVRRDWSEIAKETQAKVLEVILREGSIEKAAGIVKKVVEDLANYRVPVEKLIIHEQITRELKRYKATGPHVAIAKRLQARGIKVKPGTIISYVVLKGSKKISDRVILFDEYDSSRHKYDPDYYIHNQVLPAVLRILEAFGYKEKDLEYQRMKQTGLGAWLKMGKK

SEQ ID NO: 549 - protein, 773 aa, unidentified
  REGION 1..773: note = Description of Unknown: Synthetic polypeptide
MILDTDYITENGKPVIRIFKKEKGEFKIEYDRNFEPYIYALLEDDESIEDIKKITGERHGKKVRIIRVEKVKKKFLGEPIEVWKLVFEHPQDYPAIRDAIRSHPAVREIFEYDIPFAKRYLIDKGLVPMEGGEELKLLAFAIATFYHEGDEFAEGEILMISYADESGAKVITWKKIDLPYVEVVSTEREAIKRFLQVLREKDPDVLLTYNGDNFDFAYIKKRCEKLGLKFTIGRDGSEPKIQRMGDRFAVEVKGRIHLDLAPVVRHTIRLPTYTLEAVYEAVFGKKKEKVYAEEIAEAWKSEEGLKRVAQYSMEDARATYELGREFFPMEVELAKLIGQSVWDVSRSSTGNLVEWYLLRVAYERNELAPNKPGGEEYQRRMRSSYIGGYVKEPEKGLWESIAYLDFRSSAGSIIVTHNVSPDTLEKECKNYDVAPIVGYRFCKDFKGFIPSILEDLIETRQKVKRKMKATIDPIEKKMLDYRQRALKILANSYYGYQGYPKARWYSKECAESVTAWGRHYIETTIKEAEKFGFKVLYADTDGFFATIPNEKPETIKSKAKKFLKHINEKLPGMLELEYEGFYLRGFFVTKKAYALIDEDGHITTRGLEVVRRDWSEIAKETQAKVLEVILREGSIEKAAGIVKKVVEDLANYRVPVEKLIIHEQITRELKRYKATGPHVAIAKRLQARGIKVKPGTIISYVVLKGSKKISDRVILFDEYDSSRHKYDPDYYIHNQVLPAVLRILEAFGYKEKDLEYQRMKQTGLGAWLKMGKK

SEQ ID NO: 550 - protein, 773 aa, unidentified
  REGION 1..773: note = Description of Unknown: Synthetic polypeptide
MILDTDYITENGKPVIRIFKKEKGEFKIEYDRNFEPYIYALLEDDESIEDIKKITGERHGKKVRIIRVEKVKKKFLGEPIEVWKLVFEHPQDYPAIRDAIRSHPAVREIFEYDIPFAKRYLIDKGLVPMEGGEELKLLAFAIATFYHEGDEFAEGEILMISYADESGAKVITWKKIDLPYVEVVSTEREAIKRFLQVLREKDPDVLLTYNGDNFDFAYIKKRCEKLGLKFTIGRDGSEPKIQRMGDRFAVEVKGRIHLDLAPVVRHTIRLPTYTLEAVYEAVFGKKKEKVYAEEIAEAWKSEEGLKRVAQYSMEDARATYELGREFFPMEVELAKLIGQSVWDVSRSSTGNLVEWYLLRVAYERNELAPNKPGGEEYQRRMRSSYIGGYVKEPEKGLWESIAYLDFRSSAGSIIVTHNVSPDTLEKECKNYDVAPIVGYRFCKDFKGFIPSILEDLIETRQKVKRKMEATIDPIEKKMLDYRQRALKILANSYYGYQGYPKARWYSKECAESVTAWGRHYIETTIKEAEKFGFKVLYADTDGFFATIPNEKPETIKSKAKKFLKHINEKLPGMLELEYEGFYLRGFFVTKKKYALIDEDGHITTRGLEVVRRDWSEIAKETQAKVLEVILREGSIEKAAGIVKKVVEDLANYRVPVEKLIIHEQITRELKRYKATGPHVAIAKRLQARGIKVKPGTIISYVVLKGSKKISDRVILFDEYDSSRHKYDPDYYIHNQVLPAVLRILEAFGYKEKDLEYQRMKQTGLGAWLKMGKK

SEQ ID NO: 551 - protein, 757 aa, unidentified
  REGION 1..757: note = Description of Unknown: Synthetic polypeptide
MILDTDYITENGKPVIRIFKKEKGEFKIEYDRNFEPYIYALLEDDESIEDIKKITGERHGKKVRIIRVEKVKKKFLGEPIEVWKLVFEHPQDVPAIRDAIRSHPAVREIFEYDIPFAKRYLIDKGLVPMEGGEELKLLAFAIATFYHEGDEFAEGEILMISYADESGAKVITWKKIDLPYVEVVSTEREAIKRFLQVLREKDPDVLLTYNGDNFDFAYIKKRCEKLGLKFTIGRDGSEPKIQRMGDRFAVEVKGRIHLDLAPVVRHTIRLPTYTLEAVYEAVFGKKKEKVYAEEIAEAWKSEEGLKRVAQYSMEDARATYELGREFFPMEVELAKLIGQSVWDVSRSSTGNLVEWYLLRVAYERNELAPNKPGGEEYQRRMRSSYIGGYVKEPEKGLWESIAYLDFRSSAGSIIVTHNVSPDTLEKECKNYDVAPIVGYRFCKDFKGFIPSILEDLIETRQKVKRKMKATIDPIEKKMLDYRQRALKILANSYYGYQGYPKARWYSKECAESVTAWGRHYIETTIKEAEKFGFKVLYADTDGFFATIPNEKPETIKSKAKKFLKHINEKLPGMLELEYEGFYLRGFFVTKKKYALIDEDGHITTRGLEVVRRDWSEIAKETQAKVLEVILREGSIEKAAGIVKKVVEDLANYRVPVEKLIIHEQITRKLKDYKATGPHVAIAKRLQARGIKVRPGTIISYVVLKGSKKISDRVILFDEYDSSRHKYDPDYYIHNQVLPAVLRILEAFGYKEKDLEYQ

SEQ ID NO: 552 - protein, 773 aa, unidentified
  REGION 1..773: note = Description of Unknown: Synthetic polypeptide
MILDTDYITENGKPVIRIFKKEKGEFKIEYDRNFEPYIYALLEDDESIEDIKKITGERHGKKVRIIRVEKVKKKFLGEPIEVWKLVFEHPQDYPAIRDAIRSHPAVREIFEYDIPFAKRYLIDKGLVPMEGGEELKLLAFAIATFYHEGDEFAEGEILMISYADESGAKVITWKKIDLPYVEVVSTEREAIKRFLQVLREKDPDVLLTYNGDNFDFAYIKKRCEKLGLKFTIGRDGSEPKIQRMGDRFAVEVKGRIHLDLAPVVRHTIRLPTYTLEAVYEAVFGKKKEKVYAEEIAEAWKSEEGLKRVAQYSMEDARATYELGREFFPMEVELAKLIGQSVWDVSRSSTGNLVEWYLLRVAYERNELAPNKPGGEEYQRRMRSSYIGGYVKEPEKGLWESIAYLDFRSSAGSIIVTHNVSPDTLEKECKNYDVAPIVGYRFCKDFKGFIPSILEDLIETRQKVKRKMKATIDPIEKKMLDYRQRALKILANSYYGYQGYPKARWYSKECAESVTAWGRHYIETTIKEAEKFGFKVLYADTDGFFATIPNEKPETIKSKAKKFLKHINEKLPGMLELEYEGFYLRVFFVTKKKYALIDEDGHITTRGLEVVRRDWSEIAKETQAKVLEVILREGSIEKAAGIVKKVVEDLANYRVPVEKLIIHEQITRELKRYKATGPHVAIAKRLQARGIKVKPGTIISYVVLKGSKKISDRVILFDEYDSSRHKYDPDYYIHNQVLPAVLRILEAFGYKEKDLEYQRMKQTGLGAWLKMGKK

SEQ ID NO: 553 - protein, 773 aa, unidentified
  REGION 1..773: note = Description of Unknown: Synthetic polypeptide
MILDTDYITENGKPVIRIFKKEKGEFKIEYDRNFEPYIYALLEDDESIEDIKKITGERHGKKVRIIRVEKVKKKFLGEPIEVWKLVFEHPQDVPAIRDAIRSHPAVREIFEYDIPFAKRYLIDKGLVPMEGGEELKLLAFNIATFYHEGDEFAEGEILMISYADESGAKVITWKKIDLPYVEVVSTEREAIKRFLQVLREKDPDVLLTYNGDNFDFAYIKKRCEKLGLKFTIGRDGSEPKIQRMGDRFAVEVKGRIHLDLAPVVRHTIRLPTYTLEAVYEAVFGKKKEKVYAEEIAEAWKSEEGLKRVAQYSNEDARATYELGREFFPLEVELAKLIGQSVWDVSRSSTGNLVEWYLLRVAYERNELAPNKPGGEEYQRRMRSSYIGGYVKEPEKGLWESIAYLDFRSSAGSIIVTHNVSPDTLEKECKNYDVAPIVGYRFCKDFKGFIPSILEDLIETRQKVKRKMKATIDPIEKKMLDYRQRALKILANSYYGYQGYPKARWYSKECAESVTAWGRHYIETTIKEAEKFGFKVLYADTDGFFATIPNEKPETIKSKAKKFLKHINEKLPGMLELEYEGFYLRGFFVTKKKYALIDEDGHITTRGLEVVRRDWSEIAKETQAKVLEVILREGSIEKAAGIVKKVVEDLANYRVPVEKLIIHEQITRELKRYKATGPHVAIAKRLQARGIKVKPGTIISYVVLKGSKKISDRVILFDEYDSSRHKYDPDYYIHNQVLPAVLRILEAFGYKEKDLEYQRMKQTGLGAWLKMGKK

SEQ ID NO: 554 - protein, 773 aa, unidentified
  REGION 1..773: note = Description of Unknown: Synthetic polypeptide
MILDTDYITENGKPVIRIFKKEKGEFKIEYDRNFEPYIYALLEDDESIEDIKKITGERHGKKVRIIRVEKVKKKFLGEPIEVWKLVFEHPQDVPAIMDAIRSHPAVREIFEYDIPFAKRYLIDKGLVPMEGGEELKLLAFNIATFYHEGDEFAEGEILMISYADESGAKVITWKKIDLPYVEVVSTEREAIKRFLQVLREKDPDVLLTYNGDNFDFAYIKKRCEKLGLKFTIGRDGSEPKIQRMGDRFAVEVKGRIHLDLAPVVRHTIRLPTYTLEAVYEAVFGKKKEKVYAEEIAEAWKSEEGLKRVAQYSMEDARATYELGREFFPLEVELAKLIGQSVWDVSRSSTGNLVEWYLLRVAYERNELAPNKPGGEEYQRRMRSSYIGGYVKEPEKGLWESIAYLDFRSSAGSIIVTHNVSPDTLEKECKNYDVAPIVGYRFCKDFKGFIPSILEDLIETRQKVKRKMKATIDPIEKKMLDYRQRALKILANSYYGYQGYPKARWYSKECAESVTAWGRHYIETTIKEAEKFGFKVLYADTDGFFATIPNEKPETIKSKAKKFLKHINEKLPGMLELEYEGFYLRGFFVTKKKYALIDEDGHITTRGLEVVRRDWSEIAKETQAKVLEVILREGSIEKAAGIVKKVVEDLANYRVPVEKLIIHEQITRELKRYKATGPHVAIAKRLQARGIKVKPGTIISYVVLKGSKKISDRVILFDEYDSSRHKYDPDYYIHNQVLPAVLRILEAFGYKEKDLEYQRMKQTGLGAWLKMGKK

SEQ ID NO: 555 - protein, 757 aa, unidentified
  REGION 1..757: note = Description of Unknown: Synthetic polypeptide
MILDTDYITENGKPVIRIFKKEKGEFKIEYDRNFEPYIYALLEDDESIEDIKKITGERHGKKVRIIRVEKVKKKFLGEPIEVWKLVFEHPQDVPAIRDAIRSHPAVREIFEYDIPFAKRYLIDKGLVPMEGGEELKLLAFAIATFYHEGDEFAEGEILMISYADESGAKVITWKKIDLPYVEVVSTEREAIKRFLQVLREKDPDVLLTYNGDNFDFAYIKKRCEKLGLKFTIGRDGSEPKIQRMGDRFAVEVKGRIHLDLAPVVRHTIRLPTYTLEAVYEAVFGKKKEIVYAEEIAEAWKSEEGLKRVAQYSMEDARATYELGREFFPMEVELAKLIGQSVWDVSRSSTGNLVEWYLLRVAYERNELAPNKPGGEEYQRRMRSSYIGGYVKEPEKGLWESIAYLDFRSSAGSIIVTHNVSPDTLEKECKNYDVAPIVGYRFCKDFKGFIPSILEDLIETRQKVKRKMKATIDPIEKKMLDYRQRALKILANSYYGYQGYPKARWYSKECAESVTAWGRHYIETTIKEAEKFGFKVLYADTDGFFATIPNEKPETIKSKAKKFLKHINEKLPGMLELEYEGFYLRGFFVTKKKYALIDEDGHITTRGLEVVRRDWSEIAKETQAKVLEVILREGSIEKAAGIVKKVVEDLANYRVPVEKLIIHEQITRKLKDYKATGPHVAIAKRLQARGIKVKPGTIISYVVLKGSKKISDRVILFDEYDSSRHKYDPDYYIHNQVLPAVLRILEAFGYKEKDLEYQ

SEQ ID NO: 556 - protein, 773 aa, unidentified
  REGION 1..773: note = Description of Unknown: Synthetic polypeptide
MILDTDYITENGKPVIRIFKKEKGEFKIEYDRNFEPYIYALLEDDESIEDIKKITGERHGKKVRIIRVEKVKKKFLGEPIEVWKLVFEHPQDVPAIRDAIRSHPAVREIFEYDIPFAKRYLIDKGLVPMEGGEELKLLAFNIATFYHEGDEFAEGEILMISYADESGAKVITWKKIDLPYVEVVSTEREAIKRFLQVLREKDPDVLLTYNGDNFDFAYIKKRCEKLGLKFTIGRDGSEPKIQRMGDRFAVEVKGRIHLDLAPVVRHTIRLPTYTLEAVYEAVFGKKKEKVYAEEIAEAWKSEEGLKRVAQYSMEDARATYELGREFFPLEVELAKLIGQSVWDVSRSSTGNLVEWYLLRVAYERNELAPNKPGGEEYQRRMRSSYIGGYVKEPEKGLWESIAYLDFRSSAGSIIVTHNVSPDTLEKECKNYDVAPIVGYRFCKDFKGFIPSILEDLIETRQKVKRKMKATIDPIEKKMLDYRQRALKILANSYYGYQGYPKARWYSKECAESVTAWGRHYIETTIKEAEKFGFKVLYADTDGFFATIPNEKPETIKSKAKKFLKHINEKLPGMLELEYEGFYLRGFFVTKKKYALIDEDGHITTRGLEVVRRDWSEIAKETQAKVLEVILREGSIEKAAGIVKKVVEDLANYRVPVEKLIIHEQITRELKRYKATGLHVAIAKRLQARGIKVKPGTIISYVVLKGSKKISDRVILFDEYDSSRHKYDPDYYIHNQVLPAVLRILEAFGYKEKDLEYQRMKQTGLGAWLKMGKK

SEQ ID NO: 557 - protein, 773 aa, unidentified
  REGION 1..773: note = Description of Unknown: Synthetic polypeptide
MILDTDYITENGKPVIRIFKKEKGEFKIEYDRNFEPYIYALLEDDESIEDIKKITGERHGKKVRIIRVEKVKKKFLGEPIEVWKLVFEHPQDVPAIRDAIRSHPAVREIFEYDIPFAKRYLIDKGLVPMEGGEELKLLAFAIATFYHEGDEFAEGEILMISYADESGAKVITWKKIDLPYVEVVSTEREAIKRFLQVLREKDPDVLLTYNGDNFDFAYIKKRCEKLGLKFTIGRDGSEPKIQRMGDRFAVEVKGRIHLDLAPVVRHTIRLPTYTLEAVYEAVFGKKKEKVYAEEIAEAWKSEEGLKRVAQYSMEDARATYELGREFFPMEVELAKLIGQSVWDVSRSSTGNLVEWYLLRVARERNELAPNKPGGEEYQRRMRSSYIGGYVKEPEKGLWESIAYLDFRSSAGSIIVTHNVSPDTLEKECKNYDVAPIVGYRFCKDFKGFIPSILEDLIETRQKVKRKMKATIDPIEKKMLDYRQRALKILANSYYGYQGYPKARWYSKECAESVTAWGRHYIETTIKEAEKFGFKVLYADTDGFFATIPNEKPETIKSKAKKFLKHINEKLPGMLELEYEGFYLRGFFVTKKKYALIDEDGHITTRGLEVVRRDWSEIAKETQAKVLEVILREGSIEKAAGIVKKVVEDLANYRVPVEKLIIHEQITRELKRYKATGPHVAIAKRLQARGIKVKPGTIISYVVLKGSKKISDRVILFDEYDSSRHKYDPDYYIHNQVLPAVLRILEAFGYKEKDLEYQRMKQTGLGAWLKMGKK

SEQ ID NO: 558 - protein, 773 aa, unidentified; identical to SEQ ID NO: 123
  REGION 1..773: note = Description of Unknown: Synthetic polypeptide

SEQ ID NO: 559 - protein, 773 aa, unidentified
  REGION 1..773: note = Description of Unknown: Synthetic polypeptide
MILDTDYITENGKPVIRIFKKEKGEFKIEYDRNFEPYIYALLEDDESIEDIKKITGERHGKKVRIIRVEKVKKKFLGEPIEVWKLVFEHPQDVPAIRDAIRSHPAVREIFEYDIPFAKRYLIDKGLVPMEGGEELKLLAFNIATFYHEGDEFAEGEILMISYADESGAKVITWKKIDLPYVEVVSTEREAIKRFLQVLREKDPDVLLTYNGDNFDFAYIKKRCEKLGLKFTIGRDGSEPKIQRMGDRFAVEVKGRIHLDLAPVVRHTIRLPTYTLEAVYEAVFGKKKEKVYAEEIAEAWKSEEGLARVAQYSMEDARATYELGREFFPLEVELAKLIGQSVWDVSRSSTGNLVEWYLLRVAYERNELAPNKPGGEEYQRRMRSSYIGGYVKEPEKGLWESIAYLDFRSSAGSIIVTHNVSPDTLEKECKNYDVAPIVGYRFCKDFKGFIPSILEDLIETRQKVKRKMKATIDPIEKKMLDYRQRALKILANSYYGYQGYPKARWYSKECAESVTAWGRHYIETTIKEAEKFGFKVLYADTDGFFATIPNEKPETIKSKAKKFLKHINEKLPGMLELEYEGFYLRGFFVTKKKYALIDEDGHITTRGLEVVRRDWSEIAKETQAKVLEVILREGSIEKAAGIVKKVVEDLANYRVPVEKLIIHEQITRELKRYKATGPHVAIAKRLQARGIKVKPGTIISYVVLKGSKKISDRVILFDEYDSSRHKYDPDYYIHNQVLPAVLRILEAFGYKEKDLEYQRMKQTGLGAWLKMGKK

SEQ ID NO: 560 - protein, 773 aa, unidentified
  REGION 1..773: note = Description of Unknown: Synthetic polypeptide
MILDTDYITENGKPVIRIFKKEKGEFKIEYDRNFEPYIYALLEDDESIEDIKKITGERHGKKVRIIRVEKVKKKFLGEPIEVWKLVFEHPLDVPAIRDAIRSHPAVREIFEYDIPFAKRYLIDKGLVPMEGGEELKLLAFNIATFYHEGDEFAEGEILMISYADESGAKVITWKKIDLPYVEVVSTEREAIKRFLQVLREKDPDVLLTYNGDNFDFAYIKKRCEKLGLKFTIGRDGSEPKIQRMGDRFAVEVKGRIHLDLAPVVRHTIRLPTYTLEAVYEAVFGKKKEKVYAEEIAEAWKSEEGLKRVAQYSMEDARATYELGREFFPLEVELAKLIGQSVWDVSRSSTGNLVEWYLLRVAYERNELAPNKPGGEEYQRRMRSSYIGGYVKEPEKGLWESIAYLDFRSSAGSIIVTHNVSPDTLEKECKNYDVAPIVGYRFCKDFKGFIPSILEDLIETRQKVKRKMKATIDPIEKKMLDYRQRALKILANSYYGYQGYPKARWYSKECAESVTAWGRHYIETTIKEAEKFGFKVLYADTDGFFATIPNEKPETIKSKAKKFLKHINEKLPGMLELEYEGFYLRGFFVTKKKYALIDEDGHITTRGLEVVRRDWSEIAKETQAKVLEVILREGSIEKAAGIVKKVVEDLANYRVPVEKLIIHEQITRELKRYKATGPHVAIAKRLQARGIKVKPGTIISYVVLKGSKKISDRVILFDEYDSSRHKYDPDYYIHNQVLPAVLRILEAFGYKEKDLEYQRMKQTGLGAWLKMGKK

SEQ ID NO: 561 - protein, 773 aa, unidentified
  REGION 1..773: note = Description of Unknown: Synthetic polypeptide
MILDTDYITENGKPVIRIFKKEKGEFKIEYDRNFEPYIYALLEDDESIEDIKKITGERHGKKVRIIRVEKVKKKFLGEPIEVWKLVFEHPQDYPAIRDAIRSHPAVREIFEYDIPFAKRYLIDKGLVPMEGGEELKLLAFAIATFYHEGDEFAEGEILMISYADESGAKVITWKKIDLPYVEVVSTEREAIKRFLQVLREKDPDVLLTYNGDNFDFAYIKKRCEKLGLKFTIGRDGSEPKIQRMGDRFAVEVKGRIHLDLAPVVRHTIRLPTYTLEAVYEAVFGKKKEKVYAEEIAEAWKSEEGLKRVAQYSNEDARATYELGREFFPMEVELAKLIGQSVWDVSRSSTGNLVEWYLLRVAYERNELAPNKPGGEEYQRRMRSSYIGGYVKEPEKGLWESIAYLDFRSSAGSIIVTHNVSPDTLEKECKNYDVAPIVGYRFCKDFKGFIPSILEDLIETRQKVKRKMKATIDPIEKKMLDYRQRALKILANSYYGYQGYPKARWYSKECAESVTAWGRHYIETTIKEAEKFGFKVLYADTDGFFATIPNEKPETIKSKAKKFLKHINEKLPGMLELEYEGFYLRGFFVTKKKYALIDEDGHITTRGLEVVRRDWSEIAKETQAKVLEVILREGSIEKAAGIVKKVVEDLANYRVPVEKLIIHEQITRELKRYKATGPHVAIAKRLQARGIKVKPGTIISYVVLKGSKKISDRVILFDEYDSSRHKYDPDYYIHNQVLPAVLRILEAFGYKEKDLEYQRMKQTGLGAWLKMGKK

SEQ ID NO: 562 - protein, 773 aa, unidentified
  REGION 1..773: note = Description of Unknown: Synthetic polypeptide
MILDTDYITENGKPVIRIFKKEKGEFKIEYDRNFEPYIYALLEDDESIEDIKKITGERHGKKVRIIRVEKVKKKFLGEPIEVWKLVFEHPQDVPAINDAIRSHPAVREIFEYDIPFAKRYLIDKGLVPMEGGEELKLLAFNIATFYHEGDEFAEGEILMISYADESGAKVITWKKIDLPYVEVVSTEREAIKRFLQVLREKDPDVLLTYNGDNFDFAYIKKRCEKLGLKFTIGRDGSEPKIQRMGDRFAVEVKGRIHLDLAPVVRHTIRLPTYTLEAVYEAVFGKKKEKVYAEEIAEAWKSEEGLKRVAQYSMEDARATYELGREFFPLEVELAKLIGQSVWDVSRSSTGNLVEWYLLRVAYERNELAPNKPGGEEYQRRMRSSYIGGYVKEPEKGLWESIAYLDFRSSAGSIIVTHNVSPDTLEKECKNYDVAPIVGYRFCKDFKGFIPSILEDLIETRQKVKRKMKATIDPIEKKMLDYRQRALKILANSYYGYQGYPKARWYSKECAESVTAWGRHYIETTIKEAEKFGFKVLYADTDGFFATIPNEKPETIKSKAKKFLKHINEKLPGMLELEYEGFYLRGFFVTKKKYALIDEDGHITTRGLEVVRRDWSEIAKETQAKVLEVILREGSIEKAAGIVKKVVEDLANYRVPVEKLIIHEQITRELKRYKATGPHVAIAKRLQARGIKVKPGTIISYVVLKGSKKISDRVILFDEYDSSRHKYDPDYYIHNQVLPAVLRILEAFGYKEKDLEYQRMKQTGLGAWLKMGKK

SEQ ID NO: 563 - protein, 773 aa, unidentified
  REGION 1..773: note = Description of Unknown: Synthetic polypeptide
MILDTDYITENGKPVIRIFKKEKGEFKIEYDRNFEPYIYALLEDDESIEDIKKITGERHGKKVRIIRVEKVKKKFLGEPIEVWKLVFEHPQDYPAIRDAIRSHPAVREIFEYDIPFAKRYLIDKGLVPMEGGEELKLLAFAIATFYHEGDEFAEGEILMISYADESGAKVITWKKIDLPYVEVVSTEREAIKRFLQVLREKDPDVLLTYNGDNFDFAYIKKRCEKLGLKFTIGRDGSEPKIQRMGDRFAVEVKGRIHLDLAPVVRHTIRLPTYTLEAVYEAVFGKKKEKVYAEEIAEAWKSEEGLKRVAQYSMEDARATYELGREFFPMEVELAKLIGQSVWDVSRSSTGNLVEWYLLRVAYERNELAPNQPGGEEYQRRMRSSYIGGYVKEPEKGLWESIAYLDFRSSAGSIIVTHNVSPDTLEKECKNYDVAPIVGYRFCKDFKGFIPSILEDLIETRQKVKRKMKATIDPIEKKMLDYRQRALKILANSYYGYQGYPKARWYSKECAESVTAWGRHYIETTIKEAEKFGFKVLYADTDGFFATIPNEKPETIKSKAKKFLKHINEKLPGMLELEYEGFYLRGFFVTKKKYALIDEDGLITTRGLEVVRRDWSEIAKETQAKVLEVILREGSIEKAAGIVKKVVEDLANYRVPVEKLIIHEQITRELKRYKATGPHVAIAKRLQARGIKVKPGTIISYVVLKGSKKISDRVILFDEYDSSRHKYDPDYYIHNQVLPAVLRILEAFGYKEKDLEYQRDKQTGLGAWLKMGKK

SEQ ID NO: 564 - protein, 773 aa, unidentified
  REGION 1..773: note = Description of Unknown: Synthetic polypeptide
MILDTDYITENGKPVIRIFKKEKGEFKIEYDRNFEPYIYALLEDDESIEDIKKITGERHGKKVRIIRVEKVKKKFLGEPIEVWKLVFEHPQDYPAIRDAIRSHPAVREIFEYDIPFAKRYLIDKGLVPMEGGEELKLLAFAIATFYHEGDEFAEGEILMISYADESGAKVITWKKIDLPYVEVVSTEREAIKRFLQVLREKDPDVLLTYNGDNFDFAYIKKRCEKLGLKFTIGRDGSEPKIQRMGDRFAVEVKGRIHLDLAPVVRHTIRLPTYTLEAVYEAVFGKKKEKVYAEEIAEAWKSEEGLKRVAQYSMEDARATYELGREFFPMEVELAKLIGQSVWDVSRSSTGNLVEWYLLRVATERNELAPNKPGGEEYQRRMRSSYIGGYVKEPEKGLWESIAYLDFRSSAGSIIVTHNVSPDTLEKECKNYDVAPIVGYRFCKDFKGFIPSILEDLIETRQKVKRKMKATIDPIEKKMLDYRQRALKILANSYYGYQGYPKARWYSKECAESVTAWGRHYIETTIKEAEKFGFKVLYADTDGFFATIPNEKPETIKSKAKKFLKHINEKLPGMLELEYEGFYLRGFFVTKKKYALIDEDGHITTRGLEVVRRDWSEIAKETQAKVLEVILREGSIEKAAGIVKKVVEDLANYRVPVEKLIIHEQITRELKRYKATGPHVAIAKRLQARGIKVKPGTIISYVVLKGSKKISDRVILFDEYDSSRHKYDPDYYIHNQVLPAVLRILEAFGYKEKDLEYQRMKQTGLGAWLKMGKK

SEQ ID NO: 565 - protein, 773 aa, unidentified
  REGION 1..773: note = Description of Unknown: Synthetic polypeptide
MILDTDYITENGKPVIRIFKKEKGEFKIEYDRNFEPYIYALLEDDESIEDIKKITGERHGKKVRIIRVEKVKKKFLGEPIEVWKLVFEHPQDYPAIRDAIRSHPAVREIFEYDIPFAKRYLIDKGLVPMEGGEELKLLAFAIATFYHEGDEFAEGEILMISYADESGAKVITWKKIDLPYVEVVSTEREAIKRFLQVLREKDPDVLLTYNGDNFDFAYIKKRCEKLGLKFTIGRDGSEPKIQRMGDRFAVEVKGRIHLDLAPVVRHTIRLPTYTLEAVYEAVFGKKKEKVYAEEIAEAWKSEEGLKRVAQYSMEDARATYELGREFFPMEVELAKLIGQSVWDVSRSSTGNLVEWYLLRVAYERNELAPNKPGGEEYQRRMRSSYIGGYVKEPEKGLWESIAYLDFRSSAGSIIVTHNVSPDTLEKECKNYDVAPIVGYRFCKDFKGFIPSILEDLIETRQKVKRKMKATIDPIEKKMLDYRQRALKILANSYYGYQGYPKARWYSKECAESVTAWGRHYIETTIKEAEKFGFKVLYADTDGFFATIPNEKPETIKSKAKKFLKHINEKLPGMLELEYEGFYLRGFFVTKKKYALIDEDGHITTRGLEVVRRDWSEIAKETQAKVLEVILREGSIENAAGIVKKVVEDLANYRVPVEKLIIHEQITRELKRYKATGPHVAIAKRLQARGIKVKPGTIISYVVLKGSKKISDRVILFDEYDSSRHKYDPDYYIHNQVLPAVLRILEAFGYKEKDLEYQRMKQTGLGAWLKMGKK

SEQ ID NO: 566 - protein, 773 aa, unidentified
  REGION 1..773: note = Description of Unknown: Synthetic polypeptide
MILDTDYITENGKPVIRIFKKEKGEFKIEYDRNFEPYIYALLEDDESIEDIKKITGERHGKKVRIIRVEKVKKKFLGEPIEVWKLVFEHPQDYPAIRDAIRSHPAVREIFEYDIPFAKRYLIDKGLVPMEGGEELKLLAFAIATFYHEGDEFAEGEILMISYADESGAKVITWKKIDLPYVEVVSTEREAIKRFLQVLREKDPDVLLTYNGDNFDFAYIKKRCEKLGLKFTIGRDGSEPKIQRMGDRFAVEVKGRIHLDLAPVVRHTIRLPTYTLEAVYEAVFGKKKEKVAAEEIAEAWKSEEGLKRVAQYSMEDARATYELGREFFPMEVELAKLIGQSVWDVSRSSTGNLVEWYLLRVAYERNELAPNKPGGEEYQRRMRSSYIGGYVKEPEKGLWESIAYLDFRSSAGSIIVTHNVSPDTLEKECKNYDVAPIVGYRFCKDFKGFIPSILEDLIETRQKVKRKMKATIDPIEKKMLDYRQRALKILANSYYGYQGYPKARWYSKECAESVTAWGRHYIETTIKEAEKFGFKVLYADTDGFFATIPNEKPETIKSKAKKFLKHINEKLPGMLELEYEGFYLRGFFVTKKKYALIDEDGHITTRGLEVVRRDWSEIAKETQAKVLEVILREGSIEKAAGIVKKVVEDLANYRVPVEKLIIHEQITRELKRYKATGPHVAIAKRLQARGIKVKPGTIISYVVLKGSKKISDRVILFDEYDSSRHKYDPDYYIHNQVLPAVLRILEAFGYKEKDLEYQRMKQTGLGAWLKMGKK

SEQ ID NO: 567 - protein, 773 aa, unidentified
  REGION 1..773: note = Description of Unknown: Synthetic polypeptide
MILDTDYITENGKPVIRIFKKEKGEFKIEYDRNFEPYIYALLEDDESIEDIKKITGERHGKKVRIIRVEKVKKKFLGEPIEVWKLVFEHPQDYPAIRDAIRSHPAVREIFEYDIPFAKRYLIDKGLVPMEGGEELKLLAFAIATFYHEGDEFAEGEILMISYADESGAKVITWKKIDLPYVEVVSTEREAIKRFLQVLREKDPDVLLTYNGDNFDFAYIKKRCEKLGLKFTIGRDGSEPKIQRMGDRFAVEVKGRIHLDLAPVVRHTIRLPTYTLEAVYEAVFGKKKEKVYAEEIAEAWKSEEGLKRVAQYSMEDARATYELGREFFPMEVELAKLIGQSVWDVSRSSTGNLVEWYLLRVAYERNELAPNKPGGEEYQRRMRSSYIGGYVKEPEKGLWESIAYLDFRSSAGSIIVTHNVSPDTLEKECKNYDVAPIVGYRFCKDFKGFIPSILEDLIETRQKVKRKMKATIDPIEKKMLDYRQRALKILANSYYGYQGYPKARWYSKECAESVTAWGRHYIETTIKEAEKFGFKVLYADTDDFFATIPNEKPETIKSKAKKFLKHINEKLPGMLELEYEGFYLRGFFVTKKKYALIDEDGHITTRGLEVVRRDWSEIAKETQAKVLEVILREGSIEKAAGIVKKVVEDLANYRVPVEKLIIHEQITRELKRYKATGPHVAIAKRLQARGIKVKPGTIISYVVLKGSKKISDRVILFDEYDSSRHKYDPDYYIHNQVLPAVLRILEAFGYKEKDLEYQRMKQTGLGAWLKMGKK

SEQ ID NO: 568 - protein, 773 aa, unidentified
  REGION 1..773: note = Description of Unknown: Synthetic polypeptide
MILDTDYITENGKPVIRIFKKEKGEFKIEYDRNFEPYIYALLEDDESIEDIKKITGERHGKKVRIIRVEKVKKKFLGEPIEVWKLVFEHPQDVPAIRDAIRSHPAVREIFEYDIPFAKRYLIDKGLVPMEGGEELKLLAFAIATFYHEGDEFAEGEILMISYADESGAKVITWKKIDLPYVEVVSTEREAIKRFLQVLREKDPDVLLTYNGDNFDFAYIKKRCEKLGLKFTIGRDGSEPKIQRMGDRFAVEVKGRIHLDLAPVVRHTIRLPTYTLEAVYEAVFGKKKEKVYAEEIAEAWKSEEGLKRVAQYSMEDARATYELGREFFPMEVELAKLIGQSVWDVSRSSTGNLVEWYLLRVAYERNELAPNKPGGEEYQRRMRSSYIGGYVKEPEKGLWESIAYLDFRSSAGSIIVTHNVSPDTLEKECKNYDVAPIVGYRFCKDFKGFIPSILEDLIETRQKVKRKMKATIDPIEKKMLDYRQRALKILANSYYGYQGYPKARWYSKEQAEFVTAWGRHYIETTIKEAEKFGFKVLYADTDGFFATIPNEKPETIKSKAKKFLKHINEKLPGMLELEYEGFYLRGFFVTKKKYALIDEDGHITTRGLEVVRRDWSEIAKETQAKVLEVILREGSIEKAAGIVKKVVEDLANYRVPVEKLIIHEQITRELKDYKATGPHVAIAKRLQARGIKVKPGTIISYVVLKGSKKISDRVILFDEYDSSRHKYDPDYYIHNQVLPAVLRILEAFGYKEKDLEYQRMKQTGLGAWLKMGKK

SEQ ID NO: 569 - protein, 773 aa, unidentified
  REGION 1..773: note = Description of Unknown: Synthetic polypeptide
MILDTDYITENGKPVIRIFKKEKGEFKIEYDRNFEPYIYALLEDDESIEDIKKITGERHGKKVRIIRVEKVKKKFLGEPIEVWKLVFEHPQDVPAIRDAIRSHPAVREIFEYDIPFAKRYLIDKGLVPMEGGEELKLLAFYIATFYHEGDEFAEGEILMISYADESGAKVITWKKIDLPYVEVVSTEREAIKRFLQVLREKDPDVLLTYNGDNFDFAYIKKRCEKLGLKFTIGRDGSEPKIQRMGDRFAVEVKGRIHLDLAPVVRHTIRLPTYTLEAVYEAVFGKKKEKVYAEEIAEAWKSEEGLKRVAQYSMEFARATYELGREFFPMEVELAKLIGQSVWDVSRSSTGNLVEWYLLRVAYERNELAPNKPGGEEYQRRMRSSYIGGYVKEPEKGLWESIAYLDFRSSAGSIIVTHNVSPDTLEKECKNYDVAPIVGYRFCKDFKGFIPSILEDLIETRQKVKRKMKATIDPIEKKMLDYRQRALKILANSYYGYQGYPKARWYSKECAESVTAWGRHYIETTIKEAEKFGFKVLYADTDGFFATIPNEKPETIKSKAKKFLKHINEKLPGMLELEYEGFYLRGFFVTKKKYALIDEDGHITTRGLEVVRRDWSEIAKETQAKVLEVILREGSIEKAAGIVKKVVEDLANYRVPVEKLIIHEQITRELKDYKATGPHVAIAKRLQARGIKVKPGTIISYVVLKGSKKISDRVILFDEYDSSRHKYDPDYYIHNQVLPAVLRILEAFGYKEKDLEYQRMKQTGLGAWLKMGKK

SEQ ID NO: 570 - protein, 773 aa, unidentified; identical to SEQ ID NO: 75
  REGION 1..773: note = Description of Unknown: Synthetic polypeptide

SEQ ID NO: 571 - protein, 773 aa, unidentified
  REGION 1..773: note = Description of Unknown: Synthetic polypeptide
MILDTDYITENGKPVIRIFKKEKGEFKIEYDRNFEPYIYALLEDDESIEDIKKITGERHGKKVRIIRVEKVKKKFLGEPIEVWKLVFERPQDVPAIQDAIRSHPAVREIFEYDIPFAKRYLIDKGLVPMEGGEELKLLAFNIATFYHEGDEFAEGEILMISYADESGAKVITWKKIDLPYVEVVSTEREAIKRFLQVLREKDPDVLLTYNGDNFDFAYIKKRCEKLGLKFTIGRDGSEPKIQRMGDRFAVEVKGRIHLDLAPVVRHTIRLPTYTLEAVYEAVFGKKKEKVYAEEIAEAWKSEEGLKRVAQYSMEDARATYELGREFFPLEVELAKLIGQSVWDVSRSSTGNLVEWYLLRVAYERNELAPNKPGGEEYQRRMRSSYIGGYVKEPEKGLWESIAYLDFRSSAGSIIVTHNVSPDTLEKECKNYDVAPIVGYRFCKDFKGFIPSILEDLIETRQKVKRKMKATIDPIEKKMLDYRQRALKILANSYYGYQGYPKARWYSKECAESVTAWGRHYIETTIKEAEKFGFKVLYADTDGFFATIPNEKPETIKSKAKKFLKHINEKLPGMLELEYEGFYLRGFFVTKKKYALIDEDGHITTRGLEVVRRDWSEIAKETQAKVLEVILREGSIEKAAGIVKKVVEDLANYRVPVEKLIIHEQITRELKRYKATGPHVAIAKRLQARGIKVKPGTIISYVVLKGSKKISDRVILFDEYDSSRHKYDPDYYIHNQVLPAVLRILEAFGYKEKDLEYQRMKQTGLGAWLKMGKK

SEQ ID NO: 572 - protein, 773 aa, unidentified
  REGION 1..773: note = Description of Unknown: Synthetic polypeptide
MILDTDYITENGKPVIRIFKKEKGEFKIEYDRNFEPYIYALLEDDESIEDIKKITGERHGKKVRIIRVEKVKKKFLGEPIEVWKLVFEHPQDVPAIRDAIRSHPAVREIFEYDIPFAKRYLIDKGLVPMEGGEELKLLAFNIATFYHEGDEFAEGEILMISYADESGAKVITWKKIDLPYVEVVSTEREAIKRFLQVLREKDPDVLLTYNGDNFDFAYIKKRCEKLGLKFTIGRDGSEPKIQRMGDRFAVEVKGRIHLDLAPVVRYTIRLPTYTLEAVYEAVFGKKKEKVYAEEIAEAWKSEEGLKRVAQYSMEDARATYELGREFFPLEVELAKLIGQSVWDVSRSSTGNLVEWYLLRVAYERNELAPNKPGGEEYQRRMRSSYIGGYVKEPEKGLWESIAYLDFRSSAGSIIVTHNVSPDTLEKECKNYDVAPIVGYRFCKDFKGFIPSILEDLIETRQKVKRKMKATIDPIEKKMLDYRQRALKILANSYYGYQGYPKARWYSKECAESVTAWGRHYIETTIKEAEKFGFKVLYADTDGFFATIPNEKPETIKSKAKKFLKHINEKLPGMLELEYEGFYLRGFFVTKKKYALIDEDGHITTRGLEVVRRDWSEIAKETQAKVLEVILREGSIEKAAGIVKKVVEDLANYRVPVEKLIIHEQITRELKRYKATGPHVAIAKRLQARGIKVKPGTIISYVVLKGSKKISDRVILFDEYDSSRHKYDPDYYIHNQVLPAVLRILEAFGYKEKDLEYQRMKQTGLGAWLKMGKK

SEQ ID NO: 573 - protein, 773 aa, unidentified
  REGION 1..773: note = Description of Unknown: Synthetic polypeptide
MILDTDYITENGKPVIRIFKKEKGEFKIEYDRNFEPYIYALLEDDESIEDIKKITGERHGKKVRIIRVEKVKKKFLGEPIEVWKLVFEHPQDYPAIRDAIRSHPAVREIFEYDIPFAKRYLIDKGLVPMEGGEELKLLAFAIATFYHEGDEFAEGEILMISYADESGAKVITWKKIDLPYVEVVSTEREAIKRFLQVLREKDPDVLLTYNGDNFDFAYIKKRCEKLGLKFTIGRDGSEPKIQRMGDRFAVEVKGRIHLDLAPVVRHTIRLPTYTLEAVYEAVFGKKKEKVYAEEIAEAWKSEEGLKRVAQYSMEDARATYELGREFFPMEVELAKLIGQSVWDVSRSSTGNLVEWYLLRVAYERNELAPNKPGGEEYQRRMRSSYIGGYVKEPEKGLWESIAYLDFRSSAGSIIVTHNVSPDTLEKECKNYDVAPIVGYRFCKDFKGFIPSILEDLIETRQKVKRKMKATIDPIEKKMLDYRQRALKILANSYYGYRGYPKARWYSKEAAESVTAWGRHYIETTIKEAEKFGFKVLYADTDGFFATIPNEKPETIKSKAKKFLKHINEKLPGMLELEYEGFYLRGFFVTKKKYALIDEDGHITTRGLEVVRRDWSEIAKETQAKVLEVILREGSIEKAAGIVKKVVEDLANYRVPVEKLIIHEQITRELKRYKATGPHVAIAKRLQARGIKVKPGTIISYVVLKGSKKISDRVILFDEYDSSRHKYDPDYYIHNQVLPAVLRILEAFGYKEKDLEYQRMKQTGLGAWLKMGKK

SEQ ID NO: 574 - protein, 773 aa, unidentified
  REGION 1..773: note = Description of Unknown: Synthetic polypeptide
MILDTDYITENGKPVIRIFKKEKGEFKIEYDRNFEPYIYALLEDDESIEDIKKITGERHGKKVRIIRVEKVKKKFLGEPIEVWKLVFEHPQDYPAIRDAIRSHPAVREIFEYDIPFAKRYLIDKGLVPMEGGEELKLLAFAIATFYHEGDEFAEGEILMISYADESGAKVITWKKIDLPYVEVVSTEREAIKRFLQVLREKDPDVLLTYNGDNFDFAYIKKRCEKLGLKFTIGRDGSEPKIQRMGDRFAVEVKGRIHLDLAPVVRHTIRLPTYTLEAVYEAVFGKKKEKVYAEEIAEAWKSEEGLKRVAQYSMEDARATYELGREFFPMEVELAKLIGQSVWDVSRSSTGNLVEWYLLRVAYERNELAPNKPGGEEYQRRMRSSYIGGYVKEPEKGLWESIAYLDFRSSAGSIIVTHNISPDTLEKECKNYDVAPIVGYRFCKDFKGFIPSILEDLIETRQKVKRKMKATIDPIEKKMLDYRQRALKILANSYYGYYGYPKARWYSKEIAESVTAWGRHYIETTIKEAEKFGFKVLYADTDGFFATIPNEKPETIKSKAKKFLKHINEKLPGMLELEYEGFYLRGFFVTKKKYALIDEDGHITTRGLEVVRRDWSEIAKETQAKVLEVILREGSIEKAAGIVKKVVEDLANYRVPVEKLIIHEQITRELKRYKATGPHVAIAKRLQARGIKVKPGTIISYVVLKGSKKISDRVILFDEYDSSRHKYDPDYYIHNQVLPAVLRILEAFGYKEKDLEYQRMKQTGLGAWLKMGKK

SEQ ID NO: 575 - protein, 773 aa, unidentified
  REGION 1..773: note = Description of Unknown: Synthetic polypeptide
MILDTDRITENGKPVIRIFKKEKGEFKIEYDRNFEPYIYALLEDDESIEDIKKITGERHGKKVRIIRVEKVKKKFLGEPIEVWKLVFEHPQDVPAIRDAIRSHPAVREIFEYDIPFAKRYLIDKGLVPMEGGEELKLLAFNIATFYHEGDEFAEGEILMISYADESGAKVITWKKIDLPYVEVVSTEREAIKRFLQVLREKDPDVLLTYNGDNFDFAYIKKRCEKLGLKFTIGRDGSEPKIQRMGDRFAVEVKGRIHLDLAPVVRHTIRLPTYTLEAVYEAVFGKKKEKVYAEEIAEAWKSEEGLKRVAQYSMEDARATYELGREFFPLEVELAKLIGQSVWDVSRSSTGNLVEWYLLRVAYERNELAPNKPGGEEYQRRMRSSYIGGYVKEPEKGLWESIAYLDFRSSAGSIIVTHNVSPDTLEKECKNYDVAPIVGYRFCKDFKGFIPSILEDLIETRQKVKRKMKATIDPIEKKMLDYRQRALKILANSYYGYQGYPKARWYSKECAESVTAWGRHYIETTIKEAEKFGFKVLYADTDGFFATIPNEKPETIKSKAKKFLKHINEKLPGMLELEYEGFYLRGFFVTKKKYALIDEDGHITTRGLEVVRRDWSEIAKETQAKVLEVILREGSIEKAAGIVKKVVEDLANYRVPVEKLIIHEQITRELKRYKATGPHVAIAKRLQARGIKVKPGTIISYVVLKGSKKISDRVILFDEYDSSRHKYDPDYYIHNQVLPAVLRILEAFGYKEKDLEYQRMKQTGLGAWLKMGKK

SEQ ID NO: 576 - protein, 773 aa, unidentified
  REGION 1..773: note = Description of Unknown: Synthetic polypeptide
MILDTDYITENGKPVIRIFKKEKGEFKIEYDRNFEPYIYALLEDDESIEDIKKITGERHGKKVRIIRVEKVKKKFLGEPIEVWKLVFEHPQDYPAIRDAIRSHPAVREIFEYDIPFAKRYLIDKGLVPMEGGEELKLLAFAIATFYHEGDEFAEGEILMISYADESGAKVITWKKIDLPYVEVVSTEREAIKRFLQVLREKDPDVLLTYNGDNFDFAYIKKRCEKLGLKFTIGRDGSEPKIQRMGDRFAVEVKGRIHLDLAPVVRHTIRLPTYTLEAVYEAVFGKKKEKVYAEEIAEAWKSEEGLKRVAQYSMEDARATYELGREFFPMEVELAKLIGQSVWDVSRSSTGNLVEWYLLRVAYERNELAPNKPGGEEYQRRMRSSYIGGYVKEPEKGLWESIAYLDFRSSAGSIIVTHNVSPDTLEKECKNYDVAPIVGYRFCKDFKGFIPSILEDLIETRQKVKRKMKATIDPIEKKMLDYRQSALKILANSYYGYQGYPKARWYSKECAESVTAWGRHYIETTIKEAEKFGFKVLYADTDGFFATIPNEKPETIKSKAKKFLKHINEKLPGMLELEYEGFYLRGFFVTKKKYALIDEDGHITTRGLEVVRRDWSEIAKETQAKVLEVILREGSIEKAAGIVKKVVEDLANYRVPVEKLIIHEQITRELKRYKATGPHVAIAKRLQARGIKVKPGTIISYVVLKGSKKISDRVILFDEYDSSRHKYDPDYYIHNQVLPAVLRILEAFGYKEKDLEYQRMKQTGLGAWLKMGKK

SEQ ID NO: 577 - protein, 773 aa, unidentified
  REGION 1..773: note = Description of Unknown: Synthetic polypeptide
MILDTDYITENGKPVIRIFKKEKGEFKIEYDRNFEPYIYALLEDDESIEDIKKITGERHGKKVRIIRVEKVKKKFLGEPIEVWKLVFEHPQDVPAIRDAIRSHPAVREIFEYDIPFAKRYLIDKGLVPMEGGEELKLLAFAIATFYHEGDEFAEGEILMISYADESGAKVITWKKIDLPYVEVVSTEREAIKRFLQVLREKDPDVLLTYNGDNFDFAYIKKRCEKLGLKFTIGRDGSEPKIQRMGDRFAVEVKGRIHLDLAPVVRHTIRLPTYTLEAVYEAVFGKKKEKVYAEEIAEAWKSEEGLKRVAQYSMEDARATYELGREFFPMEVELAKLIGQSVWDVSRSSTGNLVEWYLLRVAYERNELAPNKPGGEEYQRRMRSSYIGGYVKEPEKGLWESIAYLDFRSSAGSIIVTHNVSPDTLEKECKNYDVAPIVGYRFCKDFKGFIPSILEDLIETRQKVKRKMKATIDPIEKKMLDYRQRALKILANSYYGYQGYPKARWYSKEQAEDVTAWGRHYIETTIKEAEKFGFKVLYADTDGFFATIPNEKPETIKSKAKKFLKHINEKLPGMLELEYEGFYLRGFFVTKKKYALIDEDGHITTRGLEVVRRDWSEIAKETQAKVLEVILREGSIEKAAGIVKKVVEDLANYRVPVEKLIIHEQITRELKDYKATGPHVAIAKRLQARGIKVKPGTIISYVVLKGSKKISDRVILFDEYDSSRHKYDPDYYIHNQVLPAVLRILEAFGYKEKDLEYQRMKQTGLGAWLKMGKK

SEQ ID NO: 578 - protein, 773 aa, unidentified
  REGION 1..773: note = Description of Unknown: Synthetic polypeptide
MILDTDYITENGKPVIRIFKKEKGEFKIEYDRNFEPYIYALLEDDESIEDIKKITGERHGKKVRIIRVEKVKKKFLGEPIEVWKLVFEHPQDYPAIRDAIRSHPAVREIFEYDIPFAKRYLIDKGLVPMEGGEELKLLAFAIATFYHEGDEFAEGEILMISYADESGAKVITWKKIDLPYVEVVSTEREAIKRFLQVLREKDPDVLLTYNGDNFDFAYIKKRCEKLGLKFTIGRDGSEPKIQRMGDRFAVEVKGRIHLDLAPVVRHTIRLPTYTLEAVYEAVFGKKKEKVYAEEIAEAWKSEEGLKRVAQYSMEDARATYELGREFFPMEVELAKLIGQSVWDVSRSSTGNLVEWYLLRVAYERNELAPNKPGGEEYQRRMRSSYIGGYVKEPEKGLWESIAYLDFRSSAGSIIVTHNVSPDTLEKECKNYDVAPIVGYRFCKDFKGFIPSILEDLIETRQKVKRKMKATIDPIEKKMLDYRQRALKILANSYYGYQGYPKARWYSKECAESVTAWGRHYIETTIKEAEKFGFKVLYADTDGFFATIPNEKPETIKSKAKKFLKHINEKLPGMLELEYEGFYLRGFFVTKKKYALIDEDGLITTRGLEVVRRDWSEIAKETQAKVLEVILREGSIEKAAGIVKKVVEDLANYRVPVEKLIIHEQITRELKRYKATGPHVAIAKRLQARGIKVKPGTIISYVVLKGSKKISDRVILFDEYDSSRHKYDPDYYIHNQVLPAVLRILEAFGYKEKDLEYQRMKQTGLGAWLKMGKK

SEQ ID NO: 579 - protein, 773 aa, unidentified
  REGION 1..773: note = Description of Unknown: Synthetic polypeptide
MILDTDYITENGKPVIRIFKKEKGEFKIEYDRNFEPYIYALLEDDESIEDIKKITGERHGKKVRIIRVEKVKKKFLGEPIEVWKLVFEHPQDVPAIRDAIRSHPAVREIFEYDIPFAKRYLIDKGLVPMEGGEELKLLAFNIATFYHEGDEFAEGEILMISYADESGAKVITWKKIDLPYVEVVSTEREAIKRFLQVLREKDPDVLLTYNGDNFDFAYIKKRAEKLGLKFTIGRDGSEPKIQRMGDRFAVEVKGRIHLDLAPVVRHTIRLPTYTLEAVYEAVFGKKKEKVYAEEIAEAWKSEEGLKRVAQYSMEDARATYELGREFFPLEVELAKLIGQSVWDVSRSSTGNLVEWYLLRVAYERNELAPNKPGGEEYQRRMRSSYIGGYVKEPEKGLWESIAYLDFRSSAGSIIVTHNVSPDTLEKECKNYDVAPIVGYRFCKDFKGFIPSILEDLIETRQKVKRKMKATIDPIEKKMLDYRQRALKILANSYYGYQGYPKARWYSKECAESVTAWGRHYIETTIKEAEKFGFKVLYADTDGFFATIPNEKPETIKSKAKKFLKHINEKLPGMLELEYEGFYLRGFFVTKKKYALIDEDGHITTRGLEVVRRDWSEIAKETQAKVLEVILREGSIEKAAGIVKKVVEDLANYRVPVEKLIIHEQITRELKRYKATGPHVAIAKRLQARGIKVKPGTIISYVVLKGSKKISDRVILFDEYDSSRHKYDPDYYIHNQVLPAVLRILEAFGYKEKDLEYQRMKQTGLGAWLKMGKK

SEQ ID NO: 580 - protein, 773 aa, unidentified
  REGION 1..773: note = Description of Unknown: Synthetic polypeptide
MILDTDYITENGKPVIRIFKKEKGEFKIEYDRNFEPYIYALLEDDESIEDIKKITGERHGKKVRIIRVEKVKKKFLGEPIEVWKLVFEHPQDYPAIRDAIRSHPAVREIFEYDIPFAKRYLIDKGLVPMEGGEELKLLAFAIATFYHEGDEFAEGEILMISYADESGAKVITWKKIDLPYVEVVSTEREAIKRFLQVLREKDPDVLLTYNGDNFDFAYIKKRCEKLGLKFTIGRDGSEPKIQRMGDRFAVEVKGRIHLDLAPVVRHTIRLPTYTLEAVYEAVFGKKKEKVYAEEIAEAWKSEEGLKRVAQYSMEDARATYELGREFFPMEVELAKLIGQSVWDVSRSSTGNLVEWYLLRVAYERNELAPNKPGGEEYQRRMRSSYIGGYVKEPEKGLWESIAYLDFRSSAGSIIVTHNVSPDTLEKECKNYDVAPIVGYRFCKDFKGFIPSILEDLIETRQKVKRKMKATIDPIEKKMLDYRQRALKILANSYYGYQGYPKARWYSEECAESVTAWGRHYIETTIKEAEKFGFKVLYADTDGFFATIPNEKPETIKSKAKKFLKHINEKLPGMLELEYEGFYLRGFFVTKKKYALIDEDGHITTRGLEVVRRDWSEIAKETQAKVLEVILREGSIEKAAGIVKKVVEDLANYRVPVEKLIIHEQITRELKRYKATGPHVAIAKRLQARGIKVKPGTIISYVVLKGSKKISDRVILFDEYDSSRHKYDPDYYIHNQVLPAVLRILEAFGYKEKDLEYQRMKQTGLGAWLKMGKK

SEQ ID NO: 581 - protein, 766 aa, unidentified
  REGION 1..766: note = Description of Unknown: Synthetic polypeptide
MILDTDYITENGKPVIRIFKKEKGEFKIEYDRNFEPYIYALLEDDESIEDIKKITGERHGKKVRIIRVEKVKKKFLGEPIEVWKLVFEHPQDVPAIRDAIRSHPAVREIFEYDIPFAKRYLIDKGLVPMEGGEELKLLAFNIATFYHEGDEFAEGEILMISYADESGAKVITWKKIDLPYVEVVSTEREAIKRFLQVLREKDPDVLLTYNGDNFDFAYIKKRCEKLGLKFTIGRDGSEPKIQRMGDRFAVEVKGRIHLDLAPVVRHTIRLPTYTLEAVYEAVFGKKKEKVYAEEIAEAWKSEEGLKRVAQYSAEDARATYELGREFFPLEVELAKLIGQSVWDVSRSSTGNLVEWYLLRVAYERNELAPNKPGGEEYQRRMRSSYIGGYVKEPEKGLWESIAYLDFRSSAGSIIVTHNVSPDTLEKECKNYDVAPIVGYRFCKDFKGFIPSILEDLIETRQKVKRKMKATIDPIEKKMLDYRQRALKILANSYYGYQGYPKARWYSKECAESVTAWGRHYIETTIKEAEKFGFKVLYADTDGFFATIPNEKPETIKSKAKKFLKHINEKLPGMLELEYEGFYLRGFFVTKKKYALIDEDGHITTRGLEVVRRDWSEIAKETQAKVLEVILREGSIEKAAGIVKKVVEDLANYRVPVEKLIIHEQITRELKRYKATGPHVAIAKRLQARGIKVKPGTIISYVVLKGSKKISDRVILFDEYDSSRHKYDPDYYIHNQVLPAVLRILEAFGYKEKDLEYQRDKQTGLGA

SEQ ID NO: 582 - protein, 757 aa, unidentified
  REGION 1..757: note = Description of Unknown: Synthetic polypeptide
MILDTDYITENGKPVIRIFKKEKGEFKIEYDRNFEPYIYALLEDDESIEDIKKITGERHGKKVRIIRVEKVKKKFLGEPIEVWKLVFEHPQDVPAIRDAIRSHPAVREIFEYDIPFAKRYLIDKGLVPMEGGEELKLLAFAIATFYHEGDEFAEGEILMISYADESGAKVITWKKIDLPYVEVVSTEREAIKRFLQVLREKDPDVLLTYNGDNFDFAYIKKRCEKLGLKFTIGRDGSEPKIQRMGDRFAVEVKGRIHLDLAPVVRHTIRLPTYTLEAVYEAVFGKKKEKVYAEEIAEAWKSEEGLKRVAQYSMEDARATYELGREFFPMEVELAKLIGQSVWDVSRSSTGNLVEWYLLRVAYERNELAPNKPGGEEYQRRMRSSYIGGYVKEPEKGLWESIAYLDFRSSAGSIIVTHNVSPDTLEKECKNYDVAPIVGYRFCKDFKGFIPSILEDLIETRQKVKRKMKATIDPIEKKMLDYRQRALKILANSYYGYQGYPKARWYSKECAESVTAWGRHYIETTIKEAEKFGFKVLYADTDGFFATIPNEKPETIKSKAKKFLKHINEKLPGMLELEYEGFYLRGFFVTKKKYALIDEDGHITTRGLEVVRRDWSEIAKETQAKVLEVILREGSIEKAAGIVKKVVEDLANYRVPVEKLIIHEIITRKLKDYKATGPHVAIAKRLQARGIKVKPGTIISYVVLKGSKKISDRVILFDEYDSSRHKYDPDYYIHNQVLPAVLRILEAFGYKEKDLEYQ

SEQ ID NO: 583 - protein, 773 aa, unidentified
  REGION 1..773: note = Description of Unknown: Synthetic polypeptide
MILDTDYITENGKPVIRIFKKEKGEFKIEYDRNFEPYIYALLEDDESIEDIKKITGERHGKKVRIIRVEKVKKKFLGEPIEVWKLVFEHPQDYPAIRDAIRSHPAVREIFEYDIPFAKRYLIDKGLVPMEGGEELKLLAFAIATFYHEGDEFAEGEILMISYADESGAKVITWKKIDLPYVEVVSTEREAIKRFLQVLREKDPDVLLTYNGDNFDFAYIKKRCEKLGLKFTIGRDGSEPKIQRMGDRFAVEVKGRIHLDLAPVVRHTIRLPTYTLEAVYEAVFGKKKEKVYAEEIAEAWKSEEGLKRVAQYSMEDARATYELGREFFPMEVELAKLIGQSVWDVSRSSTGNLVEWYLLRVAYERNELAPNLPGGEEYQRRMRSSYIGGYVKEPEKGLWESIAYLDFRSSAGSIIVTHNVSPDTLEKECKNYDVAPIVGYRFCKDFKGFIPSILEDLIETRQKVKRKMKATIDPIEKKMLDYRQRALKILANSYYGYQGYPKARWYSKECAESVTAWGRHYIETTIKEAEKFGFKVLYADTDGFFATIPNEKPETIKSKAKKFLKHINEKLPGMLELEYEGFYLRGFFVTKKKYALIDEDGHITTRGLEVVRRDWSEIAKETQAKVLEVILREGSIEKAAGIVKKVVEDLANYRVPVEKLIIHEQITRELKRYKATGPHVAIAKRLQARGIKVKPGTIISYVVLKGSKKISDRVILFDEYDSSRHKYDPDYYIHNQVLPAVLRILEAFGYKEKDLEYQRMKQTGLGAWLKMGKK

SEQ ID NO: 584 - protein, 773 aa, unidentified
  REGION 1..773: note = Description of Unknown: Synthetic polypeptide
MILDTDYITENGKPVIRIFKKEKGEFKIEYDRNFEPYIYALLEDDESIEDIKKITGERHGKKVRIIRVEKVKKKFLGEPIEVWKLVFEHPQDYPAIRDAIRSHPAVREIFEYDIPFAKRYLIDKGLVPMEGGEELKLLAFAIATFYHEGDEFAEGEILMISYADESGAKVITWKKIDLPYVEVVSTEREAIKRFLQVLREKDPDVLLTYNGDNFDFAYIKKRCEKLGLKFTIGRDGSEPKIQRMGDRFAVEVKGRIHLDLAPVVRHTIRLPTYTLEAVYEAVFGKKKEKVYAEEIAEAWKSEEGLKRVAQYSMEDARATYELGREFFPMEVELAKLIGQSVWDVSRSSNGNLVEWYLLRVAYERNELAPNKPGGEEYQRRMRSSYIGGYVKEPEKGLWESIAYLDFRSSAGSIIVTHNVSPDTLEKECKNYDVAPIVGYRFCKDFKGFIPSILEDLIETRQKVKRKMKATIDPIEKKMLDYRQRALKILANSYYGYQGYPKARWYSKECAESVTAWGRHYIETTIKEAEKFGFKVLYADTDGFFATIPNEKPETIKSKAKKFLKHINEKLPGMLELEYEGFYLRGFFVTKKKYALIDEDGHITTRGLEVVRRDWSEIAKETQAKVLEVILREGSIEKAAGIVKKVVEDLANYRVPVEKLIIHEQITRELKRYKATGPHVAIAKRLQARGIKVKPGTIISYVVLKGSKKISDRVILFDEYDSSRHKYDPDYYIHNQVLPAVLRILEAFGYKEKDLEYQRMKQTGLGAWLKMGKK

SEQ ID NO: 585 - protein, 773 aa, unidentified
  REGION 1..773: note = Description of Unknown: Synthetic polypeptide
MILDTDYITENGKPVIRIFKKEKGEFKIEYDRNFEPYIYALLEDDESIEDIKKITGERHGKKVRIIRVEKVKKKFLGEPIEVWKLVFEHPQDYPAIRDAIRSHPAVREIFEYDIPFAKRYLIDKGLVPMEGGEELKLLAFAIATFYHEGDEFAEGEILMISYADESGAKVITWKKIDLPYVEVVSTEREAIKRFLQVLREKDPDVLLTYNGDNFDFAYIKKRCEKLGLKFTIGRDGSEPKIQRMGDRFAVEVKGRIHLDLAPVVRHTIRLPTYTLEAVYEAVFGKKKEKVYAEEIAEAWKSEEGLKRVAQYSMEDARATYELGREFFPMEVELAKLIGQSVWDVSRSSTGNLVEWYLLRVAYERNELAPNKPGGEEYQRRMRSSYIGGYVKEPEKGLWESIAYLDFRSSAGSIIVTHNVSPDTLEKECKNYDVAPIVGYRFCKDFKGFIPSILEDLIETRQKVKRKMKATIDPIEKKMLDYRQRALKILANSYYGYQGYPKARWYSKECAESVTAWGRHYIETTIKEAEKFGFKVLYADTDGFFATIPNEKPETIKSKAKKFLKHINEKLPGMLELEYEGFYLRGFFVTKKFYALIDEDGHITTRGLEVVRRDWSEIAKETQAKVLEVILREGSIEKAAGIVKKVVEDLANYRVPVEKLIIHEQITRELKRYKATGPHVAIAKRLQARGIKVKPGTIISYVVLKGSKKISDRVILFDEYDSSRHKYDPDYYIHNQVLPAVLRILEAFGYKEKDLEYQRMKQTGLGAWLKMGKK

SEQ ID NO: 586 - protein, 773 aa, unidentified; identical to SEQ ID NO: 75
  REGION 1..773: note = Description of Unknown: Synthetic polypeptide

SEQ ID NO: 587 - protein, 773 aa, unidentified
  REGION 1..773: note = Description of Unknown: Synthetic polypeptide
MILDTDYITENGKPVIRIFKKEKGEFKIEYDRNFEPYIYALLEDDESIEDIKKITGERHGKKVRIIRVEKVKKKFLGEPIEVWKLVFEHPQDVPAIRDAIRSHPAVREIFEYDIPFAKRYLIDKGLVPMEGGEELKLLAFAIATFYHEGDEFAEGEILMISYADESGAKVITWKKIDLPYVEVVSTEREAIKRFLQVLREKDPDVLLTYNGDNFDFAYIKKRCEKLGLKFTIGRDGSEPKIQRMGDRFAVEVKGRIHLDLAPVVRHTIRLPTYTLEAVYEAVFGKKKEKVYAEEIAEAWKSEEGLKRVAQYSMEDARATYELGREFFPMEVELAKLIGQSVWDVSRSSTGNLVEWYLLRVAYERNELAPNKPGGEEYQRRMRSSYIGGYVKEPEKGLWESIAYLDFRSSAGSIIVTHNVSPDTLEKECKNYDVAPIVGYRFCKDFKGFIPSILEDLIETRQKVKRKMKATIDPIEKKMLDYRQRALKILANSYYGYQGYPKARWYSKECAESVTAWGRHYIETTIKEAEKFGFKVLYADTDGFFATIPNEKPETIKSKAKKFLKHINEKLPGMLELEYEGFYLRGFFVTKKKYALIDEDGHITTRGLEVVRRDWSEIAKETQAKVLEVILREGSIEKAAGIVKKVVEDLANYRVPVEKLIIHEVITRELKRYKATGPHVAIAKRLQARGIKVKPGTIISYVVLKGSKKISDRVILFDEYDSSRHKYDPDYYIHNQVLPAVLRILEAFGYKEKDLEYQRMKQTGLGAWLKMGKK

SEQ ID NO: 588 - protein, 773 aa, unidentified
  REGION 1..773: note = Description of Unknown: Synthetic polypeptide
MILDTDYITENGKPVIRIFKKEKGEFKIEYDRNFEPYIYALLEDDESIEDIKKITGERHGKKVRIIRVEKVKKKFLGEPIEVWKLVFEKPQDVPAIQDAIRSHPAVREIFEYDIPFAKRYLIDKGLVPMEGGEELKLLAFNIATFYHEGDEFAEGEILMISYADESGAKVITWKKIDLPYVEVVSTEREAIKRFLQVLREKDPDVLLTYNGDNFDFAYIKKRCEKLGLKFTIGRDGSEPKIQRMGDRFAVEVKGRIHLDLAPVVRHTIRLPTYTLEAVYEAVFGKKKEKVYAEEIAEAWKSEEGLKRVAQYSMEDARATYELGREFFPLEVELAKLIGQSVWDVSRSSTGNLVEWYLLRVAYERNELAPNKPGGEEYQRRMRSSYIGGYVKEPEKGLWESIAYLDFRSSAGSIIVTHNVSPDTLEKECKNYDVAPIVGYRFCKDFKGFIPSILEDLIETRQKVKRKMKATIDPIEKKMLDYRQRALKILANSYYGYQGYPKARWYSKECAESVTAWGRHYIETTIKEAEKFGFKVLYADTDGFFATIPNEKPETIKSKAKKFLKHINEKLPGMLELEYEGFYLRGFFVTKKKYALIDEDGHITTRGLEVVRRDWSEIAKETQAKVLEVILREGSIEKAAGIVKKVVEDLANYRVPVEKLIIHEQITRELKRYKATGPHVAIAKRLQARGIKVKPGTIISYVVLKGSKKISDRVILFDEYDSSRHKYDPDYYIHNQVLPAVLRILEAFGYKEKDLEYQRMKQTGLGAWLKMGKK

SEQ ID NO: 589 - protein, 773 aa, unidentified
  REGION 1..773: note = Description of Unknown: Synthetic polypeptide
MILDTDYITENGKPVIRIFKKEKGEFKIEYDRNFEPYIYALLEDDESIEDIKKITGERHGKKVRIIRVEKVKKKFLGEPIEVWKLVFEHPQDYPAIRDAIRSHPAVREIFEYDIPFAKRYLIDKGLVPMEGGEELKLLAFAIATFYHEGDEFAEGEILMISYADESGAKVITWKKIDLPYVEVVSTEREAIKRFLQVLREKDPDVLLTYNGDNFDFAYIKKRCEKLGLKFTIGRDGSEPKIQRMGDRFAVEVKGRIHLDLAPVVRHTIRLPTYTLEAVYEAVFGKKKEKVYAEEIAEAWKSEEGLKRVAQYSMEDARATYELGREFFPMEVELAKLIGQSVWDVSRSSTGNLVEWYLLRVAYERNELAPNKPGGEEYQRRMRSSYIGGYVKEPEKGLWESIAYLDFRSSAGSIIVTHNVSPDTLEKECKNYDVAPIVGYRFCKDFKGFIPSILEDLIETRQKVKRKMKATIDPIEKKMLDYRQRALKILANSYYGYQGYPKARWYSKECAESVTAWGRHYIETTIKEAEKFGFKVLYADTDGFFATIPNEKPETIKSKAKKFLKHINEKLPGMLELEYEGFYLRGFFVTKKKYALIDEDGHITTRGLEVVRRDWSEIAKETQAKVLEVILREGSIEKAAGIVKKVVEDLANYRVPVEKLIIHEQITRELKRYKATGPHVAIAKRLQARGIKVKPGTIISYVVLKGSKKISDRVILFDEYDSSRHKYDPDYYIHNQVLPAVLRILEAFGYKEKDLEYQRMKQTGLGANLKMGKK

SEQ ID NO: 590 - protein, 773 aa, unidentified
  REGION 1..773: note = Description of Unknown: Synthetic polypeptide
MILDTDYITENGKPVIRIFKKEKGEFKIEYDRNFEPYIYALLEDDESIEDIKKITGERHGKKVRIIRVEKVKKKFLGEPIEVWKLVFEHPQDVPAIRDAIRSHPAVREIFEYDIPFAKRYLIDKGLVPMEGGEELKLLAFAIATFYHEGDEFAEGEILMISYADESGAKVITWKKIDLPYVEVVSTEREAIKRFLQVLREKDPDVLLTYNGDNFDFAYIKKRCEKLGLKFTIGRDGSEPKIQRMGDRFAVEVKGRIHLDLAPVVRHTIRLPTYTLEAVYEAVFGKKKEKVYAEEIAEAWKSEEGLKRVAQYSMEDARATYELGREFFPMEVELAKLIGQSVWDVSRSSTGNLVEWYLLRVAYERNELAPNKPGGEEYQRRMRSSYIGGYVKEPEKGLWESIAYLDFRSSAGSIIVTHNVSPDTLEKECKNYDVAPIVGYRFCKDFKGFIPSILEDLIETRQKVKRKMKATIDPIEKKMLDYRQRALKILANSYYGYQGYPKARWYSKECAESVTAWGRHYIETTIKEAEKFGFKVLYADTDGFFATIPNEKPETIKSKAKKFLKHINEKLPGMLELEYEGFYLRGFFVTKKKYALIDEDGHITTRGLEVNRRDWSEIAKETQAKVLEVILREGSIEKAAGIVKKVVEDLANYRVPVEKLIIHEQITRELKRYKATGPHVAIAKRLQARGIKVKPGTIISYVVLKGSKKISDRVILFDEYDSSRHKYDPDYYIHNQVLPAVLRILEAFGYKEKDLEYQRMKQTGLGAWLKMGKK

SEQ ID NO: 591 - protein, 773 aa, unidentified
  REGION 1..773: note = Description of Unknown: Synthetic polypeptide
MILDTDYILENGKPVIRIFKKEKGEFKIEYDRNFEPYIYALLEDDESIEDIKKITGERHGKKVRIIRVEKVKKKFLGEPIEVWKLVFEHPQDYPAIRDAIRSHPAVREIFEYDIPFAKRYLIDKGLVPMEGGEELKLLAFAIATFYHEGDEFAEGEILMISYADESGAKVITWKKIDLPYVEVVSTEREAIKRFLQVLREKDPDVLLTYNGDNFDFAYIKKRCEKLGLKFTIGRDGSEPKIQRMGDRFAVEVKGRIHLDLAPVVRHTIRLPTYTLEAVYEAVFGKKKEKVYAEEIAEAWKSEEGLKRVAQYSMEDARATYELGREFFPMEVELAKLIGQSVWDVSRSSTGNLVEWYLLRVAYERNELAPNKPGGEEYQRRMRSSYIGGYVKEPEKGLWESIAYLDFRSSAGSIIVTHNVSPDTLEKECKNYDVAPIVGYRFCKDFKGFIPSILEDLIETRQKVKRKMKATIDPIEKKMLDYRQRALKILANSYYGYQGYPKARWYSKECAESVTAWGRHYIETTIKEAEKFGFKVLYADTDGFFATIPNEKPETIKSKAKKFLKHINEKLPGMLELEYEGFYLRGFFVTKKKYALIDEDGHITTRGLEVVRRDWSEIAKETQAKVLEVILREGSIEKAAGIVKKVVEDLANYRVPVEKLIIHEQITRELKRYKATGPHVAIAKRLQARGIKVKPGTIISYVVLKGSKKISDRVILFDEYDSSRHKYDPDYYIHNQVLPAVLRILEAFGYKEKDLEYQRMKQTGLGAWLKMGKK

SEQ ID NO: 592 - protein, 773 aa, unidentified
  REGION 1..773: note = Description of Unknown: Synthetic polypeptide
MILDTDYITENGKPVIRIFKKEKGEFKIEYDRNFEPYIYALLEDDESIEDIKKITGERHGKKVRIIRVEKVKKKFLGEPIEVWKLVFEHPQDVPAIRDAIRSHPAVREIFEYDIPFAKRYLIDKGLVPMEGGEELKLLAFAIATFYHEGDEFAEGEILMISYADESGAKVITWKKIDLPYVEVVSTEREAIKRFLQVLREKDPDVLLTYNGDNFDFAYIKKRCEKLGLKFTIGRDGSEPKIQRMGDRFAVEVKGRIHLDLAPVVRHTIRLPTYTLEAVYEAVFGKKKEKVYAEEIAEAWKSEEGLKRVAQYSMEDARATYELGREFFPMEVELAKLIGQSVWDVSRSSTGNLVEWYLLRVAYERNELAPNKPGGEEYQRRMRSSYIGGYVKEPEKGLWESIAYLDFRSSAGSIIVTHNVSPDTLEKECKNYDVAPIVGYRFCKDFKGFIPSILEDLIETRQKVKRKMKATIDPIEKKMLDYRQRALKILANSYYGYQGYPKARWYTKECAESVTAWGRHYIETTIKEAEKFGFKVLYADTDGFFATIPNEKPETIKSKAKKFLKHINEKLPGMLELEYEGFYLRGFFVTKKKYALIDEDGHITTRGLEVVRRDWSEIAKETQAKVLEVILREGSIEKAAGIVKKVVEDLANYRVPVEKLIIHEQITRELKDYKATGPHVAIAKRLQARGIKVKPGTIISYVVLKGSKKISDRVILFDEYDSSRHKYDPDYYIHNQVLPAVLRILEAFGYKEKDLEYQRMKQTGLGAWLKMGKK

SEQ ID NO: 593 - protein, 773 aa, unidentified
  REGION 1..773: note = Description of Unknown: Synthetic polypeptide
MILDTDYITENGKPVIRIFKKEKGEFKIEYDRNFEPYIYALLEDDESIEDIKKITGERHGKKVRIIRVEKVKKKFLGEPIEVWKLVFEHPQDVPAIRDAIRSHPAVREIFEYDIPFAKRYLIDKGLVPMEGGEELKLLAFNIATFYHEGDEFAEGEILMISYADESGAKVITWKKIDLPYVEVVSTEREAIKRFLQVLREKDPDVLLTYNGDNFDFAYIKKRCEKLGLKFTIGRDGSEPKIQRMGDRFAVEVKGRIHLDLAPVVRHTIRLPTYTLEAVYEAVFGKKKEKVYAEEIAEAWKSEEGLKRVAQYSMEDARATYELGREFFPLEVELAKLIGQSVWDVSRSSTGNLVEWYLLRVAYERNELAPNKPGGEEYQRRMRSSYIGGYVKEPEKGLWESIAYLDFRSSAGSIIVTHNVSPDTLEKECKNYDVAPIVGYRFCKDFKGFIPSILEDLIETRQKVKRKMKATIDPIEKKMLDYRQRALKILANSYYGYQGYPKARWYSKECAESVTAWGRHYIETTIKEAEKFGFKVLYADTDGFFATIPNEKPETIKSKAKKFLKHINEKLPGMLELEYEGFYLRGFFVTKKKYALIDEDGHITTRGLEVVRRNWSEIAKETQAKVLEVILREGSIEKAAGIVKKVVEDLANYRVPVEKLIIHELITRELKRYKATGPHVAIAKRLQARGIKVKPGTIISYVVLKGSKKISDRVILFDEYDSSRHKYDPDYYIHNQVLPAVLRILEAFGYKEKDLEYQRMKQTGLGAWLKMGKK

SEQ ID NO: 594 - protein, 757 aa, unidentified
  REGION 1..757: note = Description of Unknown: Synthetic polypeptide
MILDTDYITENGKPVIRIFKKEKGEFKIEYDRNFEPYIYALLEDDESIEDIKKITGERHGKKVRIIRVEKVKKKFLGEPIEVWKLVFEHPQDVPAIRDAIRSHPAVREIFEYDIPFAKRYLIDKGLVPMEGGEELKLLAFAIATFYHEGDEFAEGEILMISYADESGAKVITWKKIDLPYVEVVSTEREAIKRFLQVLREKDPDVLLTYNGDNFDFAYIKKRCEKLGLKFTIGRDGSEPKIQRMGDRFAVEVKGRIHLDLAPVVRHTIRLPTYTLEAVYEAVFGKKKEKVYAEEIAEAWKSEEGLKRVAQYSMEDARATYELGREFFPMEVELAKLIGQSVWDVSRSSTGNLVEWYLLRVAYERNELAPNKPGGEEYQRRMRSSYIGGYVKEPEKGLWESIAYLDFRSSAGSIIVTHNVSPDTLEKECKNYDVAPIVGYRFCKDFKGFIPSILEDLIETRQKVKRKMKATIDPIEKKMLDYRQRALKILANSYYGYQGYPKARWYSKECAESVTAWGRHYIETTIKEAEKFGFKVLYADTDGFFATIPNEKPETIKSKAKKFLKHINEKLPGMLELEYEGFYLRGFFVTKKKYALIDEDGHITTRGLEVVRRDWSEIAKETQAKVLEVILREGSIEKAAGIVKKVVEDLANYRVPVEKLIIHEQITRKLKDYKATGPHVAIAKRLQARGIKVEPGTIISYVVLKGSKKISDRVILFDEYDSSRHKYDPDYYIHNQVLPAVLRILEAFGYKEKDLEYQ

SEQ ID NO: 595 - protein, 773 aa, unidentified
  REGION 1..773: note = Description of Unknown: Synthetic polypeptide
MILDTDYITENGKPVIRIFKKEKGEFKIEYDRNFEPYIYALLEDDESIEDIKKITGERHGKKVRIIRVEKVKKKFLGEPIEVWKLVFEHPQDYPAIRDAIRSHPAVREIFEYDIPFAKRYLIDKGLVPMEGGEELKLLAFAIATFYHEGDEFAEGEILMISYADESGAKVITWKKIDLPYVEVVSTEREAIKRFLQVLREKDPDVLLTYNGDNFDFAYIKKRCEKLGLKFTIGRDGSEPKIQRMGDRFAVEVKGRIHLDLAPVVRHTIRLPTYTLEAVYEAVFGKKKEKVYAEEIAEAWKSEEGLKRVAQYSMEDARATYELGREFFPMEVELAKLIGQSVWDVSRSSTGNLVEWYLLRVAYERNELAPNKPGGEEYQRRMRSSYIGGYVKEPEKGLWESIAYLDFRSSAGSIIVTHNVSPDTLEKECKNYDVAPIVGYRFCKDFKGFIPSILEDLIETRQKVKRKMKATIDPIEKKMLDYRQRALKILANSYYGYEGYPKARWYSKECAESVTAWGRHYIETTIKEAEKFGFKVLYADTDGFFATIPNEKPETIKSKAKKFLKHINEKLPGMLELEYEGFYLRGFFVTKKKYALIDEDGHITTRGLEVVRRDWSEIAKETQAKVLEVILREGSIEKAAGIVKKVVEDLANYRVPVEKLIIHEQITRELKRYKATGPHVAIAKRLQARGIKVKPGTIISYVVLKGSKKISDRVILFDEYDSSRHKYDPDYYIHNQVLPAVLRILEAFGYKEKDLEYQRMKQTGLGAWLKMGKK

SEQ ID NO: 596 - protein, 773 aa, unidentified
  REGION 1..773: note = Description of Unknown: Synthetic polypeptide
MILDTDYITENGKPVIRIFKKEKGEFKIEYDRNFEPYIYALLEDDESIEDIKKITGERHGKKVRIIRVEKVKKKFLGEPIEVWKLVFEHPQDHPAIRDAIRSHPAVREIFEYDIPFAKRYLIDKGLVPMEGGEELKLLAFNIATFYHEGDEFAEGEILMISYADESGAKVITWKKIDLPYVEVVSTEREAIKRFLQVLREKDPDVLLTYNGDNFDFAYIKKRCEKLGLKFTIGRDGSEPKIQRMGDRFAVEVKGRIHLDLAPVVRHTIRLPTYTLEAVYEAVFGKKKEKVYAEEIAEAWKSEEGLKRVAQYSMEDARATYELGREFFPLEVELAKLIGQSVWDVSRSSTGNLVEWYLLRVAYERNELAPNKPGGEEYQRRMRSSYIGGYVKEPEKGLWESIAYLDFRSSAGSIIVTHNVSPDTLEKECKNYDVAPIVGYRFCKDFKGFIPSILEDLIETRQKVKRKMKATIDPIEKKMLDYRQRALKILANSYYGYQGYPKARWYSKECAESVTAWGRHYIETTIKEAEKFGFKVLYADTDGFFATIPNEKPETIKSKAKKFLKHINEKLPGMLELEYEGFYLRGFFVTKKKYALIDEDGHITTRGLEVVRRDWSEIAKETQAKVLEVILREGSIEKAAGIVKKVVEDLANYRVPVEKLIIHEQITRELKRYKATGPHVAIAKRLQARGIKVKPGTIISYVVLKGSKKISDRVILFDEYDSSRHKYDPDYYIHNQVLPAVLRILEAFGYKEKDLEYQRMKQTGLGAWLKMGKK

SEQ ID NO: 597 - protein, 773 aa, unidentified
  REGION 1..773: note = Description of Unknown: Synthetic polypeptide
MILDTDYITENGKPVIRIFKKEKGEFKIEYDRNFEPYIYALLEDDESIEDIKKITGERHGKKVRIIRVEKVKKKFLGEPIEVWKLVFEHPQDNPAIRDAIRSHPAVREIFEYDIPFAKRYLIDKGLVPMEGGEELKLLAFNIATFYHEGDEFAEGEILMISYADESGAKVITWKKIDLPYVEVVSTEREAIKRFLQVLREKDPDVLLTYNGDNFDFAYIKKRCEKLGLKFTIGRDGSEPKIQRMGDRFAVEVKGRIHLDLAPVVRHTIRLPTYTLEAVYEAVFGKKKEKVYAEEIAEAWKSEEGLKRVAQYSMEDARATYELGREFFPLEVELAKLIGQSVWDVSRSSTGNLVEWYLLRVAYERNELAPNKPGGEEYQRRMRSSYIGGYVKEPEKGLWESIAYLDFRSSAGSIIVTHNVSPDTLEKECKNYDVAPIVGYRFCKDFKGFIPSILEDLIETRQKVKRKMKATIDPIEKKMLDYRQRALKILANSYYGYQGYPKARWYSKECAESVTAWGRHYIETTIKEAEKFGFKVLYADTDGFFATIPNEKPETIKSKAKKFLKHINEKLPGMLELEYEGFYLRGFFVTKKKYALIDEDGHITTRGLEVVRRDWSEIAKETQAKVLEVILREGSIEKAAGIVKKVVEDLANYRVPVEKLIIHEQITRELKRYKATGPHVAIAKRLQARGIKVKPGTIISYVVLKGSKKISDRVILFDEYDSSRHKYDPDYYIHNQVLPAVLRILEAFGYKEKDLEYQRMKQTGLGAWLKMGKK

SEQ ID NO: 598 - protein, 773 aa, unidentified
  REGION 1..773: note = Description of Unknown: Synthetic polypeptide
MILDTDYITENGKPVIRIFKKEKGEFKIEYDRNFEPYIYALLEDDESIEDIKKITGERHGKKVRIIRVEKVKKKFLGEPIEVWKLVFEHPQDYPAIRDAIRSHPAVREIFEYDIPFAKRYLIDKGLVPMEGGEELKLLAFAIATFYHEGDEFAEGEILMISYADESGAKVITWKKIDLPYVEVVSTEREAIKRFLQVLREKDPDVLLTYNGDNFDFAYIKKRCEKLGLKFTIGRDGSEPKIQRMGDRFAVEVKGRIHLDLAPVVRHTIRLPTYTLEAVYEAVFGKKKEKVYAEEIAEAWKSEEGLKRVAQYSMEDARATYELGREFFPMEVELAKLIGQSVWDVSRSSTGNLVEWYLLRVAYERNELAPNKPGGEEYQRRMRSSYIGGYVKEPEKGLWESIAYLDFRSSAGSIIVTHNVSPDTLEKECKNYDVAPIVGYRFCKDFKGFIPSILEDLIETRQKVKRKMKATIDPIEKKMLDYRQRALKILANSYYGYQGYPKARWYSKECAESVTAWGRHYIETTIKEAEKFGFKVLYADTDGFFATIPNEKPETIKSKAKKFLKHINEKLPGMLELEYEGFYLRGFFVTKKKYALIDEDGHITTRGLEVVRRDWSEIAKETQAKVLEVILREGSIEKAAGIVKKVVEDLANYRVPVEKLIIHEQITRELKRYKATGPHVAIAKRLQARGIKVNPGTIISYVVLKGSKKISDRVILFDEYDSSRHKYDPDYYIHNQVLPAVLRILEAFGYKEKDLEYQRMKQTGLGAWLKMGKK

SEQ ID NO: 599 - protein, 773 aa, unidentified
  REGION 1..773: note = Description of Unknown: Synthetic polypeptide
MILDTDYITENGKPVIRIFKKEKGEFKIEYDRNFEPYIYALLEDDESIEDIKKITGERHGKKVRIIRVEKVKKKFLGEPIEVWKLVFEHPQDYPAIRDAIRSHPAVREIFEYDIPFAKRYLIDKGLVPMEGGEELKLLAFAIATFYHEGDEFAEGEILMISYADESGAKVITWKKIDLPYVEVVSTEREAIKRFLQVLREKDPDVLLTYNGDNFDFAYIKKRCEKLGLKFTIGRDGSEPKIQRMGDRFAVEVKGRIHLDLAPVVRHTIRLPTYTLEAVYEAVFGKKKEKVYAEEIAEAWKSEEGLKRVAQYSMEDARATYELGREFFPMEVELAKLIGQSVWDVSRSSTGNLVEWYLLRVAYERNELAPNKPGGEEYQRRMRSSYIGGYVKEPEKGLWESIAYLDFRSSAGSIIVTHNVSPDTLEKECKNYDVAPIVGYRFCKDFKGFIPSILEDLIETRQKVKRKMTATIDPIEKKMLDYRQRALKILANSYYGYQGYPKARWYSKECAESVTAWGRHYIETTIKEAEKFGFKVLYADTDGFFATIPNEKPETIKSKAKKFLKHINEKLPGMLELEYEGFYLRGFFVTKKKYALIDEDGHITTRGLEVVRRDWSEIAKETQAKVLEVILREGSIEKAAGIVKKVVEDLANYRVPVEKLIIHEQITRELKRYKATGPHVAIAKRLQARGIKVKPGTIISYVVLKGSKKISDRVILFDEYDSSRHKYDPDYYIHNQVLPAVLRILEAFGYKEKDLEYQRMKQTGLGAWLKMGKK

SEQ ID NO: 600 - protein, 773 aa, unidentified; identical to SEQ ID NO: 49
  REGION 1..773: note = Description of Unknown: Synthetic polypeptide

SEQ ID NO: 601 - protein, 773 aa, unidentified
  REGION 1..773: note = Description of Unknown: Synthetic polypeptide
MILDTDYITENGKPVIRIFKKEKGEFKIEYDRNFEPYIYALLEDDESIEDIKKITGERHGKKVRIIRVEKVKKKFLGEPIEVWKLVFEHPQDYPAIRDAIRSHPAVREIFEYDIPFAKRYLIDKGLVPMEGGEELKLLAFAIATFYHEGDEFAEGEILMISYADESGAKVITWKKIDLPYVEVVSTEREAIKRFLQVLREKDPDVLLTYNGDNFDFAYIKKRCEKLGLKFTIGRDGSEPKIQRMGDRFAVEVKGRIHLDLAPVVRHTIRLPTYTLEAVYEAVFGKKKEKVYAEEIAEAWKSEEGLKRVAQYSMEDARATYELGREFFPMEVELAKLIGQSVWDVSRSSTGNLVEWYLLRVAYERNELAPNKPGGEEYQRRMRSSYIGGYVKEPEKGLWESIAYLDFRSSAGSIIVTHNVSPDTLEKECKNYDVAPKVGYRFCKDFKGFIPSILEDLIETRQKVKRKMKATIDPIEKKMLDYRQRALKILANSYYGYQGYPKARWYSKECAESVTAWGRHYIETTIKEAEKFGFKVLYADTDGFFATIPNEKPETIKSKAKKFLKHINEKLPGMLELEYEGFYLRGFFVTKKKYALIDEDGHITTRGLEVVRRDWSEIAKETQAKVLEVILREGSIEKAAGIVKKVVEDLANYRVPVEKLIIHEQITRELKRYKATGPHVAIAKRLQARGIKVKPGTIISYVVLKGSKKISDRVILFDEYDSSRHKYDPDYYIHNQVLPAVLRILEAFGYKEKDLEYQRMKQTGLGAWLKMGKK

SEQ ID NO: 602 - protein, 773 aa, unidentified
  REGION 1..773: note = Description of Unknown: Synthetic polypeptide
MILDTDYITENGKPVIRIFKKEKGEFKIEYDRNFEPYIYALLEDDESIEDIKKITGERHGKKVRIIRVEKVKKKFLGEPIEVWKLVFEHPQDYPAIRDAIRSHPAVREIFEYDIPFAKRYLIDKGLVPMEGGEELKLLAFAIATFYHEGDEFAEGEILMISYADESGAKVITWKKIDLPYVEVVSTEREAIKRFLQVLREKDPDVLLTYNGDNFDFAYIKKRCEKLGLKFTIGRDGSEPKIQRMGDRFAVEVKGRIHLDLAPVVRHTIRLPTYTLEAVYEAVFGKKKEKVYAEEIAEAWKSEEGLKRVAQYSKEDARATYELGREFFPMEVELAKLIGQSVWDVSRSSTGNLVEWYLLRVAYERNELAPNKPGGEEYQRRMRSSYIGGYVKEPEKGLWESIAYLDFRSSAGSIIVTHNVSPDTLEKECKNYDVAPIVGYRFCKDFKGFIPSILEDLIETRQKVKRKMKATIDPIEKKMLDYRQRALKILANSYYGYQGYPKARWYSKECAESVTAWGRHYIETTIKEAEKFGFKVLYADTDGFFATIPNEKPETIKSKAKKFLKHINEKLPGMLELEYEGFYLRGFFVTKKKYALIDEDGHITTRGLEVVRRDWSEIAKETQAKVLEVILREGSIEKAAGIVKKVVEDLANYRVPVEKLIIHEQITRELKRYKATGPHVAIAKRLQARGIKVKPGTIISYVVLKGSKKISDRVILFDEYDSSRHKYDPDYYIHNQVLPAVLRILEAFGYKEKDLEYQRMKQTGLGAWLKMGKK

SEQ ID NO: 603 - protein, 773 aa, unidentified
  REGION 1..773: note = Description of Unknown: Synthetic polypeptide
MILDTDYITENGKPVIRIFKKEKGEFKIEYDRNFEPYIYALLEDDESIEDIKKITGERHGKKVRIIRVEKVKKKFLGEPIEVWKLVFEHPQDYPAIRDAIRSHPAVREIFEYDIPFAKRYLIDKGLVPMEGGEELKLLAFAIATFYHEGDEFAEGEILMISYADESGAKVITWKKIDLPYVEVVSTEREAIKRFLQVLREKDPDVLLTYNGDNFDFAYIKKRCEKLGLKFTIGRDGSEPKIQRMGDRFAVEVKGRIHLDLAPVVRHTIRLPTYTLEAVYEAVFGKKKEKVYAEEIAEAWKSEEGLKRVAQYSMEDARATYELGREFFPMEVEFAKLIGQSVWDVSRSSTGNLVEWYLLRVAYERNELAPNKPGGEEYQRRMRSSYIGGYVKEPEKGLWESIAYLDFRSSAGSIIVTHNVSPDTLEKECKNYDVAPIVGYRFCKDFKGFIPSILEDLIETRQKVKRKMKATIDPIEKKMLDYRQRALKILANSYYGYQGYPKARWYSKECAESVTAWGRHYIETTIKEAEKFGFKVLYADTDGFFATIPNEKPETIKSKAKKFLKHINEKLPGMLELEYEGFYLRGFFVTKKKYALIDEDGHITTRGLEVVRRDWSEIAKETQAKVLEVILREGSIEKAAGIVKKVVEDLANYRVPVEKLIIHEQITRELKRYKATGPHVAIAKRLQARGIKVKPGTIISYVVLKGSKKISDRVILFDEYDSSRHKYDPDYYIHNQVLPAVLRILEAFGYKEKDLEYQRMKQTGLGAWLKMGKK

SEQ ID NO: 604 - protein, 773 aa, unidentified
  REGION 1..773: note = Description of Unknown: Synthetic polypeptide
MILDTDYITENGKPVIRIFKKEKGEFKIEYDRNFEPYIYALLEDDESIEDIKKITGERHGKKVRIIRVEKVKKKFLGEPIEVWKLVFEHPQDYPAIRDAIRSHPAVREIFEYDIPFAKRYLIDKGLVPMEGGEELKLLAFAIATFYHEGDEFAEGEILMISYADESGAKVITWKKIDLPYVEVVSTEREAIKRFLQVLREKDPDVLLTYNGDNFDFAYIKKRCEKLGLKFTIGRDGSEPKIQRMGDRFAVEVKGRIHLDLAPVVRHTIRLPTYTLEAVYEAVFGKKKEKVYAEEIAEAWKSEEGLKRVAQYSMEDARATYELGREFFPMEVELAKLIGQSVWDVSRSSTGNLVEWYLLRVAYERNELAPNKPGGEEYQRRMRSSYIGGYVKEPEKGLWESIAYLDFRSSAGSIIVTHNISPDTLEKECKNYDVAPIVGYRFCKDFKGFIPSILEDLIETRQKVKRKMKATIDPIEKKMLDYRQRALKILANSYYGYRGYPKARWYNKESAESVTAWGRHYIETTIKEAEKFGFKVLYADTDGFFATIPNEKPETIKSKAKKFLKHINEKLPGMLELEYEGFYLRGFFVTKKKYALIDEDGHITTRGLEVVRRDWSEIAKETQAKVLEVILREGSIEKAAGIVKKVVEDLANYRVPVEKLIIHEQITRELKRYKATGPHVAIAKRLQARGIKVKPGTIISYVVLKGSKKISDRVILFDEYDSSRHKYDPDYYIHNQVLPAVLRILEAFGYKEKDLEYQRMKQTGLGAWLKMGKK

SEQ ID NO: 605 - protein, 773 aa, unidentified
  REGION 1..773: note = Description of Unknown: Synthetic polypeptide
MILDTDYITENGKPVIRIFKKEKGEFKIEYDRNFEPYIYALLEDDESIEDIKKITGERHGKKVRIIRVEKVKKKFLGEPIEVWKLVFEHPQDVPAIRDAIRSHPAVREIFEYDIPFAKRYLIDKGLVPMEGGEELKLLAFNIATFYHEGDEFAEGEILMISYADESGAKVITWKKIDLPYVEVVSTEREAIKRFLQVLREKDPDVLLTYNGDNFDFAYIKKRCEKLGLKFTIGRDGSEPKIQRMGDRFAVEVKGRIHLDLAPVVRHTIRLPTYTLEAVYEAVFGKKKEKVYAEEIAEAWKSEEGLKRVAQYSMEDARATYELGREFFPLEVELAKLIGQSVWDVSRSSTGNLVEWYLLRVAYERNELAPNKPGGEEYQRRMRSSYIGGYVKEPEKGLWESIAYLDFRSSAGSIIVTHNVSPDTLEKECKNYDVAPIVGYRFCKDFKGFIPSILEDLIETRQKVKRKMKATIDPIEKKMLDYRQRALKILANSYYGYQGYPKARWYSKECAESVTAWGRHYIETTIKEAEKFGFKVLYADTDGFFATIPNEKPETIKSKAKKFLKHINEKLPGMLELEYEGFYLRGFFVTKKKYALIDEDGHITTRGLEVVRRDWSEIAKETQAKVLEVILREGSIEKAAGIVKKVVEDLANYRVPVEKLIIHERITRELKRYKATGPHVAIAKRLQARGIKVKPGTIISYVVLKGSKKISDRVILFDEYDSSRHKYDPDYYIHNQVLPAVLRILEAFGYKEKDLEYQRMKQTGLGAWLKMGKK

SEQ ID NO: 606 - protein, 773 aa, unidentified
  REGION 1..773: note = Description of Unknown: Synthetic polypeptide
MILDTDYITENGKPVIRIFKKEKGEFKIEYDRNFEPYIYALLEDDESIEDIKKITGERHGKKVRIIRVEKVKKKFLGEPIEVWKLVFEHPQDYPAIRDAIRSHPAVREIFEYDIPFAKRYLIDKGLVPMEGGEELKLLAFAIATFYHEGDEFAEGEILMISYADESGAKVITWKKIDLPYVEVVSTEREAIKRFLQVLREKDPDVLLTYNGDNFDFAYIKKRCEKLGLKFTIGRDGSEPKIQRMGDRFAVEVKGRIHLDLAPVVRHTIRLPTYTLEAVYEAVFGKKKEQVYAEEIAEAWKSEEGLKRVAQYSMEDARATYELGREFFPMEVELAKLIGQSVWDVSRSSTGNLVEWYLLRVAYERNELAPNKPGGEEYQRRMRSSYIGGYVKEPEKGLWESIAYLDFRSSAGSIIVTHNVSPDTLEKECKNYDVAPIVGYRFCKDFKGFIPSILEDLIETRQKVKRKMKATIDPIEKKMLDYRQRALKILANSYYGYQGYPKARWYSKEQAERVTAWGRHYIETTIKEAEKFGFKVLYADTDGFFATIPNEKPETIKSKAKKFLKHINEKLPGMLELEYEGFYLRGFFVTKKKYALIDEDGHITTRGLEVVRRDWSEIAKETQAKVLEVILREGSIEKAAGIVKKVVEDLANYRVPVEKLIIHEQITRELKRYKATGPHVAIAKRLQARGIKVKPGTIISYVVLKGSKKISDRVILFDEYDSSRHKYDPDYYIHNQVLPAVLRILEAFGYKEKDLEYQRMKQTGLGAWLKMGKK

SEQ ID NO: 607 - protein, 773 aa, unidentified
  REGION 1..773: note = Description of Unknown: Synthetic polypeptide
MILDTDYITENGKPVIRIFKKEKGEFKIEYDRNFEPYIYALLEDDESIEDIKKITGERHGKKVRIIRVEKVKKKFLGEPIEVWKLVFEHPQDVPAIRDAIRSHPAVREIFEYDIPFAKRYLIDKGLVPMEGGEELKLLAFNIATFYHEGDEFAEGEILMISYADESGAKVITWKKIDLPYVEVVSTEREAIKRFLQVLREKDPDVLLTYNGDNFDFAYIKKRCEKLGLKFTIGRDGSEPKIQRMGDRFAVEVKGRIHLDLAPVVRHTIRLPTYTLEAVYEAVFGKKKEKVYAEEIAEAWKSEEGLKRVAQYSMEDARATYELGREFFPLEVELAKLIGQSVWDVSRSSTGNLVEWYLLRVAYERNELAPNKPGGEEYQRRMRSSYIGGYVKEPEKGLWESIAYLDFRSSAGSIIVTHNVSPDTLEKECKNYDVAPIVGYRFCKDFKGFIPSILEDLIETRQKVKRKMKATIDPIEKKMLDYRQRALKILANSYYGYQGYPKARWYSKECAESVTAWGRHYIETTIKEAEKFGFKVLYADTDGFFATIPNEKPETIKSKAKKFLKHINEKLPGMLELEYEGFYLRGFFVTKKKYALIDEDGHITTRGLEVVRRDWSEIAKETQAKVLEVILREGSIEKAAGIVKKVVEDLANYRVPVEKLIIHEQITRELKRYKATGPHVAIAKRLQARGIKVKPGTIISYVVLKGSKKISDRVILFDEYDSSRHKYDPDYYIHNQVLPAVLRILEAFGYKEKDLEYQRDKQTGLGAWLKMGKK

SEQ ID NO: 608 - protein, 773 aa, unidentified
  REGION 1..773: note = Description of Unknown: Synthetic polypeptide
MILDTDYITENGKPVIRIFKKEKGEFKIEYDRNFEPYIYALLEDDESIEDIKKITGERHGKKVRIIRVEKVKKKFLGEPIEVWKLVFEHPQDYPAIRDAIRSHPAVREIFEYDIPFAKRYLIDKGLVPYEGGEELKLLAFAIATFYHEGDEFAEGEILMISYADESGAKVITWKKIDLPYVEVVSTEREAIKRFLQVLREKDPDVLLTYNGDNFDFAYIKKRCEKLGLKFTIGRDGSEPKIQRMGDRFAVEVKGRIHLDLAPVVRHTIRLPTYTLEAVYEAVFGKKKEKVYAEEIAEAWKSEEGLKRVAQYSMEDARATYELGREFFPMEVELAKLIGQSVWDVSRSSTGNLVEWYLLRVAYERNELAPNKPGGEEYQRRMRSSYIGGYVKEPEKGLWESIAYLDFRSSAGSIIVTHNVSPDTLEKECKNYDVAPIVGYRFCKDFKGFIPSILEDLIETRQKVKRKMKATIDPIEKKMLDYRQRALKILANSYYGYQGYPKARWYSKECAESVTAWGRHYIETTIKEAEKFGFKVLYADTDGFFATIPNEKPETIKSKAKKFLKHINEKLPGMLELEYEGFYLRGFFVTKKKYALIDEDGHITTRGLEVVRRDWSEIAKETQAKVLEVILREGSIEKAAGIVKKVVEDLANYRVPVEKLIIHEQITRELKRYKATGPHVAIAKRLQARGIKVKPGTIISYVVLKGSKKISDRVILFDEYDSSRHKYDPDYYIHNQVLPAVLRILEAFGYKEKDLEYQRMKQTGLGAWLKMGKK

SEQ ID NO: 609 - protein, 773 aa, unidentified
  REGION 1..773: note = Description of Unknown: Synthetic polypeptide
MILDTDYITENGKPVIRIFKKEKGEFKIEYDRNFEPYIYALLEDDESIEDIKKITGERHGKKVRIIRVEKVKKKFLGEPIEVWKLVFEHPQDVPAIRDAIRSHPAVREIFEYDIPFAKRYLIDKGLVPMEGGEELKLLAFNIATFYHEGDEFAEGEILMISYADESGAKVITWKKIDLPYVEVVSTEREAIKRFLQVLREKDPDVLLTYNGDNFDFAYIKKRCEKLGLKFTIGRDGSEPKIQRMGDRFAVEVKGRIHLDLAPVVRHTIRLPTYTLEAVYEAVFGKKKEKVYAEEIAEAWKSEEGLKRVAQYSMEDARATYELGREFFPLEVELAKLIGQSVWDVSRSSTGNLVEWYLLRVAYERNELAPNKPGGEEYQRRMRSSYIGGYVKEPEKGLWESIAYLDFRSSAGSIIVTHNVSPDTLEKECKNYDVAPIVGYRFCKDFKGFIPSILEDLIETRQKVKRKMKATIDPIEKKMLDYRQRALKILANSYYGYQGYPKARWYSKEAAESVTAWGRHYIETTIKEAEKFGFKVLYADTDGFFATIPNEKPETIKSKAKKFLKHINEKLPGMLELEYEGFYLRGFFVTKKKYALIDEDGHITTRGLEVVRRDWSEIAKETQAKVLEVILREGSIEKAAGIVKKVVEDLANYRVPVEKLIIHEQITRELKRYKATGPHVAIAKRLQARGIKVKPGTIISYVVLKGSKKISDRVILFDEYDSSRHKYDPDYYIHNQVLPAVLRILEAFGYKEKDLEYQRMKQTGLGAWLKMGKK

SEQ ID NO: 610 - protein, 773 aa, unidentified
  REGION 1..773: note = Description of Unknown: Synthetic polypeptide
MILDTDYITENGKPVIRIFKKEKGEFKIEYDRNFEPYIYALLEDDESIEDIKKITGERHGKKVRIIRVEKVKKKFLGEPIEVWKLVFEHPQDYPAIRDAIRSHPAVREIFEYDIPFAKRYLIDKGLVPMEGGEELKLLAFAIATFYHEGDEFAEGEILMISYADESGAKVITWKKIDLPYVEVVSTEREAIKRFLQVLREKDPDVLLTYNGDNFDFAYIKKRCEKLGLKFTIGRDGSEPKIQRMGDRFAVEVKGRIHLDLAPVVRHTIRLPTYTLEAVYEAVFGKKKEKVYAEEIAEAWKSEEGLKRVAQYSMEDARATYELGREFFPMEVELAKLIGQSVWDVSRSSTGNLVEWYLLRVAYERNELAPNKPGGEEYQRRMRSSYIGGYVKEPEKGLWESIAYLDFRSSAGSIIVTHNVSPDTLEKECKNYDVAPIVGYRFCKDFKGFIPSILEDLIETRQKVKRKMKATIDPIEKKMLDYRQRALKILANSYYGYQGYPKARWYSKECAESVTAWGRHYIETTIKEAEKFGFKVLYADTDGFFATIPNEKPETIKSKAKKFLKHINEKLPGMLELEYEGFYLRGFFVTKKKYALIDEDGHITTRGLEVVRRDWSEIAKETQAKVLEVILREGSIEKAAGIVKKVVEDLANYRVPVEKLIIHEQITRELKRYKATGPHVAIAKRLQARGIQVKPGTIISYVVLKGSKKISDRVILFDEYDSSRHKYDPDYYIHNQVLPAVLRILEAFGYKEKDLEYQRMKQTGLGAWLKMGKK

SEQ ID NO: 611 - protein, 773 aa, unidentified
  REGION 1..773: note = Description of Unknown: Synthetic polypeptide
MILDTDYITENGKPVIRIFKKEKGEFKIEYDRNFEPYIYALLEDDESIEDIKKITGERHGKKVRIIRVEKVKKKFLGEPIEVWKLVFEHPQDVPAIRDAIRSHPAVREIFEYDIPFAKRYLIDKGLVPMEGGEELKLLAFAIATFYHEGDEFAEGEILMISYADESGAKVITWKKIDLPYVEVVSTEREAIKRFLQVLREKDPDVLLTYNGDNFDFAYIKKRCEKLGLKFTIGRDGSEPKIQRMGDRFAVEVKGRIHLDLAPVVRHTIRLPTYTLEAVYEAVFGKKKEKVYAEEIAEAWKSEEGLKRVAQYSMEDARATYELGREFFPMEVELAKLIGQSVWDVSRSSTGNLVEWYLLRVAYERNELAPNKPGGEEYQRRMRSSYIGGYVKEPEKGLWESIAYLDFRSSAGSIIVTHNVSPDTLEKECKNYDVAPIVGYRFCKDFKGFIPSILEDLIETRQKVKRKMKATIDPIEKKMLDYRQRALKILANSYYGYQGYPKARWYSKECAEFVTAWGRHYIETTIKEAEKFGFKVLYADTDGFFATIPNEKPETIKSKAKKFLKHINEKLPGMLELEYEGFYLRGFFVTKKKYALIDEDGHITTRGLEVVRRDWSEIAKETQAKVLEVILREGSIEKAAGIVKKVVEDLANYRVPVEKLIIHEQITRELKDYKATGPHVAIAKRLQARGIKVKPGTIISYVVLKGSKKISDRVILFDEYDSSRHKYDPDYYIHNQVLPAVLRILEAFGYKEKDLEYQRMKQTGLGAWLKMGKK

SEQ ID NO: 612 - protein, 773 aa, unidentified
  REGION 1..773: note = Description of Unknown: Synthetic polypeptide
MILDTDYITENGKPVIRIFKKEKGEFKIEYDRNFEPYIYALLEDDESIEDIKKITGERHGKKVRIIRVEKVKKKFLGEPIEVWKLVFEHPQDYPAIRDAIRSHPAVREIFEYDIPFAKRYLIDKGLVPMEGGEELKLLAFAIATFYHEGDEFAEGEILMISYADESGAKVITWKKIDLPYVEVVSTEREAIKRFLQVLREKDPDVLLTYNGDNFDFAYIKKRCEKLGLKFTIGRDGSEPKIQRMGDRFAVEVKGRIHLDLAPVVRHTIRLPTYTLEAVYEAVFGKKKEKVYAEEIAEAWKSEEGLKRVAQYSMEDARATYELGREFFPMEVELAKLIGQSVWDVSRSSTGNLVEWYLLRVAYERNELAPNRPGGEEYQRRMRSSYIGGYVKEPEKGLWESIAYLDFRSSAGSIIVTHNVSPDTLEKECKNYDVAPIVGYRFCKDFKGFIPSILEDLIETRQKVKRKMKATIDPIEKKMLDYRQRALKILANSYYGYQGYPKARWYSKECAESVTAWGRHYIETTIKEAEKFGFKVLYADTDGFFATIPNEKPETIKSKAKKFLKHINEKLPGMLELEYEGFYLRGFFVTKKKYALIDEDGHITTRGLEVVRRDWSEIAKETQAKVLEVILREGSIEKAAGIVKKVVEDLANYRVPVEKLIIHEQITRELKRYKATGPHVAIAKRLQARGIKVKPGTIISYVVLKGSKKISDRVILFDEYDSSRHKYDPDYYIHNQVLPAVLRILEAFGYKEKDLEYQRMKQTGLGAWLKMGKK

SEQ ID NO: 613 - protein, 773 aa, unidentified
  REGION 1..773: note = Description of Unknown: Synthetic polypeptide
MILDTDYITENGKPVIRIFKKEKGEFKIEYDRNFEPYIYALLEDDESIEDIKKITGERHGKKVRIIRVEKVKKKFLGEPIEVWKLVFEHPQDYPAIRDAIRSHPAVREIFEYDIPFAKRYLIDKGLVPMEGGEELKLLAFAIATFYHEGDEFAEGEILMISYADESGAKVITWKKIDLPYVEVVSTEREAIKRFLQVLREKDPDVLLTYNGDNFDFAYIKKRKEKLGLKFTIGRDGSEPKIQRMGDRFAVEVKGRIHLDLAPVVRHTIRLPTYTLEAVYEAVFGKKKEQVYAEEIAEAWKSEEGLKRVAQYSMEDARATYELGREFFPMEVELAKLIGQSVWDVSRSSTGNLVEWYLLRVAYERNELAPNKPGGEEYQRRMRSSYIGGYVKEPEKGLWESIAYLDFRSSAGSIIVTHNVSPDTLEKECKNYDVAPIVGYRFCKDFKGFIPSILEDLIETRQKVKRKMKATIDPIEKKMLDYRQRALKILANSYYGYQGYPKARWYSKECAESVTAWGRHYIETTIKEAEKFGFKVLYADTDGFFATIPNEKPETIKSKAKKFLKHINEKLPGMLELEYEGFYLRGFFVTKKKYALIDEDGHITTRGLEVVRRDWSEIAKETQAKVLEVILREGSIEKAAGIVKKVVEDLANYRVPVEKLIIHEQITRELKRYKATGPHVAIAKRLQARGIKVKPGTIISYVVLKGSKKISDRVILFDEYDSSRHKYDPDYYIHNQVLPAVLRILEAFGYKEKDLEYQRMKQTGLGAWLKMGKK

SEQ ID NO: 614 - protein, 773 aa, unidentified
  REGION 1..773: note = Description of Unknown: Synthetic polypeptide
MILDTDYITENGKPVIRIFKKEKGEFKIEYDRNFEPYIYALLEDDESIEDIKKITGERHGKKVRIIRVEKVKKKFLGEPIEVWKLVFEHPQDVPAIRDAIRSHPAVREIFEYDIPFAKRYLIDKGLVPMEGGEELKLLAFTIATFYHEGDEFAEGEILMISYADESGAKVITWKKIDLPYVEVVSTEREAIKRFLQVLREKDPDVLLTYNGDNFDFAYIKKRCEKLGLKFTIGRDGSEPKIQRMGDRFAVEVKGRIHLDLAPVVRHTIRLPTYTLEAVYEAVFGKKKEKVYAEEIAEAWKSEEGLKRVAQYSMEDARATYELGREFFPLEVELAKLIGQSVWDVSRSSTGNLVEWYLLRVAYERNELAPNKPGGEEYQRRMRSSYIGGYVKEPEKGLWESIAYLDFRSSAGSIIVTHNVSPDTLEKECKNYDVAPIVGYRFCKDFKGFIPSILEDLIETRQKVKRKMKATIDPIEKKMLDYRQRALKILANSYYGYQGYPKARWYSKECAESVTAWGRHYIETTIKEAEKFGFKVLYADTDGFFATIPNEKPETIKSKAKKFLKHINEKLPGMLELEYEGFYLRGFFVTKKKYALIDEDGHITTRGLEVVRRDWSEIAKETQAKVLEVILREGSIEKAAGIVKKVVEDLANYRVPVEKLIIHELITRELKRYKATGPHVAIAKRLQARGIKVKPGTIISYVVLKGSKKISDRVILFDEYDSSRHKYDPDYYIHNQVLPAVLRILEAFGYKEKDLEYQRMKQTGLGAWLKMGKK

SEQ ID NO: 615 - protein, 773 aa, unidentified
  REGION 1..773: note = Description of Unknown: Synthetic polypeptide
MILDTDYITENGKPVIRIFKKEKGEFKIEYDRNFEPYIYALLEDDESIEDIKKITGERHGKKVRIIRVEKVKKKFLGEPIEVWKLVFEHPQDYPAIRDAIRSHPAVREIFEYDIPFAKRYLIDKGLVPMEGGEELKLLAFAIATFYHEGDEFAEGEILMISYADESGAKVITWKKIDLPYVEVVSTEREAIKRFLQVLREKDPDVLLTYNGDNFDFAYIKKRCEKLGLKFTIGRDGSEPKIQRMGDRFAVEVKGRIHLDLAPVVRHTIRLPTYTLEAVYEAVFGKKKEQVYAEEIAEAWKSEEGLKRVAQYSMEDARATYELGREFFPMEVELAKLIGQSVWDVSRSSTGNLVEWYLLRVAYERNELAPNKPGGEEYQRRMRSSYIGGYVKEPEKGLWESIAYLDFRSSAGSIIVTHNVSPDTLEKECKNYDVAPIVGYRFCKDFKGFIPSILEDLIETRQKVKRKMKATIDPIEKKMLDYRQRALKILANSYYGYQGYPKARWYLKECAESVTAWGRHYIETTIKEAEKFGFKVLYADTDGFFATIPNEKPETIKSKAKKFLKHINEKLPGMLELEYEGFYLRGFFVTKKKYALIDEDGHITTRGLEVVRRDWSEIAKETQAKVLEVILREGSIEKAAGIVKKVVEDLANYRVPVEKLIIHEQITRELKRYKATGPHVAIAKRLQARGIKVKPGTIISYVVLKGSKKISDRVILFDEYDSSRHKYDPDYYIHNQVLPAVLRILEAFGYKEKDLEYQRMKQTGLGAWLKMGKK

SEQ ID NO: 616 - protein, 773 aa, unidentified
  REGION 1..773: note = Description of Unknown: Synthetic polypeptide
MILDTDYITENGKPVIRIFKKEKGEFKIEYDRNFEPYIYALLEDDESIEDIKKITGERHGKKVRIIRVEKVKKKFLGEPIEVWKLVFEHPQDVPAIRDAIRSHPAVREIFEYDIPFAKRYLIDKGLVPMEGGEELKLLAFAIATFYHEGDEFAEGEILMISYADESGAKVITWKKIDLPYVEVVSTEREAIKRFLQVLREKDPDVLLTYNGDNFDFAYIKKRCEKLGLKFTIGRDGSEPKIQRMGDRFAVEVKGRIHLDLAPVVRHTIRLPTYTLEAVYEAVFGKKKEKVYAEEIAEAWKSEEGLKRVAQYSMEDARATYELGREFFPMEVELAKLIGQSVWDVSRSSTGNLVEWYLLRVAYERNELAPNKPGGEEYQRRMRSSYIGGYVKEPEKGLWESIAYLDFRSSAGSIIVTHNVSPDTLEKECKNYDVAPIVGYRFCKDFKGFIPSILEDLIETRQKVKRKMKATIDPIEKKMLDYRQRALKILANSYYGYQGYPKARWYSKEQAEKVTAWGRHYIETTIKEAEKFGFKVLYADTDGFFATIPNEKPETIKSKAKKFLKHINEKLPGMLELEYEGFYLRGFFVTKKKYALIDEDGHITTRGLEVVRRDWSEIAKETQAKVLEVILREGSIEKAAGIVKKVVEDLANYRVPVEKLIIHEQITRELKDYKATGPHVAIAKRLQARGIKVKPGTIISYVVLKGSKKISDRVILFDEYDSSRHKYDPDYYIHNQVLPAVLRILEAFGYKEKDLEYQRMKQTGLGAWLKMGKK

SEQ ID NO: 617 - protein, 773 aa, unidentified
  REGION 1..773: note = Description of Unknown: Synthetic polypeptide
MILDTDYITENGKPVIRIFKKEKGEFKIEYDRNFEPYIYALLEDDESIEDIKKITGERHGKKVRIIRVEKVKKKFLGEPIEVWKLVFEHPQDYPAIRDAIRSHPAVREIFEYDIPFAKRYLIDKGLVPMEGGEELKLLAFAIATFYHEGDEFAEGEILMISYADESGAKVITWKKIDLPYVEVVSTEREAIKRFLQVLREKDPDVLLTYNGDNFDFAYIKKRCEKLGLKFTIGRDGSEPKIQRMGDRFAVEVKGRIHLDLAPVVRHTIRLPTYTLEAVYEAVFGKKKEQVYAEEIAEAWKSEEGLKRVAQYSMEDARATYELGREFFPMEVELAKLIGQSVWDVSRSSTGNLVEWYLLRVAYERNELAPNKPGGEEYQRRMRSSYIGGYVKEPEKGLWESIAYLDFRSSAGSIIVTHNVSPDTLEKECKNYDVAPIVGYRFCKDFKGFIPSILEDLIETRQKVKRKMKATIDPIEKKMLDYRQRALKILANSYYGYQGYPKARWYSKEDAEFVTAWGRHYIETTIKEAEKFGFKVLYADTDGFFATIPNEKPETIKSKAKKFLKHINEKLPGMLELEYEGFYLRGFFVTKKKYALIDEDGHITTRGLEVVRRDWSEIAKETQAKVLEVILREGSIEKAAGIVKKVVEDLANYRVPVEKLIIHEQITRELKRYKATGPHVAIAKRLQARGIKVKPGTIISYVVLKGSKKISDRVILFDEYDSSRHKYDPDYYIHNQVLPAVLRILEAFGYKEKDLEYQRMKQTGLGAWLKMGKK

SEQ ID NO: 618 - protein, 757 aa, unidentified
  REGION 1..757: note = Description of Unknown: Synthetic polypeptide
MILDTDYITENGKPVIRIFKKEKGEFKIEYDRNFEPYIYALLEDDESIEDIKKITGERHGKKVRIIRVEKVKKKFLGEPIEVWKLVFEHPQDVPAIRDAIRSHPAVREIFEYDIPFAKRYLIDKGLVPMEGGEELKLLAFAIATFYHEGDEFAEGEILMISYADESGAKVITWKKIDLPYVEVVSTEREAIKRFLQVLREKDPDVLLTYNGDNFDFAYIKKRCEKLGLKFTIGRDGSEPKIQRMGDRFAVEVKGRIHLDLAPVVRHTIRLPTYTLEAVYEAVFGKKKEKVYAEEIAEAWKSEEGLKRVAQYSMEDARATYELGREFFPMEVELAKLIGQSVWDVSRSSTGNLVEWYLLRVAYERNELAPNKPGGEEYQRRMRSSYIGGYVKEPEKGLWESIAYLDFRSSAGSIIVTHNVSPDTLEKECKNYDVAPIVGYRFCKDFKGFIPSILEDLIETRQKVKRKMKATIDPIEKKMLDYRQRALKILANSYYGYMGYPKARWYSKECAESVTAWGRHYIETTIKEAEKFGFKVLYADTDGFFATIPNEKPETIKSKAKKFLKHINEKLPGMLELEYEGFYLRGFFVTKKKYALIDEDGHITTRGLEVVRRDWSEIAKETQAKVLEVILREGSIEKAAGIVKKVVEDLANYRVPVEKLIIHEQITRKLKDYKATGPHVAIAKRLQARGIKVKPGTIISYVVLKGSKKISDRVILFDEYDSSRHKYDPDYYIHNQVLPAVLRILEAFGYKEKDLEYQ

SEQ ID NO: 619 - protein, 773 aa, unidentified
  REGION 1..773: note = Description of Unknown: Synthetic polypeptide
MILDTDYITENGKPVIRIFKKEKGEFKIEYDRNFEPYIYALLEDDESIEDIKKITGERHGKKVRIIRVEKVKKKFLGEPIEVWKLVFEHPQDVPAIRDAIRSHPAVREIFEYDIPFAKRYLIDKGLVPMEGGEELKLLAFNIATFYHEGDEFAEGEILMISYADESGAKVITWKKIDLPYVEVVSTEREAIKRFLQVLREKDPDVLLTYNGDNFDFAYIKKRCEKLGLKFTIGRDGSEPKIQRMGDRFAVEVKGRIHLDLAPVVRHTIRLPTYTLEAVYEAVFGKKKEKVYAEEIAEAWKSEEGLKRVAQYSVEDARATYELGREFFPLEVELAKLIGQSVWDVSRSSTGNLVEWYLLRVAYERNELAPNKPGGEEYQRRMRSSYIGGYVKEPEKGLWESIAYLDFRSSAGSIIVTHNVSPDTLEKECKNYDVAPIVGYRFCKDFKGFIPSILEDLIETRQKVKRKMKATIDPIEKKMLDYRQRALKILANSYYGYQGYPKARWYSKECAESVTAWGRHYIETTIKEAEKFGFKVLYADTDGFFATIPNEKPETIKSKAKKFLKHINEKLPGMLELEYEGFYLRGFFVTKKKYALIDEDGLITTRGLEVVRRDWSEIAKETQAKVLEVILREGSIEKAAGIVKKVVEDLANYRVPVEKLIIHEQITRELKRYKATGPHVAIAKRLQARGIKVKPGTIISYVVLKGSKKISDRVILFDEYDSSRHKYDPDYYIHNQVLPAVLRILEAFGYKEKDLEYQRMKQTGLGAWLKMGKK

SEQ ID NO: 620 - protein, 773 aa, unidentified
  REGION 1..773: note = Description of Unknown: Synthetic polypeptide
MILDTDYITENGKPVIRIFKKEKGEFKIEYDRNFEPYIYALLEDDESIEDIKKITGERHGKKVRIIRVEKVKKKFLGEPIEVWKLVFEHPQDYPAIRDAIRSHPAVREIFEYDIPFAKRYLIDKGLVPMEGGEELKLLAFAIATFYHEGDEFAEGEILMISYADESGAKVITWKKIDLPYVEVVSTEREAIKRFLQVLREKDPDVLLTYNGDNFDFAYIKKRCEKLGLKFTIGRDGSEPKIQRMGDRFAVEVKGRIHLDLAPVVRHTIRLPTYTLEAVYEAVFGKKKEKVYAEEIAEAWKSEEGLKRVAQYSMEDARATYELGREFFPMEVELAKLIGQSVWDVSRSSTGNLVEWYLLRVAYERNELAPNKPGGEEYQRRMRSSYIGGYVKEPEKGLWESIAYLDFRSSAGSIIVTHNVSPDTLEKECKNYDVAPIVGYRFCKDFKGFIPSILEDLIETRQKVKRKMKATIDPIEKKMLDYRQRALKILANSYYGYQGYPKARWYSKECAESVTAWGRHYIETTIKEAEKFGFKVLYADTDGFFATIPNEKPETIKSKAKKFLKHINEKLPGMLELEYEGFYLRGFFVTKKKYALIDEDGHITTRGLEVVRRDWSEIAKETQAKVLEVILREGSIEKAAGIVKKVVEDLANYRVPVEKLIIHEQITRELKRYKATGPHVAIAKRLQARGIKVKPGTIISYVVLKGSKKISDRVILFDEYDSSRHKYDPDYYIHNQVLPAVLRILEAFGYKEKDLEYQRDKQTGLGAWLKMGKK

SEQ ID NO: 621 - protein, 773 aa, unidentified
  REGION 1..773: note = Description of Unknown: Synthetic polypeptide
MILDTDYITENGKPVIRIFKKEKGEFKIEYDRNFEPYIYALLEDDESIEDIKKITGERHGKKVRIIRVEKVKKKFLGEPIEVWKLVFEHPQDVPAIRDAIRSHPAVREIFEYDIPFAKRYLIDKGLVPMEGGEELKLLAFAIATFYHEGDEFAEGEILMISYADESGAKVITWKKIDLPYVEVVSTEREAIKRFLQVLREKDPDVLLTYNGDNFDFAYIKKRCEKLGLKFTIGRDGSEPKIQRMGDRFAVEVKGRIHLDLAPVVRHTIRLPTYTLEAVYEAVFGKKKEKVYAEEIAEAWKSEEGLKRVAQYSMEDARATYELGREFFPMEVELAKLIGQSVWDVSRSSTGNLVEWYLLRVAYERNELAPNKPGGEEYQRRMRSSYIGGYVKEPEKGLWESIAYLDFRSSAGSIIVTHNVSPDTLEKECKNYDVAPIVGYRFCKDFKGFIPSILEDLIETRQKVKRKMKATIDPIEKKMLDYRQRALKILANSYYGYQGYPKARWYSKECAESVTAWGRHYIETTIKEAEKFGFKVLYADTDGFFATIPNEKPETIKSKAKKFLKHINEKLPGMLELEYEGFYLRGFFVTKKKYALIDEDGHITTRGLEVVRRDWSEIAKETQAKVLEVILREGSIEKAAGIVKKVVEDLANYRVPVEKLIIHERITRELKRYKATGPHVAIAKRLQARGIKVKPGTIISYVVLKGSKKISDRVILFDEYDSSRHKYDPDYYIHNQVLPAVLRILEAFGYKEKDLEYQRMKQTGLGAWLKMGKK

SEQ ID NO: 622 - protein, 773 aa, unidentified
  REGION 1..773: note = Description of Unknown: Synthetic polypeptide
MILDTDYITENGKPVIRIFKKEKGEFKIEYDRNFEPYIYALLEDDESIEDIKKITGERHGKKVRIIRVEKVKKKFLGEPIEVWKLVFEHPQDYPAIRDAIRSHPAVREIFEYDIPFAKRYLIDKGLVPMEGGEELKLLAFAIATFYHEGDEFAEGEILMISYADESGAKVITWKKIDLPYVEVVSTEREAIKRFLQVLREKDPDVLLTYNGDNFDFAYIKKRCEKLGLKFTIGRDGSEPKIQRMGDRFAVEVKGRIHLDLAPVVRHTIRLPTYTLEAVYEAVFGKKKEKVYAEEIAEAWKSEEGLKRVAQYSMEDARATYELGREFFPMEVELAKLIGQSVWDVSRSSTGNLVEWYLLRVAYERNELAPNKPGGEEYQRRMRSSYIGGYVKEPEKGLWESIAYLDFRSSAGSIIVTHNVSPDTLEKECKNYDVAPIVGYRFCKDFKGFIPSILEDLIETRQKVKRKMKATIDPIEAKMLDYRQRALKILANSYYGYQGYPKARWYSKECAESVTAWGRHYIETTIKEAEKFGFKVLYADTDGFFATIPNEKPETIKSKAKKFLKHINEKLPGMLELEYEGFYLRGFFVTKKKYALIDEDGHITTRGLEVVRRDWSEIAKETQAKVLEVILREGSIEKAAGIVKKVVEDLANYRVPVEKLIIHEQITRELKRYKATGPHVAIAKRLQARGIKVKPGTIISYVVLKGSKKISDRVILFDEYDSSRHKYDPDYYIHNQVLPAVLRILEAFGYKEKDLEYQRMKQTGLGAWLKMGKK

SEQ ID NO: 623 - protein, 773 aa, unidentified
  REGION 1..773: note = Description of Unknown: Synthetic polypeptide
MILDTDYITENGKPVIRIFKKEKGEFKIEYDRNFEPYIYALLEDDESIEDIKKITGERHGKKVRIIRVEKVKKKFLGEPIEVWKLVFEHPQDVPAIRDAIRSHPAVREIFEYDIPFAKRYLIDKGLVPMEGGEELKLLAFTIATFYHEGDEFAEGEILMISYADESGAKVITWKKIDLPYVEVVSTEREAIKRFLQVLREKDPDVLLTYNGDNFDFAYIKKRCEKLGLKFTIGRDGSEPKIQRMGDRFAVEVKGRIHLDLAPVVRHTIRLPTYTLEAVYEAVFGKKKEKVYAEEIAEAWKSEEGLKRVAQYSMEDARATYELGREFFPLEVELAKLIGQSVWDVSRSSTGNLVEWYLLRVAYERNELAPNKPGGEEYQRRMRSSYIGGYVKEPEKGLWESIAYLDFRSSAGSIIVTHNVSPDTLEKECKNYDVAPIVGYRFCKDFKGFIPSILEDLIETRQKVKRKMKATIDPIEKKMLDYRQRALKILANSYYGYQGYPKARWYSKECAESVTAWGRHYIETTIKEAEKFGFKVLYADTDGFFATIPNEKPETIKSKAKKFLKHINEKLPGMLELEYEGFYLRGFFVTKKKYALIDEDGHITTRGLEVVRRDWSEIAKETQAKVLEVILREGSIEKAAGIVKKVVEDLANYRVPVEKLIIHEQITRKLKRYKATGPHVAIAKRLQARGIKVKPGTIISYVVLKGSKKISDRVILFDEYDSSRHKYDPDYYIHNQVLPAVLRILEAFGYKEKDLEYQRMKQTGLGAWLKMGKK

SEQ ID NO: 624 - protein, 773 aa, unidentified
  REGION 1..773: note = Description of Unknown: Synthetic polypeptide
MILDTDYITENGKPVIRIFKKEKGEFKIEYDRNFEPYIYALLEDDESIEDIKKITGERHGKKVRIIRVEKVKKKFLGEPIEVWKLVFEHPQDVPAIRDAIRSHPAVREIFEYDIPFAKRYLIDKGLVPMEGGEELKLLAFNIATFYHEGDEFAEGEILMISYADESGAKVITWKKIDLPYVEVVSTEREAIKRFLQVLREKDPDVLLTYNGDNFDFAYIKKRCEKLGLKFTIGRDGSEPKIQRMGDRFAVEVKGRIHLDLAPVVRHTIRLPTYTLEAVYEAVFGKKKEKVYAEEIAEAWKSEEGLKRVAQYSMEDARATYELGREFFPQEVELAKLIGQSVWDVSRSSTGNLVEWYLLRVAYERNELAPNKPGGEEYQRRMRSSYIGGYVKEPEKGLWESIAYLDFRSSAGSIIVTHNVSPDTLEKECKNYDVAPIVGYRFCKDFKGFIPSILEDLIETRQKVKRKMKATIDPIEKKMLDYRQRALKILANSYYGYQGYPKARWYSKECAESVTAWGRHYIETTIKEAEKFGFKVLYADTDGFFATIPNEKPETIKSKAKKFLKHINEKLPGMLELEYEGFYLRGFFVTKKKYALIDEDGHITTRGLEVVRRDWSEIAKETQAKVLEVILREGSIEKAAGIVKKVVEDLANYRVPVEKLIIHEQITRELKRYKATGPHVAIAKRLQARGIKVKPGTIISYVVLKGSKKISDRVILFDEYDSSRHKYDPDYYIHNQVLPAVLRILEAFGYKEKDLEYQRMKQTGLGAWLKMGKK

SEQ ID NO: 625 - protein, 773 aa, unidentified
  REGION 1..773: note = Description of Unknown: Synthetic polypeptide
MILDTDYITENGKPVIRIFKKEKGEFKIEYDRNFEPYIYALLEDDESIEDIKKITGERHGKKVRIIRVEKVKKKFLGEPIEVWKLVFEHPQDYPAIRDAIRSHPAVREIFEYDIPFAKRYLIDKGLVPMEGGEELKLLAFAIATFYHEGDEFAEGEILMISYADESGAKVITWKKIDLPYVEVVSTEREAIKRFLQVLREKDPDVLLTYNGDNFDFAYIKKRCEKLGLKFTIGRDGSEPKIQRMGDRFAVEVKGRIHLDLAPVVRHTIRLPTYTLEAVYEAVFGKKKEKVYAEEIAEAWKSEEGLKRVAQYSVEDARATYELGREFFPMEVELAKLIGQSVWDVSRSSTGNLVEWYLLRVAYERNELAPNKPGGEEYQRRMRSSYIGGYVKEPEKGLWESIAYLDFRSSAGSIIVTHNVSPDTLEKECKNYDVAPIVGYRFCKDFKGFIPSILEDLIETRQKVKRKMKATIDPIEKKMLDYRQRALKILANSYYGYQGYPKARWYSKECAESVTAWGRHYIETTIKEAEKFGFKVLYADTDGFFATIPNEKPETIKSKAKKFLKHINEKLPGMLELEYEGFYLRGFFVTKKKYALIDEDGLITTRGLEVVRRDWSEIAKETQAKVLEVILREGSIEKAAGIVKKVVEDLANYRVPVEKLIIHEQITRELKRYKATGPHVAIAKRLQARGIKVKPGTIISYVVLKGSKKISDRVILFDEYDSSRHKYDPDYYIHNQVLPAVLRILEAFGYKEKDLEYQRDKQTGLGAWLKMGKK

SEQ ID NO: 626 - protein, 773 aa, unidentified
  REGION 1..773: note = Description of Unknown: Synthetic polypeptide
MILDTDYITENGKPVIRIFKKEKGEFKIEYDRNFEPYIYALLEDDESIEDIKKITGERHGKKVRIIRVEKVKKKFLGEPIEVWKLVFEHPQDYPAIRDAIRSHPAVREIFEYDIPFAKRYLIDKGLVPNEGGEELKLLAFAIATFYHEGDEFAEGEILMISYADESGAKVITWKKIDLPYVEVVSTEREAIKRFLQVLREKDPDVLLTYNGDNFDFAYIKKRCEKLGLKFTIGRDGSEPKIQRMGDRFAVEVKGRIHLDLAPVVRHTIRLPTYTLEAVYEAVFGKKKEKVYAEEIAEAWKSEEGLKRVAQYSMEDARATYELGREFFPMEVELAKLIGQSVWDVSRSSTGNLVEWYLLRVAYERNELAPNKPGGEEYQRRMRSSYIGGYVKEPEKGLWESIAYLDFRSSAGSIIVTHNVSPDTLEKECKNYDVAPIVGYRFCKDFKGFIPSILEDLIETRQKVKRKMKATIDPIEKKMLDYRQRALKILANSYYGYQGYPKARWYSKECAESVTAWGRHYIETTIKEAEKFGFKVLYADTDGFFATIPNEKPETIKSKAKKFLKHINEKLPGMLELEYEGFYLRGFFVTKKKYALIDEDGHITTRGLEVVRRDWSEIAKETQAKVLEVILREGSIEKAAGIVKKVVEDLANYRVPVEKLIIHEQITRELKRYKATGPHVAIAKRLQARGIKVKPGTIISYVVLKGSKKISDRVILFDEYDSSRHKYDPDYYIHNQVLPAVLRILEAFGYKEKDLEYQRMKQTGLGAWLKMGKK

SEQ ID NO: 627 - protein, 773 aa, unidentified
  REGION 1..773: note = Description of Unknown: Synthetic polypeptide
MILDTDYITENGKPVIRIFKKEKGEFKIEYDRNFEPYIYALLEDDESIEDIKKITGERHGKKVRIIRVEKVKKKFLGEPIEVWKLVFEHPQDYPAIRDAIRSHPAVREIFEYDIPFAKRYLIDKGLVPMEGGEELKLLAFAIATFYHEGDEFAEGEILMISYADESGAKVITWKKIDLPYVEVVSTEREAIKRFLQVLREKDPDVLLTYNGDNFDFAYIKKRCEKLGLKFTIGRDGSEPKIQRMGDRFAVEVKGRIHLDLAPVVRHTIRLPTYTLEAVYEAVFGKKKEKVYAEEIAEAWKSEEGLKRVAQYSMEDARATYELGREFFPMEVELAKLIGQSVWDVSRSSTGNLVEWYLLRVAYERNELAPNKPGGEEYQRRMRSSYIGGYVKEPEKGLWESIAYLDFRSSAGSIIVTHNRSPDTLEKECKNYDVAPIVGYRFCKDFKGFIPSILEDLIETRQKVKRKMKATIDPIEKKMLDYRQRALKILANSYYGYYGYPKARWYSKECAESVTAWGRHYIETTIKEAEKFGFKVLYADTDGFFATIPNEKPETIKSKAKKFLKHINEKLPGMLELEYEGFYLRGFFVTKKKYALIDEDGHITTRGLEVVRRDWSEIAKETQAKVLEVILREGSIEKAAGIVKKVVEDLANYRVPVEKLIIHEQITRELKRYKATGPHVAIAKRLQARGIKVKPGTIISYVVLKGSKKISDRVILFDEYDSSRHKYDPDYYIHNQVLPAVLRILEAFGYKEKDLEYQRMKQTGLGAWLKMGKK

SEQ ID NO: 628 - protein, 773 aa, unidentified
  REGION 1..773: note = Description of Unknown: Synthetic polypeptide
MILDTDYITENGKPVIRIFKKEKGEFKIEYDRNFEPYIYALLEDDESIEDIKKITGERHGKKVRIIRVEKVKKKFLGEPIEVWKLVFEHPQDYPAIRDAIRSHPAVREIFEYDIPFAKRYLIDKGLVPMEGGEELKLLAFAIATFYHEGDEFAEGEILMISYADESGAKVITWKKIDLPYVEVVSTEREAIKRFLQVLREKDPDVLLTYNGDNFDFAYIKKRCEKLGLKFTIGRDGSEPKIQRMGDRFAVEVKGRIHLDLAPVVRHTIRLPTYTLEAVYEAVFGKKKEKVYAEEIAEAWKSEEGLKRVAQYSMEDARATYELGREFFPMEVELAKLIGQSVWDVSRSSTGNLVEWYLLRVAYERNELAPNKPGGEEYQRRMRSSYIGGYVKEPEKGLWESIAYLDFRSSAGSIIVTHNISPDTLEKECKNYDVAPIVGYRFCKDFKGFIPSILEDLIETRQKVKRKMKATIDPIEKKMLDYRQRALKILANSYYGYFGYPKARWYNKEAAESVTAWGRHYIETTIKEAEKFGFKVLYADTDGFFATIPNEKPETIKSKAKKFLKHINEKLPGMLELEYEGFYLRGFFVTKKKYALIDEDGHITTRGLEVVRRDWSEIAKETQAKVLEVILREGSIEKAAGIVKKVVEDLANYRVPVEKLIIHEQITRELKRYKATGPHVAIAKRLQARGIKVKPGTIISYVVLKGSKKISDRVILFDEYDSSRHKYDPDYYIHNQVLPAVLRILEAFGYKEKDLEYQRMKQTGLGAWLKMGKK

SEQ ID NO: 629 - protein, 773 aa, unidentified
  REGION 1..773: note = Description of Unknown: Synthetic polypeptide
AILDTDYITENGKPVIRIFKKEKGEFKIEYDRNFEPYIYALLEDDESIEDIKKITGERHGKKVRIIRVEKVKKKFLGEPIEVWKLVFEHPQDVPAIRDAIRSHPAVREIFEYDIPFAKRYLIDKGLVPMEGGEELKLLAFNIATFYHEGDEFAEGEILMISYADESGAKVITWKKIDLPYVEVVSTEREAIKRFLQVLREKDPDVLLTYNGDNFDFAYIKKRCEKLGLKFTIGRDGSEPKIQRMGDRFAVEVKGRIHLDLAPVVRHTIRLPTYTLEAVYEAVFGKKKEKVYAEEIAEAWKSEEGLARVAQYSAEDARATYELGREFFPLEVELAKLIGQSVWDVSRSSTGNLVEWYLLRVAYERNELAPNKPGGEEYQRRMRSSYIGGYVKEPEKGLWESIAYLDFRSSAGSIIVTHNVSPDTLEKECKNYDVAPIVGYRFCKDFKGFIPSILEDLIETRQKVKRKMKATIDPIEKKMLDYRQRALKILANSYYGYQGYPKARWYSKECAESVTAWGRHYIETTIKEAEKFGFKVLYADTDGFFATIPNEKPETIKSKAKKFLKHINEKLPGMLELEYEGFYLRGFFVTKKKYALIDEDGHITTRGLEVVRRDWSEIAKETQAKVLEVILREGSIEKAAGIVKKVVEDLANYRVPVEKLIIHEQITRELKRYKATGPHVAIAKRLQARGIKVKPGTIISYVVLKGSKKISDRVILFDEYDSSRHKYDPDYYIHNQVLPAVLRILEAFGYKEKDLEYQRMKQTGLGAWLKMGKK

SEQ ID NO: 630 - protein, 773 aa, unidentified
  REGION 1..773: note = Description of Unknown: Synthetic polypeptide
MILDTDYITENGKPVIRIFKKEKGEFKIEYDRNFEPYIYALLEDDESIEDIKKITGERHGKKVRIIRVEKVKKKFLGEPIEVWKLVFEHPQDYPAIRDAIRSHPAVREIFEYDIPFAKRYLIDKGLVPMEGGEELKLLAFAIATFYHEGDEFAEGEILMISYADESGAKVITWKKIDLPYVEVVSTEREAIKRFLQVLREKDPDVLLTYNGDNFDFAYIKKRCEKLGLKFTIGRDGSEPQIQRMGDRFAVEVKGRIHLDLAPVVRHTIRLPTYTLEAVYEAVFGKKKEKVYAEEIAEAWKSEEGLKRVAQYSVEDARATYELGREFFPMEVELAKLIGQSVWDVSRSSTGNLVEWYLLRVAYERNELAPNQPGGEEYQRRMRSSYIGGYVKEPEKGLWESIAYLDFRSSAGSIIVTHNVSPDTLEKECKNYDVAPIVGYRFCKDFKGFIPSILEDLIETRQKVKRKMKATIDPIEKKMLDYRQRALKILANSYYGYQGYPKARWYSKECAESVTAWGRHYIETTIKEAEKFGFKVLYADTDGFFATIPNEKPETIKSKAKKFLKHINEKLPGMLELEYEGFYLRGFFVTKKKYALIDEDGHITTRGLEVVRRDWSEIAKETQAKVLEVILREGSIEKAAGIVKKVVEDLANYRVPVEKLIIHEQITRELKRYKATGPHVAIAKRLQARGIKVKPGTIISYVVLKGSKKISDRVILFDEYDSSRHKYDPDYYIHNQVLPAVLRILEAFGYKEKDLEYQRDKQTGLGAWLKMGKK

SEQ ID NO: 631 - protein, 773 aa, unidentified
  REGION 1..773: note = Description of Unknown: Synthetic polypeptide
MILDTDYITENGKPVIRIFKKEKGEFKIEYDRNFEPYIYALLEDDESIEDIKKITGERHGKKVRIIRVEKVKKKFLGEPIEVWKLVFEHPQDVPAIRDAIRSHPAVREIFEYDIPFAKRYLIDKGLVPMEGGEELKLLAFAIYTFYHEGDEFAEGEILWISYADESGAKVITWKKIDLPYVEVVSTEREAIKRFLQVLREKDPDVLLTYNGDNFDFAYIKKRCEKLGLKFTIGRDGSEPKIQRMGDRFAVEVKGRIHLDLAPVVRHTIRLPTYTLEAVYEAVFGKKKEKVYAEEIAEAWKSEEGLKRVAQYSMEDARATYELGREFFPMEVELAKLIGQSVWDVSRSSTGNLVEWYLLRVAYERNELAPNKPGGEEYQRRMRSSYIGGYVKEPEKGLWESIAYLDFRSSAGSIIVTHNVSPDTLEKECKNYDVAPIVGYRFCKDFKGFIPSILEDLIETRQKVKRKMKATIDPIEKKMLDYRQRALKILANSYYGYQGYPKARWYSKECAESVTAWGRHYIETTIKEAEKFGFKVLYADTDGFFATIPNEKPETIKSKAKKFLKHINEKLPGMLELEYEGFYLRGFFVTKKKYALIDEDGHITTRGLEVVRRDWSEIAKETQAKVLEVILREGSIEKAAGIVKKVVEDLANYRVPVEKLIIHEQITRELKDYKATGPHVAIAKRLQARGIKVKPGTIISYVVLKGSKKISDRVILFDEYDSSRHKYDPDYYIHNQVLPAVLRILEAFGYKEKDLEYQRMKQTGLGAWLKMGKK

SEQ ID NO: 632 - protein, 773 aa, unidentified
  REGION 1..773: note = Description of Unknown: Synthetic polypeptide
MILDTDYITENGKPVIRIFKKEKGEFKIEYDRNFEPYIYALLEDDESIEDIKKITGERHGKKVRIIRVEKVKKKFLGEPIEVWKLVFEHPQDYPAIRDAIRSHPAVREIFEYDIPFAKRYLIDKGLVPMEGGEELKLLAFAIATFYHEGDEFAEGEILMISYADESGAKVITWKKIDLPYVEVVSTEREAIKRFLQVLREKDPDVLLTYNGDNFDFAYIKKRMEKLGLKFTIGRDGSEPKIQRMGDRFAVEVKGRIHLDLAPVVRHTIRLPTYTLEAVYEAVFGKKKEKVYAEEIAEAWKSEEGLKRVAQYSMEDARATYELGREFFPMEVELAKLIGQSVWDVSRSSTGNLVEWYLLRVAYERNELAPNKPGGEEYQRRMRSSYIGGYVKEPEKGLWESIAYLDFRSSAGSIIVTHNVSPDTLEKECKNYDVAPIVGYRFCKDFKGFIPSILEDLIETRQKVKRKMKATIDPIEKKMLDYRQRALKILANSYYGYQGYPKARWYSKECAESVTAWGRHYIETTIKEAEKFGFKVLYADTDGFFATIPNEKPETIKSKAKKFLKHINEKLPGMLELEYEGFYLRGFFVTKKKYALIDEDGHITTRGLEVVRRDWSEIAKETQAKVLEVILREGSIEKAAGIVKKVVEDLANYRVPVEKLIIHEQITRELKRYKATGPHVAIAKRLQARGIKVKPGTIISYVVLKGSKKISDRVILFDEYDSSRHKYDPDYYIHNQVLPAVLRILEAFGYKEKDLEYQRMKQTGLGAWLKMGKK

SEQ ID NO: 633 - protein, 757 aa, unidentified
  REGION 1..757: note = Description of Unknown: Synthetic polypeptide
MILDTDYITENGKPVIRIFKKEKGEFKIEYDRNFEPYIYALLEDDESIEDIKKITGERHGKKVRIIRVEKVKKKFLGEPIEVWKLVFEHPQDVPAIRDAIRSHPAVREIFEYDIPFAKRYLIDKGLVPMEGGEELKLLAFAIATFYHEGDEFAEGEILMISYADESGAKVITWKKIDLPYVEVVSTEREAIKRFLQVLREKDPDVLLTYNGDNFDFAYIKKRCEKLGLKFTIGRDGSEPKIQRMGDRFAVEVKGRIHLDLAPVVRHTIRLPTYTLEAVYEAVFGKKKEKVYAEEIAEAWKSEEGLKRVAQYSMEDARATYELGREFFPMEVELAKLIGQSVWDVSRSSTGNLVEWYLLRVAYERNELAPNKPGGEEYQRRMRSSYIGGYVKEPEKGLWESIAYLDFRSSAGSIIVTHNVSPDTLEKECKNYDVAPIVGYRFCKDFKGFIPSILEDLIETRQKVKRKMKATIDPIEKKMLDYRQRALKILANSYYGYQGYPKARWYSKECAESVTAWGRHYIETTIKEAEKFGFKVLYADTDGFFATIPNEKPETIKSKAKKFLKHINEKLPGMLELEYEGFYLRGFFVTKKKYALIDEDGHITTRGLEVVRRNWSEIAKETQAKVLEVILREGSIEKAAGIVKKVVEDLANYRVPVEKLIIHEQITRKLKDYKATGPHVAIAKRLQARGIKVKPGTIISYVVLKGSKKISDRVILFDEYDSSRHKYDPDYYIHNQVLPAVLRILEAFGYKEKDLEYQ

SEQ ID NO: 634 - protein, 757 aa, unidentified
  REGION 1..757: note = Description of Unknown: Synthetic polypeptide
MILDTDYITENGKPVIRIFKKEKGEFKIEYDRNFEPYIYALLEDDESIEDIKKITGERHGKKVRIIRVEKVKKKFLGEPIEVWKLVFEHPQDVPAIRDAIRSHPAVREIFEYDIPFAKRYLIDKGLVPMEGGEELKLLAFAIATFYHEGDEFAEGEILMISYADESGAKVITWKKIDLPYVEVVSTEREAIKRFLQVLREKDPDVLLTYNGDNFDFAYIKKRCEKLGLKFTIGRDGSEPKIQRMGDRFAVEVKGRIHLDLAPVVRHTIRLPTYTLEAVYEAVFGKKKEKVYAEEIAEAWKSEEGLKRVAQYSMEDARATYELGREFFPMEVELAKLIGQSVWDVSRSSTGNLVEWYLLRVAYERNELAPNKPGGEEYQRRMRSSYIGGYVKEPEKGLWESIAYLDFRSSAGSIIVTHNVSPDTLEKECKNYDVAPIVGYRFCKDFKGFIPSILEDLIETRQKVKRKMKATIDPIEKKMLDYRQRALKILANSYYGYQGYPKARWYSKECAESVTAWGRHYIETTIKEAEKFGFKVLYADTDGFFATIPNEKPETIKSKAKKFLKHINEKLPGMLELEYEGFYLRGFFVTKKKYALIDEDGHITTRGLEVVRRDWSEIAKETQAKVLEVILREGSIEKAAGIVKKVVEDLANYRVPVEKLIIHEQITRKLKDYKATGPHVAIAKRLQARGKKVKPGTIISYVVLKGSKKISDRVILFDEYDSSRHKYDPDYYIHNQVLPAVLRILEAFGYKEKDLEYQ

SEQ ID NO: 635 - protein, 757 aa, unidentified
  REGION 1..757: note = Description of Unknown: Synthetic polypeptide
MILDTDYITENGKPVIRIFKKEKGEFKIEYDRNFEPYIYALLEDDESIEDIKKITGERHGKKVRIIRVEKVKKKFLGEPIEVWKLVFEHPQDVPAIRDAIRSHPAVREIFEYDIPFAKRYLIDKGLVPMEGGEELKLLAFAIATFYHEGDEFAEGEILMISYADESGAKVITWKKIDLPYVEVVSTEREAIKRFLQVLREKDPDVLLTYNGDNFDFAYIKKRCEKLGLKFTIGRDGSEPKIQRMGDRFAVEVKGRIHLDLAPVVRHTIRLPTYTLEAVYEAVFGKKKEKVYAEEIAEAWKSEEGLKRVAQYSMEDARATYELGREFFPLEVELAKLIGQSVWDVSRSSTGNLVEWYLLRVAYERNELAPNKPGGEEYQRRMRSSYIGGYVKEPEKGLWESIAYLDFRSSAGSIIVTHNVSPDTLEKECKNYDVAPIVGYRFCKDFKGFIPSILEDLIETRQKVKRKMKATIDPIEKKMLDYRQRALKILANSYYGYQGYPKARWYSKECAESVTAWGRHYIETTIKEAEKFGFKVLYADTDGFFATIPNEKPETIKSKAKKFLKHINEKLPGMLELEYEGFYLRGFFVTKKKYALIDEDGHITTRGLEVVRRNWSEIAKETQAKVLEVILREGSIEKAAGIVKKVVEDLANYRVPVEKLIIHEQITRELKRYKATGPHVAIAKRLQARGIKVKPGTIISYVVLKGSKKISDRVILFDEYDSSRHKYDPDYYIHNQVLPAVLRILEAFGYKEKDLEYQ

SEQ ID NO: 636 - protein, 758 aa, unidentified
  REGION 1..758: note = Description of Unknown: Synthetic polypeptide
MILDTDYITENGKPVIRIFKKEKGEFKIEYDRNFEPYIYALLEDDESIEDIKKITGERHGKKVRIIRVEKVKKKFLGEPIEVWKLVFEHPQDVPAIRDAIRSHPAVREIFEYDIPFAKRYLIDKGLVPMEGGEELKLLAFNIATFYHEGDEFAEGEILMISYADESGAKVITWKKIDLPYVEVVSTEREAIKRFLQVLREKDPDVLLTYNGDNFDFAYIKKRCEKLGLKFTIGRDGSEPKIQRMGDRFAVEVKGRIHLDLAPVVRHTIRLPTYTLEAVYEAVFGKKKEKVYAEEIAEAWKSEEGLKRVAQYSMEDARATYELGREFFPLEVELAKLIGQSVWDVSRSSTGNLVEWYLLRVAYERNELAPNKPGGEEYQRRMRSSYIGGYVKEPEKGLWESIAYLDFRSSAGSIIVTHNISPDTLEKECKNYDVAPIVGYRFCKDFKGFIPSILEDLIETRQKVKRKMKATIDPIEKKMLDYRQRALKILANSYYGYQGYPKARWYSKECAESVTAWGRHYIETTIKEAEKFGFKVLYADTDGFFATIPNEKPETIKSKAKKFLKHINEKLPGMLELEYEGFYLRGFFVTKKKYALIDEDGHITTRGLEVVRRDWSEIAKETQAKVLEVILREGSIEKAAGIVKKVVEDLANYRVPVEKLIIHEQITRELKRYKATGPHVAIAKRLQARGIKVKPGTIISYVVLKGSKKISDRVILFDEYDSSRHKYDPDYYIHNQVLPAVLRILEAFGYKEKDLEYQR

SEQ ID NO: 637 - protein, 773 aa, unidentified
  REGION 1..773: note = Description of Unknown: Synthetic polypeptide
MILDTDYITENGKPVIRIFKKEKGEFKIEYDRNFEPYIYALLEDDESIEDIKKITGERHGKKVRIIRVEKVKKKFLGEPIEVWKLVFEHPQDVPAIRDAIRSHPAVREIFEYDIPFAKRYLIDKGLVPMEGGEELKLLAFNIATFYHEGDEFAEGEILMISYADESGAKVITWKKIDLPYVEVVSTEREAIKRFLQVLREKDPDVLLTYNGDNFDFAYIKKRCEKLGLKFTIGRDGSEPKIQRMGDRFAVEVKGRIHLDLAPVVRHTIRLPTYTLEAVYEAVFGKKKEKVYAEEIAEAWKSEEGLKRVAQYSMEDARATYELGREFFPLEVELAKLIGQSVWDVSRSSTGNLVEWYLLRVAYERNELAPNKPGGEEYQRRMRSSYIGGYVKEPEKGLWESIAYLDFRSSAGSIIVTHNVSPDTLEKECKNYDVAPIVGYRFCKDFKGFIPSILEDLIETRQKVKRKMKATIDPIEKKMLDYRQRALKILANSYYGYQGYPKARWYSKECAESVTAWGRHYIETTIKEAEKFGFKVLYADTDGFFATIPNEKPETIKSKAKKFLKHINEKLPGMLELEYEGFYLRGFFVTKKKYALIDEDGHITTRGLEVVRRNWSEIAKETQAKVLEVILREGSIEKAAGIVKKVVEDLANYRVPVEKLIIHEQITRELKRYKATGPHVAIAKRLQARGIKVKPGTIISYVVLKGSKKISDRVILFDEYDSSRHKYDPDYYIHNQVLPAVLRILEAFGYKEKDLEYQRMKQTGLGAWLKMGKK

SEQ ID NO: 638 - protein, 773 aa, unidentified
  REGION 1..773: note = Description of Unknown: Synthetic polypeptide
MILDTDHITENGKPVIRIFKKEKGEFKIEYDRNFEPYIYALLEDDESIEDIKKITGERHGKKVRIIRVEKVKKKFLGEPIEVWKLVFEHPQDVPAIRDAIRSHPAVREIFEYDIPFAKRYLIDKGLVPMEGGEELKLLAFNIATFYHEGDEFAEGEILMISYADESGAKVITWKKIDLPYVEVVSTEREAIKRFLQVLREKDPDVLLTYNGDNFDFAYIKKRCEKLGLKFTIGRDGSEPKIQRMGDRFAVEVKGRIHLDLAPVVRHTIRLPTYTLEAVYEAVFGKKKEKVYAEEIAEAWKSEEGLKRVAQYSMEDARATYELGREFFPLEVELAKLIGQSVWDVSRSSTGNLVEWYLLRVAYERNELAPNKPGGEEYQRRMRSSYIGGYVKEPEKGLWESIAYLDFRSSAGSIIVTHNVSPDTLEKECKNYDVAPIVGYRFCKDFKGFIPSILEDLIETRQKVKRKMKATIDPIEKKMLDYRQRALKILANSYYGYQGYPKARWYSKECAESVTAWGRHYIETTIKEAEKFGFKVLYADTDGFFATIPNEKPETIKSKAKKFLKHINEKLPGMLELEYEGFYLRGFFVTKKKYALIDEDGHITTRGLEVVRRDWSEIAKETQAKVLEVILREGSIEKAAGIVKKVVEDLANYRVPVEKLIIHEQITRELKRYKATGPHVAIAKRLQARGIKVKPGTIISYVVLKGSKKISDRVILFDEYDSSRHKYDPDYYIHNQVLPAVLRILEAFGYKEKDLEYQRMKQTGLGAWLKMGKK

SEQ ID NO: 639 - protein, 773 aa, unidentified
  REGION 1..773: note = Description of Unknown: Synthetic polypeptide
MILDTDYITENGKPVIRIFKKEKGEFKIEYDRNFEPYIYALLEDDESIEDIKKITGERHGKKVRIIRVEKVKKKFLGEPIEVWKLVFEHPQDVPAIRDAIRSHPAVREIFEYDIPFAKRYLIDKGLVPMEGGEELKLLAFTIATFYHEGDEFAEGEILMISYADESGAKVITWKKIDLPYVEVVSTEREAIKRFLQVLREKDPDVLLTYNGDNFDFAYIKKRCEKLGLKFTIGRDGSEPKIQRMGDRFAVEVKGRIHLDLAPVVRHTIRLPTYTLEAVYEAVFGKKKEKVYAEEIAEAWKSEEGLKRVAQYSMEDARATYELGREFFPLEVELAKLIGQSVWDVSRSSTGNLVEWYLLRVAYERNELAPNKPGGEEYQRRMRSSYIGGYVKEPEKGLWESIAYLDFRSSAGSIIVTHNISPDTLEKECKNYDVAPIVGYRFCKDFKGFIPSILEDLIETRQKVKRKMKATIDPIEKKMLDYRQRALKILANSYYGYQGYPKARWYSKECAESVTAWGRHYIETTIKEAEKFGFKVLYADTDGFFATIPNEKPETIKSKAKKFLKHINEKLPGMLELEYEGFYLRGFFVTKKKYALIDEDGHITTRGLEVVRRDWSEIAKETQAKVLEVILREGSIEKAAGIVKKVVEDLANYRVPVEKLIIHEQITRELKRYKATGPHVAIAKRLQARGIKVKPGTIISYVVLKGSKKISDRVILFDEYDSSRHKYDPDYYIHNQVLPAVLRILEAFGYKEKDLEYQRMKQTGLGAWLKMGKK

SEQ ID NO: 640 - protein, 773 aa, unidentified
  REGION 1..773: note = Description of Unknown: Synthetic polypeptide
MILDTDYITENGKPVIRIFKKEKGEFKIEYDRNFEPYIYALLEDDESIEDIKKITGERHGKKVRIIRVEKVKKKFLGEPIEVWKLVFEHPQDYPAIRDAIRSHPAVREIFEYDIPFAKRYLIDKGLVPMEGGEELKLLAFAIATFYHEGDEFAEGEILMISYADESGAKVITWKKIDLPYVEVVSTEREAIKRFLQVLREKDPDVLLTYNGDNFDFAYIKKRCEKLGLKFTIGRDGSEPKIQRMGDRFAVEVKGRIHLDLAPVVRHTIRLPTYTLEAVYEAVFGKKKEKVYAEEIAEAWKSEEGLKRVAQYSMEDARATYELGREFFPMEVELAKLIGQSVWDVSRSSTGNLVEWYLLRVAYERNELAPNKPGGEEYQRRMRSSYIGGYVKEPEKGLWESIAYLDFRSSAGSIIVTHNVSPDTLEKECKNYDVAPIVGYRFCKDFKGFIPSILEDLIETRQKVKRKMKATIDPIEKKMLDYRQNALKILANSYYGYQGYPKARWYSKECAESVTAWGRHYIETTIKEAEKFGFKVLYADTDGFFATIPNEKPETIKSKAKKFLKHINEKLPGMLELEYEGFYLRGFFVTKKKYALIDEDGHITTRGLEVVRRDWSEIAKETQAKVLEVILREGSIEKAAGIVKKVVEDLANYRVPVEKLIIHEQITRELKRYKATGPHVAIAKRLQARGIKVKPGTIISYVVLKGSKKISDRVILFDEYDSSRHKYDPDYYIHNQVLPAVLRILEAFGYKEKDLEYQRMKQTGLGAWLKMGKK

SEQ ID NO: 641 - protein, 757 aa, unidentified
  REGION 1..757: note = Description of Unknown: Synthetic polypeptide
MILDTDYITENGKPVIRIFKKEKGEFKIEYDRNFEPYIYALLEDDESIEDIKKITGERHGKKVRIIRVEKVKKKFLGEPIEVWKLVFEHPQDVPAIRDAIRSHPAVREIFEYDIPFAKRYLIDKGLVPMEGGEELKLLAFAIATFYHEGDEFAEGEILMISYADESGAKVITWKKIDLPYVEVVSTEREAIKRFLQVLREKDPDVLLTYNGDNFDFAYIKKRCEKLGLKFTIGRDGSEPKIQRMGDRFAVEVKGRIHLDLAPVVRHTIRLPTYTLEAVYEAVFGKKKEKVYAEEIAEAWKSEEGLKRVAQYSMEDARATYELGREFFPMEVELAKLIGQSVWDVSRSSTGNLVEWYLLRVAYERNELAPNKPGGEEYQRRMRSSYIGGYVKEPEKGLWESIAYLDFRSSAGSIIVTHNVSPDTLEKECKNYDVAPIVGYRFCKDFKGFIPSILEDLIETRQKVKRKMKATIDPIEKKMLDYRQRALKILANSYYGYQGYPKARWYSKECAESVTAWGRHYIETTIKEAEKFGFKVLYADTDGFFATIPNEKPETIKSKAKKFLKHINEKLPGMLELEYEGFYLRGFFVTKKKYALIDEDGHITTRGLEVVRRDWSEIAKETQAKVLEVILREGSIEKAAGIVKKVVEDLANYRVPVEKLIIHERITRELKRYKATGPHVAIAKRLQARGIKVKPGTIISYVVLKGSKKISDRVILFDEYDSSRHKYDPDYYIHNQVLPAVLRILEAFGYKEKDLEYQ

SEQ ID NO: 642 - protein, 773 aa, unidentified
  REGION 1..773: note = Description of Unknown: Synthetic polypeptide
MILDTDYITENGKPVIRIFKKEKGEFKIEYDRNFEPYIYALLEDDESIEDIKKITGERHGKKVRIIRVEKVKKKFLGEPIEVWKLVFEHPQDYPAIRDAIRSHPAVREIFEYDIPFAKRYLIDKGLVPMEGGEELKLLAFAIVTFYHEGDEFAEGEILMISYADESGAKVITWKKIDLPYVEVVSTEREAIKRFLQVLREKDPDVLLTYNGDNFDFAYIKKRCEKLGLKFTIGRDGSEPKIQRMGDRFAVEVKGRIHLDLAPVVRHTIRLPTYTLEAVYEAVFGKKKEKVYAEEIAEAWKSEEGLKRVAQYSMEDARATYELGREFFPMEVELAKLIGQSVWDVSRSSTGNLVEWYLLRVAYERNELAPNKPGGEEYQRRMRSSYIGGYVKEPEKGLWESIAYLDFRSSAGSIIVTHNVSPDTLEKECKNYDVAPIVGYRFCKDFKGFIPSILEDLIETRQKVKRKMKATIDPIEKKMLDYRQRALKILANSYYGYQGYPKARWYSKECAESVTAWGRHYIETTIKEAEKFGFKVLYADTDGFFATIPNEKPETIKSKAKKFLKHINEKLPGMLELEYEGFYLRGFFVTKKKYALIDEDGHITTRGLEVVRRDWSEIAKETQAKVLEVILREGSIEKAAGIVKKVVEDLANYRVPVEKLIIHEQITRELKRYKATGPHVAIAKRLQARGIKVKPGTIISYVVLKGSKKISDRVILFDEYDSSRHKYDPDYYIHNQVLPAVLRILEAFGYKEKDLEYQRMKQTGLGAWLKMGKK

SEQ ID NO: 643 - protein, 773 aa, unidentified
  REGION 1..773: note = Description of Unknown: Synthetic polypeptide
MILDTDYITENGKPVIRIFKKEKGEFKIEYDRNFEPYIYALLEDDESIEDIKKITGERHGKKVRIIRVEKVKKKFLGEPIEVWKLVFEHPQDVPAIRDAIRSHPAVREIFEYDIPFAKRYLIDKGLVPMEGGEELKLLAFAIATFYHEGDEFAEGEILMISYADESGAKVITWKKIDLPYVEVVSTEREAIKRFLQVLREKDPDVLLTYNGDNFDFAYIKKRCEKLGLKFTIGRDGSEPKIQRMGDRFAVEVKGRIHLDLAPVVRHTIRLPTYTLEAVYEAVFGKKKEKVYAEEIAEAWKSEEGLKRVAQYSMEDARATYELGREFFPMEVELAKLIGQSVWDVSRSSTGNLVEWYLLRVAYERNELAPNKPGGEEYQRRMRSSYIGGYVKEPEKGLWESIAYLDFRSSAGSIIVTHNVSPDTLEKECKNYDVAPIVGYRFCKDFKGFIPSILEDLIETRQKVKRKMKATIDPIEKKMLDYRQRALKILANSYYGYQGYPKARWYSKEDAESVTAWGRHYIETTIKEAEKFGFKVLYADTDGFFATIPNEKPETIKSKAKKFLKHINEKLPGMLELEYEGFYLRGFFVTKKKYALIDEDGHITTRGLEVVRRDWSEIAKETQAKVLEVILREGSIEKAAGIVKKVVEDLANYRVPVEKLIIHEQITRELKDYKATGPHVAIAKRLQARGIKVKPGTIISYVVLKGSKKISDRVILFDEYDSSRHKYDPDYYIHNQVLPAVLRILEAFGYKEKDLEYQRMKQTGLGAWLKMGKK

SEQ ID NO: 644 - protein, 773 aa, unidentified
  REGION 1..773: note = Description of Unknown: Synthetic polypeptide
MILDTDYITENGKPVIRIFKKEKGEFKIEYDRNFEPYIYALLEDDESIEDIKKITGERHGKKVRIIRVEKVKKKFLGEPIEVWKLVFEHPQDVPAIRDAIRSHPAVREIFEYDIPFAKRYLIDKGLVPMEGGEELKLLAFAIATFYHEGDEFAEGEILMISYADESGAKVITWKKIDLPYVEVVSTEREAIKRFLQVLREKDPDVLLTYNGDNFDFAYIKKRCEKLGLKFTIGRDGSEPKIQRMGDRFAVEVKGRIHLDLAPVVRHTIRLPTYTLEAVYEAVFGKKKEKVYAEEIAEAWKSEEGLKRVAQYSMEDARATYELGREFFPMEVELAKLIGQSVWDVSRSSTGNLVEWYLLRVAYERNELAPNKPGGEEYQRRMRSSYIGGYVKEPEKGLWESIAYLDFRSSAGSIIVTHNVSPDTLEKECKNYDVAPIVGYRFCKDFKGFIPSILEDLIETRQKVKRKMKATIDPIEKKMLDYRQRALKILANSYYGYQGYPKARWYSKENAESVTAWGRHYIETTIKEAEKFGFKVLYADTDGFFATIPNEKPETIKSKAKKFLKHINEKLPGMLELEYEGFYLRGFFVTKKKYALIDEDGHITTRGLEVVRRDWSEIAKETQAKVLEVILREGSIEKAAGIVKKVVEDLANYRVPVEKLIIHEQITRELKDYKATGPHVAIAKRLQARGIKVKPGTIISYVVLKGSKKISDRVILFDEYDSSRHKYDPDYYIHNQVLPAVLRILEAFGYKEKDLEYQRMKQTGLGAWLKMGKK

SEQ ID NO: 645 - protein, 773 aa, unidentified
  REGION 1..773: note = Description of Unknown: Synthetic polypeptide
MILDTDYITENGKPVIRIFKKEKGEFKIEYDRNFEPYIYALLEDDESIEDIKKITGERHGKKVRIIRVEKVKKKFLGEPIEVWKLVFEHPQDYPAIRDAIRSHPAVREIFEYDIPFAKRYLIDKGLVPMEGGEELKLLAFAIATFYHEGDEFAEGEILMISYADESGAKVITWKKIDLPYVEVVSTEREAIKRFLQVLREKDPDVLLTYNGDNFDFAYIKKRCEKLGLKFTIGRDGSEPKIQRMGDRFAVEVKGRIHLDLAPVVRHTIRLPTYTLEAVYEAVFGKKKEKVQAEEIAEAWKSEEGLKRVAQYSMEDARATYELGREFFPMEVELAKLIGQSVWDVSRSSTGNLVEWYLLRVAYERNELAPNKPGGEEYQRRMRSSYIGGYVKEPEKGLWESIAYLDFRSSAGSIIVTHNVSPDTLEKECKNYDVAPIVGYRFCKDFKGFIPSILEDLIETRQKVKRKMKATIDPIEKKMLDYRQRALKILANSYYGYQGYPKARWYSKECAESVTAWGRHYIETTIKEAEKFGFKVLYADTDGFFATIPNEKPETIKSKAKKFLKHINEKLPGMLELEYEGFYLRGFFVTKKKYALIDEDGHITTRGLEVVRRDWSEIAKETQAKVLEVILREGSIEKAAGIVKKVVEDLANYRVPVEKLIIHEQITRELKRYKATGPHVAIAKRLQARGIKVKPGTIISYVVLKGSKKISDRVILFDEYDSSRHKYDPDYYIHNQVLPAVLRILEAFGYKEKDLEYQRMKQTGLGAWLKMGKK

SEQ ID NO: 646 - protein, 773 aa, unidentified
  REGION 1..773: note = Description of Unknown: Synthetic polypeptide
MILDTDYITENGKPVIRIFKKEKGEFKIEYDRNFEPYIYALLEDDESIEDIKKITGERHGKKVRIIRVEKVKKKFLGEPIEVWKLVFEHPQDVPAIRDAIRSHPAVREIFEYDIPFAKRYLIDKGLVPMEGGEELKLLAFNIATFYHEGDEFAEGEILMISYADESGAKVITWKKIDLPYVEVVSTEREAIKRFLQVLREKDPDVLLTYNGDNFDFAYIKKRCEKLGLKFTIGRDGSEPKIQRMGDRFAVEVKGRIHLDLARVVRHTIRLPTYTLEAVYEAVFGKKKEKVYAEEIAEAWKSEEGLKRVAQYSMEDARATYELGREFFPLEVELAKLIGQSVWDVSRSSTGNLVEWYLLRVAYERNELAPNKPGGEEYQRRMRSSYIGGYVKEPEKGLWESIAYLDFRSSAGSIIVTHNVSPDTLEKECKNYDVAPIVGYRFCKDFKGFIPSILEDLIETRQKVKRKMKATIDPIEKKMLDYRQRALKILANSYYGYQGYPKARWYSKECAESVTAWGRHYIETTIKEAEKFGFKVLYADTDGFFATIPNEKPETIKSKAKKFLKHINEKLPGMLELEYEGFYLRGFFVTKKKYALIDEDGHITTRGLEVVRRDWSEIAKETQAKVLEVILREGSIEKAAGIVKKVVEDLANYRVPVEKLIIHEQITRELKRYKATGPHVAIAKRLQARGIKVKPGTIISYVVLKGSKKISDRVILFDEYDSSRHKYDPDYYIHNQVLPAVLRILEAFGYKEKDLEYQRMKQTGLGAWLKMGKK

SEQ ID NO: 647 - protein, 773 aa, unidentified
  REGION 1..773: note = Description of Unknown: Synthetic polypeptide
MILDTDYITENGKPVIRIFKKEKGEFKIEYDRNFEPYIYALLEDDESIEDIKKITGERHGKKVRIIRVEKVKKKFLGEPIEVWKLVFEHPQDYPAIRDAIRSHPAVREIFEYDIPFAKRYLIDKGLVPMEGGEELKLLAFAIATFYHEGDEFAEGEILMISYADESGAKVITWKKIDLPYVEVVSTEREAIKRFLQVLREKDPDVLLTYNGDNFDFAYIKKRCEKLGLKFTIGRDGSEPKIQRMGDRFAVEVKGRIHLDLAPVVRHTIRLPTYTLEAVYEAVFGKKKEKVYAEEIAEAWKSEEGLKRVAQYSMEDARATYELGREFFPMEVELAKLIGQSVWDVSRSSTGNLVEWYLLRVAYERNELAPNKPGGEEYQRRMRSSYIGGYVKEPEKGLWESIAYLDFRSSAGSIIVTHNVSPDTLEKECKNYDVAPIVGYRFCKDFKGFIPSILEDLIETRQKVKRKMKATIDPIEKKMLDYRQRALKILANSYYGYQGYPKARWYSKECAESVTAWGRHYIETTIKEAEKFGFKVLYADTDGFFATIPNEKPETIKSKAKKFLKHINEKLPGMLELEYEGFYLRGFFVTKKKYALIDEDGHITTRGLEVVRRDWSEIAKETQAKVLEVILREGSIEQAAGIVKKVVEDLANYRVPVEKLIIHEQITRELKRYKATGPHVAIAKRLQARGIKVKPGTIISYVVLKGSKKISDRVILFDEYDSSRHKYDPDYYIHNQVLPAVLRILEAFGYKEKDLEYQRMKQTGLGAWLKMGKK

SEQ ID NO: 648 - protein, 773 aa, unidentified
  REGION 1..773: note = Description of Unknown: Synthetic polypeptide
MILDTDYITENGKPVIRIFKKEKGEFKIEYDRNFEPYIYALLEDDESIEDIKKITGERHGKKVRIIRVEKVKKKFLGEPIEVWKLVFEHPQDYPAIRDAIRSHPAVREIFEYDIPFAKRYLIDKGLVPMEGGEELKLLAFAIATFYHEGDEFAEGEILMISYADESGAKVITWKKIDLPYVEVVSTEREAIKRFLQVLREKDPDVLLTYNGDNFDFAYIKKRCEKLGLKFTIGRDGSEPKIQRMGDRFAVEVKGRIHLDLAPVVRHTIRLPTYTLEAVYEAVFGKKKEKVYAEEIAEAWKSEEGLKRVAQYSMEDARATYELGREFFPMEVELAKLIGQSVWDVSRSSFGNLVEWYLLRVAYERNELAPNKPGGEEYQRRMRSSYIGGYVKEPEKGLWESIAYLDFRSSAGSIIVTHNVSPDTLEKECKNYDVAPIVGYRFCKDFKGFIPSILEDLIETRQKVKRKMKATIDPIEKKMLDYRQRALKILANSYYGYQGYPKARWYSKECAESVTAWGRHYIETTIKEAEKFGFKVLYADTDGFFATIPNEKPETIKSKAKKFLKHINEKLPGMLELEYEGFYLRGFFVTKKKYALIDEDGHITTRGLEVVRRDWSEIAKETQAKVLEVILREGSIEKAAGIVKKVVEDLANYRVPVEKLIIHEQITRELKRYKATGPHVAIAKRLQARGIKVKPGTIISYVVLKGSKKISDRVILFDEYDSSRHKYDPDYYIHNQVLPAVLRILEAFGYKEKDLEYQRMKQTGLGAWLKMGKK

SEQ ID NO: 649 - protein, 757 aa, unidentified
  REGION 1..757: note = Description of Unknown: Synthetic polypeptide
MILDTDYITENGKPVIRIFKKEKGEFKIEYDRNFEPYIYALLEDDESIEDIKKITGERHGKKVRIIRVEKVKKKFLGEPIEVWKLVFEHPQDVPAIRDAIRSHPAVREIFEYDIPFAKRYLIDKGLVPMEGGEELKLLAFAIATFYHEGDEFAEGEILMISYADESGAKVITWKKIDLPYVEVVSTEREAIKRFLQVLREKDPDVLLTYNGDNFDFAYIKKRCEKLGLKFTIGRDGSEPKIQRMGDRFAVEVKGRIHLDLAPVVRHTIRLPTYTLEAVYEAVFGKKKEQVYAEEIAEAWKSEEGLKRVAQYSMEDARATYELGREFFPLEVELAKLIGQSVWDVSRSSTGNLVEWYLLRVAYERNELAPNKPGGEEYQRRMRSSYIGGYVKEPEKGLWESIAYLDFRSSAGSIIVTHNVSPDTLEKECKNYDVAPIVGYRFCKDFKGFIPSILEDLIETRQKVKRKMKATIDPIEKKMLDYRQRALKILANSYYGYQGYPKARWYSKECAESVTAWGRHYIETTIKEAEKFGFKVLYADTDGFFATIPNEKPETIKSKAKKFLKHINEKLPGMLELEYEGFYLRGFFVTKKKYALIDEDGHITTRGLEVVRRDWSEIAKETQAKVLEVILREGSIEKAAGIVKKVVEDLANYRVPVEKLIIHEQITRELKRYKATGPHVAIAKRLQARGIKVKPGTIISYVVLKGSKKISDRVILFDEYDSSRHKYDPDYYIHNQVLPAVLRILEAFGYKEKDLEYQ

SEQ ID NO: 650 - protein, 773 aa, unidentified
  REGION 1..773: note = Description of Unknown: Synthetic polypeptide
MILDTDYITENGKPVIRIFKKEKGEFKIEYDRNFEPYIYALLEDDESIEDIKKITGERHGKKVRIIRVEKVKKKFLGEPIEVWKLVFEHPQDYPAIRDAIRSHPAVREIFEYDIPFAKRYLIDKGLVPMEGGEELKLLAFAIATFYHEGDEFAEGEILMISYADESGAKVITWKKIDLPYVEVVSTEREAIKRFLQVLREKDPDVLLTYNGDNFDFAYIKKRCEKLGLKFTIGRDGSEPKIQRMGDRFAVEVKGRIHLDLAPVVRHTIRLPTYTLEAVYEAVFGKKKEKVYAEEIAEAWKSEEGLKRVAQYSMEDARATYELGREFFPMEVELAKLIGQSVWDVSRSSTGNLVEWYLLRVAYERNELAPNKPGGEEYQRRMRSSYIGGYVKEPEKGLWESIAYLDFRSSAGSIIVTHNVSPDTLEKECKNYDVAPIVGYRFCKDFKGFIPSILEDLIETRQKVKRKMKATIDPIEKKMLDYRQRALKILANSYYGYQGYPKARWYSKECAESVTAWGRHYIETTIKEAEKFGFKVLYADTDGFFATIPNEKPETIKSKAKKFLKHINEKLPGMLELEYEGFYLRGFFVTKKKYALIDEDGHITTRGLEVVRRDWSEIAKETQAKVLEVILREGSIESAAGIVKKVVEDLANYRVPVEKLIIHEQITRELKRYKATGPHVAIAKRLQARGIKVKPGTIISYVVLKGSKKISDRVILFDEYDSSRHKYDPDYYIHNQVLPAVLRILEAFGYKEKDLEYQRMKQTGLGAWLKMGKK

SEQ ID NO: 651 - protein, 773 aa, unidentified
  REGION 1..773: note = Description of Unknown: Synthetic polypeptide
MILDTDYITENGKPVIRIFKKEKGEFKIEYDRNFEPYIYALLEDDESIEDIKKITGERHGKKVRIIRVEKVKKKFLGEPIEVWKLVFEHPQDYPAIRDAIRSHPAVREIFEYDIPFAKRYLIDKGLVPMEGGEELKLLAFAIATFYHEGDEFAEGEILMISYADESGAKVITWKKIDLPYVEVVSTEREAIKRFLQVLREKDPDVLLTYNGDNFDFAYIKKRCEKLGLKFTIGRDGSEPKIQRMGDRFAVEVKGRIHLDLAPVVRHTIRLPTYTLEAVYEAVFGKKKEKVYAEEIAEAWKSEEGLARVAQYSMEDARATYELGREFFPMEVELAKLIGQSVWDVSRSSTGNLVEWYLLRVAYERNELAPNQPGGEEYQRRMRSSYIGGYVKEPEKGLWESIAYLDFRSSAGSIIVTHNVSPDTLEKECKNYDVAPIVGYRFCKDFKGFIPSILEDLIETRQKVKRKLKATIDPIEKKMLDYRQRALKILANSYYGYQGYPKARWYSKECAESVTAWGRHYIETTIKEAEKFGFKVLYADTDGFFATIPNEKPETIKSKAKKFLKHINEKLPGMLELEYEGFYLRGFFVTKKKYALIDEDGHITTRGLEVVRRDWSEIAKETQAKVLEVILREGSIEKAAGIVKKVVEDLANYRVPVEKLIIHEQITRELKRYKATGPHVAIAKRLQARGIKVKPGTIISYVVLKGSKKISDRVILFDEYDSSRHKYDPDYYIHNQVLPAVLRILEAFGYKEKDLEYQRMKQTGLGAWLKMGKK

SEQ ID NO: 652 - protein, 773 aa, unidentified
  REGION 1..773: note = Description of Unknown: Synthetic polypeptide
MILDTDYITENGKPVIRIFKKEKGEFKIEYDRNFEPYIYALLEDDESIEDIKKITGERHGKKVRIIRVEKVKKKFLGEPIEVWKLVFEHPQDYPAIRDAIRSHPAVREIFEYDIPFAKRYLIDKGLVPMEGGEELKLLAFAIATFYHEGDEFAEGEILMISYADESGAKVITWKKIDLPYVEVVSTEREAIKRFLQVLREKDPDVLLTYNGDNFDFAYIKKRCEKLGLKFTIGRDGSEPKIQRMGDRFAVEVKGRIHLDLAPVVRHTIRLPTYTLEAVYEAVFGKKKEKVYAEEIAEAWKSEEGLKRVAQYSMEDARATYELGREFFPMEVELAKLIGQSVWDVSRSSTGNLVEWYLLRVAYERNELAPNKPGGEEYQRRMRSSYIGGYVKEPEKGLWESIAYLDFRSSAGSIIVTHNVSPDTLEKECKNYDVAPIVGYRFCKDFKGFIPSILEDLIETRQKVKRKMKATIDPIEKKMLDYRQRALKILANSYYGYQGYPKARWYSKECAESVTAWGRHYIETTIKEAEKFGFKVLYADTDGFFATIPNEKPETIKSKAKKFLKHINEKLPGALELEYEGFYLRGFFVTKKKYALIDEDGHITTRGLEVVRRDWSEIAKETQAKVLEVILREGSIEKAAGIVKKVVEDLANYRVPVEKLIIHEQITRELKRYKATGPHVAIAKRLQARGIKVKPGTIISYVVLKGSKKISDRVILFDEYDSSRHKYDPDYYIHNQVLPAVLRILEAFGYKEKDLEYQRMKQTGLGAWLKMGKK

SEQ ID NO: 653 - protein, 773 aa, unidentified
  REGION 1..773: note = Description of Unknown: Synthetic polypeptide
MILDTDYITENGKPVIRIFKKEKGEFKIEYDRNFEPYIYALLEDDESIEDIKKITGERHGKKVRIIRVEKVKKKFLGEPIEVWKLVFEHPQDVPAIRDAIRSHPAVREIFEYDIPFAKRYLIDKGLVPMEGGEELKLLAFNIATFYHEGDEFAEGEILMISYADESGAKVITWKKIDLPYVEVVSTEREAIKRFLQVLREKDPDVLLTYNGDNFDFAYIKKRCEKLGLKFTIGRDGSEPEIQRMGDRFAVEVKGRIHLDLAPVVRHTIRLPTYTLEAVYEAVFGKKKEKVYAEEIAEAWKSEEGLKRVAQYSMEDARATYELGREFFPLEVELAKLIGQSVWDVSRSSTGNLVEWYLLRVAYERNELAPNKPGGEEYQRRMRSSYIGGYVKEPEKGLWESIAYLDFRSSAGSIIVTHNVSPDTLEKECKNYDVAPIVGYRFCKDFKGFIPSILEDLIETRQKVKRKMKATIDPIEKKMLDYRQRALKILANSYYGYQGYPKARWYSKECAESVTAWGRHYIETTIKEAEKFGFKVLYADTDGFFATIPNEKPETIKSKAKKFLKHINEKLPGMLELEYEGFYLRGFFVTKKKYALIDEDGHITTRGLEVVRRDWSEIAKETQAKVLEVILREGSIEKAAGIVKKVVEDLANYRVPVEKLIIHEQITRELKRYKATGPHVAIAKRLQARGIKVKPGTIISYVVLKGSKKISDRVILFDEYDSSRHKYDPDYYIHNQVLPAVLRILEAFGYKEKDLEYQRMKQTGLGAWLKMGKK

SEQ ID NO: 654 - protein, 773 aa, unidentified
  REGION 1..773: note = Description of Unknown: Synthetic polypeptide
MILDTDYITENGKPVIRIFKKEKGEFKIEYDRNFEPYIYALLEDDESIEDIKKITGERHGKKVRIIRVEKVKKKFLGEPIEVWKLVFEHPQDVPAIRDAIRSHPAVREIFEYDIPFAKRYLIDKGLVPMEGGEELKLLAFAIATFYHEGDEFAEGEILMISYADESGAKVITWKKIDLPYVEVVSTEREAIKRFLQVLREKDPDVLLTYNGDNFDFAYIKKRCEKLGLKFTIGRDGSEPKIQRMGDRFAVEVKGRIHLDLAPVVRHTIRLPTYTLEAVYEAVFGKKKEKVYAEEIAEAWKSEEGLKRVAQYSMEDARATYELGREFFPMEVELAKLIGQSVWDVSRSSTGNLVEWYLLRVAYERNELAPNKPGGEEYQRRMRSSYIGGYVKEPEKGLWESIAYLDFRSSAGSIIVTHNVSPDTLEKECKNYDVAPIVGYRFCKDFKGFIPSILEDLIETRQKVKRKMKATIDPIEKKMLDYRQRALKILANSYYGYQGYPKARWYSKECAESVTAWGRHYIETTIKEAEKFGFKVLYADTDGFFATIPNEKPETIKSKAKKFLKHINEKLPGMLELEYEGFYLRGFFVTKKKYALIDEDGHITTRGLEVVRRDWSEIAKETQAKVLEVILREGSIEKAAGIVKKVVEDLANYRVPVEKLIIHENITRELKRYKATGPHVAIAKRLQARGIKVKPGTIISYVVLKGSKKISDRVILFDEYDSSRHKYDPDYYIHNQVLPAVLRILEAFGYKEKDLEYQRMKQTGLGAWLKMGKK

SEQ ID NO: 655 - protein, 773 aa, unidentified
  REGION 1..773: note = Description of Unknown: Synthetic polypeptide
MILDTDYITENGKPVIRIFKKEKGEFKIEYDRNFEPYIYALLEDDESIEDIKKITGERHGKKVRIIRVEKVKKKFLGEPIEVWKLVFEHPKDVPAIQDAIRSHPAVREIFEYDIPFAKRYLIDKGLVPMEGGEELKLLAFNIATFYHEGDEFAEGEILMISYADESGAKVITWKKIDLPYVEVVSTEREAIKRFLQVLREKDPDVLLTYNGDNFDFAYIKKRCEKLGLKFTIGRDGSEPKIQRMGDRFAVEVKGRIHLDLAPVVRHTIRLPTYTLEAVYEAVFGKKKEKVYAEEIAEAWKSEEGLKRVAQYSMEDARATYELGREFFPLEVELAKLIGQSVWDVSRSSTGNLVEWYLLRVAYERNELAPNKPGGEEYQRRMRSSYIGGYVKEPEKGLWESIAYLDFRSSAGSIIVTHNVSPDTLEKECKNYDVAPIVGYRFCKDFKGFIPSILEDLIETRQKVKRKMKATIDPIEKKMLDYRQRALKILANSYYGYQGYPKARWYSKECAESVTAWGRHYIETTIKEAEKFGFKVLYADTDGFFATIPNEKPETIKSKAKKFLKHINEKLPGMLELEYEGFYLRGFFVTKKKYALIDEDGHITTRGLEVVRRDWSEIAKETQAKVLEVILREGSIEKAAGIVKKVVEDLANYRVPVEKLIIHEQITRELKRYKATGPHVAIAKRLQARGIKVKPGTIISYVVLKGSKKISDRVILFDEYDSSRHKYDPDYYIHNQVLPAVLRILEAFGYKEKDLEYQRMKQTGLGAWLKMGKK

SEQ ID NO: 656 - protein, 773 aa, unidentified
  REGION 1..773: note = Description of Unknown: Synthetic polypeptide
MILDTDYITENGKPVIRIFKKEKGEFKIEYDRNFEPYIYALLEDDESIEDIKKITGERHGKKVRIIRVEKVKKKFLGEPIEVWKLVFEHPQDYPAIRDAIRSHPAVREIFEYDIPFAKRYLIDKGLVPMEGGEELKLLAFAIATFYHEGDEFAEGEILMISYADESGAKVITWKKIDLPYVEVVSTEREAIKRFLQVLREKDPDVLLTYNGDNFDFAYIKKRCEKLGLKFTIGRDGSEPKIQRMGDRFAVEVKGRIHLDLAPVVRHTIRLPTYTLEAVYEAVFGKKKEKVYAEEIAEAWKSEEGLKRVAQYSMEDARATYELGREFFPMEVELAKLIGQSVWDVSRSSTGNLVEWYLLRVAYERNELAPNKPGGEEYQRRMRSSYIGGYVKEPEKGLWESIAYLDFRSSAGSIIVTHNISPDTLEKECKNYDVAPIVGYRFCKDFKGFIPSILEDLIETRQKVKRKMKATIDPIEKKMLDYRQRALKILANSYYGYNGYPKARWYVKEAAESVTAWGRHYIETTIKEAEKFGFKVLYADTDGFFATIPNEKPETIKSKAKKFLKHINEKLPGMLELEYEGFYLRGFFVTKKKYALIDEDGHITTRGLEVVRRDWSEIAKETQAKVLEVILREGSIEKAAGIVKKVVEDLANYRVPVEKLIIHEQITRELKRYKATGPHVAIAKRLQARGIKVKPGTIISYVVLKGSKKISDRVILFDEYDSSRHKYDPDYYIHNQVLPAVLRILEAFGYKEKDLEYQRMKQTGLGAWLKMGKK

SEQ ID NO: 657 - protein, 772 aa, unidentified; identical to SEQ ID NO: 103
  REGION 1..772: note = Description of Unknown: Synthetic polypeptide

SEQ ID NO: 658 - protein, 773 aa, unidentified
  REGION 1..773: note = Description of Unknown: Synthetic polypeptide
MILDTDYITENGKPVIRIFKKEKGEFKIEYDRNFEPYIYALLEDDESIEDIKKITGERHGKKVRIIRVEKVKKKFLGEPIEVWKLVFEHPQDYPAIRDAIRSHPAVREIFEYDIPFAKRYLIDKGLVPMEGGEELKLLAFAIATFYHEGDEFAEGEILMISYADESGAKVITWKKIDLPYVEVVSTEREAIKRFLQVLREKDPDVLLTYNGDNFDFAYIKKRCEKLGLKFTIGRDGSEPKIQRMGDRFAVEVKGRIHLDLAPVVRHTIRLPTYTLEAVYEAVFGKKKEKVYAEEIAEAWKSEEGLKRVAQYSMEAARATYELGREFFPMEVELAKLIGQSVWDVSRSSTGNLVEWYLLRVAYERNELAPNKPGGEEYQRRMRSSYIGGYVKEPEKGLWESIAYLDFRSSAGSIIVTHNVSPDTLEKECKNYDVAPIVGYRFCKDFKGFIPSILEDLIETRQKVKRKMKATIDPIEKKMLDYRQRALKILANSYYGYQGYPKARWYSKECAESVTAWGRHYIETTIKEAEKFGFKVLYADTDGFFATIPNEKPETIKSKAKKFLKHINEKLPGMLELEYEGFYLRGFFVTKKKYALIDEDGHITTRGLEVVRRDWSEIAKETQAKVLEVILREGSIEKAAGIVKKVVEDLANYRVPVEKLIIHEQITRELKRYKATGPHVAIAKRLQARGIKVKPGTIISYVVLKGSKKISDRVILFDEYDSSRHKYDPDYYIHNQVLPAVLRILEAFGYKEKDLEYQRMKQTGLGAWLKMGKK

SEQ ID NO: 659 - protein, 773 aa, unidentified
  REGION 1..773: note = Description of Unknown: Synthetic polypeptide
MILDTDYITENGKPVIRIFKKEKGEFKIEYDRNFEPYIYALLEDDESIEDIKKITGERHGKKVRIIRVEKVKKKFLGEPIEVWKLVFEHPQDYPAIRDAIRSHPAVREIFEYDIPFAKRYLIDKGLVPMEGGEELKLLAFAIATFYHEGDEFAEGEILMISYADESGAKVITWKKIDLPYVEVVSTEREAIKRFLQVLREKDPDVLLTYNGDNFDFAYIKKRCEKLGLKFTIGRDGSEPKIQRMGDRFAVEVKGRIHLDLAPVVRHTIRLPTYTLEAVYEAVFGKKKEKVYAEEIAEAWKSEEGLKRVAQYSMEDARATYELGREFFPMEVELAKLIGQSVWDVSRSSTGNLVEWYLLRVAYERNELAPNKPGGEEYQRRMRSSYIGGYVKEPEKGLWESIAYLDFRSSAGSIIVTHNVSPDTLEKECKNYDVAPIVGYRFCKDFKGFIPSILEDLIETRQKVKRKMKATIDPIEKKMLDYRQRALKILANSYYGYQGYPKARWYSKECAESVTAWGRHYIETTIKEAEKFGFKVLYADTDGFFATIPNEKPETIKSKAKKFLKHINEKLPGMLELEYEGFYLRGFFVTKKKYALIDEDGHITTRGLEVVRRDWSEIAKETQAKVLEVILREGSIEKAAGIVKKVVEDLANYRVPVEKLIIHEQITRELKRYKATGPHVAIAKRLQARGIKVRPGTIISYVVLKGSKKISDRVILFDEYDSSRHKYDPDYYIHNQVLPAVLRILEAFGYKEKDLEYQRMKQTGLGAWLKMGKK

SEQ ID NO: 660 - protein, 773 aa, unidentified
  REGION 1..773: note = Description of Unknown: Synthetic polypeptide
MILDTDYITENGKPVIRIFKKEKGEFKIEYDRNFEPYIYALLEDDESIEDIKKITGERHGKKVRIIRVEKVKKKFLGEPIEVWKLVFEHPQDVPAIRDAIRSHPAVREIFEYDIPFAKRYLIDKGLVPMEGGEELKLLAFNIATFYHEGDEFAEGEILMISYADESGAKVITWKKIDLPYVEVVSTEREAIKRFLQVLREKDPDVLLTYNGDNFDFAYIKKRCEKLGLKFTIGRDGSEPKIQRMGDRFAVEVKGRIHLDLAPVVRHTIRLPTYDLEAVYEAVFGKKKEKVYAEEIAEAWKSEEGLKRVAQYSMEDARATYELGREFFPLEVELAKLIGQSVWDVSRSSTGNLVEWYLLRVAYERNELAPNKPGGEEYQRRMRSSYIGGYVKEPEKGLWESIAYLDFRSSAGSIIVTHNVSPDTLEKECKNYDVAPIVGYRFCKDFKGFIPSILEDLIETRQKVKRKMKATIDPIEKKMLDYRQRALKILANSYYGYQGYPKARWYSKECAESVTAWGRHYIETTIKEAEKFGFKVLYADTDGFFATIPNEKPETIKSKAKKFLKHINEKLPGMLELEYEGFYLRGFFVTKKKYALIDEDGHITTRGLEVVRRDWSEIAKETQAKVLEVILREGSIEKAAGIVKKVVEDLANYRVPVEKLIIHEQITRELKRYKATGPHVAIAKRLQARGIKVKPGTIISYVVLKGSKKISDRVILFDEYDSSRHKYDPDYYIHNQVLPAVLRILEAFGYKEKDLEYQRMKQTGLGAWLKMGKK

SEQ ID NO: 661 - protein, 773 aa, unidentified; identical to SEQ ID NO: 49
  REGION 1..773: note = Description of Unknown: Synthetic polypeptide

SEQ ID NO: 662 - protein, 758 aa, unidentified
  REGION 1..758: note = Description of Unknown: Synthetic polypeptide
MILDTDYITENGKPVIRIFKKEKGEFKIEYDRNFEPYIYALLEDDESIEDIKKITGERHGKKVRIIRVEKVKKKFLGEPIEVWKLVFEHPQDYPAIRDAIRSHPAVREIFEYDIPFAKRYLIDKGLVPMEGGEELKLLAFAIATFYHEGDEFAEGEILMISYADESGAKVITWKKIDLPYVEVVSTEREAIKRFLQVLREKDPDVLLTYNGDNFDFAYIKKRCEKLGLKFTIGRDGSEPKIQRMGDRFAVEVKGRIHLDLAPVVRHTIRLPTYTLEAVYEAVFGKKKEKVYAEEIAEAWKSEEGLKRVAQYSMEDARATYELGREFFPMEVELAKLIGQSVWDVSRSSTGNLVEWYLLRVAYERNELAPNKPGGEEYQRRMRSSYIGGYVKEPEKGLWESIAYLDFRSSAGSIIVTHNVSPDTLEKECKNYDVAPIVGYRFCKDFKGFIPSILEDLIETRQKVKRKMKATIDPIEKKMLDYRQRALKILANSYYGYQGYPKARWYSKECAESVTAWGRHYIETTIKEAEKFGFKVLYADTDGFFATIPNEKPETIKSKAKKFLKHINEKLPGMLELEYEGFYLRGFFVTKKKYALIDEDGHITTRGLEVVRRDWSEIAKETQAKVLEVILREGSIEKAAGIVKKVVEDLANYRVPVEKLIIHEQITRELKRYKATGPHVAIAKRLQARGIKVKPGTIISYVVLKGSKKISDRVILFDEYDSSRHKYDPDYYIHNQVLPAVLRILEAFGYKEKDLEYQR

SEQ ID NO: 663 - protein, 773 aa, unidentified
  REGION 1..773: note = Description of Unknown: Synthetic polypeptide
QILDTDYITENGKPVIRIFKKEKGEFKIEYDRNFEPYIYALLEDDESIEDIKKITGERHGKKVRIIRVEKVKKKFLGEPIEVWKLVFEHPQDYPAIRDAIRSHPAVREIFEYDIPFAKRYLIDKGLVPFEGGEELKLLAFAIATFYHEGDEFAEGEILMISYADESGAKVITWKKIDLPYVEVVSTEREAIKRFLQVLREKDPDVLLTYNGDNFDFAYIKKRCEKLGLKFTIGRDGSEPKIQRMGDRFAVEVKGRIHLDLAPVVRHTIRLPTYTLEAVYEAVFGKKKEKVYAEEIAEAWKSEEGLKRVAQYSMEDARATYELGREFFPMEVELAKLIGQSVWDVSRSSTGNLVEWYLLRVAYERNELAPNKPGGEEYQRRMRSSYIGGYVKEPEKGLWESIAYLDFRSSAGSIIVTHNVSPDTLEKECKNYDVAPIVGYRFCKDFKGFIPSILEDLIETRQKVKRKMKATIDPIEKKMLDYRQRALKILANSYYGYQGYPKARWYSKECAESVTAWGRHYIETTIKEAEKFGFKVLYADTDGFFATIPNEKPETIKSKAKKFLKHINEKLPGMLELEYEGFYLRGFFVTKKKYALIDEDGHITTRGLEVVRRDWSEIAKETQAKVLEVILREGSIEKAAGIVKKVVEDLANYRVPVEKLIIHEQITRELKRYKATGPHVAIAKRLQARGIKVKPGTIISYVVLKGSKKISDRVILFDEYDSSRHKYDPDYYIHNQVLPAVLRILEAFGYKEKDLEYQRMKQTGLGAWLKMGKK

SEQ ID NO: 664 - protein, 773 aa, unidentified
  REGION 1..773: note = Description of Unknown: Synthetic polypeptide
MILDTDHITENGKPVIRIFKKEKGEFKIEYDRNFEPYIYALLEDDESIEDIKKITGERHGKKVRIIRVEKVKKKFLGEPIEVWKLVFEHPQDYPAIRDAIRSHPAVREIFEYDIPFAKRYLIDKGLVPMEGGEELKLLAFAIATFYHEGDEFAEGEILMISYADESGAKVITWKKIDLPYVEVVSTEREAIKRFLQVLREKDPDVLLTYNGDNFDFAYIKKRCEKLGLKFTIGRDGSEPKIQRMGDRFAVEVKGRIHLDLAPVVRHTIRLPTYTLEAVYEAVFGKKKEKVYAEEIAEAWKSEEGLKRVAQYSMEDARATYELGREFFPMEVELAKLIGQSVWDVSRSSTGNLVEWYLLRVAYERNELAPNKPGGEEYQRRMRSSYIGGYVKEPEKGLWESIAYLDFRSSAGSIIVTHNVSPDTLEKECKNYDVAPIVGYRFCKDFKGFIPSILEDLIETRQKVKRKMKATIDPIEKKMLDYRQRALKILANSYYGYQGYPKARWYSKECAESVTAWGRHYIETTIKEAEKFGFKVLYADTDGFFATIPNEKPETIKSKAKKFLKHINEKLPGMLELEYEGFYLRGFFVTKKKYALIDEDGHITTRGLEVVRRDWSEIAKETQAKVLEVILREGSIEKAAGIVKKVVEDLANYRVPVEKLIIHEQITRELKRYKATGPHVAIAKRLQARGIKVKPGTIISYVVLKGSKKISDRVILFDEYDSSRHKYDPDYYIHNQVLPAVLRILEAFGYKEKDLEYQRMKQTGLGAWLKMGKK

SEQ ID NO: 665 - protein, 773 aa, unidentified
  REGION 1..773: note = Description of Unknown: Synthetic polypeptide
MILDTDYITENGKPVIRIFKKEKGEFKIEYDRNFEPYIYALLEDDESIEDIKKITGERHGKKVRIIRVEKVKKKFLGEPIEVWKLVFEHPQDYPAIRDAIRSHPAVREIFEYDIPFAKRYLIDKGLVPMEGGEELKLLAFAIATFYHEGDEFAEGEILMISYADESGAKVITWKKIDLPYVEVVSTEREAIKRFLQVLREKDPDVLLTYNGDNFDFAYIKKRCEKLGLKFTIGRDGSEPKIQRMGDRFAVEVKGRIHLDLAPVVRHTIRLPTYTLEAVYEAVFGKKKEKVYAEEIAEAWKSEEGLKRVAQYSMEDARATYELGREFFPMEVELAKLIGQSVWDVSRSSTGNLVEWYLLRVAYERNELAPNKPGGEEYQRRMRSSYIGGYVKEPEKGLWESIAYLDFRSSAGSIIVTHNVSPDTLEKECKNYDVAPIVGYRFCKDFKGFIPSILEDLIETRQKVKRKMKATIDPIEKKMLDYRQRALKILANSYYGYQGYPKARWYSKECAESVTAWGRHYIETTIKEAEKFGFKVLYADTDGFFATIPNEKPETIKSKAKKFLKHINEKLPGMLELEYEGFYLRGFFVTKKKYALIDEDGHITTRGLEVVRRDWSEIAKETQAKVLEVILREGSIEKAAGIVKKVVEDLANYRVPVEKLIIHEQITRELKRYKATGPHVAISKRLQARGIKVKPGTIISYVVLKGSKKISDRVILFDEYDSSRHKYDPDYYIHNQVLPAVLRILEAFGYKEKDLEYQRMKQTGLGAWLKMGKK

SEQ ID NO: 666 - protein, 773 aa, unidentified
  REGION 1..773: note = Description of Unknown: Synthetic polypeptide
MILDTDYITENGKPVIRIFKKEKGEFKIEYDRNFEPYIYALLEDDESIEDIKKITGERHGKKVRIIRVEKVKKKFLGEPIEVWKLVFEHPQDYPAIRDAIRSHPAVREIFEYDIPFAKRYLIDKGLVPMEGGEELKLLAFAIATFYHEGDEFAEGEILMISYADESGAKVITWKKIDLPYVEVVSTEREAIKRFLQVLREKDPDVLLTYNGDNFDFAYIKKRCEKLGLKFTIGRDGSEPKIQRMGDRFAVEVKGRIHLDLAPVVRHTIRLPTYTLEAVYEAVFGKKKEKVYAEEIAEAWKSEEGLKRVAQYSMEDARATYELGREFFPMEVELAKLIGQSVWDVSRSSTGNLVEWYLLRVAYERNELAPNKPGGEEYQRRMRSSYIGGQVKEPEKGLWESIAYLDFRSSAGSIIVTHNVSPDTLEKECKNYDVAPIVGYRFCKDFKGFIPSILEDLIETRQKVKRKMKATIDPIEKKMLDYRQRALKILANSYYGYQGYPKARWYSKECAESVTAWGRHYIETTIKEAEKFGFKVLYADTDGFFATIPNEKPETIKSKAKKFLKHINEKLPGMLELEYEGFYLRGFFVTKKKYALIDEDGHITTRGLEVVRRDWSEIAKETQAKVLEVILREGSIEKAAGIVKKVVEDLANYRVPVEKLIIHEQITRELKRYKATGPHVAIAKRLQARGIKVKPGTIISYVVLKGSKKISDRVILFDEYDSSRHKYDPDYYIHNQVLPAVLRILEAFGYKEKDLEYQRMKQTGLGAWLKMGKK

SEQ ID NO: 667 - protein, 773 aa, unidentified
  REGION 1..773: note = Description of Unknown: Synthetic polypeptide
MILDTDYITENGKPVIRIFKKEKGEFKIEYDRNFEPYIYALLEDDESIEDIKKITGERHGKKVRIIRVEKVKKKFLGEPIEVWKLVFEHPQDVPAIRDAIRSHPAVREIFEYDIPFAKRYLIDKGLVPMEGGEELKLLAFNIATFYHEGDEFAEGEILMISYADESGAKVITWKKIDLPYVEVVSTEREAIKRFLQVLREKDPDVLLTYNGDNFDFAYIKKRCEKLGLKFTIGRDGSEPKIQRMGDRFAVEVKGRIHLDLAQVVRHTIRLPTYTLEAVYEAVFGKKKEKVYAEEIAEAWKSEEGLKRVAQYSMEDARATYELGREFFPLEVELAKLIGQSVWDVSRSSTGNLVEWYLLRVAYERNELAPNKPGGEEYQRRMRSSYIGGYVKEPEKGLWESIAYLDFRSSAGSIIVTHNVSPDTLEKECKNYDVAPIVGYRFCKDFKGFIPSILEDLIETRQKVKRKMKATIDPIEKKMLDYRQRALKILANSYYGYQGYPKARWYSKECAESVTAWGRHYIETTIKEAEKFGFKVLYADTDGFFATIPNEKPETIKSKAKKFLKHINEKLPGMLELEYEGFYLRGFFVTKKKYALIDEDGHITTRGLEVVRRDWSEIAKETQAKVLEVILREGSIEKAAGIVKKVVEDLANYRVPVEKLIIHEQITRELKRYKATGPHVAIAKRLQARGIKVKPGTIISYVVLKGSKKISDRVILFDEYDSSRHKYDPDYYIHNQVLPAVLRILEAFGYKEKDLEYQRMKQTGLGAWLKMGKK

SEQ ID NO: 668 - protein, 757 aa, unidentified
  REGION 1..757: note = Description of Unknown: Synthetic polypeptide
MILDTDYITENGKPVIRIFKKEKGEFKIEYDRNFEPYIYALLEDDESIEDIKKITGERHGKKVRIIRVEKVKKKFLGEPIEVWKLVFEHPQDVPAIRDAIRSHPAVREIFEYDIPFAKRYLIDKGLVPMEGGEELKLLAFAIATFYHEGDEFAEGEILMISYADESGAKVITWKKIDLPYVEVVSTEREAIKRFLQVLREKDPDVLLTYNGDNFDFAYIKKRCEKLGLKFTIGRDGSEPKIQRMGDRFAVEVKGRIHLDLAPVVRHTIRLPTYTLEAVYEAVFGKKKEKVYAEEIAEAWKSEEGLKRVAQYSMEDARATYELGREFFPMEVELAKLIGQSVWDVSRSSTGNLVEWYLLRVAYERNELAPNKPGGEEYQRRMRSSYIGGYVKEPEKGLWESIAYLDFRSSAGSIIVTHNVSPDTLEKECKNYDVAPIVGYRFCKDFKGFIPSILEDLIETRQKVKRKMKATIDPIEKKMLDYRQRALKILANSYYGYQGYPKARWYSKECAESVTAWGRHYIETTIKEAEKFGFKVLYADTDGFFATIPNEKPETIKSKAKKFLKHINEKLPGMLELEYEGFYLRGFFVTKKKYALIDEDGHITTRGLEVVRRDWSEIAKETQAKVLEVILREGSIEKAAGIVKKVVEDLANYRVPVEKLIIHEQITRKLKDYKATGPHVAIAKRLQARGTKVKPGTIISYVVLKGSKKISDRVILFDEYDSSRHKYDPDYYIHNQVLPAVLRILEAFGYKEKDLEYQ

SEQ ID NO: 669 - protein, 773 aa, unidentified; identical to SEQ ID NO: 49
  REGION 1..773: note = Description of Unknown: Synthetic polypeptide

SEQ ID NO: 670 - protein, 773 aa, unidentified
  REGION 1..773: note = Description of Unknown: Synthetic polypeptide
MILDTDYITENGKPVIRIFKKEKGEFKIEYDRNFEPYIYALLEDDESIEDIKKITGERHGKKVRIIRVEKVKKKFLGEPIEVWKLVFEHPQDYPAIRDAIRSHPAVREIFEYDIPFAKRYLIDKGLVPMEGGEELKLLAFAIATFYHEGDEFAEGEILMISYADESGAKVITWKKIDLPYVEVVSTEREAIKRFLQVLREKDPDVLLTYNGDNFDFAYIKKRCEKLGLKFTIGRDGSEPKIQRMGDRFAVEVKGRIHLDLAPVVRHTIRLPTYTLEAVYEAVFGKKKEKVYAEEIAEAWKSEEGLKRVAQYSMEDARATYELGREFFPMEVELAKLIGQSVWDVSRSSTGNLVEWYLLRVAYERNELAPNKPGGEEYQRRMRSSYIGGYVKEPEKGLWESIAYLDFRSSAGSIIVTHNVSPDTLEKECKNYDVAPIVGYRFCKDFKGFIPSILEDLIETRQKVKRKMKATIDPIEKKMLDYRQRALKILANSYYGYQGYPKARWYSKECAESVTAWGRHYIETTIKEAEKFGFKVLYADTDGFFATIPNEKPETIKSKAKKFLKHINEKLPGMLELEYEGFYLRGFFVTKKKYALIDEDGHITTRGLEVVRRDWSEIAKETQAKVLEVILREGSIEKAAGIVKKVVEDLANYRVPVEKLIIHEQITRELKRYKATGPHVAIAKRLQARGIKVKPGMIISYVVLKGSKKISDRVILFDEYDSSRHKYDPDYYIHNQVLPAVLRILEAFGYKEKDLEYQRMKQTGLGAWLKMGKK

SEQ ID NO: 671 - protein, 773 aa, unidentified
  REGION 1..773: note = Description of Unknown: Synthetic polypeptide
MILDTDYITENGKPVIRIFKKEKGEFKIEYDRNFEPYIYALLEDDESIEDIKKITGERHGKKVRIIRVEKVKKKFLGEPIEVWKLVFEHPQDYPAIRDAIRSHPAVREIFEYDIPFAKRYLIDKGLVPMEGGEELKLLAFAIATFYHEGDEFAEGEILMISYADESGAKVITWKKIDLPYVEVVSTEREAIKRFLQVLREKDPDVLLTYNGDNFDFAYIKKRCEKLGLKFTIGRDGSEPKIQRMGDRFAVEVKGRIHLDLAPVVRHTIRLPTYTLEAVYEAVFGKKKEKVYAEEIAEAWKSEEGLKRVAQYSMEDARATYELGREFFPMEVELAKLIGQSVWDVSRSSTGNLVEWYLLRVAYERNELAPNKPGGEEYQRRMRSSYIGGYVKEPEKGLWESIAYLDFRSSAGSIIVTHNISPDTLEKECKNYDVAPIVGYRFCKDFKGFIPSILEDLIETRQKVKRKMKATIDPIEKKMLDYRQRALKILANSYYGYFGYPKARWYLKEAAESVTAWGRHYIETTIKEAEKFGFKVLYADTDGFFATIPNEKPETIKSKAKKFLKHINEKLPGMLELEYEGFYLRGFFVTKKKYALIDEDGHITTRGLEVVRRDWSEIAKETQAKVLEVILREGSIEKAAGIVKKVVEDLANYRVPVEKLIIHEQITRELKRYKATGPHVAIAKRLQARGIKVKPGTIISYVVLKGSKKISDRVILFDEYDSSRHKYDPDYYIHNQVLPAVLRILEAFGYKEKDLEYQRMKQTGLGAWLKMGKK

SEQ ID NO: 672 - protein, 773 aa, unidentified
  REGION 1..773: note = Description of Unknown: Synthetic polypeptide
MILDTDYITENGKPVIRIFKKEKGEFKIEYDRNFEPYIYALLEDDESIEDIKKITGERHGKKVRIIRVEKVKKKFLGEPIEVWKLVFEHPQDVPAIRDAIRSHPAVREIFEYDIPFAKRYLIDKGLVPMEGGEELKLLAFAIATFYHEGDEFAEGEILMISYADESGAKVITWKKIDLPYVEVVSTEREAIKRFLQVLREKDPDVLLTYNGDNFDFAYIKKRCEKLGLKFTIGRDGSEPKIQRMGDRFAVEVKGRIHLDLAPVVRHTIRLPTYTLEAVYEAVFGKKKEKVYAEEIAEAWKSEEGLKRVAQYSMEDARATYELGREFFPMEVELAKLIGQSVWDVSRSSTGNLVEWYLLRVAYERNELAPNKPGGEEYQRRMRSSYIGGYVKEPEKGLWESIAYLDFRSSAGSIIVTHNVSPDTLEKECKNYDVAPIVGYRFCKDFKGFIPSILEDLIETRQKVKRKMKATIDPIEKKMLDYRQRALKILANSYYGYMGYPKARWYSKEAAESVTAWGRHYIETTIKEAEKFGFKVLYADTDGFFATIPNEKPETIKSKAKKFLKHINEKLPGMLELEYEGFYLRGFFVTKKKYALIDEDGHITTRGLEVVRRDWSEIAKETQAKVLEVILREGSIEKAAGIVKKVVEDLANYRVPVEKLIIHEQITRELKRYKATGPHVAIAKRLQARGIKVKPGTIISYVVLKGSKKISDRVILFDEYDSSRHKYDPDYYIHNQVLPAVLRILEAFGYKEKDLEYQRMKQTGLGAWLKMGKK

SEQ ID NO: 673 - protein, 773 aa, unidentified
  REGION 1..773: note = Description of Unknown: Synthetic polypeptide
MILDTDYITENGKPVIRIFKKEKGEFKIEYDRNFEPYIYALLEDDESIEDIKKITGERHGKKVRIIRVEKVKKKFLGEPIEVWKLVFEHPQDYPAIRDAIRSHPAVREIFEYDIPFAKRYLIDKGLVPMEGGEELKLLAFAIATFYHEGDEFAEGEILMISYADESGAKVITWKKIDLPYVEVVSTEREAIKRFLQVLREKDPDVLLTYNGDNFDFAYIKKRCEKLGLKFTIGRDGSEPKIQRMGDRFAVEVKGRIHLDLAPVVRHTIRLPTYTLEAVYEAVFGKKKEKVYAEEIAEAWKSEEGLKRVAQYSMEDARATYELGREFFPMEVELAKLIGQSVWDVSRSSTGNLVEWYLLRVAYERNELAPNKPGGEEYQRRMRSSYIGGYVKEPEKGLWESIAYLDFRSSAGSIIVTHNVSPDTLEKECKNYDVAPDVGYRFCKDFKGFIPSILEDLIETRQKVKRKMKATIDPIEKKMLDYRQRALKILANSYYGYQGYPKARWYSKECAESVTAWGRHYIETTIKEAEKFGFKVLYADTDGFFATIPNEKPETIKSKAKKFLKHINEKLPGMLELEYEGFYLRGFFVTKKKYALIDEDGHITTRGLEVVRRDWSEIAKETQAKVLEVILREGSIEKAAGIVKKVVEDLANYRVPVEKLIIHEQITRELKRYKATGPHVAIAKRLQARGIKVKPGTIISYVVLKGSKKISDRVILFDEYDSSRHKYDPDYYIHNQVLPAVLRILEAFGYKEKDLEYQRMKQTGLGAWLKMGKK

SEQ ID NO: 674 - protein, 773 aa, unidentified
  REGION 1..773: note = Description of Unknown: Synthetic polypeptide
MILDTDYITENGKPVIRIFKKEKGEFKIEYDRNFEPYIYALLEDDESIEDIKKITGERHGKKVRIIRVEKVKKKFLGEPIEVWKLVFDHPQDYPAIRDAIRSHPAVREIFEYDIPFAKRYLIDKGLVPMEGGEELKLLAFAIATFYHEGDEFAEGEILMISYADESGAKVITWKKIDLPYVEVVSTEREAIKRFLQVLREKDPDVLLTYNGDNFDFAYIKKRCEKLGLKFTIGRDGSEPKIQRMGDRFAVEVKGRIHLDLAPVVRHTIRLPTYTLEAVYEAVFGKKKEKVYAEEIAEAWKSEEGLKRVAQYSMEDARATYELGREFFPMEVELAKLIGQSVWDVSRSSTGNLVEWYLLRVAYERNELAPNKPGGEEYQRRMRSSYIGGYVKEPEKGLWESIAYLDFRSSAGSIIVTHNVSPDTLEKECKNYDVAPIVGYRFCKDFKGFIPSILEDLIETRQKVKRKMKATIDPIEKKMLDYRQRALKILANSYYGYQGYPKARWYSKECAESVTAWGRHYIETTIKEAEKFGFKVLYADTDGFFATIPNEKPETIKSKAKKFLKHINEKLPGMLELEYEGFYLRGFFVTKKKYALIDEDGHITTRGLEVVRRDWSEIAKETQAKVLEVILREGSIEKAAGIVKKVVEDLANYRVPVEKLIIHEQITRELKRYKATGPHVAIAKRLQARGIKVKPGTIISYVVLKGSKKISDRVILFDEYDSSRHKYDPDYYIHNQVLPAVLRILEAFGYKEKDLEYQRMKQTGLGAWLKMGKK

SEQ ID NO: 675 - protein, 773 aa, unidentified
  REGION 1..773: note = Description of Unknown: Synthetic polypeptide
MILDTDYITENGKPVIRIFKKEKGEFKIEYDRNFEPYIYALLEDDESIEDIKKITGERHGKKVRIIRVEKVKKKFLGEPIEVWKLVFEHPQDYPAIRDAIRSHPAVREIFEYDIPFAKRYLIDKGLVPMEGGEELKLLAFAIATFYHEGDEFAEGEILMISYADESGAKVITWKKIDLPYVEVVSTEREAIKRFLQVLREKDPDVLLTYNGDNFDFAYIKKRCEKLGLKFTIGRDGSEPKIQRMGDRFAVEVKGRIHLDLAPVVRHTIRLPTYTLEAVYEAVFGKKKEQVYAEEIAEAWKSEEGLKRVAQYSMEDARATYELGREFFPMEVELAKLIGQSVWDVSRSSTGNLVEWYLLRVAYERNELAPNKPGGEEYQRRMRSSYIGGYVKEPEKGLWESIAYLDFRSSAGSIIVTHNVSPDTLEKECKNYDVAPIVGYRFCKDFKGFIPSILEDLIETRQKVKRKMKATIDPIEKKMLDYRQRALKILANSYYGYQGYPKARWYSKENAESVTAWGRHYIETTIKEAEKFGFKVLYADTDGFFATIPNEKPETIKSKAKKFLKHINEKLPGMLELEYEGFYLRGFFVTKKKYALIDEDGHITTRGLEVVRRDWSEIAKETQAKVLEVILREGSIEKAAGIVKKVVEDLANYRVPVEKLIIHEQITRELKRYKATGPHVAIAKRLQARGIKVKPGTIISYVVLKGSKKISDRVILFDEYDSSRHKYDPDYYIHNQVLPAVLRILEAFGYKEKDLEYQRMKQTGLGAWLKMGKK

SEQ ID NO: 676 - protein, 773 aa, unidentified
  REGION 1..773: note = Description of Unknown: Synthetic polypeptide
MILDTDYITENGKPVIRIFKKEKGEFKIEYDRNFEPYIYALLEDDESIEDIKKITGERHGKKVRIIRVEKVKKKFLGEPIEVWKLVFEHPQDYPAIRDAIRSHPAVREIFEYDIPFAKRYLIDKGLVPMEGGEELKLLAFAIATFYHEGDEFAEGEILMISYADESGAKVITWKKIDLPYVEVVSTEREAIKRFLQVLREKDPDVLLTYNGDNFDFAYIKKRCEKLGLKFTIGRDGSEPKIQRMGDRFAVEVKGRIHLDLAPVVRHTIRLPTYTLEAVYEAVFGKKKEQVYAEEIAEAWKSEEGLKRVAQYSMEDARATYELGREFFPMEVELAKLIGQSVWDVSRSSTGNLVEWYLLRVAYERNELAPNKPGGEEYQRRMRSSYIGGYVKEPEKGLWESIAYLDFRSSAGSIIVTHNVSPDTLEKECKNYDVAPIVGYRFCKDFKGFIPSILEDLIETRQKVKRKMKATIDPIEKKMLDYRQRALKILANSYYGYQGYPKARWYSKEQAEHVTAWGRHYIETTIKEAEKFGFKVLYADTDGFFATIPNEKPETIKSKAKKFLKHINEKLPGMLELEYEGFYLRGFFVTKKKYALIDEDGHITTRGLEVVRRDWSEIAKETQAKVLEVILREGSIEKAAGIVKKVVEDLANYRVPVEKLIIHEQITRELKRYKATGPHVAIAKRLQARGIKVKPGTIISYVVLKGSKKISDRVILFDEYDSSRHKYDPDYYIHNQVLPAVLRILEAFGYKEKDLEYQRMKQTGLGAWLKMGKK

SEQ ID NO: 677 - protein, 773 aa, unidentified
  REGION 1..773: note = Description of Unknown: Synthetic polypeptide
MILDTDYITENGKPVIRIFKKEKGEFKIEYDRNFEPYIYALLEDDESIEDIKKITGERHGKKVRIIRVEKVKKKFLGEPIEVWKLVFEHPQDVPAIRDAIRSHPAVREIFEYDIPFAKRYLIDKGLVPMEGGEELKLLAFNIATFYHEGDEFAEGEILMISYADESGAKVITWKKIDLPYVEVVSTEREAIKRFLQVLREKDPDVLLTYNGDNFDFAYIKKRCEKLGLKFTIGRDGSEPKIQRMGDRFAVEVKGRIHLDLAPVVRHTIRLPTYTLEAVYEAVFGKKKEKVYAEEIAEAWKSEEGLKRVAQYSMEDARATYELGREFFPLEVELAKLIGQSVWDVSRSSTGNLVEWYLLRVAYERNELAPNKPGGEEYQRRMRSSYIGGYVKEPEKGLWESIAYLDFRSSAGSIIVTHNVSPDTLEKECKNYDVAPIVGYRFCKDFKGFIPSILEDLIETRQKVKRKMKATIDPIEKKMLDYRQRALKILANSYYGYQGYPKARWYSKECAESVTAWGRHYIETTIKEAEKFGFKVLYADTDGFFATIPNEKPETIKSKAKKFLKHINEKLPGMLELEYEGFYLRGFFVTKKKYALIDEDGHITTRGLEVVRRDWSEIAKETQAKVLEVILREGSIEKAAGIVKKVVEDLANYRVPVEKLIIHEQITRELKRYKATGPHVAIAKRLQARGIKVKPGTIFSYVVLKGSKKISDRVILFDEYDSSRHKYDPDYYIHNQVLPAVLRILEAFGYKEKDLEYQRMKQTGLGAWLKMGKK

SEQ ID NO: 678 - protein, 773 aa, unidentified
  REGION 1..773: note = Description of Unknown: Synthetic polypeptide
MILDTDYIAENGKPVIRIFKKEKGEFKIEYDRNFEPYIYALLEDDESIEDIKKITGERHGKKVRIIRVEKVKKKFLGEPIEVWKLVFEHPQDYPAIRDAIRSHPAVREIFEYDIPFAKRYLIDKGLVPMEGGEELKLLAFAIATFYHEGDEFAEGEILMISYADESGAKVITWKKIDLPYVEVVSTEREAIKRFLQVLREKDPDVLLTYNGDNFDFAYIKKRCEKLGLKFTIGRDGSEPKIQRMGDRFAVEVKGRIHLDLAPVVRHTIRLPTYTLEAVYEAVFGKKKEKVYAEEIAEAWKSEEGLKRVAQYSMEDARATYELGREFFPMEVELAKLIGQSVWDVSRSSTGNLVEWYLLRVAYERNELAPNKPGGEEYQRRMRSSYIGGYVKEPEKGLWESIAYLDFRSSAGSIIVTHNVSPDTLEKECKNYDVAPIVGYRFCKDFKGFIPSILEDLIETRQKVKRKMKATIDPIEKKMLDYRQRALKILANSYYGYQGYPKARWYSKECAESVTAWGRHYIETTIKEAEKFGFKVLYADTDGFFATIPNEKPETIKSKAKKFLKHINEKLPGMLELEYEGFYLRGFFVTKKKYALIDEDGHITTRGLEVVRRDWSEIAKETQAKVLEVILREGSIEKAAGIVKKVVEDLANYRVPVEKLIIHEQITRELKRYKATGPHVAIAKRLQARGIKVKPGTIISYVVLKGSKKISDRVILFDEYDSSRHKYDPDYYIHNQVLPAVLRILEAFGYKEKDLEYQRMKQTGLGAWLKMGKK

SEQ ID NO: 679 - protein, 773 aa, unidentified
  REGION 1..773: note = Description of Unknown: Synthetic polypeptide
MILDTDYISENGKPVIRIFKKEKGEFKIEYDRNFEPYIYALLEDDESIEDIKKITGERHGKKVRIIRVEKVKKKFLGEPIEVWKLVFEHPQDVPAIRDAIRSHPAVREIFEYDIPFAKRYLIDKGLVPMEGGEELKLLAFNIATFYHEGDEFAEGEILMISYADESGAKVITWKKIDLPYVEVVSTEREAIKRFLQVLREKDPDVLLTYNGDNFDFAYIKKRCEKLGLKFTIGRDGSEPKIQRMGDRFAVEVKGRIHLDLAPVVRHTIRLPTYTLEAVYEAVFGKKKEKVYAEEIAEAWKSEEGLKRVAQYSMEDARATYELGREFFPLEVELAKLIGQSVWDVSRSSTGNLVEWYLLRVAYERNELAPNKPGGEEYQRRMRSSYIGGYVKEPEKGLWESIAYLDFRSSAGSIIVTHNVSPDTLEKECKNYDVAPIVGYRFCKDFKGFIPSILEDLIETRQKVKRKMKATIDPIEKKMLDYRQRALKILANSYYGYQGYPKARWYSKECAESVTAWGRHYIETTIKEAEKFGFKVLYADTDGFFATIPNEKPETIKSKAKKFLKHINEKLPGMLELEYEGFYLRGFFVTKKKYALIDEDGHITTRGLEVVRRDWSEIAKETQAKVLEVILREGSIEKAAGIVKKVVEDLANYRVPVEKLIIHEQITRELKRYKATGPHVAIAKRLQARGIKVKPGTIISYVVLKGSKKISDRVILFDEYDSSRHKYDPDYYIHNQVLPAVLRILEAFGYKEKDLEYQRMKQTGLGAWLKMGKK

SEQ ID NO: 680 - protein, 773 aa, unidentified
  REGION 1..773: note = Description of Unknown: Synthetic polypeptide
MILDTDYITETGKPVIRIFKKEKGEFKIEYDRNFEPYIYALLEDDESIEDIKKITGERHGKKVRIIRVEKVKKKFLGEPIEVWKLVFEHPQDYPAIRDAIRSHPAVREIFEYDIPFAKRYLIDKGLVPMEGGEELKLLAFAIATFYHEGDEFAEGEILMISYADESGAKVITWKKIDLPYVEVVSTEREAIKRFLQVLREKDPDVLLTYNGDNFDFAYIKKRCEKLGLKFTIGRDGSEPKIQRMGDRFAVEVKGRIHLDLAPVVRHTIRLPTYTLEAVYEAVFGKKKEKVYAEEIAEAWKSEEGLKRVAQYSMEDARATYELGREFFPMEVELAKLIGQSVWDVSRSSTGNLVEWYLLRVAYERNELAPNKPGGEEYQRRMRSSYIGGYVKEPEKGLWESIAYLDFRSSAGSIIVTHNVSPDTLEKECKNYDVAPIVGYRFCKDFKGFIPSILEDLIETRQKVKRKMKATIDPIEKKMLDYRQRALKILANSYYGYQGYPKARWYSKECAESVTAWGRHYIETTIKEAEKFGFKVLYADTDGFFATIPNEKPETIKSKAKKFLKHINEKLPGMLELEYEGFYLRGFFVTKKKYALIDEDGHITTRGLEVVRRDWSEIAKETQAKVLEVILREGSIEKAAGIVKKVVEDLANYRVPVEKLIIHEQITRELKRYKATGPHVAIAKRLQARGIKVKPGTIISYVVLKGSKKISDRVILFDEYDSSRHKYDPDYYIHNQVLPAVLRILEAFGYKEKDLEYQRMKQTGLGAWLKMGKK

SEQ ID NO: 681 - protein, 772 aa, unidentified; identical to SEQ ID NO: 103
  REGION 1..772: note = Description of Unknown: Synthetic polypeptide

SEQ ID NO: 682 - protein, 773 aa, unidentified
  REGION 1..773: note = Description of Unknown: Synthetic polypeptide
MILDTDYITENGKPVIRIFKKEKGEFKIEYDRNFEPYIYALLEDDESIEDIKKITGERHGKKVRIIRVEKVKKKFLGEPIEVWKLVFEHPQDYPAIRDAIRSHPAVREIFEYDIPFAKRYLIDKGLVPMEGGEELKLLAFAIATFYHEGDEFAEGEILMISYADESGAKVITWKKIDLPYVEVVSTEREAIKRFLQVLREKDPDVLLTYNGDNFDFAYIKKRCEKLGLKFTIGRDGSEPKIQRMGDRFAVEVKGRIHLDLAPVVRHTIRLPTYTLEAVYEAVFGKKKEKVYAEEIAEAEKSEEGLKRVAQYSMEDARATYELGREFFPMEVELAKLIGQSVWDVSRSSTGNLVEWYLLRVAYERNELAPNKPGGEEYQRRMRSSYIGGYVKEPEKGLWESIAYLDFRSSAGSIIVTHNVSPDTLEKECKNYDVAPIVGYRFCKDFKGFIPSILEDLIETRQKVKRKMKATIDPIEKKMLDYRQRALKILANSYYGYQGYPKARWYSKECAESVTAWGRHYIETTIKEAEKFGFKVLYADTDGFFATIPNEKPETIKSKAKKFLKHINEKLPGMLELEYEGFYLRGFFVTKKKYALIDEDGHITTRGLEVVRRDWSEIAKETQAKVLEVILREGSIEKAAGIVKKVVEDLANYRVPVEKLIIHEQITRELKRYKATGPHVAIAKRLQARGIKVKPGTIISYVVLKGSKKISDRVILFDEYDSSRHKYDPDYYIHNQVLPAVLRILEAFGYKEKDLEYQRMKQTGLGAWLKMGKK

SEQ ID NO: 683 - protein, 773 aa, unidentified
  REGION 1..773: note = Description of Unknown: Synthetic polypeptide
MILDTDYITENGKPVIRIFKKEKGEFKIEYDRNFEPYIYALLEDDESIEDIKKITGERHGKKVRIIRVEKVKKRFLGEPIEVWKLVFEHPQDYPAIRDAIRSHPAVREIFEYDIPFAKRYLIDKGLVPMEGGEELKLLAFAIATFYHEGDEFAEGEILMISYADESGAKVITWKKIDLPYVEVVSTEREAIKRFLQVLREKDPDVLLTYNGDNFDFAYIKKRCEKLGLKFTIGRDGSEPKIQRMGDRFAVEVKGRIHLDLAPVVRHTIRLPTYTLEAVYEAVFGKKKEKVYAEEIAEAWKSEEGLKRVAQYSMEDARATYELGREFFPMEVELAKLIGQSVWDVSRSSTGNLVEWYLLRVAYERNELAPNKPGGEEYQRRMRSSYIGGYVKEPEKGLWESIAYLDFRSSAGSIIVTHNVSPDTLEKECKNYDVAPIVGYRFCKDFKGFIPSILEDLIETRQKVKRKMKATIDPIEKKMLDYRQRALKILANSYYGYQGYPKARWYSKECAESVTAWGRHYIETTIKEAEKFGFKVLYADTDGFFATIPNEKPETIKSKAKKFLKHINEKLPGMLELEYEGFYLRGFFVTKKKYALIDEDGHITTRGLEVVRRDWSEIAKETQAKVLEVILREGSIEKAAGIVKKVVEDLANYRVPVEKLIIHEQITRELKRYKATGPHVAIAKRLQARGIKVKPGTIISYVVLKGSKKISDRVILFDEYDSSRHKYDPDYYIHNQVLPAVLRILEAFGYKEKDLEYQRMKQTGLGAWLKMGKK

SEQ ID NO: 684 - protein, 773 aa, unidentified
  REGION 1..773: note = Description of Unknown: Synthetic polypeptide
MILDTDYITENGKPVIRIFKKEKGEFKIEYDRNFEPYIYALLEDDESIEDIKKITGERHGKKVRIIRVEKVKKKFLGEPIEVWKLVFEHPQDYPAIRDAIRSHPAVREIFEYDIPFAKRYLIDKGLVPMEGGEELKLLAFAIATFYHEGDEFAEGEILMISYADESGAKVITWKKIDLPYVEVVSTEREAIKRFLQVLREKDPDVLLTYNGDNFDFAYIKKRCEKLGLKFTIGRDGSEPKIQRMGDRFAVEVKGRIHLDLAPVVRHTIRLPTYTLEAVYEAVFGKKKEKVYAEEIAEAWKSEEGLKRVAQYSMEDARATYELGREFFPMEVELAKLIGQSVWDVSRSSTGNLVEWYLLRVAYERNELAPNKPGGEEYQRRMRSSYIGGYVKEPEKGLWESIAYLDFRSSAGSIIVTHNISPDTLEKECKNYDVAPIVGYRFCKDFKGFIPSILEDLIETRQKVKRKMKATIDPIEKKMLDYRQRALKILANSYYGYMGYPKARWYSKECAESVTAWGRHYIETTIKEAEKFGFKVLYADTDGFFATIPNEKPETIKSKAKKFLKHINEKLPGMLELEYEGFYLRGFFVTKKKYALIDEDGHITTRGLEVVRRDWSEIAKETQAKVLEVILREGSIEKAAGIVKKVVEDLANYRVPVEKLIIHEQITRELKRYKATGPHVAIAKRLQARGIKVKPGTIISYVVLKGSKKISDRVILFDEYDSSRHKYDPDYYIHNQVLPAVLRILEAFGYKEKDLEYQRMKQTGLGAWLKMGKK

SEQ ID NO: 685 - protein, 773 aa, unidentified
  REGION 1..773: note = Description of Unknown: Synthetic polypeptide
MILDTDYITENGKPVIRIFKKEKGEFKIEYDRNFEPYIYALLEDDESIEDIKKITGERHGKKVRIIRVEKVKKKFLGEPIEVWKLVFEHPQDYPAIRDAIRSHPAVREIFEYDIPFAKRYLIDKGLVPMEGGEELKLLAFAIATFYHEGDEFAEGEILMISYADESGAKVITWKKIDLPYVEVVSTEREAIKRFLQVLREKDPDVLLTYNGDNFDFAYIKKRCEKLGLKFTIGRDGSEPKIQRMGDRFAVEVKGRIHLDLAPVVRHTIRLPTYTLEAVYEAVFGKKKEKVYAEEIAEAWKSEEGLKRVAQYSMEDARATYELGREFFPMEVELAKLIGQSVWDVSRSSTGNLVEWYLLRVAYERNELAPNKPGGEEYQRRMRSSYIGGYVKEPEKGLWESIAYLDFRSSAGSIIVTHNVSPDTLEKECKNYDVAPIVGYRFCKDFKGFIPSILEDLIETRQKVKRKMKATIDPIEKKMLDYRQKALKILANSYYGYQGYPKARWYSKECAESVTAWGRHYIETTIKEAEKFGFKVLYADTDGFFATIPNEKPETIKSKAKKFLKHINEKLPGMLELEYEGFYLRGFFVTKKKYALIDEDGHITTRGLEVVRRDWSEIAKETQAKVLEVILREGSIEKAAGIVKKVVEDLANYRVPVEKLIIHEQITRELKRYKATGPHVAIAKRLQARGIKVKPGTIISYVVLKGSKKISDRVILFDEYDSSRHKYDPDYYIHNQVLPAVLRILEAFGYKEKDLEYQRMKQTGLGAWLKMGKK

SEQ ID NO: 686 - protein, 773 aa, unidentified
  REGION 1..773: note = Description of Unknown: Synthetic polypeptide
MILDTDYITENGKPVIRIFKKEKGEFKIEYDRNFEPYIYALLEDDESIEDIKKITGERHGKKVRIIRVEKVKKKFLGEPIEVWKLVFEHPQDFPAIRDAIRSHPAVREIFEYDIPFAKRYLIDKGLVPMEGGEELKLLAFNIATFYHEGDEFAEGEILMISYADESGAKVITWKKIDLPYVEVVSTEREAIKRFLQVLREKDPDVLLTYNGDNFDFAYIKKRCEKLGLKFTIGRDGSEPKIQRMGDRFAVEVKGRIHLDLAPVVRHTIRLPTYTLEAVYEAVFGKKKEKVYAEEIAEAWKSEEGLKRVAQYSMEDARATYELGREFFPLEVELAKLIGQSVWDVSRSSTGNLVEWYLLRVAYERNELAPNKPGGEEYQRRMRSSYIGGYVKEPEKGLWESIAYLDFRSSAGSIIVTHNVSPDTLEKECKNYDVAPIVGYRFCKDFKGFIPSILEDLIETRQKVKRKMKATIDPIEKKMLDYRQRALKILANSYYGYQGYPKARWYSKECAESVTAWGRHYIETTIKEAEKFGFKVLYADTDGFFATIPNEKPETIKSKAKKFLKHINEKLPGMLELEYEGFYLRGFFVTKKKYALIDEDGHITTRGLEVVRRDWSEIAKETQAKVLEVILREGSIEKAAGIVKKVVEDLANYRVPVEKLIIHEQITRELKRYKATGPHVAIAKRLQARGIKVKPGTIISYVVLKGSKKISDRVILFDEYDSSRHKYDPDYYIHNQVLPAVLRILEAFGYKEKDLEYQRMKQTGLGAWLKMGKK

SEQ ID NO: 687 - protein, 773 aa, unidentified
  REGION 1..773: note = Description of Unknown: Synthetic polypeptide
MILDTDYITENGKPVIRIFKKEKGEFKIEYDRNFEPYIYALLEDDESIEDIKKITGERHGKKVRIIRVEKVKKKFLGEPIEVWKLVFEHPQDYPAIRDAIRSHPAVREIFEYDIPFAKRYLIDKGLVPMEGGEELKLLAFAIATFYHEGDEFAEGEILMISYADESGAKVITWKKIDLPYVEVVSTEREAIKRFLQVLREKDPDVLLTYNGDNFDFAYIKKRCEKLGLKFTIGRDGSEPKIQRMGDRFAVEVKGRIHLDLAPVVRHTIRLPTYTLEAVYEAVFGKKKEKVYAEEIAEAWKSEEGLKRVAQYSMEDARATYELGREFFPMEVELAKLIGQSVWDVSRSSTGNLVEWYLLRVAYERNELAPNKPGGEEYQRRMRSSYIGGYVKEPEKGLWESIAYLDFRSSAGSIIVTHNVSPDTLEKECKNYDVAPIVGYRFCKDFKGFIPSILEDLIETRQKVKRKMKATIDPIEKKMLDYRQRALKILANSYYGYQGYPKARWYSKECAESVTAWGRHYIETTIKEAEKFGFKVLYADTDRFFATIPNEKPETIKSKAKKFLKHINEKLPGMLELEYEGFYLRGFFVTKKKYALIDEDGHITTRGLEVVRRDWSEIAKETQAKVLEVILREGSIEKAAGIVKKVVEDLANYRVPVEKLIIHEQITRELKRYKATGPHVAIAKRLQARGIKVKPGTIISYVVLKGSKKISDRVILFDEYDSSRHKYDPDYYIHNQVLPAVLRILEAFGYKEKDLEYQRMKQTGLGAWLKMGKK

SEQ ID NO: 688 - protein, 757 aa, unidentified
  REGION 1..757: note = Description of Unknown: Synthetic polypeptide
MILDTDYITENGKPVIRIFKKEKGEFKIEYDRNFEPYIYALLEDDESIEDIKKITGERHGKKVRIIRVEKVKKKFLGEPIEVWKLVFEHPQDVPAIRDAIRSHPAVREIFEYDIPFAKRYLIDKGLVPMEGGEELKLLAFAIATFYHEGDEFAEGEILMISYADESGAKVITWKKIDLPYVEVVSTEREAIKRFLQVLREKDPDVLLTYNGDNFDFAYIKKRCEKLGLKFTIGRDGSEPKIQRMGDRFAVEVKGRIHLDLAPVVRHTIRLPTYTLEAVYEAVFGKKKEKVYAEEIAEAWKSEEGLKRVAQYSMEDARATYELGREFFPMEVELAKLIGQSVWDVSRSSTGNLVEWYLLRVAYERNELAPNKPGGEEYQRRMRSSYIGGYVKEPEKGLWESIAYLDFRSSAGSIIVTHNVSPDTLEKECKNYDVAPIVGYRFCKDFKGFIPSILEDLIETRQKVKRKMKATIDPIEKKMLDYRQRALKILANSYYGYQGYPKARWYSKECAESVTAWGRHYIETTIKEAEKFGFKVLYADTDGFFATIPNEKPETIKSKAKKFLKHINEKLPGMLELEYEGFYLRGFFVTKKKYALIDEDGHITTRGLEVVRRDWSEIAKETQAKVLEVILREGSIEKAAGIVKKVVEDLANYRVPVEKLIIHEQITRKLKDYKATGPHVAIAKRLQARGRKVKPGTIISYVVLKGSKKISDRVILFDEYDSSRHKYDPDYYIHNQVLPAVLRILEAFGYKEKDLEYQ

SEQ ID NO: 689 - protein, 773 aa, unidentified
  REGION 1..773: note = Description of Unknown: Synthetic polypeptide
MILDTDYITENGKPVIRIFKKEKGEFKIEYDRNFEPYIYALLEDDESIEDIKKITGERHGKKVRIIRVEKVKKKFLGEPIEVWKLVFEHPQDVPAIRDAIRSHPAVREIFEYDIPFAKRYLIDKGLVPMEGGEELKLLAFAIYTFYHEGDEFAEGEILFISYADESGAKVITWKKIDLPYVEVVSTEREAIKRFLQVLREKDPDVLLTYNGDNFDFAYIKKRCEKLGLKFTIGRDGSEPKIQRMGDRFAVEVKGRIHLDLAPVVRHTIRLPTYTLEAVYEAVFGKKKEKVYAEEIAEAWKSEEGLKRVAQYSMEDARATYELGREFFPMEVELAKLIGQSVWDVSRSSTGNLVEWYLLRVAYERNELAPNKPGGEEYQRRMRSSYIGGYVKEPEKGLWESIAYLDFRSSAGSIIVTHNVSPDTLEKECKNYDVAPIVGYRFCKDFKGFIPSILEDLIETRQKVKRKMKATIDPIEKKMLDYRQRALKILANSYYGYQGYPKARWYSKECAESVTAWGRHYIETTIKEAEKFGFKVLYADTDGFFATIPNEKPETIKSKAKKFLKHINEKLPGMLELEYEGFYLRGFFVTKKKYALIDEDGHITTRGLEVVRRDWSEIAKETQAKVLEVILREGSIEKAAGIVKKVVEDLANYRVPVEKLIIHEQITRELKDYKATGPHVAIAKRLQARGIKVKPGTIISYVVLKGSKKISDRVILFDEYDSSRHKYDPDYYIHNQVLPAVLRILEAFGYKEKDLEYQRMKQTGLGAWLKMGKK

SEQ ID NO: 690 - protein, 773 aa, unidentified
  REGION 1..773: note = Description of Unknown: Synthetic polypeptide
MILDTDYITENGKPVIRIFKKEKGEFKIEYDRNFEPYIYALLEDDESIEDIKKITGERHGKKVRIIRVEKVKKKFLGEPIEVWKLVFEHPQDYPAIRDAIRSHPAVREIFEYDIPFAKRYLIDKGLVPMEGGEELKLLAFAIATFYHEGDEFAEGEILMISYADESGAKVITWKKIDLPYVEVVSTEREAIKRFLQVLREKDPDVLLTYNGDNFDFAYIKKRCEKLGLKFTIGRDGSEPKIQRMGDRFAVEVKGRIHLDLAPVVRHTIRLPTYTLEAVYEAVFGKKKEKVYAEEIAEAWKSEEGLKRVAQYSMEDARATYELGREFFPMEVELAKLIGQSVWDVSRSSTGNLVEWYLLRVAYERNELAPNKPGGEEYQRRMRSSYIGGYVKEPEKGLWESIAYLDFRSSAGSIIVTHNISPDTLEKECKNYDVAPIVGYRFCKDFKGFIPSILEDLIETRQKVKRKMKATIDPIEKKMLDYRQRALKILANSYYGYRGYPKARWYNKEAAESVTAWGRHYIETTIKEAEKFGFKVLYADTDGFFATIPNEKPETIKSKAKKFLKHINEKLPGMLELEYEGFYLRGFFVTKKKYALIDEDGHITTRGLEVVRRDWSEIAKETQAKVLEVILREGSIEKAAGIVKKVVEDLANYRVPVEKLIIHEQITRELKRYKATGPHVAIAKRLQARGIKVKPGTIISYVVLKGSKKISDRVILFDEYDSSRHKYDPDYYIHNQVLPAVLRILEAFGYKEKDLEYQRMKQTGLGAWLKMGKK

SEQ ID NO: 691 - protein, 773 aa, unidentified
  REGION 1..773: note = Description of Unknown: Synthetic polypeptide
MILDTDYIRENGKPVIRIFKKEKGEFKIEYDRNFEPYIYALLEDDESIEDIKKITGERHGKKVRIIRVEKVKKKFLGEPIEVWKLVFEHPQDVPAIRDAIRSHPAVREIFEYDIPFAKRYLIDKGLVPMEGGEELKLLAFNIATFYHEGDEFAEGEILMISYADESGAKVITWKKIDLPYVEVVSTEREAIKRFLQVLREKDPDVLLTYNGDNFDFAYIKKRCEKLGLKFTIGRDGSEPKIQRMGDRFAVEVKGRIHLDLAPVVRHTIRLPTYTLEAVYEAVFGKKKEKVYAEEIAEAWKSEEGLKRVAQYSMEDARATYELGREFFPLEVELAKLIGQSVWDVSRSSTGNLVEWYLLRVAYERNELAPNKPGGEEYQRRMRSSYIGGYVKEPEKGLWESIAYLDFRSSAGSIIVTHNVSPDTLEKECKNYDVAPIVGYRFCKDFKGFIPSILEDLIETRQKVKRKMKATIDPIEKKMLDYRQRALKILANSYYGYQGYPKARWYSKECAESVTAWGRHYIETTIKEAEKFGFKVLYADTDGFFATIPNEKPETIKSKAKKFLKHINEKLPGMLELEYEGFYLRGFFVTKKKYALIDEDGHITTRGLEVVRRDWSEIAKETQAKVLEVILREGSIEKAAGIVKKVVEDLANYRVPVEKLIIHEQITRELKRYKATGPHVAIAKRLQARGIKVKPGTIISYVVLKGSKKISDRVILFDEYDSSRHKYDPDYYIHNQVLPAVLRILEAFGYKEKDLEYQRMKQTGLGAWLKMGKK

SEQ ID NO: 692 - protein, 773 aa, unidentified
  REGION 1..773: note = Description of Unknown: Synthetic polypeptide
MILDTDYITENGKPVIRIFKKEKGEFKIEYDRNFEPYIYALLEDDESIEDIKKITGERHGKKVRIIRVEKVKKKFLGEPIEVWKLVFEHPQDYPAIRDAIRSHPAVREIFEYDIPFAKRYLIDKGLVPMEGGEELKLLAFAIATFYHEGDEFAEGEILMISYADESGAKVITWKKIDLPYVEVVSTEREAIKRFLQVLREKDPDVLLTYNGDNFDFAYIKKRCEKLGLKFTIGRDGSEPKIQRMGDRFAVEVKGRIHLDLAPVVRHTIRLPTYTLEAVYEAVFGKKKEKVYAEEIAEAWKSEEGLKRVAQYSMEDARATYELGREFFPMEVELAKLIGQSVWDVSRSSTGNLVEWYLLRVAYERNELAPNKPGGEEYQRRMRSSYIGGYVKEPEKGLWESIAYLDFRSSAGSIIVTHNISPDTLEKECKNYDVAPIVGYRFCKDFKGFIPSILEDLIETRQKVKRKMKATIDPIEKKMLDYRQRALKILANSYYGYRGYPKARWYSKEIAESVTAWGRHYIETTIKEAEKFGFKVLYADTDGFFATIPNEKPETIKSKAKKFLKHINEKLPGMLELEYEGFYLRGFFVTKKKYALIDEDGHITTRGLEVVRRDWSEIAKETQAKVLEVILREGSIEKAAGIVKKVVEDLANYRVPVEKLIIHEQITRELKRYKATGPHVAIAKRLQARGIKVKPGTIISYVVLKGSKKISDRVILFDEYDSSRHKYDPDYYIHNQVLPAVLRILEAFGYKEKDLEYQRMKQTGLGAWLKMGKK

SEQ ID NO: 693 - protein, 773 aa, unidentified
  REGION 1..773: note = Description of Unknown: Synthetic polypeptide
MILDTDYITENGKPVIRIFKKEKGEFKIEYDRNFEPYIYALLEDDESIEDIKKITGERHGKKVRIIRVEKVKKKFLGEPIEVWKLVFEHPQDYPAIRDAIRSHPAVREIFEYDIPFAKRYLIDKGLVPMEGGEELKLLAFAIATFYHEGDEFAEGEILMISYADESGAKVITWKKIDLPYVEVVSTEREAIKRFLQVLREKDPDVLLTYNGDNFDFAYIKKRCEKLGLKFTIGRDGSEPKIQRMGDRFAVEVKGRIHLDLAPVVRHTIRLPTYTLEAVYEAVFGKKKEKVYAEEIAEAWKSEEGLKRVAQYSMEDARATYELGREFFPMEVELAKLIGQSVWDVSRSSTGNLVEWYLLRVAYERNELAPNKPGGEEYQRRMRSSYIGGYVKEPEKGLWESIAYLDFRSSAGSIIVTHNVSPDTLEKECKNYDVAPIVGYRFCKDFKGFIPSILEDLIETRQKVKRKMKATIDPIEKKMLDYRQRALKILANSYYGYQDYPKARWYSKECAESVTAWGRHYIETTIKEAEKFGFKVLYADTDGFFATIPNEKPETIKSKAKKFLKHINEKLPGMLELEYEGFYLRGFFVTKKKYALIDEDGHITTRGLEVVRRDWSEIAKETQAKVLEVILREGSIEKAAGIVKKVVEDLANYRVPVEKLIIHEQITRELKRYKATGPHVAIAKRLQARGIKVKPGTIISYVVLKGSKKISDRVILFDEYDSSRHKYDPDYYIHNQVLPAVLRILEAFGYKEKDLEYQRMKQTGLGAWLKMGKK

SEQ ID NO: 694 - protein, 773 aa, unidentified
  REGION 1..773: note = Description of Unknown: Synthetic polypeptide
MILDTDYITENGKPVIRIFKKEKGEFKIEYDRNFEPYIYALLEDDESIEDIKKITGERHGKKVRIIRVEKVKKKFLGEPIEVWKLVFEHPQDYPAIRDAIRSHPAVREIFEYDIPFAKRYLIDKGLVPMEGGEELKLLAFAIATFYHEGDEFAEGEILMISYADESGAKVITWKKIDLPYVEVVSTEREAIKRFLQVLREKDPDVLLTYNGDNFDFAYIKKRCEKLGLKFTIGRDGSEPAIQRMGDRFAVEVKGRIHLDLAPVVRHTIRLPTYTLEAVYEAVFGKKKEKVYAEEIAEAWKSEEGLARVAQYSMEDARATYELGREFFPMEVELAKLIGQSVWDVSRSSTGNLVEWYLLRVAYERNELAPNKPGGEEYQRRMRSSYIGGYVKEPEKGLWESIAYLDFRSSAGSIIVTHNVSPDTLEKECKNYDVAPIVGYRFCKDFKGFIPSILEDLIETRQKVKRKMRATIDPIEKKMLDYRQRALKILANSYYGYQGYPKARWYSKECAESVTAWGRHYIETTIKEAEKFGFKVLYADTDGFFATIPNEKPETIKSKAKKFLKHINEKLPGMLELEYEGFYLRGFFVTKKKYALIDEDGHITTRGLEVVRRDWSEIAKETQAKVLEVILREGSIEKAAGIVKKVVEDLANYRVPVEKLIIHEQITRELKRYKATGPHVAIAKRLQARGIKVKPGTIISYVVLKGSKKISDRVILFDEYDSSRHKYDPDYYIHNQVLPAVLRILEAFGYKEKDLEYQRMKQTGLGAWLKMGKK

SEQ ID NO: 695 - protein, 773 aa, unidentified
  REGION 1..773: note = Description of Unknown: Synthetic polypeptide
MILDTDYITENGKPVIRIFKKEKGEFKIEYDRNFEPYIYALLEDDESIEDIKKITGERHGKKVRIIRVEKVKKKFLGEPIEVWKLVFEHPQDVPAIRDAIRSHPAVREIFEYDIPFAKRYLIDKGLVPMEGGEELKLLAFNIATFYHEGDEFAEGEILMISYADESGAKVITWKKIDLPYVEVVSTEREAIKRFLQVLREKDPDVLLTYNGDNFDFAYIKKRCEKLGLKFTIGRDGSEPKIQRMGDRFAVEVKGRIHLDLAPVVRHTIRLPTYTLEAVYEAVFGKKKEKVYAEEIAEAWKSEEGLKRVAQYSMEDARATYELGREFFPLEVELAKLIGQSVWDVSRSSTGNLVEWYLLRVAYERNELAPNKPGGEEYQRRMRSSYIGGYVKEPEKGLWESIAYLDFRSSAGSIIVTHNVSPDTLEKECKNYDVAPIVGYRFCKDFKGFIPSILEDLIETRQKVKRKMKATIDPIEKKMLDYRQRALKILANSYYGYQGYPKARWYSKECAESVTAWGRHYIETTIKEAEKFGFKVLYADTDGFFATIPNEKPETIKSKAKKFLKHINEKLPGMLELEYEGFYLRGFFVTKKKYALIDEDGHITTRGLEVVRRDWSEIAKETQAKVLEVILREGSIEKAAGIVKKVVEDLANYRVPVEKLIIHEQITRELKRYKATGPHVAIAKRLQARGIKVKPGTIISYVVLKGSKKISDRVILFDEYDSSRHKYDPDYYIHNQVLPAVLRILEAFGYKEKDLEYQRMKQTGLGARLKMGKK

SEQ ID NO: 696 - protein, 773 aa, unidentified
  REGION 1..773: note = Description of Unknown: Synthetic polypeptide
MILDTDYITENGKPVIRIFKKEKGEFKIEYDRNFEPYIYALLEDDESIEDIKKITGERHGKKVRIIRVEKVKKKFLGEPIEVWKLVFEHPQDYPAIRDAIRSHPAVREIFEYDIPFAKRYLIDKGLVPMEGGEELKLLAFAIATFYHEGDEFAEGEILMISYADESGAKVITWKKIDLPYVEVVSTEREAIKRFLQVLREKDPDVLLTYNGDNFDFAYIKKRCEKLGLKFTIGRDGSEPQIQRMGDRFAVEVKGRIHLDLAPVVRHTIRLPTYTLEAVYEAVFGKKKEKVYAEEIAEAWKSEEGLKRVAQYSVEDARATYELGREFFPMEVELAKLIGQSVWDVSRSSTGNLVEWYLLRVAYERNELAPNQPGGEEYQRRMRSSYIGGYVKEPEKGLWESIAYLDFRSSAGSIIVTHNVSPDTLEKECKNYDVAPIVGYRFCKDFKGFIPSILEDLIETRQKVKRKMKATIDPIEKKMLDYRQRALKILANSYYGYQGYPKARWYSKECAESVTAWGRHYIETTIKEAEKFGFKVLYADTDGFFATIPNEKPETIKSKAKKFLKHINEKLPGMLELEYEGFYLRGFFVTKKKYALIDEDGHITTRGLEVVRRDWSEIAKETQAKVLEVILREGSIEKAAGIVKKVVEDLANYRVPVEKLIIHEQITRELKRYKATGPHVAIAKRLQARGIKVKPGTIISYVVLKGSKKISDRVILFDEYDSSRHKYDPDYYIHNQVLPAVLRILEAFGYKEKDLEYQRMKQTGLGAWLKMGKK

SEQ ID NO: 697 - protein, 773 aa, unidentified
  REGION 1..773: note = Description of Unknown: Synthetic polypeptide
MILDTDYITENGKPVIRIFKKEKGEFKIEYDRNFEPYIYALLEDDESIEDIKKITGERHGKKVRIIRVEKVKKKFLGEPIEVWKLVFEHPQDYPAIRDAIRSHPAVREIFEYDIPFAKRYLIDKGLVPMEGGEELKLLAFAIATFYHEGDEFAEGEILMISYADESGAKVITWKKIDLPYVEVVSTEREAIKRFLQVLREKDPDVLLTYNGDNFDFAYIKKRCEKLGLKFTIGRDGSEPKIQRMGDRFAVEVKGRIHLDLAPVVRHTIRLPTYTLEAVYEAVFGKKKEKVYAEEIAEAWKSEEGLKRVAQYSMEDARATYELGREFFPMEVELAKLIGQSVWDVSRSSTGNLVEWYLLRVAYERNELAPNYPGGEEYQRRMRSSYIGGYVKEPEKGLWESIAYLDFRSSAGSIIVTHNVSPDTLEKECKNYDVAPIVGYRFCKDFKGFIPSILEDLIETRQKVKRKMKATIDPIEKKMLDYRQRALKILANSYYGYQGYPKARWYSKECAESVTAWGRHYIETTIKEAEKFGFKVLYADTDGFFATIPNEKPETIKSKAKKFLKHINEKLPGMLELEYEGFYLRGFFVTKKKYALIDEDGHITTRGLEVVRRDWSEIAKETQAKVLEVILREGSIEKAAGIVKKVVEDLANYRVPVEKLIIHEQITRELKRYKATGPHVAIAKRLQARGIKVKPGTIISYVVLKGSKKISDRVILFDEYDSSRHKYDPDYYIHNQVLPAVLRILEAFGYKEKDLEYQRMKQTGLGAWLKMGKK

SEQ ID NO: 698 - protein, 773 aa, unidentified
  REGION 1..773: note = Description of Unknown: Synthetic polypeptide
FILDTDYITENGKPVIRIFKKEKGEFKIEYDRNFEPYIYALLEDDESIEDIKKITGERHGKKVRIIRVEKVKKKFLGEPIEVWKLVFEHPQDYPAIRDAIRSHPAVREIFEYDIPFAKRYLIDKGLVPYEGGEELKLLAFAIATFYHEGDEFAEGEILMISYADESGAKVITWKKIDLPYVEVVSTEREAIKRFLQVLREKDPDVLLTYNGDNFDFAYIKKRCEKLGLKFTIGRDGSEPKIQRMGDRFAVEVKGRIHLDLAPVVRHTIRLPTYTLEAVYEAVFGKKKEKVYAEEIAEAWKSEEGLKRVAQYSMEDARATYELGREFFPMEVELAKLIGQSVWDVSRSSTGNLVEWYLLRVAYERNELAPNKPGGEEYQRRMRSSYIGGYVKEPEKGLWESIAYLDFRSSAGSIIVTHNVSPDTLEKECKNYDVAPIVGYRFCKDFKGFIPSILEDLIETRQKVKRKMKATIDPIEKKMLDYRQRALKILANSYYGYQGYPKARWYSKECAESVTAWGRHYIETTIKEAEKFGFKVLYADTDGFFATIPNEKPETIKSKAKKFLKHINEKLPGMLELEYEGFYLRGFFVTKKKYALIDEDGHITTRGLEVVRRDWSEIAKETQAKVLEVILREGSIEKAAGIVKKVVEDLANYRVPVEKLIIHEQITRELKRYKATGPHVAIAKRLQARGIKVKPGTIISYVVLKGSKKISDRVILFDEYDSSRHKYDPDYYIHNQVLPAVLRILEAFGYKEKDLEYQRMKQTGLGAWLKMGKK

SEQ ID NO: 699 - protein, 773 aa, unidentified
  REGION 1..773: note = Description of Unknown: Synthetic polypeptide
MILDTDYITENGKPVIRIFKKEKGEFKIEYDRNFEPYIYALLEDDESIEDIKKITGERHGKKVRIIRVEKVKKKFLGEPIEVWKLVFEHPQDVPAIRDAIRSHPAVREIFEYDIPFAKRYLIDKGLVPMEGGEELKLLAFNIATFYHEGDEFAEGEILMISYADESGAKVITWKKIDLPYVEVVSTEREAIKRFLQVLREKDPDVLLTYNGDNFDFAYIKKRCEKLGLKFTIGRDGSEPKIQRMGDRFAVEVKGRIHLDLALVVRHTIRLPTYTLEAVYEAVFGKKKEKVYAEEIAEAWKSEEGLKRVAQYSMEDARATYELGREFFPLEVELAKLIGQSVWDVSRSSTGNLVEWYLLRVAYERNELAPNKPGGEEYQRRMRSSYIGGYVKEPEKGLWESIAYLDFRSSAGSIIVTHNVSPDTLEKECKNYDVAPIVGYRFCKDFKGFIPSILEDLIETRQKVKRKMKATIDPIEKKMLDYRQRALKILANSYYGYQGYPKARWYSKECAESVTAWGRHYIETTIKEAEKFGFKVLYADTDGFFATIPNEKPETIKSKAKKFLKHINEKLPGMLELEYEGFYLRGFFVTKKKYALIDEDGHITTRGLEVVRRDWSEIAKETQAKVLEVILREGSIEKAAGIVKKVVEDLANYRVPVEKLIIHEQITRELKRYKATGPHVAIAKRLQARGIKVKPGTIISYVVLKGSKKISDRVILFDEYDSSRHKYDPDYYIHNQVLPAVLRILEAFGYKEKDLEYQRMKQTGLGAWLKMGKK

SEQ ID NO: 700 - protein, 773 aa, unidentified
  REGION 1..773: note = Description of Unknown: Synthetic polypeptide
MILDTDYITENGKPVIRIFKKEKGEFKIEYDRNFEPYIYALLEDDESIEDIKKITGERHGKKVRIIRVEKVKKKFLGEPIEVWKLVFEHPQDVPAIRDAIRSHPAVREIFEYDIPFAKRYLIDKGLVPMEGGEELKLLAFNIATFYHEGDEFAEGEILMISYADESGAKVITWKKIDLPYVEVVSTEREAIKRFLQVLREKDPDVLLTYNGDNFDFAYIKKRCEKLGLKFTIGRDGSEPKIQRMGDRFAVEVKGRIHLDLAPVVRHTIRLPTYTLEAVYEAVFGKKKEKVYAEEIAEAWKSEEGLKRVAQYSVEDARATYELGREFFPLEVELAKLIGQSVWDVSRSSTGNLVEWYLLRVAYERNELAPNKPGGEEYQRRMRSSYIGGYVKEPEKGLWESIAYLDFRSSAGSIIVTHNVSPDTLEKECKNYDVAPIVGYRFCKDFKGFIPSILEDLIETRQKVKRKMKATIDPIEKKMLDYRQRALKILANSYYGYQGYPKARWYSKECAESVTAWGRHYIETTIKEAEKFGFKVLYADTDGFFATIPNEKPETIKSKAKKFLKHINEKLPGMLELEYEGFYLRGFFVTKKKYALIDEDGLITTRGLEVVRRDWSEIAKETQAKVLEVILREGSIEKAAGIVKKVVEDLANYRVPVEKLIIHEQITRELKRYKATGPHVAIAKRLQARGIKVKPGTIISYVVLKGSKKISDRVILFDEYDSSRHKYDPDYYIHNQVLPAVLRILEAFGYKEKDLEYQRDKQTGLGAWLKMGKK

SEQ ID NO: 701 - protein, 773 aa, unidentified
  REGION 1..773: note = Description of Unknown: Synthetic polypeptide
MILDTDYITENGKPVIRIFKKEKGEFKIEYDRNFEPYIYAQLEDDESIEDIKKITGERHGKKVRIIRVEKVKKKFLGEPIEVWKLVFEHPQDYPAIRDAIRSHPAVREIFEYDIPFAKRYLIDKGLVPMEGGEELKLLAFAIATFYHEGDEFAEGEILMISYADESGAKVITWKKIDLPYVEVVSTEREAIKRFLQVLREKDPDVLLTYNGDNFDFAYIKKRCEKLGLKFTIGRDGSEPKIQRMGDRFAVEVKGRIHLDLAPVVRHTIRLPTYTLEAVYEAVFGKKKEKVYAEEIAEAWKSEEGLKRVAQYSMEDARATYELGREFFPMEVELAKLIGQSVWDVSRSSTGNLVEWYLLRVAYERNELAPNKPGGEEYQRRMRSSYIGGYVKEPEKGLWESIAYLDFRSSAGSIIVTHNVSPDTLEKECKNYDVAPIVGYRFCKDFKGFIPSILEDLIETRQKVKRKMKATIDPIEKKMLDYRQRALKILANSYYGYQGYPKARWYSKECAESVTAWGRHYIETTIKEAEKFGFKVLYADTDGFFATIPNEKPETIKSKAKKFLKHINEKLPGMLELEYEGFYLRGFFVTKKKYALIDEDGHITTRGLEVVRRDWSEIAKETQAKVLEVILREGSIEKAAGIVKKVVEDLANYRVPVEKLIIHEQITRELKRYKATGPHVAIAKRLQARGIKVKPGTIISYVVLKGSKKISDRVILFDEYDSSRHKYDPDYYIHNQVLPAVLRILEAFGYKEKDLEYQRMKQTGLGAWLKMGKK

SEQ ID NO: 702 - protein, 773 aa, unidentified
  REGION 1..773: note = Description of Unknown: Synthetic polypeptide
MILDTDYITENGKPVIRIFKKEKGEFKIEYDRNFEPYIYALLEDDESIEDIKKITGERHGKKVRIIRVEKVKKKFLGEPIEVWKLVFEHPQDVPAIRDAIRSHPAVREIFEYDIPFAKRYLIDKGLVPMEGGEELKLLAFNIATFYHEGDEFAEGEILMISYADESGAKVITWKKIDLPYVEVVSTEREAIKRFLQVLREKDPDVLLTYNGDNFDFAYIKKRCEKLGLKFTIGRDGSEPKIQRMGDRFAVEVKGRIHLDLAPVVRHTIRLPTYTLEAVYEAVFGKKKEKVYAEEIAEAWKSEEGLKRVAQYSMEDARATYELGREFFPLEVELAKLIGQSVWDVSRSSTGNLVEWYLLRVAYERNELAPNQPGGEEYQRRMRSSYIGGYVKEPEKGLWESIAYLDFRSSAGSIIVTHNVSPDTLEKECKNYDVAPIVGYRFCKDFKGFIPSILEDLIETRQKVKRKMKATIDPIEKKMLDYRQRALKILANSYYGYQGYPKARWYSKECAESVTAWGRHYIETTIKEAEKFGFKVLYADTDGFFATIPNEKPETIKSKAKKFLKHINEKLPGMLELEYEGFYLRGFFVTKKKYALIDEDGIITTRGLEVVRRDWSEIAKETQAKVLEVILREGSIEKAAGIVKKVVEDLANYRVPVEKLIIHEQITRELKRYKATGPHVAIAKRLQARGIKVKPGTIISYVVLKGSKKISDRVILFDEYDSSRHKYDPDYYIHNQVLPAVLRILEAFGYKEKDLEYQRMKQTGLGAWLKMGKK

SEQ ID NO: 703 - protein, 773 aa, unidentified
  REGION 1..773: note = Description of Unknown: Synthetic polypeptide
MILDTDYITENGKPVIRIFKKEKGEFKIEYDRNFEPYIYALLEDDESIEDIKKITGERHGKKVRIIRVEKVKKKFLGEPIEVWKLVFEHPQDYPAIRDAIRSHPAVREIFEYDIPFAKRYLIDKGLVPMEGGEELKLLAFAIATFYHEGDEFAEGEILMISYADESGAKVITWKKIDLPYVEVVSTEREAIKRFLQVLREKDPDVLLTYNGDNFDFAYIKKRCEKLGLKFTIGRDGSEPKIQRMGDRFAVEVKGRIHLDLAPVVRHTIRLPTYTLEAVYEAVFGKKKEKVYAEEIAEAWKSEEGLKRVAQYSMEDARATYELGREFFPMEVELAKLIGQSVWDVSRSSTGNLVEWYLLRVAYERNELAPNKPGGEEYQRRMRSSYIGGYVKEPEKGLWESIAYLDFRSSAGSIIVTHNVSPDTLEKECKNYDVAPIVGYRFCKDFKGFIPSILEDLIETRQKVKRKMKATIDPIEKKMLDYRQRALKILANSYYGYFGYPKARWYSKEAAESVTAWGRHYIETTIKEAEKFGFKVLYADTDGFFATIPNEKPETIKSKAKKFLKHINEKLPGMLELEYEGFYLRGFFVTKKKYALIDEDGHITTRGLEVVRRDWSEIAKETQAKVLEVILREGSIEKAAGIVKKVVEDLANYRVPVEKLIIHEQITRELKRYKATGPHVAIAKRLQARGIKVKPGTIISYVVLKGSKKISDRVILFDEYDSSRHKYDPDYYIHNQVLPAVLRILEAFGYKEKDLEYQRMKQTGLGAWLKMGKK

SEQ ID NO: 704 - protein, 773 aa, unidentified; identical to SEQ ID NO: 49
  REGION 1..773: note = Description of Unknown: Synthetic polypeptide

SEQ ID NO: 705 - protein, 773 aa, unidentified
  REGION 1..773: note = Description of Unknown: Synthetic polypeptide
LILDTDYITENGKPVIRIFKKEKGEFKIEYDRNFEPYIYALLEDDESIEDIKKITGERHGKKVRIIRVEKVKKKFLGEPIEVWKLVFEHPQDYPAIRDAIRSHPAVREIFEYDIPFAKRYLIDKGLVPLEGGEELKLLAFAIATFYHEGDEFAEGEILMISYADESGAKVITWKKIDLPYVEVVSTEREAIKRFLQVLREKDPDVLLTYNGDNFDFAYIKKRCEKLGLKFTIGRDGSEPKIQRMGDRFAVEVKGRIHLDLAPVVRHTIRLPTYTLEAVYEAVFGKKKEKVYAEEIAEAWKSEEGLKRVAQYSMEDARATYELGREFFPMEVELAKLIGQSVWDVSRSSTGNLVEWYLLRVAYERNELAPNKPGGEEYQRRMRSSYIGGYVKEPEKGLWESIAYLDFRSSAGSIIVTHNVSPDTLEKECKNYDVAPIVGYRFCKDFKGFIPSILEDLIETRQKVKRKMKATIDPIEKKMLDYRQRALKILANSYYGYQGYPKARWYSKECAESVTAWGRHYIETTIKEAEKFGFKVLYADTDGFFATIPNEKPETIKSKAKKFLKHINEKLPGMLELEYEGFYLRGFFVTKKKYALIDEDGHITTRGLEVVRRDWSEIAKETQAKVLEVILREGSIEKAAGIVKKVVEDLANYRVPVEKLIIHEQITRELKRYKATGPHVAIAKRLQARGIKVKPGTIISYVVLKGSKKISDRVILFDEYDSSRHKYDPDYYIHNQVLPAVLRILEAFGYKEKDLEYQRMKQTGLGAWLKMGKK

SEQ ID NO: 706 - protein, 773 aa, unidentified
  REGION 1..773: note = Description of Unknown: Synthetic polypeptide
MILDTDYITENGKPVIRIFKKEKGEFKIEYDRNFEPYIYALLEDDESIEDIKKITGERHGKKVRIIRVEKVKKKFLGEPIEVWKLVFEHPQDVPAIRDAIRSHPAVREIFEYDIPFAKRYLIDKGLVPMEGGEELKLLAFNIATFYHEGDEFAEGEILMISYADESGAKVITWKKIDLPYVEVVSTEREAIKRFLQVLREKDPDVLLTYNGDNFDFAYIKKRCEKLGLKFTIGRDGSEPKIQRMGDRFAVEVKGRIHLDLAPVVRHTIRLPTYTLEAVYEAVFGKKKEKVYAEEIAEAWKSEEGLKRVAQYSVEDARATYELGREFFPLEVELAKLIGQSVWDVSRSSTGNLVEWYLLRVAYERNELAPNKPGGEEYQRRMRSSYIGGYVKEPEKGLWESIAYLDFRSSAGSIIVTHNVSPDTLEKECKNYDVAPIVGYRFCKDFKGFIPSILEDLIETRQKVKRKMKATIDPIEFKMLDYRQRALKILANSYYGYQGYPKARWYSKECAESVTAWGRHYIETTIKEAEKFGFKVLYADTDGFFATIPNEKPETIKSKAKKFLKHINEKLPGMLELEYEGFYLRGFFVTKKKYALIDEDGLITTRGLEVVRRDWSEIAKETQAKVLEVILREGSIEKAAGIVKKVVEDLANYRVPVEKLIIHEQITRELKRYKATGPHVAIAKRLQARGIKVKPGTIISYVVLKGSKKISDRVILFDEYDSSRHKYDPDYYIHNQVLPAVLRILEAFGYKEKDLEYQRMKQTGLGAWLKMGKK

SEQ ID NO: 707 - protein, 773 aa, unidentified
  REGION 1..773: note = Description of Unknown: Synthetic polypeptide
MILDTDYIDENGKPVIRIFKKEKGEFKIEYDRNFEPYIYALLEDDESIEDIKKITGERHGKKVRIIRVEKVKKKFLGEPIEVWKLVFEHPQDVPAIRDAIRSHPAVREIFEYDIPFAKRYLIDKGLVPMEGGEELKLLAFNIATFYHEGDEFAEGEILMISYADESGAKVITWKKIDLPYVEVVSTEREAIKRFLQVLREKDPDVLLTYNGDNFDFAYIKKRCEKLGLKFTIGRDGSEPKIQRMGDRFAVEVKGRIHLDLAPVVRHTIRLPTYTLEAVYEAVFGKKKEKVYAEEIAEAWKSEEGLKRVAQYSMEDARATYELGREFFPLEVELAKLIGQSVWDVSRSSTGNLVEWYLLRVAYERNELAPNKPGGEEYQRRMRSSYIGGYVKEPEKGLWESIAYLDFRSSAGSIIVTHNVSPDTLEKECKNYDVAPIVGYRFCKDFKGFIPSILEDLIETRQKVKRKMKATIDPIEKKMLDYRQRALKILANSYYGYQGYPKARWYSKECAESVTAWGRHYIETTIKEAEKFGFKVLYADTDGFFATIPNEKPETIKSKAKKFLKHINEKLPGMLELEYEGFYLRGFFVTKKKYALIDEDGHITTRGLEVVRRDWSEIAKETQAKVLEVILREGSIEKAAGIVKKVVEDLANYRVPVEKLIIHEQITRELKRYKATGPHVAIAKRLQARGIKVKPGTIISYVVLKGSKKISDRVILFDEYDSSRHKYDPDYYIHNQVLPAVLRILEAFGYKEKDLEYQRMKQTGLGAWLKMGKK

SEQ ID NO: 708 - protein, 773 aa, unidentified
  REGION 1..773: note = Description of Unknown: Synthetic polypeptide
MILDTDYITENGKPVIRIFKKEKGEFKIEYDRNFEPYIYALLEDDESIEDIKKITGERHGKKVRIIRVEKVKKKFLGEPIEVWKLVFEHPQDYPAIRDAIRSHPAVREIFEYDIPFAKRYLIDKGLVPMEGGEELKLLAFAIATFYHEGDEFAEGEILMISYADESGAKVITWKKIDLPYVEVVSTEREAIKRFLQVLREKDPDVLLTYNGDNFDFAYIKKRCEKLGLKFTIGRDGSEPKIQRMGDRFAVEVKGRIHLDLAPVVRHTIRLPTYTLEAVYEAVFGKKKEKVYAEEIAEAWKSEEGLKRVAQYSMEDARATYELGREFFPMEVELAKLIGQSVWDVSRSSTGNLVEWYLLRVAYERNELAPNKPGGEEYQRRMRSSYIGGYVKEPEKGLWESIAYLDFRSSAGSIIVTHNVSPDTLEKECKNYDVAPIVGYRFCKDFKGFIPSILEDLIETRQKVKRKMKATIDPIEKKMLDYRQRALKILANSYYGYQGYPKARWYSKECAESVTAWGRHYIETTIKEAEKFGFKVLYADTDGFFATIPNEKPETIKSKAKKFLKHINEKLPGMLELEYEGFYLRGFFVTKKKYALIDEDGHITTRGLEVVRRDWSEIAKETQAKVLEVILREGSIEKAAGIVKKVVEDLANYRVPVEKLIIHEQITRELKRYKATGPHVAIAKRLQARGIKVKPGTIISYVVLKGSKKISDRVILFDEYDSSRHKYDPDYYIHNQVLPAVLRILEAFGYKEKDLEYQRMKQTGLTAWLKMGKK

SEQ ID NO: 709 - protein, 773 aa, unidentified
  REGION 1..773: note = Description of Unknown: Synthetic polypeptide
MILDTDYITENGKPVIRIFKKEKGEFKIEYDRNFEPYIYALLEDDESIEDIKKITGERHGKKVRIIRVEKVKKKFLGEPIEVWKLVFEHPQDVPAIRDAIRSHPAVREIFEYDIPFAKRYLIDKGLVPMEGGEELKLLAFNIATFYHEGDEFAEGEILMISYADESGAKVITWKKIDLPYVEVVSTEREAIKRFLQVLREKDPDVLLTYNGDNFDFAYIKKRCEKLGLKFTIGRDGSEPKIQRMGDRFAVEVKGRIHLDLAPVVRHTIRLPTYTLEAVYEAVFGKKKEKVYAEEIAEAWKSEEGLKRVAQYSMEDARATYELGREFFPLEVELAKLIGQSVWDVSRSSTGNLVEWYLLRVAYERNELAPNKPGGEEYQRRMRSSYIGGYVKEPEKGLWESIAYLDFRSSAGSIIVTHNVSPDTLEKECKNYDVAPIVGYRFCKDFKGFIPSILEDLIETRQKVKRKMKATIDPIEKKMLDYRQRALKILANSYYGYQGYPKARWYSKECAESVTAWGRHYIETTIKEAEKFGFKVLYADTDGFFATIPNEKPETIKSKAKKFLKHINEKLPGMLELEYEGFYLRGFFVTKKIYALIDEDGHITTRGLEVVRRDWSEIAKETQAKVLEVILREGSIEKAAGIVKKVVEDLANYRVPVEKLIIHEQITRELKRYKATGPHVAIAKRLQARGIKVKPGTIISYVVLKGSKKISDRVILFDEYDSSRHKYDPDYYIHNQVLPAVLRILEAFGYKEKDLEYQRMKQTGLGAWLKMGKK

SEQ ID NO: 710 - protein, 773 aa, unidentified
  REGION 1..773: note = Description of Unknown: Synthetic polypeptide
MILDTDYITENGKPVIRIFKKEKGEFKIEYDRNFEPYIYALLEDDESIEDIKKITGERHGKKVRIIRVEKVKKKFLGEPIEVWKLVFEHPQDYPAIRDAIRSHPAVREIFEYDIPFAKRYLIDKGLVPMEGGEELKLLAFAIATFYHEGDEFAEGEILMISYADESGAKVITWKKIDLPYVEVVSTEREAIKRFLQVLREKDPDVLLTYNGDNFDFAYIKKRCEKLGLKFTIGRDGSEPKIQRMGDRFAVEVKGRIHLDLAPVVRHTIRLPTYTLEAVYEAVFGKKKEKVYAEEIAEAWKSEEGLIRVAQYSMEDARATYELGREFFPMEVELAKLIGQSVWDVSRSSTGNLVEWYLLRVAYERNELAPNKPGGEEYQRRMRSSYIGGYVKEPEKGLWESIAYLDFRSSAGSIIVTHNVSPDTLEKECKNYDVAPIVGYRFCKDFKGFIPSILEDLIETRQKVKRKMKATIDPIEKKMLDYRQRALKILANSYYGYQGYPKARWYSKECAESVTAWGRHYIETTIKEAEKFGFKVLYADTDGFFATIPNEKPETIKSKAKKFLKHINEKLPGMLELEYEGFYLRGFFVTKKKYALIDEDGHITTRGLEVVRRDWSEIAKETQAKVLEVILREGSIEKAAGIVKKVVEDLANYRVPVEKLIIHEQITRELKRYKATGPHVAIAKRLQARGIKVKPGTIISYVVLKGSKKISDRVILFDEYDSSRHKYDPDYYIHNQVLPAVLRILEAFGYKEKDLEYQRMKQTGLGAWLKMGKK

SEQ ID NO: 711 - protein, 773 aa, unidentified
  REGION 1..773: note = Description of Unknown: Synthetic polypeptide
MILDTDYITENGKPVIRIFKKEKGEFKIEYDRNFEPYIYALLEDDESIEDIKKITGERHGKKVRIIRVEKVKKKFLGEPIEVWKLVFEHPQDVPAIRDAIRSHPAVREIFEYDIPFAKRYLIDKGLVPMEGGEELKLLAFNIATFYHEGDEFAEGEILMISYADESGAKVITWKKIDLPYVEVVSTEREAIKRFLQVLREKDPDVLLTYNGDNFDFAYIKKRCEKLGLKFTIGRDGSEPKIQRMGDRFAVEVKGRIHLDLAPVVRHTIRLPTYTLEAVYEAVFGKKKEKVYAEEIAEAWKSEEGLKRVAQYSMEWARATYELGREFFPMEVELAKLIGQSVWDVSRSSTGNLVEWYLLRVAYERNELAPNKPGGEEYQRRMRSSYIGGYVKEPEKGLWESIAYLDFRSSAGSIIVTHNVSPDTLEKECKNYDVAPIVGYRFCKDFKGFIPSILEDLIETRQKVKRKMKATIDPIEKKMLDYRQRALKILANSYYGYQGYPKARWYSKECAESVTAWGRHYIETTIKEAEKFGFKVLYADTDGFFATIPNEKPETIKSKAKKFLKHINEKLPGMLELEYEGFYLRGFFVTKKKYALIDEDGHITTRGLEVVRRDWSEIAKETQAKVLEVILREGSIEKAAGIVKKVVEDLANYRVPVEKLIIHEQITRELKDYKATGPHVAIAKRLQARGIKVKPGTIISYVVLKGSKKISDRVILFDEYDSSRHKYDPDYYIHNQVLPAVLRILEAFGYKEKDLEYQRMKQTGLGAWLKMGKK

SEQ ID NO: 712 - protein, 773 aa, unidentified
  REGION 1..773: note = Description of Unknown: Synthetic polypeptide
MILDTDYITENGKPVIRIFKKEKGEFKIEYDRNFEPYIYALLEDDESIEDIKKITGERHGKKVRIIRVEKVKKKFLGEPIEVWKLVFEHPQDVPAIRDAIRSHPAVREIFEYDIPFAKRYLIDKGLVPMEGGEELKLLAFNIATFYHEGDEFAEGEILMISYADESGAKVITWKKIDLPYVEVVSTEREAIKRFLQVLREKDPDVLLTYNGDNFDFAYIKKRCEKLGLKFTIGRDGSEPKIQRMGDRFAVEVKGRIHLDLAPVVRHTIRLPTYTLEAVYEAVFGKKKEKVYAEEIAEAWKSEEGLKRVAQYSMEDARATYELGREFFPLEVELAKLIGQSVWDVSRSSTGNLVEWYLLRVAYERNELAPNKPGGEEYQRRMRSSYIGGYVKEPEKGLWESIAYLDFRSSAGSIIVTHNVSPDTLEKECKNYDVAPIVGYRFCKDFKGFIPSILEDLIETRQKVKRKMKATIDPIEKKMLDYRQRALKILANSYYGYQGYPKARWYSKECAESVTAWGRHYIETTIKEAEKFGFKVLYADTDGFFATIPNEKPETIKSKAKKFLKHINEKLPGMLELEYEGFYLRGFFVTKKKYALIDEDGIITTRGLEVVRRDWSEIAKETQAKVLEVILREGSIEKAAGIVKKVVEDLANYRVPVEKLIIHEQITRELKRYKATGPHVAIAKRLQARGIKVKPGTIISYVVLKGSKKISDRVILFDEYDSSRHKYDPDYYIHNQVLPAVLRILEAFGYKEKDLEYQRMKQTGLGAWLKMGKK

SEQ ID NO: 713 - protein, 773 aa, unidentified
  REGION 1..773: note = Description of Unknown: Synthetic polypeptide
MILDTDYITENGKPVIRIFKKEKGEFKIEYDRNFEPYIYALLEDDESIEDIKKITGERHGKKVRIIRVEKVKKKFLGEPIEVWKLVFEHPQDYPAIRDAIRSHPAVREIFEYDIPFAKRYLIDKGLVPMEGGEELKLLAFAIATFYHEGDEFAEGEILMISYADESGAKVITWKKIDLPYVEVVSTEREAIKRFLQVLREKDPDVLLTYNGDNFDFAYIKKRCEKLGLKFTIGRDGSEPKIQRMGDRFAVEVKGRIHLDLAPVVRHTIRLPTYTLEAVYEAVFGKKKEKVYAEEIAEAWKSEEGLKRVAQYSMEDARATYELGREFFPMEVELAKLIGQSVWDVSRSSTGNLVEWYLLRVAYERNELAPNKPGGEEYQRRMRSSYIGGYVKEPEKGLWESIAYLDFRSSAGSIIVTHNVSPDTLEKECKNYDVAPIVGYRFCKDFKGFIPSILEDLIETRQKVKRKMKATIDPIEKKMLDYRQRALKILANSYYGYFGYPKARWYNKEAAESVTAWGRHYIETTIKEAEKFGFKVLYADTDGFFATIPNEKPETIKSKAKKFLKHINEKLPGMLELEYEGFYLRGFFVTKKKYALIDEDGHITTRGLEVVRRDWSEIAKETQAKVLEVILREGSIEKAAGIVKKVVEDLANYRVPVEKLIIHEQITRELKRYKATGPHVAIAKRLQARGIKVKPGTIISYVVLKGSKKISDRVILFDEYDSSRHKYDPDYYIHNQVLPAVLRILEAFGYKEKDLEYQRMKQTGLGAWLKMGKK

SEQ ID NO: 714 - protein, 773 aa, unidentified
  REGION 1..773: note = Description of Unknown: Synthetic polypeptide
MILDTDYITENGKPVIRIFKKEKGEFKIEYDRNFEPYIYALLEDDESIEDIKKITGERHGKKVRIIRVEKVKKKFLGEPIEVWKLVFEHPQDYPAIRDAIRSHPAVREIFEYDIPFAKRYLIDKGLVPMEGGEELKLLAFAIATFYHEGDEFAEGEILMISYADESGAKVITWKKIDLPYVEVVSTEREAIKRFLQVLREKDPDVLLTYNGDNFDFAYIKKRCEKLGLKFTIGRDGSEPKIQRMGDRFAVEVKGRIHLDLAPVVRHTIRLPTYTLEAVYEAVFGKKKEKVYAEEIAEAWKSEEGLKRVAQYSMEDARATYELGREFFPMEVELAKLIGQSVWDVSRSSTGNLVEWYLLRVAYERNELAPNKPGGEEYQRRMRSSYIGGYVKEPEKGLWESIAYLDFRSSAGSIIVTHNVSPDTLEKECKNYDVAPIVGYRFCKDFKGFIPSILEDLIETRQKVKRKMKATIDPIEKKMLDYRQRALKILANSYYGYQGYPKARWYSKECAESVTAWGRHYIETTIKEAEKFGFKVLYADTDGFFATIPNEKPETIKSKAKKFLKHINEKLPGMLELEYEGFYLRGFFVTKKKYALIDEDGHITTRGLEVVRRDWSEIAKETQAKVLEVILREGSIEKAAGIVKKVVEDLANYRVPVEKLIIHEQITRELKRYKATGPHVAIAKRLQARGIKVKPGTIISYVVLKGSKKISDRVILFDEYDSSRHKYDPDYYIHRQVLPAVLRILEAFGYKEKDLEYQRMKQTGLGAWLKMGKK

SEQ ID NO: 715 - protein, 773 aa, unidentified
  REGION 1..773: note = Description of Unknown: Synthetic polypeptide
MILDTDYITENGKPVIRIFKKEKGEFKIEYDRNFEPYIYALLEDDESIEDIKKITGERHGKKVRIIRVEKVKKKFLGEPIEVWKLVFEHPQDYPAIRDAIRSHPAVREIFEYDIPFAKRYLIDKGLVPMEGGEELKLLAFAIATFYHEGDEFAEGEILMISYADESGAKVITWKKIDLPYVEVVSTEREAIKRFLQVLREKDPDVLLTYNGDNFDFAYIKKRCEKLGLKFTIGRDGSEPKIQRMGDRFAVEVKGRIHLDLAPVVRHTIRLPTYTLEAVYEAVFGKKKEKVYAEEIAEAWKSEEGLKRVAQYSMEDARATYELGREFFPMEVELAKLIGQSVWDVSRSSTGNLVEWYLLRVAYERNELAPNKPGGEEYQRRMRSSYIGGYVKEPEKGLWESIAYLDFRSSAGSIIVTHNVSPDTLEKECKNYDVAPIVGYRFCKDFKGFIPSILEDLIETRQKVKRKMKATIDPIEKKMLDYRQRALKILANSYYGYLGYPKARWYLKEIAESVTAWGRHYIETTIKEAEKFGFKVLYADTDGFFATIPNEKPETIKSKAKKFLKHINEKLPGMLELEYEGFYLRGFFVTKKKYALIDEDGHITTRGLEVVRRDWSEIAKETQAKVLEVILREGSIEKAAGIVKKVVEDLANYRVPVEKLIIHEQITRELKRYKATGPHVAIAKRLQARGIKVKPGTIISYVVLKGSKKISDRVILFDEYDSSRHKYDPDYYIHNQVLPAVLRILEAFGYKEKDLEYQRMKQTGLGAWLKMGKK

SEQ ID NO: 716 - protein, 758 aa, unidentified
  REGION 1..758: note = Description of Unknown: Synthetic polypeptide
MILDTDYITENGKPVIRIFKKEKGEFKIEYDRNFEPYIYALLEDDESIEDIKKITGERHGKKVRIIRVEKVKKKFLGEPIEVWKLVFEHPQDVPAIRDAIRSHPAVREIFEYDIPFAKRYLIDKGLVPMEGGEELKLLAFNIATFYHEGDEFAEGEILMISYADESGAKVITWKKIDLPYVEVVSTEREAIKRFLQVLREKDPDVLLTYNGDNFDFAYIKKRCEKLGLKFTIGRDGSEPKIQRMGDRFAVEVKGRIHLDLAPVVRHTIRLPTYTLEAVYEAVFGKKKEKVYAEEIAEAWKSEEGLKRVAQYSMEDARATYELGREFFPLEVELAKLIGQSVWDVSRSSTGNLVEWYLLRVAYERNELAPNKPGGEEYQRRMRSSYIGGYVKEPEKGLWESIAYLDFRSSAGSIIVTHNVSPDTLEKECKNYDVAPIVGYRFCKDFKGFIPSILEDLIETRQKVKRKMKATIDPIEKKMLDYRQRALKILANSYYGYQGYPKARWYSKECAESVTAWGRHYIETTIKEAEKFGFKVLYADTDGFFATIPNEKPETIKSKAKKFLKHINEKLPGMLELEYEGFYLRGFFVTKKKYALIDEDGHITTRGLEVVRRDWSEIAKETQAKVLEVILREGSIEKAAGIVKKVVEDLANYRVPVEKLIIHELITRELKRYKATGPHVAIAKRLQARGIKVKPGTIISYVVLKGSKKISDRVILFDEYDSSRHKYDPDYYIHNQVLPAVLRILEAFGYKEKDLEYQR

SEQ ID NO: 717 - protein, 773 aa, unidentified
  REGION 1..773: note = Description of Unknown: Synthetic polypeptide
MILDTDYITENGKPVIRIFKKEKGEFKIEYDRNFEPYIYALLEDDESIEDIKKITGERHGKKVRIIRVEKVKKKFLGEPIEVWKLVFEHPQDYPAIRDAIRSHPAVREIFEYDIPFAKRYLIDKGLVPMEGGEELKLLAFAIATFYHEGDEFAEGEILMISYADESGAKVITWKKIDLPYVEVVSTEREAIKRFLQVLREKDPDVLLTYNGDNFDFAYIKKRCEKLGLKFTIGRDGSEPKIQRMGDRFAVEVKGRIHLDLAPVVRHTIRLPTYTLEAVYEAVFGKKKEQVYAEEIAEAWKSEEGLKRVAQYSMEDARATYELGREFFPMEVELAKLIGQSVWDVSRSSTGNLVEWYLLRVAYERNELAPNKPGGEEYQRRMRSSYIGGYVKEPEKGLWESIAYLDFRSSAGSIIVTHNVSPDTLEKECKNYDVAPIVGYRFCKDFKGFIPSILEDLIETRQKVKRKMKATIDPIEKKMLDYRQRALKILANSYYGYQGYPKARWYSKECAEDVTAWGRHYIETTIKEAEKFGFKVLYADTDGFFATIPNEKPETIKSKAKKFLKHINEKLPGMLELEYEGFYLRGFFVTKKKYALIDEDGHITTRGLEVVRRDWSEIAKETQAKVLEVILREGSIEKAAGIVKKVVEDLANYRVPVEKLIIHEQITRELKRYKATGPHVAIAKRLQARGIKVKPGTIISYVVLKGSKKISDRVILFDEYDSSRHKYDPDYYIHNQVLPAVLRILEAFGYKEKDLEYQRMKQTGLGAWLKMGKK

SEQ ID NO: 718 - protein, 773 aa, unidentified
  REGION 1..773: note = Description of Unknown: Synthetic polypeptide
MILDTDYITENGKPVIRIFKKEKGEFKIEYDRNFEPYIYALLEDDESIEDIKKITGERHGKKVRIIRVEKVKKKFLGEPIEVWKLVFEHPQDYPAIRDAIRSHPAVREIFEYDIPFAKRYLIDKGLVPMEGGEELKLLAFAIATFYHEGDEFAEGEILMISYADESGAKVITWKKIDLPYVEVVSTEREAIKRFLQVLREKDPDVLLTYNGDNFDFAYIKKRCEKLGLKFTIGRDGSEPKIQRMGDRFAVEVKGRIHLDLAPVVRHTIRLPTYTLEAVYEAVFGKKKEKVYAEEIAEAWKSEEGLKRVAQYSAEDARATYELGREFFPMEVELAKLIGQSVWDVSRSSTGNLVEWYLLRVAYERNELAPNKPGGEEYQRRMRSSYIGGYVKEPEKGLWESIAYLDFRSSAGSIIVTHNVSPDTLEKECKNYDVAPIVGYRFCKDFKGFIPSILEDLIETRQKVKRKMKATIDPIEKKMLDYRQRALKILANSYYGYQGYPKARWYSKECAESVTAWGRHYIETTIKEAEKFGFKVLYADTDGFFATIPNEKPETIKSKAKKFLKHINEKLPGMLELEYEGFYLRGFFVTKKKYALIDEDGHITTRGLEVVRRDWSEIAKETQAKVLEVILREGSIEKAAGIVKKVVEDLANYRVPVEKLIIHEQITRELKRYKATGPHVAIAKRLQARGIKVKPGTIISYVVLKGSKKISDRVILFDEYDSSRHKYDPDYYIHNQVLPAVLRILEAFGYKEKDLEYQRMKQTGLGAWLKMGKK

SEQ ID NO: 719 - protein, 773 aa, unidentified
  REGION 1..773: note = Description of Unknown: Synthetic polypeptide
MILDTDYITENGKPVIRIFKKEKGEFKIEYDRNFEPYIYALLEDDESIEDIKKITGERHGKKVRIIRVEKVKKKFLGEPIEVWKLVFEHPQDYPAIRDAIRSHPAVREIFEYDIPFAKRYLIDKGLVPMEGGEELKLLAFAIATFYHEGDEFAEGEILMISYADESGAKVITWKKIDLPYVEVVSTEREAIKRFLQVLREKDPDVLLTYNGDNFDFAYIKKRCEKLGLKFTIGRDGSEPKIQRMGDRFAVEVKGRIHLDLAPVVRHTIRLPTYTLEAVYEAVFGKKKEKVYAEEIAEAWKSEEGLKRVAQYSMEDARATYELGREFFPMEVELAKLIGQSVWDVSRSSTGNLVEWYLLRVAYERNELAPNKPGGEEYQRRMRSSYIGGYVKEPEKGLWESIAYLDFRSSAGSIIVTHNVSPDTLEKECKNYDVAPIVGYRFCKDFKGFIPSILEDLIETRQKVKRKMKATIDPIEKKMLDYRQRALKSLANSYYGYQGYPKARWYSKECAESVTAWGRHYIETTIKEAEKFGFKVLYADTDGFFATIPNEKPETIKSKAKKFLKHINEKLPGMLELEYEGFYLRGFFVTKKKYALIDEDGHITTRGLEVVRRDWSEIAKETQAKVLEVILREGSIEKAAGIVKKVVEDLANYRVPVEKLIIHEQITRELKRYKATGPHVAIAKRLQARGIKVKPGTIISYVVLKGSKKISDRVILFDEYDSSRHKYDPDYYIHNQVLPAVLRILEAFGYKEKDLEYQRMKQTGLGAWLKMGKK

SEQ ID NO: 720 - protein, 773 aa, unidentified
  REGION 1..773: note = Description of Unknown: Synthetic polypeptide
MILDTDYITENGKPVIRIFKKEKGEFKIEYDRNFEPYIYALLEDDESIEDIKKITGERHGKKVRIIRVEKVKKKFLGEPIEVWKLVFEHPQDVPAIRDAIRSHPAVREIFEYDIPFAKRYLIDKGLVPMEGGEELKLLAFNIATFYHEGDEFAEGEILMISYADESGAKVITWKKIDLPYVEVVSTEREAIKRFLQVLREKDPDVLLTYNGDNFDFAYIKKRCEKLGLKFTIGRDGSEPKNQRMGDRFAVEVKGRIHLDLAPVVRHTIRLPTYTLEAVYEAVFGKKKEKVYAEEIAEAWKSEEGLKRVAQYSMEDARATYELGREFFPLEVELAKLIGQSVWDVSRSSTGNLVEWYLLRVAYERNELAPNKPGGEEYQRRMRSSYIGGYVKEPEKGLWESIAYLDFRSSAGSIIVTHNVSPDTLEKECKNYDVAPIVGYRFCKDFKGFIPSILEDLIETRQKVKRKMKATIDPIEKKMLDYRQRALKILANSYYGYQGYPKARWYSKECAESVTAWGRHYIETTIKEAEKFGFKVLYADTDGFFATIPNEKPETIKSKAKKFLKHINEKLPGMLELEYEGFYLRGFFVTKKKYALIDEDGHITTRGLEVVRRDWSEIAKETQAKVLEVILREGSIEKAAGIVKKVVEDLANYRVPVEKLIIHEQITRELKRYKATGPHVAIAKRLQARGIKVKPGTIISYVVLKGSKKISDRVILFDEYDSSRHKYDPDYYIHNQVLPAVLRILEAFGYKEKDLEYQRMKQTGLGAWLKMGKK

SEQ ID NO: 721 - protein, 773 aa, unidentified
  REGION 1..773: note = Description of Unknown: Synthetic polypeptide
MILDTDYITENGKPVIRIFKKEKGEFKIEYDRNFEPYIYALLEDDESIEDIKKITGERHGKKVRIIRVEKVKKKFLGEPIEVWKLVFEHPQDYPAIRDAIRSHPAVREIFEYDIPFAKRYLIDKGLVPMEGGEELKLLAFAIATFYHEGDEFAEGEILMISYADESGAKVITWKKIDLPYVEVVSTEREAIKRFLQVLREKDPDVLLTYNGDNFDFAYIKKRCEKLGLKFTIGRDGSEPDIQRMGDRFAVEVKGRIHLDLAPVVRHTIRLPTYTLEAVYEAVFGKKKEKVYAEEIAEAWKSEEGLKRVAQYSMEDARATYELGREFFPMEVELAKLIGQSVWDVSRSSTGNLVEWYLLRVAYERNELAPNKPGGEEYQRRMRSSYIGGYVKEPEKGLWESIAYLDFRSSAGSIIVTHNVSPDTLEKECKNYDVAPIVGYRFCKDFKGFIPSILEDLIETRQKVKRKMKATIDPIEKKMLDYRQRALKILANSYYGYQGYPKARWYSKECAESVTAWGRHYIETTIKEAEKFGFKVLYADTDGFFATIPNEKPETIKSKAKKFLKHINEKLPGMLELEYEGFYLRGFFVTKKKYALIDEDGHITTRGLEVVRRDWSEIAKETQAKVLEVILREGSIEKAAGIVKKVVEDLANYRVPVEKLIIHEQITRELKRYKATGPHVAIAKRLQARGIKVKPGTIISYVVLKGSKKISDRVILFDEYDSSRHKYDPDYYIHNQVLPAVLRILEAFGYKEKDLEYQRMKQTGLGAWLKMGKK

SEQ ID NO: 722 - protein, 773 aa, unidentified
  REGION 1..773: note = Description of Unknown: Synthetic polypeptide
MILDTDYITENGKPVIRIFKKEKGEFKIEYDRNFEPYIYALLEDDESIEDIKKITGERHGKKVRIIRVEKVKKKFLGEPIEVWKLVFEHPQDYPAIRDAIRSHPAVREIFEYDIPFAKRYLIDKGLVPMEGGEELKLLAFAIATFYHEGDEFAEGEILMISYADESGAKVITWKKIDLPYVEVVSTEREAIKRFLQVLREKDPDVLLTYNGDNFDFAYIKKRCEKLGLKFTIGRDGSEPKIQRMGDRFAVEVKGRIHLDLAPVVRHTIRLPTYTLEAVYEAVFGKKKEKVYAEEIAEAWKSEEGLKRVAQYSMEDARATYELGREFFPMEVELAKLIGQSVWDVSRSSTGNLVEWYLLRVAYERNELAPNKPGGEEYQRRMRSSYIGGYVKEPEKGLWESIAYLDFRSSAGSIIVTHNVSPDTLEKECKNYDVAPHVGYRFCKDFKGFIPSILEDLIETRQKVKRKMKATIDPIEKKMLDYRQRALKILANSYYGYQGYPKARWYSKECAESVTAWGRHYIETTIKEAEKFGFKVLYADTDGFFATIPNEKPETIKSKAKKFLKHINEKLPGMLELEYEGFYLRGFFVTKKKYALIDEDGHITTRGLEVVRRDWSEIAKETQAKVLEVILREGSIEKAAGIVKKVVEDLANYRVPVEKLIIHEQITRELKRYKATGPHVAIAKRLQARGIKVKPGTIISYVVLKGSKKISDRVILFDEYDSSRHKYDPDYYIHNQVLPAVLRILEAFGYKEKDLEYQRMKQTGLGAWLKMGKK

SEQ ID NO: 723 - protein, 773 aa, unidentified
  REGION 1..773: note = Description of Unknown: Synthetic polypeptide
MILDTDYITENGKPVIRIFKKEKGEFKIEYDRNFEPYIYALLEDDESIEDIKKITGERHGKKVRIIRVEKVKKKFLGEPIEVWKLVFEHPQDVPAIRDAIRSHPAVREIFEYDIPFAKRYLIDKGLVPMEGGEELKLLAFKIATFYHEGDEFAEGEILMISYADESGAKVITWKKIDLPYVEVVSTEREAIKRFLQVLREKDPDVLLTYNGDNFDFAYIKKRCEKLGLKFTIGRDGSEPKIQRMGDRFAVEVKGRIHLDLAPVVRHTIRLPTYTLEAVYEAVFGKKKEKVYAEEIAEAWKSEEGLKRVAQYSMEDARATYELGREFFPLEVELAKLIGQSVWDVSRSSTGNLVEWYLLRVAYERNELAPNKPGGEEYQRRMRSSYIGGYVKEPEKGLWESIAYLDFRSSAGSIIVTHNVSPDTLEKECKNYDVAPIVGYRFCKDFKGFIPSILEDLIETRQKVKRKMKATIDPIEKKMLDYRQRALKILANSYYGYQGYPKARWYSKECAESVTAWGRHYIETTIKEAEKFGFKVLYADTDGFFATIPNEKPETIKSKAKKFLKHINEKLPGMLELEYEGFYLRGFFVTKKKYALIDEDGHITTRGLEVVRRDWSEIAKETQAKVLEVILREGSIEKAAGIVKKVVEDLANYRVPVEKLIIHEQITRKLKRYKATGPHVAIAKRLQARGIKVKPGTIISYVVLKGSKKISDRVILFDEYDSSRHKYDPDYYIHNQVLPAVLRILEAFGYKEKDLEYQRMKQTGLGAWLKMGKK

SEQ ID NO: 724 - protein, 773 aa, unidentified
  REGION 1..773: note = Description of Unknown: Synthetic polypeptide
MILDTDYITENGKPVIRIFKKEKGEFKIEYDRNFEPYIYALLEDDESIEDIKKITGERHGKKVRIIRVEKVKKKFLGEPIEVWKLVFEHPQDVPAIRDAIRSHPAVREIFEYDIPFAKRYLIDKGLVPMEGGEELKLLAFNIATFYHEGDEFAEGEILMISYADESGAKVITWKKIDLPYVEVVSTEREAIKRFLQVLREKDPDVLLTYNGDNFDFAYIKKRCEKLGLKFTIGRDGSEPKIQRMGDRFAVEVKGRIHLDLAPVVRHTIRLPTYTLEAVYEAVFGKKKEKVYAEEIAEAWKSEEGLKRVAQYSMEDARATYELGREFFPLEVELAKLIGQSVWDVSRSSTGNLVEWYLLRVAYERNELAPNKPGGEEYQRRMRSSYIGGYVKEPEKGLWESIAYLDFRSSAGSIIVTHNVSPDTLEKECKNYDVAPIVGYRFCKDFKGFIPSILEDLIETRQKVKRKMKATIDPIEKKMLDYRQRALKILANSYYGYQGYPKARWYSKECAESVTAWGRHYIETTIKEAEKFGFKVLYADTDGFFATIPNEKPETIKSKAKKFLKHINEKLPGMLELEYEGFYLRGFFVTKKTYALIDEDGHITTRGLEVVRRDWSEIAKETQAKVLEVILREGSIEKAAGIVKKVVEDLANYRVPVEKLIIHEQITRELKRYKATGPHVAIAKRLQARGIKVKPGTIISYVVLKGSKKISDRVILFDEYDSSRHKYDPDYYIHNQVLPAVLRILEAFGYKEKDLEYQRMKQTGLGAWLKMGKK

SEQ ID NO: 725 - protein, 773 aa, unidentified; identical to SEQ ID NO: 123
  REGION 1..773: note = Description of Unknown: Synthetic polypeptide

SEQ ID NO: 726 - protein, 773 aa, unidentified
  REGION 1..773: note = Description of Unknown: Synthetic polypeptide
MILDTDYITENGKPVIRIFKKEKGEFKIEYDRNFEPYIYALLEDDESIEDIKKITGERHGKKVRIIRVEKVKKKFLGEPIEVWKLVFEHPQDVPAIRDAIRSHPAVREIFEYDIPFAKRYLIDKGLVPMEGGEELKLLAFNIATFYHEGDEFAEGEILMISYADESGAKVITWKKIDLPYVEVVSTEREAIKRFLQVLREKDPDVLLTYNGDNFDFAYIKKRCEKLGLKFTIGRDGSEPKIQRMGDRFAVEVKGRIHLDLAPVVRHTIRLPTYTLEAVYEAVFGKKKEKVYAEEIAEAWKSEEGLKRVAQYSMEDARATYELGREFFPLEVELAKLIGQSVWDVSRSSTGNLVEWYLLRVAYERNELAPNKPGGEEYQRRMRSSYIGGYVKEPEKGLWESIAYLDFRSSAGSIIVTHNVSPDTLEKECKNYDVAPIVGYRFCKDFKGFIPSILEDLIETRQKVKRKMKATIDPIEKKMLDYRQRALKILANSYYGYQGYPKARWYSKECAESVTAWGRHYIETTIKEAEKFGFKVLYADTDGFFATIPNEKPETIKSKAKKFLKHINEKLPGMLELEYEGFYLRGFFVTKKKYALIDEDGHITTRGLEVVRRDWSEIAKETQAKVLEVILREGSIEKAAGIVKKVVEDLANYRVPVEKLIIHEQITRRLKRYKATGPHVAIAKRLQARGIKVKPGTIISYVVLKGSKKISDRVILFDEYDSSRHKYDPDYYIHNQVLPAVLRILEAFGYKEKDLEYQRMKQTGLGAWLKMGKK

SEQ ID NO: 727 - protein, 757 aa, unidentified
  REGION 1..757: note = Description of Unknown: Synthetic polypeptide
MILDTDYITENGKPVIRIFKKEKGEFKIEYDRNFEPYIYALLEDDESIEDIKKITGERHGKKVRIIRVEKVKKKFLGEPIEVWKLVFEHPQDVPAIRDAIRSHPAVREIFEYDIPFAKRYLIDKGLVPMEGGEELKLLAFAIATFYHEGDEFAEGEILMISYADESGAKVITWKKIDLPYVEVVSTEREAIKRFLQVLREKDPDVLLTYNGDNFDFAYIKKRCEKLGLKFTIGRDGSEPKIQRMGDRFAVEVKGRIHLDLAPVVRHTIRLPTYTLEAVYEAVFGKKKEKVYAEEIAEAWKSEEGLKRVAQYSMEDARATYELGREFFPLEVELAKLIGQSVWDVSRSSTGNLVEWYLLRVAYERNELAPNKPGGEEYQRRMRSSYIGGYVKEPEKGLWESIAYLDFRSSAGSIIVTHNVSPDTLEKECKNYDVAPIVGYRFCKDFKGFIPSILEDLIETRQKVKRKMKATIDPIEKKMLDYRQRALKILANSYYGYQGYPKARWYSKECAESVTAWGRHYIETTIKEAEKFGFKVLYADTDGFFATIPNEKPETIKSKAKKFLKHINEKLPGMLELEYEGFYLRGFFVTKKKYALIDEDGHITTRGLEVVRRDWSEIAKETQAKVLEVILREGSIEKAAGIVKKVVEDLANYRVPVEKLIIHELITRELKRYKATGPHVAIAKRLQARGIKVKPGTIISYVVLKGSKKISDRVILFDEYDSSRHKYDPDYYIHNQVLPAVLRILEAFGYKEKDLEYQ

SEQ ID NO: 728 - protein, 773 aa, unidentified
  REGION 1..773: note = Description of Unknown: Synthetic polypeptide
MILDTDYITENGKPVIRIFKKEKGEFKIEYDRNFEPYIYALLEDDESIEDIKKITGERHGKKVRIIRVEKVKKKFLGEPIEVWKLVFEHPQDVPAIRDAIRSHPAVREIFEYDIPFAKRYLIDKGLVPMEGGEELKLLAFAIATFYHEGDEFAEGEILMISYADESGAKVITWKKIDLPYVEVVSTEREAIKRFLQVLREKDPDVLLTYNGDNFDFAYIKKRCEKLGLKFTIGRDGSEPKIQRMGDRFAVEVKGRIHLDLAPVVRHTIRLPTYTLEAVYEAVFGKKKEKVYAEEIAEAWKSEEGLKRVAQYSMEDARATYELGREFFPMEVELAKLIGQSVWDVSRSSTGNLVEWYLLRVAYERNELAPNKPGGEEYQRRMRSSYIGGYVKEPEKGLWESIAYLDFRSSAGSIIVTHNVSPDTLEKECKNYDVAPIVGYRFCKDFKGFIPSILEDLIETRQKVKRKMKATIDPIEKKMLDYRQRALKILANSYYGYQGYPKARWYSKENAEKVTAWGRHYIETTIKEAEKFGFKVLYADTDGFFATIPNEKPETIKSKAKKFLKHINEKLPGMLELEYEGFYLRGFFVTKKKYALIDEDGHITTRGLEVVRRDWSEIAKETQAKVLEVILREGSIEKAAGIVKKVVEDLANYRVPVEKLIIHEQITRELKDYKATGPHVAIAKRLQARGIKVKPGTIISYVVLKGSKKISDRVILFDEYDSSRHKYDPDYYIHNQVLPAVLRILEAFGYKEKDLEYQRMKQTGLGAWLKMGKK

SEQ ID NO: 729 - protein, 773 aa, unidentified
  REGION 1..773: note = Description of Unknown: Synthetic polypeptide
MILDTDYITENGKPVIRIFKKEKGEFKIEYDRNFEPYIYALLEDDESIEDIKKITGERHGKKVRIIRVEKVKKKFLGEPIEVWKLVFEHPQDYPAIRDAIRSHPAVREIFEYDIPFAKRYLIDKGLVPMEGGEELKLLAFAIATFYHEGDEFAEGEILMISYADESGAKVITWKKIDLPYVEVVSTEREAIKRFLQVLREKDPDVLLTYNGDNFDFTYIKKRCEKLGLKFTIGRDGSEPKIQRMGDRFAVEVKGRIHLDLAPVVRHTIRLPTYTLEAVYEAVFGKKKEKVYAEEIAEAWKSEEGLKRVAQYSMEDARATYELGREFFPMEVELAKLIGQSVWDVSRSSTGNLVEWYLLRVAYERNELAPNKPGGEEYQRRMRSSYIGGYVKEPEKGLWESIAYLDFRSSAGSIIVTHNVSPDTLEKECKNYDVAPIVGYRFCKDFKGFIPSILEDLIETRQKVKRKMKATIDPIEKKMLDYRQRALKILANSYYGYQGYPKARWYSKECAESVTAWGRHYIETTIKEAEKFGFKVLYADTDGFFATIPNEKPETIKSKAKKFLKHINEKLPGMLELEYEGFYLRGFFVTKKKYALIDEDGHITTRGLEVVRRDWSEIAKETQAKVLEVILREGSIEKAAGIVKKVVEDLANYRVPVEKLIIHEQITRELKRYKATGPHVAIAKRLQARGIKVKPGTIISYVVLKGSKKISDRVILFDEYDSSRHKYDPDYYIHNQVLPAVLRILEAFGYKEKDLEYQRMKQTGLGAWLKMGKK

SEQ ID NO: 730 - protein, 773 aa, unidentified
  REGION 1..773: note = Description of Unknown: Synthetic polypeptide
MILDTDYIRENGKPVIRIFKKEKGEFKIEYDRNFEPYIYALLEDDESIEDIKKITGERHGKKVRIIRVEKVKKKFLGEPIEVWKLVFEHPQDYPAIRDAIRSHPAVREIFEYDIPFAKRYLIDKGLVPMEGGEELKLLAFAIATFYHEGDEFAEGEILMISYADESGAKVITWKKIDLPYVEVVSTEREAIKRFLQVLREKDPDVLLTYNGDNFDFAYIKKRCEKLGLKFTIGRDGSEPKIQRMGDRFAVEVKGRIHLDLAPVVRHTIRLPTYTLEAVYEAVFGKKKEKVYAEEIAEAWKSEEGLKRVAQYSMEDARATYELGREFFPMEVELAKLIGQSVWDVSRSSTGNLVEWYLLRVAYERNELAPNKPGGEEYQRRMRSSYIGGYVKEPEKGLWESIAYLDFRSSAGSIIVTHNVSPDTLEKECKNYDVAPIVGYRFCKDFKGFIPSILEDLIETRQKVKRKMKATIDPIEKKMLDYRQRALKILANSYYGYQGYPKARWYSKECAESVTAWGRHYIETTIKEAEKFGFKVLYADTDGFFATIPNEKPETIKSKAKKFLKHINEKLPGMLELEYEGFYLRGFFVTKKKYALIDEDGHITTRGLEVVRRDWSEIAKETQAKVLEVILREGSIEKAAGIVKKVVEDLANYRVPVEKLIIHEQITRELKRYKATGPHVAIAKRLQARGIKVKPGTIISYVVLKGSKKISDRVILFDEYDSSRHKYDPDYYIHNQVLPAVLRILEAFGYKEKDLEYQRMKQTGLGAWLKMGKK

SEQ ID NO: 731 - protein, 773 aa, unidentified
  REGION 1..773: note = Description of Unknown: Synthetic polypeptide
MILDTDYITENGKPVIRIFKKEKGEFKIEYDRNFEPYIYALLEDDESIEDIKKITGERHGKKVRIIRVEKVKKKFLGEPIEVWKLVFEHPQDYPAIRDAIRSHPAVREIFEYDIPFAKRYLIDKGLVPMEGGEELKLLAFAIATFYHEGDEFAEGEILMISYADESGAKVITWKKIDLPYVEVVSTEREAIKRFLQVLREKDPDVLLTYNGDNFDFAYIKKRCEKLGLKFTIGRDGSEPKIQRMGDRFAVEVKGRIHLDLAPVVRHTIRLPTYTLEAVYEAVFGKKKEKVYAEEIAEAWKSEEGLKRVAQYSMEDARATYELGREFFPMEVELAKLIGQSVWDVSRSSTGNLVEWYLLRVAYERNELAPNKPGGEEYQRRMRSSYIGGYVKEPEKGLWESIAYLDFRSSAGSIIVTHNVSPDTLEKECKNYDVAPIVGYRFCKDFKGFIPSILEDLIETRQKVKRKMKATIDPIEKKMLDYRQRALKLLANSYYGYQGYPKARWYSKECAESVTAWGRHYIETTIKEAEKFGFKVLYADTDGFFATIPNEKPETIKSKAKKFLKHINEKLPGMLELEYEGFYLRGFFVTKKKYALIDEDGHITTRGLEVVRRDWSEIAKETQAKVLEVILREGSIEKAAGIVKKVVEDLANYRVPVEKLIIHEQITRELKRYKATGPHVAIAKRLQARGIKVKPGTIISYVVLKGSKKISDRVILFDEYDSSRHKYDPDYYIHNQVLPAVLRILEAFGYKEKDLEYQRMKQTGLGAWLKMGKK

SEQ ID NO: 732 - protein, 773 aa, unidentified
  REGION 1..773: note = Description of Unknown: Synthetic polypeptide
MILDTDYITENGKPVIRIFKKEKGEFKIEYDRNFEPYIYALLEDDESIEDIKKITGERHGKKVRIIRVEKVKKKFLGEPIEVWKLVFEHPQDVPAIRDAIRSHPAVREIFEYDIPFAKRYLIDKGLVPMEGGEELKLLAFNIATFYHEGDEFAEGEILMISYADESGAKVITWKKIDLPYVEVVSTEREAIKRFLQVLREKDPDVLLTYNGDNFDFAYIKKRCEKLGLKFTIGRDGSEPKIQRMGDRFAVEVKGRIHLDLAPVVRHTIRLPTYTLEAVYEAVFGKKKEKVYAEEIAEAWKSEEGLKRVAQYSMEDARATYELGREFFPLEVELAKLIGQSVWDVSRSSTGNLVEWYLLRVAYERNELAPNKPGGEEYQRRMRSSYIGGYVKEPEKGLWESIAYLDFRSSAGSIIVTHNVSPDTLEKECKNYDVAPIVGYRFCKDFKGFIPSILEDLIETRQKVKRKMKATIDPIEKKMLDYRQRALKILANSYYGYQGYPKARWYSKECAESVTAWGRHYIETTIKEAEKFGFKVLYADTDGFFATIPNEKPETIKSKAKKFLKHINEKLPGMLELEYEGFYLRGFFVTKKKYALIDEDGHITTRGLEVVRRFWSEIAKETQAKVLEVILREGSIEKAAGIVKKVVEDLANYRVPVEKLIIHEQITRELKRYKATGPHVAIAKRLQARGIKVKPGTIISYVVLKGSKKISDRVILFDEYDSSRHKYDPDYYIHNQVLPAVLRILEAFGYKEKDLEYQRMKQTGLGAWLKMGKK

SEQ ID NO: 733 - protein, 773 aa, unidentified
  REGION 1..773: note = Description of Unknown: Synthetic polypeptide
MILDTDYITENGKPVIRIFKKEKGEFKIEYDRNFEPYIYALLEDDESIEDIKKITGERHGKKVRIIRVEKVKKKFLGEPIEVWKLVFEHPQDYPAIRDAIRSHPAVREIFEYDIPFAKRYLIDKGLVPMEGGEELKLLAFAIATFYHEGDEFAEGEILMISYADESGAKVITWKKIDLPYVEVVSTEREAIKRFLQVLREKDPDVLLTYNGDNFDFAYIKKRCEKLGLKFTIGRDGSEPKIQRMGDRFAVEVKGRIHLDLAPVVRHTIRLPTYTLEAVYEAVFGKKKEKVYAEEIAEAWKSEEGLKRVAQYSMEDARATYELGREFFPMEVELAKLIGQSVWDVSRASTGNLVEWYLLRVAYERNELAPNKPGGEEYQRRMRSSYIGGYVKEPEKGLWESIAYLDFRSSAGSIIVTHNVSPDTLEKECKNYDVAPIVGYRFCKDFKGFIPSILEDLIETRQKVKRKMKATIDPIEKKMLDYRQRALKILANSYYGYQGYPKARWYSKECAESVTAWGRHYIETTIKEAEKFGFKVLYADTDGFFATIPNEKPETIKSKAKKFLKHINEKLPGMLELEYEGFYLRGFFVTKKKYALIDEDGHITTRGLEVVRRDWSEIAKETQAKVLEVILREGSIEKAAGIVKKVVEDLANYRVPVEKLIIHEQITRELKRYKATGPHVAIAKRLQARGIKVKPGTIISYVVLKGSKKISDRVILFDEYDSSRHKYDPDYYIHNQVLPAVLRILEAFGYKEKDLEYQRMKQTGLGAWLKMGKK

SEQ ID NO: 734 - protein, 773 aa, unidentified
  REGION 1..773: note = Description of Unknown: Synthetic polypeptide
MILDTDQITENGKPVIRIFKKEKGEFKIEYDRNFEPYIYALLEDDESIEDIKKITGERHGKKVRIIRVEKVKKKFLGEPIEVWKLVFEHPQDVPAIRDAIRSHPAVREIFEYDIPFAKRYLIDKGLVPMEGGEELKLLAFNIATFYHEGDEFAEGEILMISYADESGAKVITWKKIDLPYVEVVSTEREAIKRFLQVLREKDPDVLLTYNGDNFDFAYIKKRCEKLGLKFTIGRDGSEPKIQRMGDRFAVEVKGRIHLDLAPVVRHTIRLPTYTLEAVYEAVFGKKKEKVYAEEIAEAWKSEEGLKRVAQYSMEDARATYELGREFFPLEVELAKLIGQSVWDVSRSSTGNLVEWYLLRVAYERNELAPNKPGGEEYQRRMRSSYIGGYVKEPEKGLWESIAYLDFRSSAGSIIVTHNVSPDTLEKECKNYDVAPIVGYRFCKDFKGFIPSILEDLIETRQKVKRKMKATIDPIEKKMLDYRQRALKILANSYYGYQGYPKARWYSKECAESVTAWGRHYIETTIKEAEKFGFKVLYADTDGFFATIPNEKPETIKSKAKKFLKHINEKLPGMLELEYEGFYLRGFFVTKKKYALIDEDGHITTRGLEVVRRDWSEIAKETQAKVLEVILREGSIEKAAGIVKKVVEDLANYRVPVEKLIIHEQITRELKRYKATGPHVAIAKRLQARGIKVKPGTIISYVVLKGSKKISDRVILFDEYDSSRHKYDPDYYIHNQVLPAVLRILEAFGYKEKDLEYQRMKQTGLGAWLKMGKK

SEQ ID NO: 735 - protein, 773 aa, unidentified
  REGION 1..773: note = Description of Unknown: Synthetic polypeptide
MILDTDYITENGKPVIRIFKKEKGEFKIEYDRNFEPYIYALLEDDESIEDIKKITGERHGKKVRIIRVEKVKKKFLGEPIEVWKLVFEHPQDYPAIRDAIRSHPAVREIFEYDIPFAKRYLIDKGLVPMEGGEELKLLAFAIATFYHEGDEFAEGEILMISYADESGAKVITWKKIDLPYVEVVSTEREAIKRFLQVLREKDPDVLLTYNGDNFDFAYIKKRCEKLGLKFTIGRDGSEPKIQRMGDRFAVEVKGRIHLDLAPVVRHTIRLPTYTLEAVYEAVFGKKKEKVYAEEIAEAWKSEEGLKRVAQYSMEDARATYELGREFFPMEVELAKLIGQSVWDVSRSSTGNLVEWYLLRVAYERNELAPNKPGGEEYQRRMRSSYIGGYVKEPEKGLWESIAYLDFRSSAGSIIVTHNVSPDTLEKECKNYDVAPIVGYRFCKDFKGFIPSILEDLIETRQKVKRKMKATIDPIEKKMLDYRQRALKILANSYYGYQGYPKARWYSKECAESVTAWGRHYIETTIKEAEKFGFKVLYADTDGFFATIPNEKPERIKSKAKKFLKHINEKLPGMLELEYEGFYLRGFFVTKKKYALIDEDGHITTRGLEVVRRDWSEIAKETQAKVLEVILREGSIEKAAGIVKKVVEDLANYRVPVEKLIIHEQITRELKRYKATGPHVAIAKRLQARGIKVKPGTIISYVVLKGSKKISDRVILFDEYDSSRHKYDPDYYIHNQVLPAVLRILEAFGYKEKDLEYQRMKQTGLGAWLKMGKK

SEQ ID NO: 736 - protein, 773 aa, unidentified
  REGION 1..773: note = Description of Unknown: Synthetic polypeptide
MILDTDYITENGKPVIRIFKKEKGEFKIEYDRNFEPYIYALLEDDESIEDIKKITGERHGKKVRIIRVEKVKKKFLGEPIEVWKLVFEHPQDVPAIRDAIRSHPAVREIFEYDIPFAKRYLIDKGLVPMEGGEELKLLAFNIATFYHEGDEFAEGEILMISYADESGAKVITWKKIDLPYVEVVSTEREAIKRFLQVLREKDPDVLLTYNGDNFDFAYIKKRCEKLGLKFTIGRDGSEPKIQRMGDRFAVEVKGRIHLDLAPVVRHTIRLPTYTLEAVYEAVFGKKKEKVYAEEIAEAWKSEEGLKRVAQYSMEDARATYELGREFFPLEVELAKLIGQSVWDVSRSSTGNLVEWYLLRVAYERNELAPNKPGGEEYQRRMRSSYIGGYVKEPEKGLWESIAYLDFRSSAGSIIVTHNVSPDTLEKECKNYDVAPIVGYRFCKDFKGFIPSILEDLIETRQKVKRKMKATIDPIEKKMLDYRQRALKILANSYYGYQGYPKARWYSKECAESVTAWGRHYIETTIKEAEKFGFKVLYADTDGFFATIPNEKPETIKSKAKKFLKHINEKLPGMLELEYEGFYLRGFFVTKKKYALIDEDGHITTRGLEVVRRDWSEIAKETQAKVLEVILREGSIEKAAGIVKKVVEDLANYRVPVEKLIIHEQITRELKRYKATGPHVAITKRLQARGIKVKPGTIISYVVLKGSKKISDRVILFDEYDSSRHKYDPDYYIHNQVLPAVLRILEAFGYKEKDLEYQRMKQTGLGAWLKMGKK

SEQ ID NO: 737 - protein, 773 aa, unidentified; identical to SEQ ID NO: 49
  REGION 1..773: note = Description of Unknown: Synthetic polypeptide

SEQ ID NO: 738 - protein, 766 aa, unidentified
  REGION 1..766: note = Description of Unknown: Synthetic polypeptide
MILDTDYITENGKPVIRIFKKEKGEFKIEYDRNFEPYIYALLEDDESIEDIKKITGERHGKKVRIIRVEKVKKKFLGEPIEVWKLVFEHPQDVPAIRDAIRSHPAVREIFEYDIPFAKRYLIDKGLVPMEGGEELKLLAFNIATFYHEGDEFAEGEILMISYADESGAKVITWKKIDLPYVEVVSTEREAIKRFLQVLREKDPDVLLTYNGDNFDFAYIKKRCEKLGLKFTIGRDGSEPKIQRMGDRFAVEVKGRIHLDLAPVVRHTIRLPTYTLEAVYEAVFGKKKEKVYAEEIAEAWKSEEGLKRVAQYSMEDARATYELGREFFPLEVELAKLIGQSVWDVSRSSTGNLVEWYLLRVAYERNELAPNQPGGEEYQRRMRSSYIGGYVKEPEKGLWESIAYLDFRSSAGSIIVTHNVSPDTLEKECKNYDVAPIVGYRFCKDFKGFIPSILEDLIETRQKVKRKMKATIDPIEKKMLDYRQRALKILANSYYGYQGYPKARWYSKECAESVTAWGRHYIETTIKEAEKFGFKVLYADTDGFFATIPNEKPETIKSKAKKFLKHINEKLPGMLELEYEGFYLRGFFVTKKKYALIDEDGHITTRGLEVVRRDWSEIAKETQAKVLEVILREGSIEKAAGIVKKVVEDLANYRVPVEKLIIHEQITRELKRYKATGPHVAIAKRLQARGIKVKPGTIISYVVLKGSKKISDRVILFDEYDSSRHKYDPDYYIHNQVLPAVLRILEAFGYKEKDLEYQRDKQTGLGA

SEQ ID NO: 739 - protein, 773 aa, unidentified
  REGION 1..773: note = Description of Unknown: Synthetic polypeptide
MILDTDYITENGKPVIRIFKKEKGEFKIEYDRNFEPYIYALLEDDESIEDIKKITGERHGKKVRIIRVEKVKKKFLGEPIEVWKLVFEHPQDVPAIRDAIRSHPAVREIFEYDIPFAKRYLIDKGLVPMEGGEELKLLAFNIATFYHEGDEFAEGEILMISYADESGAKVITWKKIDLPYVEVVSTEREAIKRFLQVLREKDPDVLLTYNGDNFDFAYIKKRCEKLGLKFTIGRDGSEPKIQRMGDRFAVEVKGRIHLDLAPVVRHTIRLPTYTLEAVYEAVFGKKKEKVYAEEIAEAWKSEEGLKRVAQYSMEDARATYELGREFFPLEVELAKLIGQSVWDVSRSSTGNLVEWYLLRVAYERNELAPNKPGGEEYQRRMRSSYIGGYVKEPEKGLWESIAYLDFRSSAGSIIVTHNVSPDTLEKECKNYDVAPIVGYRFCKDFKGFIPSILEDLIETRQKVKRKMKATIDPIEKKMLDYRQRALKILANSYYGYQGYPKARWYSKECAESVTAWGRHYIETTIKEAEKFGFKVLYADTDGFFATIPNEKPETIKSKAKKFLKHINEKLPGMLELEYEGFYLRGFFVTKKKYALIDEDGLITTRGLEVVRRDWSEIAKETQAKVLEVILREGSIEKAAGIVKKVVEDLANYRVPVEKLIIHEQITRELKRYKATGPHVAIAKRLQARGIKVKPGTIISYVVLKGSKKISDRVILFDEYDSSRHKYDPDYYIHNQVLPAVLRILEAFGYKEKDLEYQRDKQTGLGAWLKMGKK

SEQ ID NO: 740 - protein, 773 aa, unidentified
  REGION 1..773: note = Description of Unknown: Synthetic polypeptide
MILDTDYITENGKPVIRIFKKEKGEFKIEYDRNFEPYIYALLEDDESIEDIKKITGERHGKKVRIIRVEKVKKNFLGEPIEVWKLVFEHPQDYPAIRDAIRSHPAVREIFEYDIPFAKRYLIDKGLVPMEGGEELKLLAFAIATFYHEGDEFAEGEILMISYADESGAKVITWKKIDLPYVEVVSTEREAIKRFLQVLREKDPDVLLTYNGDNFDFAYIKKRCEKLGLKFTIGRDGSEPKIQRMGDRFAVEVKGRIHLDLAPVVRHTIRLPTYTLEAVYEAVFGKKKEKVYAEEIAEAWKSEEGLKRVAQYSMEDARATYELGREFFPMEVELAKLIGQSVWDVSRSSTGNLVEWYLLRVAYERNELAPNKPGGEEYQRRMRSSYIGGYVKEPEKGLWESIAYLDFRSSAGSIIVTHNVSPDTLEKECKNYDVAPIVGYRFCKDFKGFIPSILEDLIETRQKVKRKMKATIDPIEKKMLDYRQRALKILANSYYGYQGYPKARWYSKECAESVTAWGRHYIETTIKEAEKFGFKVLYADTDGFFATIPNEKPETIKSKAKKFLKHINEKLPGMLELEYEGFYLRGFFVTKKKYALIDEDGHITTRGLEVVRRDWSEIAKETQAKVLEVILREGSIEKAAGIVKKVVEDLANYRVPVEKLIIHEQITRELKRYKATGPHVAIAKRLQARGIKVKPGTIISYVVLKGSKKISDRVILFDEYDSSRHKYDPDYYIHNQVLPAVLRILEAFGYKEKDLEYQRMKQTGLGAWLKMGKK

SEQ ID NO: 741 - protein, 773 aa, unidentified
  REGION 1..773: note = Description of Unknown: Synthetic polypeptide
MILDTDYITENGKPVIRIFKKEKGEFKIEYDRNFEPYIYALLEDDESIEDIKKITGERHGKKVRIIRVEKVKKKFLGEPIEVWKLVFEHPQDVPAIRDAIRSHPAVREIFEYDIPFAKRYLIDKGLVPMEGGEELKLLAFNIATFYHEGDEFAEGEILMISYADESGAKVITWKKIDLPYVEVVSTEREAIKRFLQVLREKDPDVLLTYNGDNFDFAYIKKRCEKLGLKFTIGRDGSEPKAQRMGDRFAVEVKGRIHLDLAPVVRHTIRLPTYTLEAVYEAVFGKKKEKVYAEEIAEAWKSEEGLKRVAQYSMEDARATYELGREFFPLEVELAKLIGQSVWDVSRSSTGNLVEWYLLRVAYERNELAPNKPGGEEYQRRMRSSYIGGYVKEPEKGLWESIAYLDFRSSAGSIIVTHNVSPDTLEKECKNYDVAPIVGYRFCKDFKGFIPSILEDLIETRQKVKRKMKATIDPIEKKMLDYRQRALKILANSYYGYQGYPKARWYSKECAESVTAWGRHYIETTIKEAEKFGFKVLYADTDGFFATIPNEKPETIKSKAKKFLKHINEKLPGMLELEYEGFYLRGFFVTKKKYALIDEDGHITTRGLEVVRRDWSEIAKETQAKVLEVILREGSIEKAAGIVKKVVEDLANYRVPVEKLIIHEQITRELKRYKATGPHVAIAKRLQARGIKVKPGTIISYVVLKGSKKISDRVILFDEYDSSRHKYDPDYYIHNQVLPAVLRILEAFGYKEKDLEYQRMKQTGLGAWLKMGKK

SEQ ID NO: 742 - protein, 773 aa, unidentified
  REGION 1..773: note = Description of Unknown: Synthetic polypeptide
MILDTDYITENGKPVIRIFKKEKGEFKIEYDRNFEPYIYALLEDDESIEDIKKITGERHGKKVRIIRVEKVKKKFLGEPIEVWKLVFEHPQDRPAIRDAIRSHPAVREIFEYDIPFAKRYLIDKGLVPMEGGEELKLLAFNIATFYHEGDEFAEGEILMISYADESGAKVITWKKIDLPYVEVVSTEREAIKRFLQVLREKDPDVLLTYNGDNFDFAYIKKRCEKLGLKFTIGRDGSEPKIQRMGDRFAVEVKGRIHLDLAPVVRHTIRLPTYTLEAVYEAVFGKKKEKVYAEEIAEAWKSEEGLKRVAQYSMEDARATYELGREFFPLEVELAKLIGQSVWDVSRSSTGNLVEWYLLRVAYERNELAPNKPGGEEYQRRMRSSYIGGYVKEPEKGLWESIAYLDFRSSAGSIIVTHNVSPDTLEKECKNYDVAPIVGYRFCKDFKGFIPSILEDLIETRQKVKRKMKATIDPIEKKMLDYRQRALKILANSYYGYQGYPKARWYSKECAESVTAWGRHYIETTIKEAEKFGFKVLYADTDGFFATIPNEKPETIKSKAKKFLKHINEKLPGMLELEYEGFYLRGFFVTKKKYALIDEDGHITTRGLEVVRRDWSEIAKETQAKVLEVILREGSIEKAAGIVKKVVEDLANYRVPVEKLIIHEQITRELKRYKATGPHVAIAKRLQARGIKVKPGTIISYVVLKGSKKISDRVILFDEYDSSRHKYDPDYYIHNQVLPAVLRILEAFGYKEKDLEYQRMKQTGLGAWLKMGKK

SEQ ID NO: 743 - protein, 773 aa, unidentified
  REGION 1..773: note = Description of Unknown: Synthetic polypeptide
MILDTDYITENGKPVIRIFKKEKGEFKIEYDRNFEPYIYALLEDDESIEDIKKITGERHGKKVRIIRVEKVKKKFLGEPIEVWKLVFEHPQDYPAIRDAIRSHPAVREIFEYDIPFAKRYLIDKGLVPMEGGEELKLLAFAIATFYHEGDEFAEGEILMISYADESGAKVITWKKIDLPYVEVVSTEREAIKRFLQVLREKDPDVLLTYNGDNFDFAYIKKRCEKLGLKFTIGRDGSEPKIQRMGDRFAVEVKGRIHLDLAPVVRHTIRLPTYTLEAVYEAVFGKKKEKVYAEEIAEAWKSEEGLKRVAQYSMEDARATYELGREFFPMEVELAKLIGQSVWDVSRSSTGNLVEWYLLRVAYERNELAPNKPGGEEYQRRMRSSYIGGYVKEPEKGLWESIAYLDFRSSAGSIIVTHNVSPDTLEKECKNYDVAPIVGYRFCKDFKGFIPSILEDLIETRQKVKRKMKATIDPIEKKMLDYRQRALKILANSYYGYQGYPKARWYSKECAESVTAWGRHYIETTIKEAEKFGFKVLYADTDGFFATIPNEKPETIKSKAKKFLKHINEKLPGMLELEYEGFYLRGFFVTKKKYALIDEDGHITTRGLEVVRRDWSEIAKETQAKVLEVILREGSIEKAAGIVKKVVEDLANYRVPVEKLIIHEQITRELKRYKATGPHVAIAKRLQARGIKVSPGTIISYVVLKGSKKISDRVILFDEYDSSRHKYDPDYYIHNQVLPAVLRILEAFGYKEKDLEYQRMKQTGLGAWLKMGKK

SEQ ID NO: 744 - protein, 773 aa, unidentified
  REGION 1..773: note = Description of Unknown: Synthetic polypeptide
MILDTDYITENGKPVIRIFKKEKGEFKIEYDRNFEPYIYALLEDDESIEDIKKITGERHGKKVRIIRVEKVKKKFLGEPIEVWKLVFEHPQDYPAIRDAIRSHPAVREIFEYDIPFAKRYLIDKGLVPMEGGEELKLLAFAIATFYHEGDEFAEGEILMISYADESGAKVITWKKIDLPYVEVVSTEREAIKRFLQVLREKDPDVLLTYNGDNFDFAYIKKRCEKLGLKFTIGRDGSEPKIQRMGDRFAVEVKGRIHLDLAPVVRHTIRLPTYTLEAVYEAVFGKKKEKVYAEEIAEAWKSEEGLKRVAQYSMEDARATYELGREFFPMEVELAKLIGQSVWDVSRSSTGNLVEWYLLRVAYERNELAPNKPGGEEYQRRMRSSYIGGYVKEPEKGLWESIAYLDFRSSAGSIIVTHNVSPDTLEKECKNYDVAPIVGYRFCKDFKGFIPSILEDLIETRQKVKRKMKATIDPIEKKMLDYRQRALKILANSYYGYQGYPKARWYSKECAESVTAWGRHYIETTIKEAEKFGFKVLYADTDGFFATIPNEKPETIKSKAKKFLKHINEKLPGMLELEYEGFYLRGFFVTKKKYALIDEDGHITTRGLEVVRRDWSEIAKETQAKVLEVILREGSIEKAAGIVKKVVEDLANYRVPVEKLIIHEQITRELKRYKATGPHVAITKRLQARGIKVKPGTIISYVVLKGSKKISDRVILFDEYDSSRHKYDPDYYIHNQVLPAVLRILEAFGYKEKDLEYQRMKQTGLGAWLKMGKK

SEQ ID NO: 745 - protein, 773 aa, unidentified
  REGION 1..773: note = Description of Unknown: Synthetic polypeptide
MILDTDYITENGKPVIRIFKKEKGEFKIEYDRNFEPYIYALLEDDESIEDIKKITGERHGKKVRIIRVEKVKKKFLGEPIEVWKLVFEHPQDYPAIRDAIRSHPAVREIFEYDIPFAKRYLIDKGLVPEEGGEELKLLAFAIATFYHEGDEFAEGEILMISYADESGAKVITWKKIDLPYVEVVSTEREAIKRFLQVLREKDPDVLLTYNGDNFDFAYIKKRCEKLGLKFTIGRDGSEPKIQRMGDRFAVEVKGRIHLDLAPVVRHTIRLPTYTLEAVYEAVFGKKKEKVYAEEIAEAWKSEEGLKRVAQYSMEDARATYELGREFFPMEVELAKLIGQSVWDVSRSSTGNLVEWYLLRVAYERNELAPNKPGGEEYQRRMRSSYIGGYVKEPEKGLWESIAYLDFRSSAGSIIVTHNVSPDTLEKECKNYDVAPIVGYRFCKDFKGFIPSILEDLIETRQKVKRKMKATIDPIEKKMLDYRQRALKILANSYYGYQGYPKARWYSKECAESVTAWGRHYIETTIKEAEKFGFKVLYADTDGFFATIPNEKPETIKSKAKKFLKHINEKLPGMLELEYEGFYLRGFFVTKKKYALIDEDGHITTRGLEVVRRDWSEIAKETQAKVLEVILREGSIEKAAGIVKKVVEDLANYRVPVEKLIIHEQITRELKRYKATGPHVAIAKRLQARGIKVKPGTIISYVVLKGSKKISDRVILFDEYDSSRHKYDPDYYIHNQVLPAVLRILEAFGYKEKDLEYQRMKQTGLGAWLKMGKK

SEQ ID NO: 746 - protein, 773 aa, unidentified
  REGION 1..773: note = Description of Unknown: Synthetic polypeptide
MILDTDYITENGKPVIRIFKKEKGEFKIEYDRNFEPYIYALLEDDESIEDIKKITGERHGKKVRIIRVEKVKKKFLGEPIEVWKLVFEHPQDYPAIRDAIRSHPAVREIFEYDIPFAKRYLIDKGLVPMEGGEELKLLAFAIATFYHEGDEFAEGEILMISYADESGAKVITWKKIDLPYVEVVSTEREAIKRFLQVLREKDPDVLLTYNGDNFDFAYIKKRCEKLGLKFTIGRDGSEPKIQRMGDRFAVEVKGRIHLDLAPVVRHTIRLPTYTLEAVYEAVFGKKKEKVYAEEIAEAWKSEEGLKRVAQYSMEDARATYELGREFFPMEVELAKLIGQSVWDVSRSSTGNLVEWYLLRVAYERNELAPNKPGGEEYQRRMRSSYIGGYVKEPEKGLWESIAYLDFRSSAGSIIVTHNVSPDTLEKECKNYDVAPIVGYRFCKDFKGFIPSILEDLIETRQKVKRKMKATIDPIEKKMLDYRQRALKILANSYYGYQGYPKARWYSKECAESVTAWGRHYIETTIKEAEKFGFKVLYADTDGFFATIPNEKPETIKSKAKKFLKHINEKLPGMLELEYEGFYLRGFFVTKKKYALIDEDGHITTRGLEVVRRDWSEIAKETQAKVLEVILREGSIEKAAGIVKKVVEDLANYRVPVEKLIIHEQITRELKRYKATGPHVAFAKRLQARGIKVKPGTIISYVVLKGSKKISDRVILFDEYDSSRHKYDPDYYIHNQVLPAVLRILEAFGYKEKDLEYQRMKQTGLGAWLKMGKK

SEQ ID NO: 747 - protein, 773 aa, unidentified
  REGION 1..773: note = Description of Unknown: Synthetic polypeptide
MILDTDYITENGKPVIRIFKKEKGEFKIEYDRNFEPYIYALLEDDESIEDIKKITGERHGKKVRIIRVEKVKKKFLGEPIEVWKLVFEHPQDYPAIRDAIRSHPAVREIFEYDIPFAKRYLIDKGLVPMEGGEELKLLAFAIATFYHEGDEFAEGEILMISYADESGAKVITWKKIDLPYVEVVSTEREAIKRFLQVLREKDPDVLLTYNGDNFDFAYIKKRCEKLGLKFTIGRDGSEPKIQRMGDRFAVEVKGRIHLDLAPVVRHTIRLPTYTLEAVYEAVFGKKKEKVYAEEIAEAWKSEEGLKRVAQYSMEDARATYELGREFFPMEVELAKLIGQSVWDVSRSSTGNLVEWYLLRVAYERNELAPNKPGGEEYQRRMRSSYIGGYVKEPEKGLWESIAYLDFRSSAGSIIVTHNVSPDTLEKECKNYDVAPIVGYRFCKDFKGFIPSILEDLIETRQKVKRKMKATIDPIEKKMLDYRQRALKILANSYYGYQGYPKARWYCKECAESVTAWGRHYIETTIKEAEKFGFKVLYADTDGFFATIPNEKPETIKSKAKKFLKHINEKLPGMLELEYEGFYLRGFFVTKKKYALIDEDGHITTRGLEVVRRDWSEIAKETQAKVLEVILREGSIEKAAGIVKKVVEDLANYRVPVEKLIIHEQITRELKRYKATGPHVAIAKRLQARGIKVKPGTIISYVVLKGSKKISDRVILFDEYDSSRHKYDPDYYIHNQVLPAVLRILEAFGYKEKDLEYQRMKQTGLGAWLKMGKK

SEQ ID NO: 748 - protein, 773 aa, unidentified
  REGION 1..773: note = Description of Unknown: Synthetic polypeptide
MILDTDYITENGKPVIRIFKKEKGEFKIEYDRNFEPYIYALLEDDESIEDIKKITGERHGKKVRIIRVEKVKKKFLGEPIEVWKLVFEHPQDYPAIRDAIRSHPAVREIFEYDIPFAKRYLIDKGLVPMEGGEELKLLAFAIATFYHEGDEFAEGEILMISYADESGAKVITWKKIDLPYVEVVSTEREAIKRFLQVLREKDPDVLLTYNGDNFDFAYIKKRCEKLGLKFTIGRDGSEPKIQRMGDRFAVEVKGRIHLDLAPVVRHTIRLPTYTLEAVYEAVFGKKKEKVYAEEIAEAWKSEEGLKRVAQYSVEDARATYELGREFFPMEVELAKLIGQSVWDVSRSSTGNLVEWYLLRVAYERNELAPNKPGGEEYQRRMRSSYIGGYVKEPEKGLWESIAYLDFRSSAGSIIVTHNVSPDTLEKECKNYDVAPIVGYRFCKDFKGFIPSILEDLIETRQKVKRKMKATIDPIEKKMLDYRQRALKILANSYYGYQGYPKARWYSKECAESVTAWGRHYIETTIKEAEKFGFKVLYADTDGFFATIPNEKPETIKSKAKKFLKHINEKLPGMLELEYEGFYLRGFFVTKKKYALIDEDGHITTRGLEVVRRDWSEIAKETQAKVLEVILREGSIEKAAGIVKKVVEDLANYRVPVEKLIIHEQITRELKRYKATGPHVAIAKRLQARGIKVKPGTIISYVVLKGSKKISDRVILFDEYDSSRHKYDPDYYIHNQVLPAVLRILEAFGYKEKDLEYQRMKQTGLGAWLKMGKK

SEQ ID NO: 749 - protein, 773 aa, unidentified
  REGION 1..773: note = Description of Unknown: Synthetic polypeptide
IILDTDYITENGKPVIRIFKKEKGEFKIEYDRNFEPYIYALLEDDESIEDIKKITGERHGKKVRIIRVEKVKKKFLGEPIEVWKLVFEHPQDYPAIRDAIRSHPAVREIFEYDIPFAKRYLIDKGLVPLEGGEELKLLAFAIATFYHEGDEFAEGEILMISYADESGAKVITWKKIDLPYVEVVSTEREAIKRFLQVLREKDPDVLLTYNGDNFDFAYIKKRCEKLGLKFTIGRDGSEPKIQRMGDRFAVEVKGRIHLDLAPVVRHTIRLPTYTLEAVYEAVFGKKKEKVYAEEIAEAWKSEEGLKRVAQYSMEDARATYELGREFFPMEVELAKLIGQSVWDVSRSSTGNLVEWYLLRVAYERNELAPNKPGGEEYQRRMRSSYIGGYVKEPEKGLWESIAYLDFRSSAGSIIVTHNVSPDTLEKECKNYDVAPIVGYRFCKDFKGFIPSILEDLIETRQKVKRKMKATIDPIEKKMLDYRQRALKILANSYYGYQGYPKARWYSKECAESVTAWGRHYIETTIKEAEKFGFKVLYADTDGFFATIPNEKPETIKSKAKKFLKHINEKLPGMLELEYEGFYLRGFFVTKKKYALIDEDGHITTRGLEVVRRDWSEIAKETQAKVLEVILREGSIEKAAGIVKKVVEDLANYRVPVEKLIIHEQITRELKRYKATGPHVAIAKRLQARGIKVKPGTIISYVVLKGSKKISDRVILFDEYDSSRHKYDPDYYIHNQVLPAVLRILEAFGYKEKDLEYQRMKQTGLGAWLKMGKK

SEQ ID NO: 750 - protein, 773 aa, unidentified
  REGION 1..773: note = Description of Unknown: Synthetic polypeptide
MILDTDYITENGKPVIRIFKKEKGEFKIEYDRNFEPYIYALLEDDESIEDIKKITGERHGKKVRIIRVEKVKKKFLGEPIEVWKLVFEHPQDVPAIRDAIRSHPAVREIFEYDIPFAKRYLIDKGLVPMEGGEELKLLAFNIATFYHEGDEFAEGEILMISYADESGAKVITWKKIDLPYVEVVSTEREAIKRFLQVLREKDPDVLLTYNGDNFDFAYIKKRCEKLGLKFTIGRDGSEPKIQRMGDRFAVEVKGRIHLDLAPVVRHTIRLPTYTLEAVYEAVFGKKKEKVYAEEIAEAWKSEEGLKRVAQYSMEAARATYELGREFFPLEVELAKLIGQSVWDVSRSSTGNLVEWYLLRVAYERNELAPNKPGGEEYQRRMRSSYIGGYVKEPEKGLWESIAYLDFRSSAGSIIVTHNVSPDTLEKECKNYDVAPIVGYRFCKDFKGFIPSILEDLIETRQKVKRKMKATIDPIEKKMLDYRQRALKILANSYYGYQGYPKARWYSKECAESVTAWGRHYIETTIKEAEKFGFKVLYADTDGFFATIPNEKPETIKSKAKKFLKHINEKLPGMLELEYEGFYLRGFFVTKKKYALIDEDGHITTRGLEVVRRDWSEIAKETQAKVLEVILREGSIEKAAGIVKKVVEDLANYRVPVEKLIIHEQITRELKRYKATGPHVAIAKRLQARGIKVKPGTIISYVVLKGSKKISDRVILFDEYDSSRHKYDPDYYIHNQVLPAVLRILEAFGYKEKDLEYQRMKQTGLGAWLKMGKK

SEQ ID NO: 751 - protein, 773 aa, unidentified
  REGION 1..773: note = Description of Unknown: Synthetic polypeptide
MILDTDYITENGKPVIRIFKKEKGEFKIEYDRNFEPYIYALLEDDESIEDIKKITGERHGKKVRIIRVEKVKKKFLGEPIEVWKLVFEHPQDVPAIRDAIRSHPAVREIFEYDIPFAKRYLIDKGLVPMEGGEELKLLAFTIATFYHEGDEFAEGEILMISYADESGAKVITWKKIDLPYVEVVSTEREAIKRFLQVLREKDPDVLLTYNGDNFDFAYIKKRCEKLGLKFTIGRDGSEPKIQRMGDRFAVEVKGRIHLDLAPVVRHTIRLPTYTLEAVYEAVFGKKKEQVYAEEIAEAWKSEEGLKRVAQYSMEDARATYELGREFFPLEVELAKLIGQSVWDVSRSSTGNLVEWYLLRVAYERNELAPNKPGGEEYQRRMRSSYIGGYVKEPEKGLWESIAYLDFRSSAGSIIVTHNVSPDTLEKECKNYDVAPIVGYRFCKDFKGFIPSILEDLIETRQKVKRKMKATIDPIEKKMLDYRQRALKILANSYYGYQGYPKARWYSKECAESVTAWGRHYIETTIKEAEKFGFKVLYADTDGFFATIPNEKPETIKSKAKKFLKHINEKLPGMLELEYEGFYLRGFFVTKKKYALIDEDGHITTRGLEVVRRDWSEIAKETQAKVLEVILREGSIEKAAGIVKKVVEDLANYRVPVEKLIIHEQITRELKRYKATGPHVAIAKRLQARGIKVKPGTIISYVVLKGSKKISDRVILFDEYDSSRHKYDPDYYIHNQVLPAVLRILEAFGYKEKDLEYQRMKQTGLGAWLKMGKK

SEQ ID NO: 752 - protein, 773 aa, unidentified
  REGION 1..773: note = Description of Unknown: Synthetic polypeptide
MILDTDYITENGKPVIRIFKKEKGEFKIEYDRNFEPYIYALLEDDESIEDIKKITGERHGKKVRIIRVEKVKKKFLGEPIEVWKLVFEHPQDVPAIRDAIRSHPAVREIFEYDIPFAKRYLIDKGLVPMEGGEELKLLAFAIATFYHEGDEFAEGEILMISYADESGAKVITWKKIDLPYVEVVSTEREAIKRFLQVLREKDPDVLLTYNGDNFDFAYIKKRNEKLGLKFTIGRDGSEPKIQRMGDRFAVEVKGRIHLDLAPVVRHTIRLPTYTLEAVYEAVFGKKKEKVYAEEIAEAWKSEEGLKRVAQYSMEDARATYELGREFFPMEVELAKLIGQSVWDVSRSSTGNLVEWYLLRVAYERNELAPNKPGGEEYQRRMRSSYIGGYVKEPEKGLWESIAYLDFRSSAGSIIVTHNVSPDTLEKECKNYDVAPIVGYRFCKDFKGFIPSILEDLIETRQKVKRKMKATIDPIEKKMLDYRQRALKILANSYYGYQGYPKARWYSKECAESVTAWGRHYIETTIKEAEKFGFKVLYADTDGFFATIPNEKPETIKSKAKKFLKHINEKLPGMLELEYEGFYLRGFFVTKKKYALIDEDGHITTRGLEVVRRDWSEIAKETQAKVLEVILREGSIEKAAGIVKKVVEDLANYRVPVEKLIIHEQITRELKDYKATGPHVAIAKRLQARGIKVKPGTIISYVVLKGSKKISDRVILFDEYDSSRHKYDPDYYIHNQVLPAVLRILEAFGYKEKDLEYQRMKQTGLGAWLKMGKK

SEQ ID NO: 753 - protein, 773 aa, unidentified
  REGION 1..773: note = Description of Unknown: Synthetic polypeptide
MILDTDYITENGKSVIRIFKKEKGEFKIEYDRNFEPYIYALLEDDESIEDIKKITGERHGKKVRIIRVEKVKKKFLGEPIEVWKLVFEHPQDYPAIRDAIRSHPAVREIFEYDIPFAKRYLIDKGLVPMEGGEELKLLAFAIATFYHEGDEFAEGEILMISYADESGAKVITWKKIDLPYVEVVSTEREAIKRFLQVLREKDPDVLLTYNGDNFDFAYIKKRCEKLGLKFTIGRDGSEPKIQRMGDRFAVEVKGRIHLDLAPVVRHTIRLPTYTLEAVYEAVFGKKKEKVYAEEIAEAWKSEEGLKRVAQYSMEDARATYELGREFFPMEVELAKLIGQSVWDVSRSSTGNLVEWYLLRVAYERNELAPNKPGGEEYQRRMRSSYIGGYVKEPEKGLWESIAYLDFRSSAGSIIVTHNVSPDTLEKECKNYDVAPIVGYRFCKDFKGFIPSILEDLIETRQKVKRKMKATIDPIEKKMLDYRQRALKILANSYYGYQGYPKARWYSKECAESVTAWGRHYIETTIKEAEKFGFKVLYADTDGFFATIPNEKPETIKSKAKKFLKHINEKLPGMLELEYEGFYLRGFFVTKKKYALIDEDGHITTRGLEVVRRDWSEIAKETQAKVLEVILREGSIEKAAGIVKKVVEDLANYRVPVEKLIIHEQITRELKRYKATGPHVAIAKRLQARGIKVKPGTIISYVVLKGSKKISDRVILFDEYDSSRHKYDPDYYIHNQVLPAVLRILEAFGYKEKDLEYQRMKQTGLGAWLKMGKK

SEQ ID NO: 754 - protein, 773 aa, unidentified
  REGION 1..773: note = Description of Unknown: Synthetic polypeptide
MILDTDYITENGKPVIRIFKKEKGEFKIEYDRNFEPYIYALLEDDESIEDIKKITGERHGKKVRIIRVEKVKKKFLGEPIEVWKLVFEHPQDYPAIRDAIRSHPAVREIFEYDIPFAKRYLIDKGLVPMEGGEELKLLAFAIATFYHEGDEFAEGEILMISYADESGAKVITWKKIDLPYVEVVSTEREAIKRFLQVLREKDPDVLLTYNGDNFDFAYIKKRCEKLGLKFTIGRDGSEPKIQRMGDRFAVEVKGRIHLDLAPVVRHTIRLPTYTLEAVYEAVFGKKKEQVYAEEIAEAWKSEEGLKRVAQYSMEDARATYELGREFFPMEVELAKLIGQSVWDVSRSSTGNLVEWYLLRVAYERNELAPNKPGGEEYQRRMRSSYIGGYVKEPEKGLWESIAYLDFRSSAGSIIVTHNVSPDTLEKECKNYDVAPIVGYRFCKDFKGFIPSILEDLIETRQKVKRKMKATIDPIEKKMLDYRQRALKILANSYYGYQGYPKARWYTKECAESVTAWGRHYIETTIKEAEKFGFKVLYADTDGFFATIPNEKPETIKSKAKKFLKHINEKLPGMLELEYEGFYLRGFFVTKKKYALIDEDGHITTRGLEVVRRDWSEIAKETQAKVLEVILREGSIEKAAGIVKKVVEDLANYRVPVEKLIIHEQITRELKRYKATGPHVAIAKRLQARGIKVKPGTIISYVVLKGSKKISDRVILFDEYDSSRHKYDPDYYIHNQVLPAVLRILEAFGYKEKDLEYQRMKQTGLGAWLKMGKK

SEQ ID NO: 755 - protein, 772 aa, unidentified; identical to SEQ ID NO: 103
  REGION 1..772: note = Description of Unknown: Synthetic polypeptide

SEQ ID NO: 756 - protein, 773 aa, unidentified
  REGION 1..773: note = Description of Unknown: Synthetic polypeptide
MILDTDYITENGKPVIRIFKKEKGEFKIEYDRNFEPYIYALLEDDESIEDIKKITGERHGKKVRIIRVEKVKKKFLGEPIEVWKLVFEHPQDYPAIRDAIRSHPAVREIFEYDIPFAKRYLIDKGLVPMEGGEELKLLAFAIATFYHEGDEFAEGEILMISYADESGAKVITWKKIDLPYVEVVSTEREAIKRFLQVLREKDPDVLLTYNGDNFDFAYIKKRCEKLGLKFTIGRDGSEPKIQRMGDRFAVEVKGRIHLDLAPVVRHTIRLPTYTLEAVYEAVFGKKKEKVYAEEIAEAWKSEEGLKRVAQYSMEDARATYELGREFFPMEVELAKLIGQSVWDVSRSSTGNLVEWYLLRVAYERNELAPNKPGGEEYQRRMRSSYIGGYVKEPEKGLWESIAYLDFRSSAGSIIVTHNVSPDTLEKECKNYDVAPIVGYRFCKDFKGFIPSILEDLIETRQKVKRKMKATIDPIEKKMLDYRQRALKILANSYYGYFGYPKARWYLKEAAESVTAWGRHYIETTIKEAEKFGFKVLYADTDGFFATIPNEKPETIKSKAKKFLKHINEKLPGMLELEYEGFYLRGFFVTKKKYALIDEDGHITTRGLEVVRRDWSEIAKETQAKVLEVILREGSIEKAAGIVKKVVEDLANYRVPVEKLIIHEQITRELKRYKATGPHVAIAKRLQARGIKVKPGTIISYVVLKGSKKISDRVILFDEYDSSRHKYDPDYYIHNQVLPAVLRILEAFGYKEKDLEYQRMKQTGLGAWLKMGKK

SEQ ID NO: 757 - protein, 773 aa, unidentified
  REGION 1..773: note = Description of Unknown: Synthetic polypeptide
MILDTDYITENGKPVIRIFKKEKGEFKIEYDRNFEPYIYALLEDDESIEDIKKITGERHGKKVRIIRVEKVKKKFLGEPIEVWKLVFEHPQDVPAIRDAIRSHPAVREIFEYDIPFAKRYLIDKGLVPMEGGEELKLLAFNIATFYHEGDEFAEGEILMISYADESGAKVITWKKIDLPYVEVVSTEREAIKRFLQVLREKDPDVLLTYNGDNFDFAYIKKRCEKLGLKFTIGRDGSEPKIQRMGDRFAVEVKGRIHLDLAPVVRHTIRLPTYTLEAVYEAVFGKKKEKVYAEEIAEAWKSEEGLKRVAQYSMEDARATYELGREFFPLEVELAKLIGQSVWDVSRSSTGNLVEWYLLRVAYERNELAPNKPGGEEYQRRMRSSYIGGYVKEPEKGLWESIAYLDFRSSAGSIIVTHNVSPDTLEKECKNYDVAPIVGYRFCKDFKGFIPSILEDLIETRQKVKRKMKATIDPIEKKMLDYRQRALKILANSYYGYQGYPKARWYSKECAESVTAWGRHYIETTIKEAEKFGFKVLYADTDEFFATIPNEKPETIKSKAKKFLKHINEKLPGMLELEYEGFYLRGFFVTKKKYALIDEDGHITTRGLEVVRRDWSEIAKETQAKVLEVILREGSIEKAAGIVKKVVEDLANYRVPVEKLIIHEQITRELKRYKATGPHVAIAKRLQARGIKVKPGTIISYVVLKGSKKISDRVILFDEYDSSRHKYDPDYYIHNQVLPAVLRILEAFGYKEKDLEYQRMKQTGLGAWLKMGKK

SEQ ID NO: 758 - protein, 773 aa, unidentified
  REGION 1..773: note = Description of Unknown: Synthetic polypeptide
MILDTDYITENGKPVIRIFKKEKGEFKIEYDRNFEPYIYALLEDDESIEDIKKITGERHGKKVRIIRVEKVKKKFLGEPIEVWKLVFEHPQDVPAIRDAIRSHPAVREIFEYDIPFAKRYLIDKGLVPMEGGEELKLLAFNIATFYHEGDEFAEGEILMISYADESGAKVITWKKIDLPYVEVVSTEREAIKRFLQVLREKDPDVLLTYNGDNFDFAYIKKRCEKLGLKFTIGRDGSEPKIQRMGDRFAVEVKGRIHLDLAPVVRHTIRLPTYTLEAVYEAVFGKKKEKVYAEEIAEAWKSEEGLKRVAQYSMEDARATYELGREFFPLEVELAKLIGQSVWDVSRSSTGNLVEWYLLRVAYERNELAPNKPGGEEYQRRMRSSYIGGYVKEPEKGLWESIAYLDFRSSAGSIIVTHNISPDTLEKECKNYDVAPIVGYRFCKDFKGFIPSILEDLIETRQKVKRKMKATIDPIEKKMLDYRQRALKILANSYYGYQGYPKARWYSKECAESVTAWGRHYIETTIKEAEKFGFKVLYADTDGFFATIPNEKPETIKSKAKKFLKHINEKLPGMLELEYEGFYLRGFFVTKKKYALIDEDGHITTRGLEVVRRNWSEIAKETQAKVLEVILREGSIEKAAGIVKKVVEDLANYRVPVEKLIIHEQITRELKRYKATGPHVAIAKRLQARGIKVKPGTIISYVVLKGSKKISDRVILFDEYDSSRHKYDPDYYIHNQVLPAVLRILEAFGYKEKDLEYQRMKQTGLGAWLKMGKK

SEQ ID NO: 759 - protein, 773 aa, unidentified
  REGION 1..773: note = Description of Unknown: Synthetic polypeptide
MILDTDYITENGKPVIRIFKKEKGEFKIEYDRNFEPYIYALLEDDESIEDIKKITGERHGKKVRIIRVEKVKKKFLGEPIEVWKLVFEHPQDYPAIRDAIRSHPAVREIFEYDIPFAKRYLIDKGLVPMEGGEELKLLAFAIATFYHEGDEFAEGEILMISYADESGAKVITWKKIDLPYVEVVSTEREAIKRFLQVLREKDPDVLLTYNGDNFDFAYIKKRCEKLGLKFTIGRDGSEPKIQRMGDRFAVEVKGRIHLDLAPVVRHTIRLPTYTLEAVYEAVFGKKKEKVYAEEIAEAWKSEEGLKRVAQYSMEDARATYELGREFFPMEVELAKLIGQSVWDVSRSSTGNLVEWYLLRVAYERNELAPNKPGGEEYQRRMRSSYIGGYVKEPEKGLWESIAYLDFRSSAGSIIVTHNVSPDTLEKECKNYDVAPIVGYRFCKDFKGFIPSILEDLIETRQKVKRKMKATIDPIEKKMLDYRQRALKILANSYYGYQGYPKARWYSKECAESVTAWGRHYIETTIKEAEKFGFKVLYADTDGFFATIPNEKPETIKSKAKKFLKHINEKLPGMLELEYEGFYLRGFFVTKKKYALIDEDGHITTRGLEVVRRDWSEIAKETQAKVLEVILREGSIEKAAGIVKKVVEDLANYRVPVEKLIIHEQITRELKRYKATGPHVAIAKRLQARGIKVKPGTIISYVVLKGSKKISDRVILFDEYDSSRHKYDPDYYIHNQVLPAVLRILEAFGYKEKDLEYQRMKQTGLYAWLKMGKK

SEQ ID NO: 760 - protein, 773 aa, unidentified
  REGION 1..773: note = Description of Unknown: Synthetic polypeptide
MILDTDYITENGKPVIRIFKKEKGEFKIEYDRNFEPYIYALLEDDESIEDIKKITGERHGKKVRIIRVEKVKKKFLGEPIEVWKLVFQHPQDYPAIRDAIRSHPAVREIFEYDIPFAKRYLIDKGLVPMEGGEELKLLAFAIATFYHEGDEFAEGEILMISYADESGAKVITWKKIDLPYVEVVSTEREAIKRFLQVLREKDPDVLLTYNGDNFDFAYIKKRCEKLGLKFTIGRDGSEPKIQRMGDRFAVEVKGRIHLDLAPVVRHTIRLPTYTLEAVYEAVFGKKKEKVYAEEIAEAWKSEEGLKRVAQYSMEDARATYELGREFFPMEVELAKLIGQSVWDVSRSSTGNLVEWYLLRVAYERNELAPNKPGGEEYQRRMRSSYIGGYVKEPEKGLWESIAYLDFRSSAGSIIVTHNVSPDTLEKECKNYDVAPIVGYRFCKDFKGFIPSILEDLIETRQKVKRKMKATIDPIEKKMLDYRQRALKILANSYYGYQGYPKARWYSKECAESVTAWGRHYIETTIKEAEKFGFKVLYADTDGFFATIPNEKPETIKSKAKKFLKHINEKLPGMLELEYEGFYLRGFFVTKKKYALIDEDGHITTRGLEVVRRDWSEIAKETQAKVLEVILREGSIEKAAGIVKKVVEDLANYRVPVEKLIIHEQITRELKRYKATGPHVAIAKRLQARGIKVKPGTIISYVVLKGSKKISDRVILFDEYDSSRHKYDPDYYIHNQVLPAVLRILEAFGYKEKDLEYQRMKQTGLGAWLKMGKK

SEQ ID NO: 761 - protein, 773 aa, unidentified
  REGION 1..773: note = Description of Unknown: Synthetic polypeptide
MILDTDYITENGKPVIRIFKKEKGEFKIEYDRNFEPYIYALLEDDESIEDIKKITGERHGKKVRIIRVEKVKKKFLGEPIEVWKLVFEHPQDVPAIRDAIRSHPAVREIFEYDIPFAKRYLIDKGLVPMEGGEELKLLAFNIATFYHEGDEFAEGEILMISYADESGAKVITWKKIDLPYVEVVSTEREAIKRFLQVLREKDPDVLLTYNGDNFDFAYIKKRCEKLGLKFTIGRDGSEPKIQRMGDRFAVEVKGRIHLDLAPVVRHTIRLPTYTLEAVYEAVFGKKKEKVYAEEIAEAWKSEEGLKRVAQYSMEDARATYELGREFFPLEVELAKLIGQSVWDVSRSSTGNLVEWYLLRVAYERNELAPNKPGGEEYQRRMRSSYIGGYVKEPEKGLWESIAYLDFRSSAGSIIVTHNVSPDTLEKECKNYDVAPIVGYRFCKDFKGFIPSILEDLIETRQKVKRKMKATIDPIEKKMLDYRQRALKILANSYYGYQGYPKARWYSKECAESVTAWGRHYIETTIKEAEKFGFKVLYADTDGFFATIPNEKPETIKSKAKKFLKHINEKLPGMLELEYEGFYLRGFFVTKKKYALIDEDGHITTRGLEVVRRDWSEIAKETQAKVLEVILREGSIEKAAGIVKKVVEDLANYRVPVEKLIIHEQITRELKRYKATEPHVAIAKRLQARGIKVKPGTIISYVVLKGSKKISDRVILFDEYDSSRHKYDPDYYIHNQVLPAVLRILEAFGYKEKDLEYQRMKQTGLGAWLKMGKK

SEQ ID NO: 762 - protein, 773 aa, unidentified
  REGION 1..773: note = Description of Unknown: Synthetic polypeptide
MILDTDYITENGKPVIRIFKKEKGEFKIEYDRNFEPYIYALLEDDESIEDIKKITGERHGKKVRIIRVEKVKKKFLGEPIEVWKLVFEHPQDYPAIRDAIRSHPAVREIFEYDIPFAKRYLIDKGLVPMEGGEELKLLAFAIATFYHEGDEFAEGEILMISYADESGAKVITWKKIDLPYVEVVSTEREAIKRFLQVLREKDPDVLLTYNGDNFDFAYIKKRCEKLGLKFTIGRDGSEPKIQRMGDRFAVEVKGRIHLDLAPVVRHTIRLPTYTLEAVYEAVFGKKKEKVYAEEIAEAWKSEEGLKRVAQYSMEDARATYELGREFFPMEVELAKLIGQSVWDVSRSSTGNLVEWYLLRVAYERNELAPNKPGGEEYQRRMRSSYIGGYVKEPEKGLWESIAYLDFRSSAGSIIVTHNVSPDTLEKECKNYDVAPIVGYRFCKDFKGFIPSILEDLIETRQKVKRKMKATIDPIEKKMLDYRQRALKILANSYYGYLGYPKARWYSKEAAESVTAWGRHYIETTIKEAEKFGFKVLYADTDGFFATIPNEKPETIKSKAKKFLKHINEKLPGMLELEYEGFYLRGFFVTKKKYALIDEDGHITTRGLEVVRRDWSEIAKETQAKVLEVILREGSIEKAAGIVKKVVEDLANYRVPVEKLIIHEQITRELKRYKATGPHVAIAKRLQARGIKVKPGTIISYVVLKGSKKISDRVILFDEYDSSRHKYDPDYYIHNQVLPAVLRILEAFGYKEKDLEYQRMKQTGLGAWLKMGKK

SEQ ID NO: 763 - protein, 773 aa, unidentified
  REGION 1..773: note = Description of Unknown: Synthetic polypeptide
MILDTDYITENGKPVIRIFKKEKGEFKIEYDRNFEPYIYALLEDDESIEDIKKITGERHGKKVRIIRVEKVKKKFLGEPIEVWKLVFEHPQDVPAIRDAIRSHPAVREIFEYDIPFAKRYLIDKGLVPMEGGEELKLLAFNIATFYHEGDEFAEGEILMISYADESGAKVITWKKIDLPYVEVVSTEREAIKRFLQVLREKDPDVLLTYNGDNFDFAYIKKRCEKLGLKFTIGRDGSEPKIQRMGDRFAVEVKGRIHLDLAPVVRHTIRLPTYTLEAVYEAVFGKKKEKVYAEEIAEAWKSEEGLKRVAQYSMEDARATYELGREFFPLEVELAKLIGQSVWDVSRSSTGNLVEWYLLRVAYERNELAPNKPGGEEYQRRMRSSYIGGYVKEPEKGLWESIAYLDFRSSAGSIIVTHNISPDTLEKECKNYDVAPIVGYRFCKDFKGFIPSILEDLIETRQKVKRKMKATIDPIEKKMLDYRQRALKILANSYYGYQGYPKARWYSKECAESVTAWGRHYIETTIKEAEKFGFKVLYADTDGFFATIPNEKPETIKSKAKKFLKHINEKLPGMLELEYEGFYLRGFFVTKKKYALIDEDGHITTRGLEVVRRNWSEIAKETQAKVLEVILREGSIEKAAGIVKKVVEDLANYRVPVEKLIIHEFITRELKRYKATGPHVAIAKRLQARGIKVKPGTIISYVVLKGSKKISDRVILFDEYDSSRHKYDPDYYIHNQVLPAVLRILEAFGYKEKDLEYQRMKQTGLGAWLKMGKK

SEQ ID NO: 764 - protein, 773 aa, unidentified
  REGION 1..773: note = Description of Unknown: Synthetic polypeptide
MILDTDYITENGKPVIRIFKKEKGEFKIEYDRNFEPYIYALLEDDESIEDIKKITGERHGKKVRIIRVEKVKKKFLGEPIEVWKLVFELPQDVPAIQDAIRSHPAVREIFEYDIPFAKRYLIDKGLVPMEGGEELKLLAFNIATFYHEGDEFAEGEILMISYADESGAKVITWKKIDLPYVEVVSTEREAIKRFLQVLREKDPDVLLTYNGDNFDFAYIKKRCEKLGLKFTIGRDGSEPKIQRMGDRFAVEVKGRIHLDLAPVVRHTIRLPTYTLEAVYEAVFGKKKEKVYAEEIAEAWKSEEGLKRVAQYSMEDARATYELGREFFPLEVELAKLIGQSVWDVSRSSTGNLVEWYLLRVAYERNELAPNKPGGEEYQRRMRSSYIGGYVKEPEKGLWESIAYLDFRSSAGSIIVTHNVSPDTLEKECKNYDVAPIVGYRFCKDFKGFIPSILEDLIETRQKVKRKMKATIDPIEKKMLDYRQRALKILANSYYGYQGYPKARWYSKECAESVTAWGRHYIETTIKEAEKFGFKVLYADTDGFFATIPNEKPETIKSKAKKFLKHINEKLPGMLELEYEGFYLRGFFVTKKKYALIDEDGHITTRGLEVVRRDWSEIAKETQAKVLEVILREGSIEKAAGIVKKVVEDLANYRVPVEKLIIHEQITRELKRYKATGPHVAIAKRLQARGIKVKPGTIISYVVLKGSKKISDRVILFDEYDSSRHKYDPDYYIHNQVLPAVLRILEAFGYKEKDLEYQRMKQTGLGAWLKMGKK

SEQ ID NO: 765 - protein, 773 aa, unidentified
  REGION 1..773: note = Description of Unknown: Synthetic polypeptide
YILDTDYITENGKPVIRIFKKEKGEFKIEYDRNFEPYIYALLEDDESIEDIKKITGERHGKKVRIIRVEKVKKKFLGEPIEVWKLVFEHPQDYPAIRDAIRSHPAVREIFEYDIPFAKRYLIDKGLVPFEGGEELKLLAFAIATFYHEGDEFAEGEILMISYADESGAKVITWKKIDLPYVEVVSTEREAIKRFLQVLREKDPDVLLTYNGDNFDFAYIKKRCEKLGLKFTIGRDGSEPKIQRMGDRFAVEVKGRIHLDLAPVVRHTIRLPTYTLEAVYEAVFGKKKEKVYAEEIAEAWKSEEGLKRVAQYSMEDARATYELGREFFPMEVELAKLIGQSVWDVSRSSTGNLVEWYLLRVAYERNELAPNKPGGEEYQRRMRSSYIGGYVKEPEKGLWESIAYLDFRSSAGSIIVTHNVSPDTLEKECKNYDVAPIVGYRFCKDFKGFIPSILEDLIETRQKVKRKMKATIDPIEKKMLDYRQRALKILANSYYGYQGYPKARWYSKECAESVTAWGRHYIETTIKEAEKFGFKVLYADTDGFFATIPNEKPETIKSKAKKFLKHINEKLPGMLELEYEGFYLRGFFVTKKKYALIDEDGHITTRGLEVVRRDWSEIAKETQAKVLEVILREGSIEKAAGIVKKVVEDLANYRVPVEKLIIHEQITRELKRYKATGPHVAIAKRLQARGIKVKPGTIISYVVLKGSKKISDRVILFDEYDSSRHKYDPDYYIHNQVLPAVLRILEAFGYKEKDLEYQRMKQTGLGAWLKMGKK

SEQ ID NO: 766 - protein, 757 aa, unidentified
  REGION 1..757: note = Description of Unknown: Synthetic polypeptide
MILDTDYITENGKPVIRIFKKEKGEFKIEYDRNFEPYIYALLEDDESIEDIKKITGERHGKKVRIIRVEKVKKKFLGEPIEVWKLVFEHPQDVPAIRDAIRSHPAVREIFEYDIPFAKRYLIDKGLVPMEGGEELKLLAFNIATFYHEGDEFAEGEILMISYADESGAKVITWKKIDLPYVEVVSTEREAIKRFLQVLREKDPDVLLTYNGDNFDFAYIKKRCEKLGLKFTIGRDGSEPKIQRMGDRFAVEVKGRIHLDLAPVVRRTIRLPTYTLEAVYEAVFGKKKEKVYAEEIAEAWKSEEGLKRVAQYSMEDARATYELGREFFPLEVELAKLIGQSVWDVSRSSTGNLVEWYLLRVAYERNELAPNKPGGEEYQRRRRSSYIGGYVKEPEKGLWESIAYLDFRSSAGSIIVTHNVSPDTLEKECKNYDVAPIVGYRFCKDFKGFIPSILEDLIETRQKVKRKMKATIDPIEKKMLDYRQRALKILANSYYGYQGYPKARWYSKECAESVTAWGRHYIETTIKEAEKFGFKVLYADTDGFFATIPNEKPETIKSKAKKFLKHINEKLPGMLELEYEGFYLRGFFVTKKKYALIDEDGHITTRGLEVVRRDWSEIAKETQAKVLEVILREGSIEKAAGIVKKVVEDLANYRVPVEKLIIHEQITRELKRYKATGPHVAIAKRLQARGIKVKPGTIISYVVLKGSKKISDRVILFDEYDSSRHKYDPDYYIHNQVLPAVLRILEAFGYKEKDLEYQ

SEQ ID NO: 767 - protein, 773 aa, unidentified; identical to SEQ ID NO: 736
  REGION 1..773: note = Description of Unknown: Synthetic polypeptide

SEQ ID NO: 768 - protein, 773 aa, unidentified
  REGION 1..773: note = Description of Unknown: Synthetic polypeptide
MILDTDYITENGKPVIRIFKKEKGEFKIEYDRNFEPYIYALLEDDESIEDIKKITGERHGKKVRIIRVEKVKKKFLGEPIEVWKLVFEHPQDYPAIRDAIRSHPAVREIFEYDIPFAKRYLIDKGLVPMEGGEELKLLAFAIATFYHEGDEFAEGEILMISYADESGAKVITWKKIDLPYVEVVSTEREAIKRFLQVLREKDPDVLLTYNGDNFDFAYIKKRCEKLGLKFTIGRDGSEPKIQRMGDRFAVEVKGRIHLDLAPVVRHTIRLPTYTLEAVYEAVFGKKKEKVYAEEIAEAWKSEEGLKRVAQYSMEDARATYELGREFFPMEVELAKLIGQSVWDVSRSSTGNLVEWYLLRVAYERNELAPNKPGGEEYQRRMRSSYIGGYVKEPEKGLWESIAYLDFRSSAGSIIVTHNVSPDTLEKECKNYDVAPIVGYRFCKDFKGFIPSILEDLIETRQKVKRKMKATIDPIEKKMLDYRQRALKILANSYYGYQGYPKARWYSKECAESVTAWGRHYIETTIKEAEKFGFKVLYADTDGFFATIPNEKPETIKSKAKKFLKHINEKLPGMLELEYEGFYLRGFFVTKKKYALIDEDGHITTRGLEVVRRDWSEIAKETQAKVLEVILREGSIEKAAGIVKKVVEDLANYRVPVEKLIIHEQITRELKRYKATGPHVAIAKRLQARGIKVDPGTIISYVVLKGSKKISDRVILFDEYDSSRHKYDPDYYIHNQVLPAVLRILEAFGYKEKDLEYQRMKQTGLGAWLKMGKK

SEQ ID NO: 769 - protein, 773 aa, unidentified
  REGION 1..773: note = Description of Unknown: Synthetic polypeptide
MILDTDYITENGKPVIRIFKKEKGEFKIEYDRNFEPYIYALLEDDESIEDIKKITGERHGKKVRIIRVEKVKKKFLGEPIEVWKLVFEHPQDYPAIRDAIRSHPAVREIFEYDIPFAKRYLIDKGLVPMEGGEELKLLAFAIATFYHEGDEFAEGEILMISYADESGAKVITWKKIDLPYVEVVSTEREAIKRFLQVLREKDPDVLLTYNGDNFDFAYIKKRCEKLGLKFTIGRDGSEPKIQRMGDRFAVEVKGRIHLDLAPVVRHTIRLPTYTLEAVYEAVFGKKKEKVYAEEIAEAWKSEEGLKRVAQYSMEDARATYELGREFFPMEVELAKLIGQSVWDVSRSSTGNLVEWYLLRVAYERNELAPNKPGGEEYQRRMRSSYIGGYVKEPEKGLWESIAYLDFRSSAGSIIVTHNISPDTLEKECKNYDVAPIVGYRFCKDFKGFIPSILEDLIETRQKVKRKMKATIDPIEKKMLDYRQRALKILANSYYGYRGYPKARWYSKEAAESVTAWGRHYIETTIKEAEKFGFKVLYADTDGFFATIPNEKPETIKSKAKKFLKHINEKLPGMLELEYEGFYLRGFFVTKKKYALIDEDGHITTRGLEVVRRDWSEIAKETQAKVLEVILREGSIEKAAGIVKKVVEDLANYRVPVEKLIIHEQITRELKRYKATGPHVAIAKRLQARGIKVKPGTIISYVVLKGSKKISDRVILFDEYDSSRHKYDPDYYIHNQVLPAVLRILEAFGYKEKDLEYQRMKQTGLGAWLKMGKK

SEQ ID NO: 770 - protein, 773 aa, unidentified
  REGION 1..773: note = Description of Unknown: Synthetic polypeptide
MILDTDYITENGKPVIRIFKKEKGEFKIEYDRNFEPYIYALLEDDESIEDIKKITGERHGKKVRIIRVEKVKKKFLGEPIEVWKLVFEHPQDYPAIRDAIRSHPAVREIFEYDIPFAKRYLIDKGLVPMEGGEELKLLAFAIATFYHEGDEFAEGEILMISYADESGAKVITWKKIDLPYVEVVSTEREAIKRFLQVLREKDPDVLLTYNGDNFDFAYIKKRCEKLGLKFTIGRDGSEPKIQRMGDRFAVEVKGRIHLDLAPVVRHTIRLPTYTLEAVYEAVFGKKKEKVYAEEIAEAWKSEEGLKRVAQYSMEDARATYELGREFFPMEVELAKLIGQSVWDVSRSSTGNLVEWYLLRVAYERNELAPNKPGGEEYQRRMRSSYIGGYVKEPEKGLWESIAYLDFRSSAGSIIVTHNVSPDTLEKECKNYDVAPIVGYRFCKDFKGFIPSILEDLIETRQKVKRKMKATIDPIEKKMLDYRQRALKILANSYYGYQGYPKARWYSKECAESVTAWGRHYIETTIKEAEKFGFKVLYADTDGFFATIPNEKPETIKSKAKKFLKHINEKLPGMLELEYEGFYLRGFFVTKKKYALIDEDGHITTRNLEVVRRDWSEIAKETQAKVLEVILREGSIEKAAGIVKKVVEDLANYRVPVEKLIIHEQITRELKRYKATGPHVAIAKRLQARGIKVKPGTIISYVVLKGSKKISDRVILFDEYDSSRHKYDPDYYIHNQVLPAVLRILEAFGYKEKDLEYQRMKQTGLGAWLKMGKK

SEQ ID NO: 771 - protein, 773 aa, unidentified
  REGION 1..773: note = Description of Unknown: Synthetic polypeptide
MILDTDYITENGKPVIRIFKKEKGEFKIEYDRNFEPYIYALLEDDESIEDIKKITGERHGKKVRIIRVEKVKKKFLGEPIEVWKLVFEHPQDVPAIRDAIRSHPAVREIFEYDIPFAKRYLIDKGLVPMEGGEELKLLAFNIATFYHEGDEFAEGEILMISYADESGAKVITWKKIDLPYVEVVSTEREAIKRFLQVLREKDPDVLLTYNGDNFDFAYIKKRCEKLGLKFTIGRDGSEPKIQRMGDRFAVEVKGRIHLDLAPVVRHTIRLPTYTLEAVYEAVFGKKKEKVYAEEIAEAWKSEEGLKRVAQYSMEDARATYELGREFFPLEVELAKLIGQSVWDVSRSSTGNLVEWYLLRVAYERNELAPNKPGGEEYQRRMRSSYIGGYVKEPEKGLWESIAYLDFRSSAGSIIVTHNVSPDTLEKECKNYDVAPIVGYRFCKDFKGFIPSILEDLIETRQKVKRKMKATIDPIEKKMLDYRQRALKILANSYYGYQGYPKARWYSKECAESVTAWGRHYIETTIKEAEKFGFKVLYADTDGFFATIPNEKPETIKSKAKKFLKHINEKLPGMLELEYEGFYLRGFFVTKKKYALIDEDGHITTRGLEVVRRDWSEIAKETQAKVLEVILREGSIEKAAGIVKKVVEDLANYRVPVEKLIIHELITRRLKRYKATGPHVAIAKRLQARGIKVKPGTIISYVVLKGSKKISDRVILFDEYDSSRHKYDPDYYIHNQVLPAVLRILEAFGYKEKDLEYQRMKQTGLGAWLKMGKK

SEQ ID NO: 772 - protein, 773 aa, unidentified
  REGION 1..773: note = Description of Unknown: Synthetic polypeptide
MILDTDYITENGKPVIRIFKKEKGEFKIEYDRNFEPYIYALLEDDESIEDIKKITGERHGKKVRIIRVEKVKKKFLGEPIEVWKLVFEHPQDVPAIRDAIRSHPAVREIFEYDIPFAKRYLIDKGLVPMEGGEELKLLAFNIATFYHEGDEFAEGEILMISYADESGAKVITWKKIDLPYVEVVSTEREAIKRFLQVLREKDPDVLLTYNGDNFDFAYIKKRCEKLGLKFTIGRDGSEPKIQRMGDRFAVEVKGRIHLDLAPVVRHTIRLPTYTLEAVYEAVFGKKKEKVYAEEIAEAWKSEEGLKRVAQYSMEDARATYELGREFFPLEVELAKLIGQSVWDVSRSSTGNLVEWYLLRVAYERNELAPNKPGGEEYQRRMRSSYIGGYVKEPEKGLWESIAYLDFRSSAGSIIVTHNVSPDTLEKECKNYDVAPIVGYRFCKDFKGFIPSILEDLIETRQKVKRKMKATIDPIEKKMLDYRQRALKILANSYYGYQGYPKARWYSKECAESVTAWGRHYIETTIKEAEKFGFKVLYADTDGFFATIPNEKPETIKSKAKKFLKHINEKLPGMLELEYEGFYLRGFFVTKKKYALIDEDGHITTRGLEVVRRNWSEIAKETQAKVLEVILREGSIEKAAGIVKKVVEDLANYRVPVEKLIIHEFITRELKRYKATGLHVAIAKRLQARGIKVKPGTIISYVVLKGSKKISDRVILFDEYDSSRHKYDPDYYIHNQVLPAVLRILEAFGYKEKDLEYQRMKQTGLGAWLKMGKK

SEQ ID NO: 773 - protein, 773 aa, unidentified
  REGION 1..773: note = Description of Unknown: Synthetic polypeptide
MILDTDYITENGKPVIRIFKKEKGEFKIEYDRNFEPYIYALLEDDESIEDIKKITGERHGKKVRIIRVEKVKKKFLGEPIEVWKLVFEHPQDYPAIRDAIRSHPAVREIFEYDIPFAKRYLIDKGLVPMEGGEELKLLAFTIATFYHEGDEFAEGEILMISYADESGAKVITWKKIDLPYVEVVSTEREAIKRFLQVLREKDPDVLLTYNGDNFDFAYIKKRCEKLGLKFTIGRDGSEPKIQRMGDRFAVEVKGRIHLDLAPVVRHTIRLPTYTLEAVYEAVFGKKKEKVYAEEIAEAWKSEEGLKRVAQYSMEDARATYELGREFFPMEVELAKLIGQSVWDVSRSSTGNLVEWYLLRVAYERNELAPNKPGGEEYQRRMRSSYIGGYVKEPEKGLWESIAYLDFRSSAGSIIVTHNVSPDTLEKECKNYDVAPIVGYRFCKDFKGFIPSILEDLIETRQKVKRKMKATIDPIEKKMLDYRQRALKILANSYYGYQGYPKARWYSKECAESVTAWGRHYIETTIKEAEKFGFKVLYADTDGFFATIPNEKPETIKSKAKKFLKHINEKLPGMLELEYEGFYLRGFFVTKKKYALIDEDGHITTRGLEVVRRDWSEIAKETQAKVLEVILREGSIEKAAGIVKKVVEDLANYRVPVEKLIIHEQITRELKRYKATGPHVAIAKRLQARGIKVKPGTIISYVVLKGSKKISDRVILFDEYDSSRHKYDPDYYIHNQVLPAVLRILEAFGYKEKDLEYQRMKQTGLGAWLKMGKK

SEQ ID NO: 774 - protein, 757 aa, unidentified
  REGION 1..757: note = Description of Unknown: Synthetic polypeptide
MILDTDYITENGKPVIRIFKKEKGEFKIEYDRNFEPYIYALLEDDESIEDIKKITGERHGKKVRIIRVEKVKKKFLGEPIEVWKLVFEHPQDVPAIRDAIRSHPAVREIFEYDIPFAKRYLIDKGLVPMEGGEELKLLAFAIATFYHEGDEFAEGEILMISYADESGAKVITWKKIDLPYVEVVSTEREAIKRFLQVLREKDPDVLLTYNGDNFDFAYIKKRCEKLGLKFTIGRDGSEPKIQRMGDRFAVEVKGRIHLDLAPVVRHTIRLPTYTLEAVYEAVFGKKKEKVYAEEIAEAWKSEEGLKRVAQYSMEDARATYELGREFFPMEVELAKLIGQSVWDVSRSSTGNLVEWYLLRVAYERNELAPNKPGGEEYQRRMRSSYIGGYVKEPEKGLWESIAYLDFRSSAGSIIVTHNVSPDTLEKECKNYDVAPIVGYRFCKDFKGFIPSILEDLIETRQKVKRKMKATIDPIEKKMLDYRQRALKILANSYYGYQGYPKARWYSKECAESVTAWGRHYIETTIKEAEKFGFKVLYADTDGFFATIPNEKPETIKSKAKKFLKHINEKLPGMLELEYEGFYLRGFFVTKKKYALIDEDGHITTRGLEVVRRDWSEIAKETQAKVLEVILREGSIEKAAGIVKKVVEDLANYRVPVEKLIIHEQITRRLKDYKATGPHVAIAKRLQARGIKVKPGTIISYVVLKGSKKISDRVILFDEYDSSRHKYDPDYYIHNQVLPAVLRILEAFGYKEKDLEYQ

SEQ ID NO: 775 - protein, 773 aa, unidentified
  REGION 1..773: note = Description of Unknown: Synthetic polypeptide
MILDTDYITENGKPVIRIFKKEKGEFKIEYDRNFEPYIYALLEDDESIEDIKKITGERHGKKVRIIRVEKVKKKFLGEPIEVWKLVFEQPQDFPAIRDAIRSHPAVREIFEYDIPFAKRYLIDKGLVPMEGGEELKLLAFNIATFYHEGDEFAEGEILMISYADESGAKVITWKKIDLPYVEVVSTEREAIKRFLQVLREKDPDVLLTYNGDNFDFAYIKKRCEKLGLKFTIGRDGSEPKIQRMGDRFAVEVKGRIHLDLAPVVRHTIRLPTYTLEAVYEAVFGKKKEKVYAEEIAEAWKSEEGLKRVAQYSMEDARATYELGREFFPLEVELAKLIGQSVWDVSRSSTGNLVEWYLLRVAYERNELAPNKPGGEEYQRRMRSSYIGGYVKEPEKGLWESIAYLDFRSSAGSIIVTHNVSPDTLEKECKNYDVAPIVGYRFCKDFKGFIPSILEDLIETRQKVKRKMKATIDPIEKKMLDYRQRALKILANSYYGYQGYPKARWYSKECAESVTAWGRHYIETTIKEAEKFGFKVLYADTDGFFATIPNEKPETIKSKAKKFLKHINEKLPGMLELEYEGFYLRGFFVTKKKYALIDEDGHITTRGLEVVRRDWSEIAKETQAKVLEVILREGSIEKAAGIVKKVVEDLANYRVPVEKLIIHEQITRELKRYKATGPHVAIAKRLQARGIKVKPGTIISYVVLKGSKKISDRVILFDEYDSSRHKYDPDYYIHNQVLPAVLRILEAFGYKEKDLEYQRMKQTGLGAWLKMGKK

SEQ ID NO: 776 - protein, 773 aa, unidentified
  REGION 1..773: note = Description of Unknown: Synthetic polypeptide
MILDTDYITENGKPVIRIFKKEKGEFKIEYDRNFEPYIYALLEDDESIEDIKKITGERHGKKVRIIRVEKVKKKFLGEPIEVWKLVFEHPQDVPAIRDAIRSHPAVREIFEYDIPFAKRYLIDKGLVPMEGGEELKLLAFKIATFYHEGDEFAEGEILMISYADESGAKVITWKKIDLPYVEVVSTEREAIKRFLQVLREKDPDVLLTYNGDNFDFAYIKKRCEKLGLKFTIGRDGSEPKIQRMGDRFAVEVKGRIHLDLAPVVRHTIRLPTYTLEAVYEAVFGKKKEKVYAEEIAEAWKSEEGLKRVAQYSMEDARATYELGREFFPLEVELAKLIGQSVWDVSRSSTGNLVEWYLLRVAYERNELAPNKPGGEEYQRRMRSSYIGGYVKEPEKGLWESIAYLDFRSSAGSIIVTHNVSPDTLEKECKNYDVAPIVGYRFCKDFKGFIPSILEDLIETRQKVKRKMKATIDPIEKKMLDYRQRALKILANSYYGYQGYPKARWYSKECAESVTAWGRHYIETTIKEAEKFGFKVLYADTDGFFATIPNEKPETIKSKAKKFLKHINEKLPGMLELEYEGFYLRGFFVTKKKYALIDEDGHITTRGLEVVRRDWSEIAKETQAKVLEVILREGSIEKAAGIVKKVVEDLANYRVPVEKLIIHELITRELKRYKATGPHVAIAKRLQARGIKVKPGTIISYVVLKGSKKISDRVILFDEYDSSRHKYDPDYYIHNQVLPAVLRILEAFGYKEKDLEYQRMKQTGLGAWLKMGKK

SEQ ID NO: 777 - protein, 773 aa, unidentified
  REGION 1..773: note = Description of Unknown: Synthetic polypeptide
MILDTDYITENGKPVIRIFKKEKGEFKIEYDRNFEPYIYALLEDDESIEDIKKITGERHGKKVRIIRVEKVKKKFLGEPIEVWKLVFELPQDFPAIRDAIRSHPAVREIFEYDIPFAKRYLIDKGLVPMEGGEELKLLAFNIATFYHEGDEFAEGEILMISYADESGAKVITWKKIDLPYVEVVSTEREAIKRFLQVLREKDPDVLLTYNGDNFDFAYIKKRCEKLGLKFTIGRDGSEPKIQRMGDRFAVEVKGRIHLDLAPVVRHTIRLPTYTLEAVYEAVFGKKKEKVYAEEIAEAWKSEEGLKRVAQYSMEDARATYELGREFFPLEVELAKLIGQSVWDVSRSSTGNLVEWYLLRVAYERNELAPNKPGGEEYQRRMRSSYIGGYVKEPEKGLWESIAYLDFRSSAGSIIVTHNVSPDTLEKECKNYDVAPIVGYRFCKDFKGFIPSILEDLIETRQKVKRKMKATIDPIEKKMLDYRQRALKILANSYYGYQGYPKARWYSKECAESVTAWGRHYIETTIKEAEKFGFKVLYADTDGFFATIPNEKPETIKSKAKKFLKHINEKLPGMLELEYEGFYLRGFFVTKKKYALIDEDGHITTRGLEVVRRDWSEIAKETQAKVLEVILREGSIEKAAGIVKKVVEDLANYRVPVEKLIIHEQITRELKRYKATGPHVAIAKRLQARGIKVKPGTIISYVVLKGSKKISDRVILFDEYDSSRHKYDPDYYIHNQVLPAVLRILEAFGYKEKDLEYQRMKQTGLGAWLKMGKK

SEQ ID NO: 778 - protein, 757 aa, unidentified
  REGION 1..757: note = Description of Unknown: Synthetic polypeptide
MILDTDYITENGKPVIRIFKKEKGEFKIEYDRNFEPYIYALLEDDESIEDIKKITGERHGKKVRIIRVEKVKKKFLGEPIEVWKLVFEHPQDVPAIRDAIRSHPAVREIFEYDIPFAKRYLIDKGLVPMEGGEELKLLAFAIATFYHEGDEFAEGEILMISYADESGAKVITWKKIDLPYVEVVSTEREAIKRFLQVLREKDPDVLLTYNGDNFDFAYIKKRCEKLGLKFTIGRDGSEPKIQRMGDRFAVEVKGRIHLDLAPVVRHTIRLPTYTLEAVYEAVFGKKKENVYAEEIAEAWKSEEGLKRVAQYSMEDARATYELGREFFPMEVELAKLIGQSVWDVSRSSTGNLVEWYLLRVAYERNELAPNKPGGEEYQRRMRSSYIGGYVKEPEKGLWESIAYLDFRSSAGSIIVTHNVSPDTLEKECKNYDVAPIVGYRFCKDFKGFIPSILEDLIETRQKVKRKMKATIDPIEKKMLDYRQRALKILANSYYGYQGYPKARWYSKECAESVTAWGRHYIETTIKEAEKFGFKVLYADTDGFFATIPNEKPETIKSKAKKFLKHINEKLPGMLELEYEGFYLRGFFVTKKKYALIDEDGHITTRGLEVVRRDWSEIAKETQAKVLEVILREGSIEKAAGIVKKVVEDLANYRVPVEKLIIHEQITRELKRYKATGPHVAIAKRLQARGIKVKPGTIISYVVLKGSKKISDRVILFDEYDSSRHKYDPDYYIHNQVLPAVLRILEAFGYKEKDLEYQ

SEQ ID NO: 779 - protein, 773 aa, unidentified
  REGION 1..773: note = Description of Unknown: Synthetic polypeptide
MILDTDYITENGKPVIRIFKKEKGEFKIEYDRNFEPYIYALLEDDESIEDIKKITGERHGKKVRIIRVEKVKKKFLGEPIEVWKLVFEHPQDYPAIRDAIRSHPAVREIFEYDIPFAKRYLIDKGLVPMEGGEELKLLAFAIATFYHEGDEFAEGEILMISYADESGAKVITWKKIDLPYVEVVSTEREAIKRFLQVLREKDPDVLLTYNGDNFDFAYIKKRCEKLGLKFTIGRDGSEPKIQRMGDRFAVEVKGRIHLDLAPVVRHTIRLPTYTLEAVYEAVFGKKKEKVYAEEIAEAWKSEEGLKRVAQYSMEDARATYELGREFFPMEVELAKLIGQSVWDVSRSSTGNLVEWYLLRVAYERNELAPNKPGGEEYQRRMRSSYKGGYVKEPEKGLWESIAYLDFRSSAGSIIVTHNVSPDTLEKECKNYDVAPIVGYRFCKDFKGFIPSILEDLIETRQKVKRKMKATIDPIEKKMLDYRQRALKILANSYYGYQGYPKARWYSKECAESVTAWGRHYIETTIKEAEKFGFKVLYADTDGFFATIPNEKPETIKSKAKKFLKHINEKLPGMLELEYEGFYLRGFFVTKKKYALIDEDGHITTRGLEVVRRDWSEIAKETQAKVLEVILREGSIEKAAGIVKKVVEDLANYRVPVEKLIIHEQITRELKRYKATGPHVAIAKRLQARGIKVKPGTIISYVVLKGSKKISDRVILFDEYDSSRHKYDPDYYIHNQVLPAVLRILEAFGYKEKDLEYQRMKQTGLGAWLKMGKK

SEQ ID NO: 780 - protein, 773 aa, unidentified; identical to SEQ ID NO: 49
  REGION 1..773: note = Description of Unknown: Synthetic polypeptide

SEQ ID NO: 781 - protein, 773 aa, unidentified
  REGION 1..773: note = Description of Unknown: Synthetic polypeptide
MILDTDYITENGKPVIRIFKKEKGEFKIEYDRNFEPYIYALLEDDESIEDIKKITGERHGKKVRIIRVEKVKKKFLGEPIEVWKLVFEHPQDYPAIRDAIRSHPAVREIFEYDIPFAKRYLIDKGLVPMEGGEELKLLAFAIATFYHEGDEFAEGEILMISYADESGAKVITWKKIDLPYVEVVSTEREAIKRFLQVLREKDPDVLLTYNGDNFDFAYIKKRCEKLGLKFTIGRDGSEPKIQRMGDRFAVEVKGRIHLDLAPVVRHTIRLPTYTLEAVYEAVFGKKKEKVYAEEIAEAWKSEEGLKRVAQYSMEDARATYELGREFFPMEVELAKLIGQSVWDVSRSSTGNLVEWYLLRVAYERNELAPNKPGGEEYQRRMRSSYIGGYVKEPEKGLWESIAYLDFRSSAGSIIVTHNVSPDTLEKECKNYDVAPIVGYRFCKDFKGFIPSILEDLIETRQKVKRKMKATIDPIEKKMLDYRQRALKILANSYYGYQGYPKARWYSKECAESVTAWGRHYIETTIKEAEKFGFKVLYADTDGFFATIPNEKPETIKSKAKKFLKHINEKLPGMLELEYEGFYLRGFFVTKKKYALIDEDGHITTRGLEVVRRDWSEIAKETQAKVLEVILREGSIEKAAGIVKKVVEDLANYRVPVEKLIIHEQITRELKRYKATGPQVAIAKRLQARGIKVKPGTIISYVVLKGSKKISDRVILFDEYDSSRHKYDPDYYIHNQVLPAVLRILEAFGYKEKDLEYQRMKQTGLGAWLKMGKK

SEQ ID NO: 782 - protein, 773 aa, unidentified
  REGION 1..773: note = Description of Unknown: Synthetic polypeptide
MILDTDYITENGKPVIRIFKKEKGEFKIEYDRNFEPYIYALLEDDESIEDIKKITGERHGKKVRIIRVEKVKKKFLGEPIEVWKLVFEHPQDYPAIRDAIRSHPAVREIFEYDIPFAKRYLIDKGLVPMEGGEELKLLAFNIATFYHEGDEFAEGEILMISYADESGAKVITWKKIDLPYVEVVSTEREAIKRFLQVLREKDPDVLLTYNGDNFDFAYIKKRCEKLGLKFTIGRDGSEPKIQRMGDRFAVEVKGRIHLDLAPVVRHTIRLPTYTLEAVYEAVFGKKKEKVYAEEIAEAWKSEEGLKRVAQYSMEDARATYELGREFFPMEVELAKLIGQSVWDVSRSSTGNLVEWYLLRVAYERNELAPNKPGGEEYQRRMRSSYIGGYVKEPEKGLWESIAYLDFRSSAGSIIVTHNVSPDTLEKECKNYDVAPIVGYRFCKDFKGFIPSILEDLIETRQKVKRKMKATIDPIEKKMLDYRQRALKILANSYYGYQGYPKARWYSKECAESVTAWGRHYIETTIKEAEKFGFKVLYADTDGFFATIPNEKPETIKSKAKKFLKHINEKLPGMLELEYEGFYLRGFFVTKKKYALIDEDGHITTRGLEVVRRDWSEIAKETQAKVLEVILREGSIEKAAGIVKKVVEDLANYRVPVEKLIIHEQITRELKRYKATGPHVAIAKRLQARGIKVKPGTIISYVVLKGSKKISDRVILFDEYDSSRHKYDPDYYIHNQVLPAVLRILEAFGYKEKDLEYQRMKQTGLGAWLKMGKK

SEQ ID NO: 783 - protein, 773 aa, unidentified
  REGION 1..773: note = Description of Unknown: Synthetic polypeptide
MILDTDYITENGKPVIRIFKKEKGEFKIEYDRNFEPYIYALLEDDESIEDIKKITGERHGKKVRIIRVEKVKKKFLGEPIEVWKLVFEHPQDYPAIRDAIRSHPAVREIFEYDIPFAKRYLIDKGLVPMEGGEELKLLAFAIATFYHEGDEFAEGEILMISYADESGAKVITWKKIDLPYVEVVSTEREAIKRFLQVLREKDPDVLLTYNGDNFDFAYIKKRCEKLGLKFTIGRDGSEPAIQRMGDRFAVEVKGRIHLDLAPVVRHTIRLPTYTLEAVYEAVFGKKKEKVYAEEIAEAWKSEEGLARVAQYSMEDARATYELGREFFPMEVELAKLIGQSVWDVSRSSTGNLVEWYLLRVAYERNELAPNKPGGEEYQRRMRSSYIGGYVKEPEKGLWESIAYLDFRSSAGSIIVTHNVSPDTLEKECQNYDVAPIVGYRFCKDFKGFIPSILEDLIETRQKVKRKMKATIDPIEKKMLDYRQRALKILANSYYGYQGYPKARWYSKECAESVTAWGRHYIETTIKEAEKFGFKVLYADTDGFFATIPNEKPETIKSKAKKFLKHINEKLPGMLELEYEGFYLRGFFVTKKKYALIDEDGHITTRGLEVVRRDWSEIAKETQAKVLEVILREGSIEKAAGIVKKVVEDLANYRVPVEKLIIHEQITRELKRYKATGPHVAIAKRLQARGIKVKPGTIISYVVLKGSKKISDRVILFDEYDSSRHKYDPDYYIHNQVLPAVLRILEAFGYKEKDLEYQRMKQTGLGAWLKMGKK

SEQ ID NO: 784 - protein, 773 aa, unidentified
  REGION 1..773: note = Description of Unknown: Synthetic polypeptide
MILDTDYITENGKPVIRIFKKEKGEFKIEYDRNFEPYIYALLEDDESIEDIKKITGERHGKKVRIIRVEKVKKKFLGEPIEVWKLVFEHPQDYPAIRDAIRSHPAVREIFEYDIPFAKRYLIDKGLVPMEGGEELKLLAFAIATFYHEGDEFAEGEILMISYADESGAKVITWKKIDLPYVEVVSTEREAIKRFLQVLREKDPDVLLTYNGDNFDFAYIKKRSEKLGLKFTIGRDGSEPKIQRMGDRFAVEVKGRIHLDLAPVVRHTIRLPTYTLEAVYEAVFGKKKEKVYAEEIAEAWKSEEGLKRVAQYSMEDARATYELGREFFPMEVELAKLIGQSVWDVSRSSTGNLVEWYLLRVAYERNELAPNKPGGEEYQRRMRSSYIGGYVKEPEKGLWESIAYLDFRSSAGSIIVTHNVSPDTLEKECKNYDVAPIVGYRFCKDFKGFIPSILEDLIETRQKVKRKMKATIDPIEKKMLDYRQRALKILANSYYGYQGYPKARWYSKECAESVTAWGRHYIETTIKEAEKFGFKVLYADTDGFFATIPNEKPETIKSKAKKFLKHINEKLPGMLELEYEGFYLRGFFVTKKKYALIDEDGHITTRGLEVVRRDWSEIAKETQAKVLEVILREGSIEKAAGIVKKVVEDLANYRVPVEKLIIHEQITRELKRYKATGPHVAIAKRLQARGIKVKPGTIISYVVLKGSKKISDRVILFDEYDSSRHKYDPDYYIHNQVLPAVLRILEAFGYKEKDLEYQRMKQTGLGAWLKMGKK

SEQ ID NO: 785 - protein, 773 aa, unidentified
  REGION 1..773: note = Description of Unknown: Synthetic polypeptide
MILDTDYITENGKPVIRIFKKEKGEFKIEYDRNFEPYIYALLEDDESIEDIKKITGERHGKKVRIIRVEKVKKKFLGEPIEVWKLVFEKPQDFPAIRDAIRSHPAVREIFEYDIPFAKRYLIDKGLVPMEGGEELKLLAFNIATFYHEGDEFAEGEILMISYADESGAKVITWKKIDLPYVEVVSTEREAIKRFLQVLREKDPDVLLTYNGDNFDFAYIKKRCEKLGLKFTIGRDGSEPKIQRMGDRFAVEVKGRIHLDLAPVVRHTIRLPTYTLEAVYEAVFGKKKEKVYAEEIAEAWKSEEGLKRVAQYSMEDARATYELGREFFPLEVELAKLIGQSVWDVSRSSTGNLVEWYLLRVAYERNELAPNKPGGEEYQRRMRSSYIGGYVKEPEKGLWESIAYLDFRSSAGSIIVTHNVSPDTLEKECKNYDVAPIVGYRFCKDFKGFIPSILEDLIETRQKVKRKMKATIDPIEKKMLDYRQRALKILANSYYGYQGYPKARWYSKECAESVTAWGRHYIETTIKEAEKFGFKVLYADTDGFFATIPNEKPETIKSKAKKFLKHINEKLPGMLELEYEGFYLRGFFVTKKKYALIDEDGHITTRGLEVVRRDWSEIAKETQAKVLEVILREGSIEKAAGIVKKVVEDLANYRVPVEKLIIHEQITRELKRYKATGPHVAIAKRLQARGIKVKPGTIISYVVLKGSKKISDRVILFDEYDSSRHKYDPDYYIHNQVLPAVLRILEAFGYKEKDLEYQRMKQTGLGAWLKMGKK

SEQ ID NO: 786 - protein, 773 aa, unidentified
  REGION 1..773: note = Description of Unknown: Synthetic polypeptide
MILDTDYITENGKPVIRIFKKEKGEFKIEYDRNFEPYIYALLEDDESIEDIKKITGERHGKKVRIIRVEKVKKKFLGEPIEVWKLVFEHPQDVPAIRDAIRSHPAVREIFEYDIPFAKRYLIDKGLVPMEGGEELKLLAFAIATFYHEGDEFAEGEILMISYADESGAKVITWKKIDLPYVEVVSTEREAIKRFLQVLREKDPDVLLTYNGDNFDFAYIKKRCEKLGLKFTIGRDGSEPKIQRMGDRFAVEVKGRIHLDLAPVVRHTIRLPTYTLEAVYEAVFGKKKEKVYAEEIAEAWKSEEGLKRVAQYSMEDARATYELGREFFPMEVELAKLIGQSVWDVSRSSTGNLVEWYLLRVAYERNELAPNKPGGEEYQRRMRSSYIGGYVKEPEKGLWESIAYLDFRSSAGSIIVTHNVSPDTLEKECKNYDVAPIVGYRFCKDFKGFIPSILEDLIETRQKVKRKMKATIDPIEKKMLDYRQRALKILANSYYGYQGYPKARWYSKEHAESVTAWGRHYIETTIKEAEKFGFKVLYADTDGFFATIPNEKPETIKSKAKKFLKHINEKLPGMLELEYEGFYLRGFFVTKKKYALIDEDGHITTRGLEVVRRDWSEIAKETQAKVLEVILREGSIEKAAGIVKKVVEDLANYRVPVEKLIIHEQITRELKDYKATGPHVAIAKRLQARGIKVKPGTIISYVVLKGSKKISDRVILFDEYDSSRHKYDPDYYIHNQVLPAVLRILEAFGYKEKDLEYQRMKQTGLGAWLKMGKK

SEQ ID NO: 787 - protein, 773 aa, unidentified
  REGION 1..773: note = Description of Unknown: Synthetic polypeptide
MILDTDYITENGKPVIRIFKKEKGEFKIEYDRNFEPYIYALLEDDESIEDIKKITGERHGKKVRIIRVEKVKKKFLGEPIEVWKLVFEQPQDVPAIRDAIRSHPAVREIFEYDIPFAKRYLIDKGLVPMEGGEELKLLAFNIATFYHEGDEFAEGEILMISYADESGAKVITWKKIDLPYVEVVSTEREAIKRFLQVLREKDPDVLLTYNGDNFDFAYIKKRCEKLGLKFTIGRDGSEPKIQRMGDRFAVEVKGRIHLDLAPVVRHTIRLPTYTLEAVYEAVFGKKKEKVYAEEIAEAWKSEEGLKRVAQYSMEDARATYELGREFFPLEVELAKLIGQSVWDVSRSSTGNLVEWYLLRVAYERNELAPNKPGGEEYQRRMRSSYIGGYVKEPEKGLWESIAYLDFRSSAGSIIVTHNVSPDTLEKECKNYDVAPIVGYRFCKDFKGFIPSILEDLIETRQKVKRKMKATIDPIEKKMLDYRQRALKILANSYYGYQGYPKARWYSKECAESVTAWGRHYIETTIKEAEKFGFKVLYADTDGFFATIPNEKPETIKSKAKKFLKHINEKLPGMLELEYEGFYLRGFFVTKKKYALIDEDGHITTRGLEVVRRDWSEIAKETQAKVLEVILREGSIEKAAGIVKKVVEDLANYRVPVEKLIIHEQITRELKRYKATGPHVAIAKRLQARGIKVKPGTIISYVVLKGSKKISDRVILFDEYDSSRHKYDPDYYIHNQVLPAVLRILEAFGYKEKDLEYQRMKQTGLGAWLKMGKK

SEQ ID NO: 788 - protein, 773 aa, unidentified
  REGION 1..773: note = Description of Unknown: Synthetic polypeptide
MILDTDYITENGKPVIRIFKKEKGEFKIEYDRNFEPYIYALLEDDESIEDIKKITGERHGKKVRIIRVEKVKKKFLGEPIEVWKLVFEHPQDVPAIRDAIRSHPAVREIFEYDIPFAKRYLIDKGLVPMEGGEELKLLAFNIATFKHEGDEFAEGEILMISYADESGAKVITWKKIDLPYVEVVSTEREAIKRFLQVLREKDPDVLLTYNGDNFDFAYIKKRCEKLGLKFTIGRDGSEPKIQRMGDRFAVEVKGRIHLDLAPVVRHTIRLPTYTLEAVYEAVFGKKKEKVYAEEIAEAWKSEEGLKRVAQYSMEDARATYELGREFFPLEVELAKLIGQSVWDVSRSSTGNLVEWYLLRVAYERNELAPNKPGGEEYQRRMRSSYIGGYVKEPEKGLWESIAYLDFRSSAGSIIVTHNVSPDTLEKECKNYDVAPIVGYRFCKDFKGFIPSILEDLIETRQKVKRKMKATIDPIEKKMLDYRQRALKILANSYYGYQGYPKARWYSKECAESVTAWGRHYIETTIKEAEKFGFKVLYADTDGFFATIPNEKPETIKSKAKKFLKHINEKLPGMLELEYEGFYLRGFFVTKKKYALIDEDGHITTRGLEVVRRDWSEIAKETQAKVLEVILREGSIEKAAGIVKKVVEDLANYRVPVEKLIIHEQITRELKRYKATGPHVAIAKRLQARGIKVKPGTIISYVVLKGSKKISDRVILFDEYDSSRHKYDPDYYIHNQVLPAVLRILEAFGYKEKDLEYQRMKQTGLGAWLKMGKK

SEQ ID NO: 789 - protein, 773 aa, unidentified
  REGION 1..773: note = Description of Unknown: Synthetic polypeptide
MILDTDYITENGKPVIRIFKKEKGEFKIEYDRNFEPYIYALLEDDESIEDIKKITGERHGKKVRIIRVEKVKKKFLGEPIEVWKLVFEHPQDYPAIRDAIRSHPAVREIFEYDIPFAKRYLIDKGLVPMEGGEELKLLAFAIATFYHEGDEFAEGEILMISYADESGAKVITWKKIDLPYVEVVSTEREAIKRFLQVLREKDPDVLLTYNGDNFDFAYIKKRCEKLGLKFTIGRDGSEPKIQRMGDRFAVEVKGRIHLDLAPVVRHTIRLPTYTLEAVYEAVFGKKKEKVYAEEIAEAWKSEEGLARVAQYSVEDARATYELGREFFPMEVELAKLIGQSVWDVSRSSTGNLVEWYLLRVAYERNELAPNKPGGEEYQRRMRSSYIGGYVKEPEKGLWESIAYLDFRSSAGSIIVTHNVSPDTLEKECQNYDVAPIVGYRFCKDFKGFIPSILEDLIETRQKVKRKMKATIDPIEKKMLDYRQRALKILANSYYGYQGYPKARWYSKECAESVTAWGRHYIETTIKEAEKFGFKVLYADTDGFFATIPNEKPETIKSKAKKFLKHINEKLPGMLELEYEGFYLRGFFVTKKKYALIDEDGHITTRGLEVVRRDWSEIAKETQAKVLEVILREGSIEKAAGIVKKVVEDLANYRVPVEKLIIHEQITRELKRYKATGPHVAIAKRLQARGIKVKPGTIISYVVLKGSKKISDRVILFDEYDSSRHKYDPDYYIHNQVLPAVLRILEAFGYKEKDLEYQRMKQTGLGAWLKMGKK

SEQ ID NO: 790 - protein, 773 aa, unidentified
  REGION 1..773: note = Description of Unknown: Synthetic polypeptide
MILDTDYITENGKPVIRIFKKEKGEFKIEYDRNFEPYIYALLEDDESIEDIKKITGERHGKKVRIIRVEKVKKKFLGEPIEVWKLVFEHPQDVPAIRDAIRSHPAVREIFEYDIPFAKRYLIDKGLVPMEGGEELKLLAFNIATFYHEGDEFAEGEILMISYADESGAKVITWKKIDLPYVEVVSTEREAIKRFLQVLREKDPDVLLTYNGDNFDFAYIKKRCEKLGLKFTIGRDGSEPKIQRMGDRFAVEVKGRIHLDLAPVVRHTIRLPTYTLEAVYEAVFGKKKEKVYAEEIAEAWKSEEGLARVAQYSVEDARATYELGREFFPLEVELAKLIGQSVWDVSRSSTGNLVEWYLLRVAYERNELAPNKPGGEEYQRRMRSSYIGGYVKEPEKGLWESIAYLDFRSSAGSIIVTHNVSPDTLEKECQNYDVAPIVGYRFCKDFKGFIPSILEDLIETRQKVKRKMKATIDPIEKKMLDYRQRALKILANSYYGYQGYPKARWYSKECAESVTAWGRHYIETTIKEAEKFGFKVLYADTDGFFATIPNEKPETIKSKAKKFLKHINEKLPGMLELEYEGFYLRGFFVTKKKYALIDEDGHITTRGLEVVRRDWSEIAKETQAKVLEVILREGSIEKAAGIVKKVVEDLANYRVPVEKLIIHEQITRELKRYKATGPHVAIAKRLQARGIKVKPGTIISYVVLKGSKKISDRVILFDEYDSSRHKYDPDYYIHNQVLPAVLRILEAFGYKEKDLEYQRMKQTGLGAWLKMGKK

SEQ ID NO: 791 - protein, 773 aa, unidentified
  REGION 1..773: note = Description of Unknown: Synthetic polypeptide
MILDTDYITENGKPVIRIFKKEKGEFKIEYDRNFEPYIYALLEDDESIEDIKKITGERHGKKVRIIRVEKVKKKFLGEPIEVWKLVFEHPQDYPAIRDAIRSHPAVREIFEYDIPFAKRYLIDKGLVPMEGGEELKLLAFAIATFYHEGDEFAEGEILMISYADESGAKVITWKKIDLPYVEVVSTEREAIKRFLQVLREKDPDVLLTYNGDNFDFAYIKKRCEKLGLKFTIGRDGSEPKIQRMGDRFAVEVKGRIHLDLAPVVRHTIRLPTYTLEAVYEAVFGKKKEQVYAEEIAEAWKSEEGLKRVAQYSMEDARATYELGREFFPMEVELAKLIGQSVWDVSRSSTGNLVEWYLLRVAYERNELAPNKPGGEEYQRRMRSSYIGGYVKEPEKGLWESIAYLDFRSSAGSIIVTHNVSPDTLEKECKNYDVAPIVGYRFCKDFKGFIPSILEDLIETRQKVKRKMKATIDPIEKKMLDYRQRALKILANSYYGYQGYPKARWYSKECAESVTAWGRHYIETTIKEAEKFGFKVLYADTDGFFATIPNEKPETIKSKAKKFLKHINEKLPGMLELEYEGFYLRGFFVTKKKYALIDEDGHITTRGLEVVRRDWSEIAKETQAKVLEVILREGSIEKAAGIVKKVVEDLANYRVPVEKLIIHEQITRKLKRYKATGPHVAIAKRLQARGIKVKPGTIISYVVLKGSKKISDRVILFDEYDSSRHKYDPDYYIHNQVLPAVLRILEAFGYKEKDLEYQRMKQTGLGAWLKMGKK

SEQ ID NO: 792 - protein, 773 aa, unidentified
  REGION 1..773: note = Description of Unknown: Synthetic polypeptide
MILDTDYITENGKPVIRIFKKEKGEFKIEYDRNFEPYIYALLEDDESIEDIKKITGERHGKKVRIIRVEKVKKKFLGEPIEVWKLVFEHPQDYPAIRDAIRSHPAVREIFEYDIPFAKRYLIDKGLVPMEGGEELKLLAFAIATFYHEGDEFAEGEILMISYADESGAKVITWKKIDLPYVEVVSTEREAILRFLQVLREKDPDVLLTYNGDNFDFAYIKKRCEKLGLKFTIGRDGSEPKIQRMGDRFAVEVKGRIHLDLAPVVRHTIRLPTYTLEAVYEAVFGKKKEKVYAEEIAEAWKSEEGLKRVAQYSMEDARATYELGREFFPMEVELAKLIGQSVWDVSRSSTGNLVEWYLLRVAYERNELAPNKPGGEEYQRRMRSSYIGGYVKEPEKGLWESIAYLDFRSSAGSIIVTHNVSPDTLEKECKNYDVAPIVGYRFCKDFKGFIPSILEDLIETRQKVKRKMKATIDPIEKKMLDYRQRALKILANSYYGYQGYPKARWYSKECAESVTAWGRHYIETTIKEAEKFGFKVLYADTDGFFATIPNEKPETIKSKAKKFLKHINEKLPGMLELEYEGFYLRGFFVTKKKYALIDEDGHITTRGLEVVRRDWSEIAKETQAKVLEVILREGSIEKAAGIVKKVVEDLANYRVPVEKLIIHEQITRELKRYKATGPHVAIAKRLQARGIKVKPGTIISYVVLKGSKKISDRVILFDEYDSSRHKYDPDYYIHNQVLPAVLRILEAFGYKEKDLEYQRMKQTGLGAWLKMGKK

SEQ ID NO: 793 - protein, 773 aa, unidentified
  REGION 1..773: note = Description of Unknown: Synthetic polypeptide
MILDTDYITENGKPVIRIFKKEKGEFKIEYDRNFEPYIYALLEDDESIEDIKKITGERHGKKVRIIRVEKVKKKFLGEPIEVWKLVFELPQDVPAIRDAIRSHPAVREIFEYDIPFAKRYLIDKGLVPMEGGEELKLLAFNIATFYHEGDEFAEGEILMISYADESGAKVITWKKIDLPYVEVVSTEREAIKRFLQVLREKDPDVLLTYNGDNFDFAYIKKRCEKLGLKFTIGRDGSEPKIQRMGDRFAVEVKGRIHLDLAPVVRHTIRLPTYTLEAVYEAVFGKKKEKVYAEEIAEAWKSEEGLKRVAQYSMEDARATYELGREFFPLEVELAKLIGQSVWDVSRSSTGNLVEWYLLRVAYERNELAPNKPGGEEYQRRMRSSYIGGYVKEPEKGLWESIAYLDFRSSAGSIIVTHNVSPDTLEKECKNYDVAPIVGYRFCKDFKGFIPSILEDLIETRQKVKRKMKATIDPIEKKMLDYRQRALKILANSYYGYQGYPKARWYSKECAESVTAWGRHYIETTIKEAEKFGFKVLYADTDGFFATIPNEKPETIKSKAKKFLKHINEKLPGMLELEYEGFYLRGFFVTKKKYALIDEDGHITTRGLEVVRRDWSEIAKETQAKVLEVILREGSIEKAAGIVKKVVEDLANYRVPVEKLIIHEQITRELKRYKATGPHVAIAKRLQARGIKVKPGTIISYVVLKGSKKISDRVILFDEYDSSRHKYDPDYYIHNQVLPAVLRILEAFGYKEKDLEYQRMKQTGLGAWLKMGKK

SEQ ID NO: 794 - protein, 773 aa, unidentified
  REGION 1..773: note = Description of Unknown: Synthetic polypeptide
MILDTDYITENGKPVIRIFKKEKGEFKIEYDRNFEPYIYALLEDDESIEDIKKITGERHGKKVRIIRVEKVKKKFLGEPIEVWKLVFEHPQDYPAIRDAIRSHPAVREIFEYDIPFAKRYLIDKGLVPMEGGEELKLLAFAIATFYHEGDEFAEGEILMISYADESGAKVITWKKIDLPYVEVVSTEREAIKRFLQVLREKDPDVLLTYNGDNFDFAYIKKRCEKLGLKFTIGRDGSEPEIQRMGDRFAVEVKGRIHLDLAPVVRHTIRLPTYTLEAVYEAVFGKKKEKVYAEEIAEAWKSEEGLKRVAQYSMEDARATYELGREFFPMEVELAKLIGQSVWDVSRSSTGNLVEWYLLRVAYERNELAPNKPGGEEYQRRMRSSYIGGYVKEPEKGLWESIAYLDFRSSAGSIIVTHNVSPDTLEKECKNYDVAPIVGYRFCKDFKGFIPSILEDLIETRQKVKRKMKATIDPIEKKMLDYRQRALKILANSYYGYQGYPKARWYSKECAESVTAWGRHYIETTIKEAEKFGFKVLYADTDGFFATIPNEKPETIKSKAKKFLKHINEKLPGMLELEYEGFYLRGFFVTKKKYALIDEDGHITTRGLEVVRRDWSEIAKETQAKVLEVILREGSIEKAAGIVKKVVEDLANYRVPVEKLIIHEQITRELKRYKATGPHVAIAKRLQARGIKVKPGTIISYVVLKGSKKISDRVILFDEYDSSRHKYDPDYYIHNQVLPAVLRILEAFGYKEKDLEYQRMKQTGLGAWLKMGKK

SEQ ID NO: 795 - protein, 773 aa, unidentified
  REGION 1..773: note = Description of Unknown: Synthetic polypeptide
MILDTDYITENGKPVIRIFKKEKGEFKIEYDRNFEPYIYALLEDDESIEDIKKITGERHGKKVRIIRVEKVKKKFLGEPIEVWKLVFEHPQDYPAIRDAIRSHPAVREIFEYDIPFAKRYLIDKGLVPMEGGEELKLLAFAIATFYHEGDEFAEGEILMISYADESGAKVITWKKIDLPYVEVVSTEREAIKRFLQVLREKDPDVLLTYNGDNFDFAYIKKRCEKLGLKFTIGRDGSEPKIQRMGDRFAVEVKGRIHLDLAPVVRHTIRLPTYTLEAVYEAVFGKKKEKVYAEEIAEAWKSEEGLKRVAQYSMEDARATYELGREFFPMEVELAKLIGQSVWDVSRSSTGNLVEWYLLRVAYERNELAPNKPGGEEYQRRMRSQYIGGYVKEPEKGLWESIAYLDFRSSAGSIIVTHNVSPDTLEKECKNYDVAPIVGYRFCKDFKGFIPSILEDLIETRQKVKRKMKATIDPIEKKMLDYRQRALKILANSYYGYQGYPKARWYSKECAESVTAWGRHYIETTIKEAEKFGFKVLYADTDGFFATIPNEKPETIKSKAKKFLKHINEKLPGMLELEYEGFYLRGFFVTKKKYALIDEDGHITTRGLEVVRRDWSEIAKETQAKVLEVILREGSIEKAAGIVKKVVEDLANYRVPVEKLIIHEQITRELKRYKATGPHVAIAKRLQARGIKVKPGTIISYVVLKGSKKISDRVILFDEYDSSRHKYDPDYYIHNQVLPAVLRILEAFGYKEKDLEYQRMKQTGLGAWLKMGKK

SEQ ID NO: 796 - protein, 773 aa, unidentified; identical to SEQ ID NO: 75
  REGION 1..773: note = Description of Unknown: Synthetic polypeptide

SEQ ID NO: 797 - protein, 757 aa, unidentified
  REGION 1..757: note = Description of Unknown: Synthetic polypeptide
MILDTDYITENGKPVIRIFKKEKGEFKIEYDRNFEPYIYALLEDDESIEDIKKITGERHGKKVRIIRVEKVKKKFLGEPIEVWKLVFEHPQDVPAIRDAIRSHPAVREIFEYDIPFAKRYLIDKGLVPMEGGEELKLLAFRIATFYHEGDEFAEGEILMISYADESGAKVITWKKIDLPYVEVVSTEREAIKRFLQVLREKDPDVLLTYNGDNFDFAYIKKRCEKLGLKFTIGRDGSEPKIQRMGDRFAVEVKGRIHLDLAPVVRHTIRLPTYTLEAVYEAVFGKKKEKVYAEEIAEAWKSEEGLKRVAQYSMEDARATYELGREFFPLEVELAKLIGQSVWDVSRSSTGNLVEWYLLRVAYERNELAPNKPGGEEYQRRMRSSYIGGYVKEPEKGLWESIAYLDFRSSAGSIIVTHNVSPDTLEKECKNYDVAPIVGYRFCKDFKGFIPSILEDLIETRQKVKRKMKATIDPIEKKMLDYRQRALKILANSYYGYQGYPKARWYSKECAESVTAWGRHYIETTIKEAEKFGFKVLYADTDGFFATIPNEKPETIKSKAKKFLKHINEKLPGMLELEYEGFYLRGFFVTKKKYALIDEDGHITTRGLEVVRRDWSEIAKETQAKVLEVILREGSIEKAAGIVKKVVEDLANYRVPVEKLIIHEQITRELKRYKATGPHVAIAKRLQARGIKVKPGTIISYVVLKGSKKISDRVILFDEYDSSRHKYDPDYYIHNQVLPAVLRILEAFGYKEKDLEYQ

SEQ ID NO: 798 - protein, 757 aa, unidentified
  REGION 1..757: note = Description of Unknown: Synthetic polypeptide
MILDTDYITENGKPVIRIFKKEKGEFKIEYDRNFEPYIYALLEDDESIEDIKKITGERHGKKVRIIRVEKVKKKFLGEPIEVWKLVFEHPQDVPAIRDAIRSHPAVREIFEYDIPFAKRYLIDKGLVPMEGGEELKLLAFAIATFYHEGDEFAEGEILMISYADESGAKVITWKKIDLPYVEVVSTEREAIKRFLQVLREKDPDVLLTYNGDNFDFAYIKKRCEKLGLKFTIGRDGSEPKIQRMGDRFAVEVKGRIHLDLAPVVRHTIRLPTYTLEAVYEAVFGKKKEQVYAEEIAEAWKSEEGLKRVAQYSMEDARATYELGREFFPMEVELAKLIGQSVWDVSRSSTGNLVEWYLLRVAYERNELAPNKPGGEEYQRRMRSSYIGGYVKEPEKGLWESIAYLDFRSSAGSIIVTHNVSPDTLEKECKNYDVAPIVGYRFCKDFKGFIPSILEDLIETRQKVKRKMKATIDPIEKKMLDYRQRALKILANSYYGYQGYPKARWYSKECAESVTAWGRHYIETTIKEAEKFGFKVLYADTDGFFATIPNEKPETIKSKAKKFLKHINEKLPGMLELEYEGFYLRGFFVTKKKYALIDEDGHITTRGLEVVRRDWSEIAKETQAKVLEVILREGSIEKAAGIVKKVVEDLANYRVPVEKLIIHEQITRKLKRYKATGPHVAIAKRLQARGIKVKPGTIISYVVLKGSKKISDRVILFDEYDSSRHKYDPDYYIHNQVLPAVLRILEAFGYKEKDLEYQ

SEQ ID NO: 799 - protein, 773 aa, unidentified
  REGION 1..773: note = Description of Unknown: Synthetic polypeptide
MILDTDYITENGKPVIRIFKKEKGEFKIEYDRNFEPYIYALLEDDESIEDIKKITGERHGKKVRIIRVEKVKKKFLGEPIEVWKLVFEHPQDYPAIRDAIRSHPAVREIFEYDIPFAKRYLIDKGLVPMEGGEELKLLAFAIATFYHEGDEFAEGEILMISYADESGAKVITWKKIDLPYVEVVSTEREAIKRFLQVLREKDPDVLLTYNGDNFDFAYIKKRCEKLGLKFTIGRDGSEPKIQRMGDRFAVEVKGRIHLDLAPVVRHTIRLPTYTLEAVYEAVFGKKKEKVYAEEIAEAWKSEEGLKRVAQYSMEDARATYELGREFFPMEVELAKLIGQSVWDVSRSSTGNLVEWYLLRVAYERNELAPNKPGGEEYQRRMRSSYIGGYVKEPEKGLWESIAYLDFRSSAGSIIVTHNVSPDTLEKECKNYDVAPIVGYRFCKDFKGFIPSILEDLIETRQKVKRKMRATIDPIEKKMLDYRQRALKILANSYYGYQGYPKARWYSKECAESVTAWGRHYIETTIKEAEKFGFKVLYADTDGFFATIPNEKPETIKSKAKKFLKHINEKLPGMLELEYEGFYLRGFFVTKKKYALIDEDGHITTRGLEVVRRDWSEIAKETQAKVLEVILREGSIEKAAGIVKKVVEDLANYRVPVEKLIIHEQITRELKRYKATGPHVAIAKRLQARGIKVKPGTIISYVVLKGSKKISDRVILFDEYDSSRHKYDPDYYIHNQVLPAVLRILEAFGYKEKDLEYQRMKQTGLGAWLKMGKK

SEQ ID NO: 800 - protein, 773 aa, unidentified
  REGION 1..773: note = Description of Unknown: Synthetic polypeptide
MILDTDYITENGKPVIRIFKKEKGEFKIEYDRNFEPYIYALLEDDESIEDIKKITGERHGKKVRIIRVEKVKKKFLGEPIEVWKLVFEHPQDYPAIRDAIRSHPAVREIFEYDIPFAKRYLIDKGLVPMEGGEELKLLAFAIATFYHEGDEFAEGEILMISYADESGAKVITWKKIDLPYVEVVSTEREAIKRFLQVLREKDPDVLLTYNGDNFDFAYIKKRCEKLGLKFTIGRDGSEPKIQRMGDRFAVEVKGRIHLDLAPVVRHTIRLPTYTLEAVYEAVFGKKKEKVYAEEIAEAWKSEEGLARVAQYSVEDARATYELGREFFPMEVELAKLIGQSVWDVSRSSTGNLVEWYLLRVAYERNELAPNKPGGEEYQRRMRSSYIGGYVKEPEKGLWESIAYLDFRSSAGSIIVTHNVSPDTLEKECKNYDVAPIVGYRFCKDFKGFIPSILEDLIETRQKVKRKMKATIDPIEFKMLDYRQRALKILANSYYGYQGYPKARWYSKECAESVTAWGRHYIETTIKEAEKFGFKVLYADTDGFFATIPNEKPETIKSKAKKFLKHINEKLPGMLELEYEGFYLRGFFVTKKKYALIDEDGHITTRGLEVVRRDWSEIAKETQAKVLEVILREGSIEKAAGIVKKVVEDLANYRVPVEKLIIHEQITRELKRYKATGPHVAIAKRLQARGIKVKPGTIISYVVLKGSKKISDRVILFDEYDSSRHKYDPDYYIHNQVLPAVLRILEAFGYKEKDLEYQRMKQTGLGAWLKMGKK

SEQ ID NO: 801 - protein, 773 aa, unidentified
  REGION 1..773: note = Description of Unknown: Synthetic polypeptide
MILDTDYITENGKPVIRIFKKEKGEFKIEYDRNFEPYIYALLEDDESIEDIKKITGERHGKKVRIIRVEKVKKKFLGEPIEVWKLVFEHPQDVPAIRDAIRSHPAVREIFEYDIPFAKRYLIDKGLVPMEGGEELKLLAFNIATFYHEGDEFAEGEILMISYADESGAKVITWKKIDLPYVEVVSTEREAIKRFLQVLREKDPDVLLTYNGDNFDFAYIKKRCEKLGLKFTIGRDGSEPKIQRMGDRFAVEVKGRIHLDLAPVVRHTIRLPTYRLEAVYEAVFGKKKEKVYAEEIAEAWKSEEGLKRVAQYSMEDARATYELGREFFPLEVELAKLIGQSVWDVSRSSTGNLVEWYLLRVAYERNELAPNKPGGEEYQRRMRSSYIGGYVKEPEKGLWESIAYLDFRSSAGSIIVTHNVSPDTLEKECKNYDVAPIVGYRFCKDFKGFIPSILEDLIETRQKVKRKMKATIDPIEKKMLDYRQRALKILANSYYGYQGYPKARWYSKECAESVTAWGRHYIETTIKEAEKFGFKVLYADTDGFFATIPNEKPETIKSKAKKFLKHINEKLPGMLELEYEGFYLRGFFVTKKKYALIDEDGHITTRGLEVVRRDWSEIAKETQAKVLEVILREGSIEKAAGIVKKVVEDLANYRVPVEKLIIHEQITRELKRYKATGPHVAIAKRLQARGIKVKPGTIISYVVLKGSKKISDRVILFDEYDSSRHKYDPDYYIHNQVLPAVLRILEAFGYKEKDLEYQRMKQTGLGAWLKMGKK

SEQ ID NO: 802 - protein, 773 aa, unidentified
  REGION 1..773: note = Description of Unknown: Synthetic polypeptide
MILDTDYITENGKPVIRIFKKEKGEFKIEYDRNFEPYIYALLEDDESIEDIKKITGERHGKKVRIIRVEKVKKKFLGEPIEVWKLVFEHPQDYPAIRDAIRSHPAVREIFEYDIPFAKRYLIDKGLVPMEGGEELKLLAFAIATFYHEGDEFAEGEILMISYADESGAKVITWKKIDLPYVEVVSTEREAIKRFLQVLREKDPDVLLTYNGDNFDFAYIKKRCEKLGLKFTIGRDGSEPKIQRMGDRFAVEVKGRIHLDLAPVVRHTIRLPTYTLEAVYEAVFGKKKEKVYAEEIAEAWKSEEGLKRVAQYSMEDARATYELGREFFPNEVELAKLIGQSVWDVSRSSTGNLVEWYLLRVAYERNELAPNKPGGEEYQRRMRSSYIGGYVKEPEKGLWESIAYLDFRSSAGSIIVTHNVSPDTLEKECKNYDVAPIVGYRFCKDFKGFIPSILEDLIETRQKVKRKMKATIDPIEKKMLDYRQRALKILANSYYGYQGYPKARWYSKECAESVTAWGRHYIETTIKEAEKFGFKVLYADTDGFFATIPNEKPETIKSKAKKFLKHINEKLPGMLELEYEGFYLRGFFVTKKKYALIDEDGHITTRGLEVVRRDWSEIAKETQAKVLEVILREGSIEKAAGIVKKVVEDLANYRVPVEKLIIHEQITRELKRYKATGPHVAIAKRLQARGIKVKPGTIISYVVLKGSKKISDRVILFDEYDSSRHKYDPDYYIHNQVLPAVLRILEAFGYKEKDLEYQRMKQTGLGAWLKMGKK

SEQ ID NO: 803 - protein, 773 aa, unidentified; identical to SEQ ID NO: 49
  REGION 1..773: note = Description of Unknown: Synthetic polypeptide

SEQ ID NO: 804 - protein, 757 aa, unidentified
  REGION 1..757: note = Description of Unknown: Synthetic polypeptide
MILDTDYITENGKPVIRIFKKEKGEFKIEYDRNFEPYIYALLEDDESIEDIKKITGERHGKKVRIIRVEKVKKKFLGEPIEVWKLVFEHPQDVPAIRDAIRSHPAVREIFEYDIPFAKRYLIDKGLVPMEGGEELKLLAFAIATFYHEGDEFAEGEILMISYADESGAKVITWKKIDLPYVEVVSTEREAIKRFLQVLREKDPDVLLTYNGDNFDFAYIKKRCEKLGLKFTIGRDGSEPKIQRMGDRFAVEVKGRIHLDLAPVVRHTIRLPTYTLEAVYEAVFGKKKEKVYAEEIAEAWKSEEGLKRVAQYSMEDARATYELGREFFPMEVELAKLIGQSVWDVSRSSTGNLVEWYLLRVAYERNELAPNKPGGEEYQRRMRSSYIGGYVKEPEKGLWESIAYLDFRSSAGSIIVTHNVSPDTLEKECKNYDVAPIVGYRFCKDFKGFIPSILEDLIETRQKVKRKMKATIDPIEKKMLDYRQRALKILANSYYGYQGYPKARWYSKECAESVTAWGRHYIETTIKEAEKFGFKVLYADTDGFFATIPNEKPETIKSKAKKFLKHINEKLPGMLELEYEGFYLRGFFVTKKKYALIDEDGHITTRGLEVVRRDWSEIAKETQAKVLEVILREGSIEKAAGIVKKVVEDLANYRVPVEKLIIHEKITRELKRYKATGPHVAIAKRLQARGIKVKPGTIISYVVLKGSKKISDRVILFDEYDSSRHKYDPDYYIHNQVLPAVLRILEAFGYKEKDLEYQ

SEQ ID NO: 805 - protein, 757 aa, unidentified
  REGION 1..757: note = Description of Unknown: Synthetic polypeptide
MILDTDYITENGKPVIRIFKKEKGEFKIEYDRNFEPYIYALLEDDESIEDIKKITGERHGKKVRIIRVEKVKKKFLGEPIEVWKLVFEHPQDYPAIRDAIRSHPAVREIFEYDIPFAKRYLIDKGLVPMEGGEELKLLAFAIATFYHEGDEFAEGEILMISYADESGAKVITWKKIDLPYVEVVSTEREAIKRFLQVLREKDPDVLLTYNGDNFDFAYIKKRCEKLGLKFTIGRDGSEPKIQRMGDRFAVEVKGRIHLDLAPVVRHTIRLPTYTLEAVYEAVFGKKKEKVYAEEIAEAWKSEEGLKRVAQYSMEDARATYELGREFFPMEVELAKLIGQSVWDVSRSSTGNLVEWYLLRVAYERNELAPNKPGGEEYQRRMRSSYIGGYVKEPEKGLWESIAYLDFRSSAGSIIVTHNVSPDTLEKECKNYDVAPIVGYRFCKDFKGFIPSILEDLIETRQKVKRKMKATIDPIEKKMLDYRQRALKILANSYYGYQGYPKARWYSKECAESVTAWGRHYIETTIKEAEKFGFKVLYADTDGFFATIPNEKPETIKSKAKKFLKHINEKLPGMLELEYEGFYLRGFFVTKKKYALIDEDGHITTRGLEVVRRDWSEIAKETQAKVLEVILREGSIEKAAGIVKKVVEDLANYRVPVEKLIIHEQITRELKRYKATGPHVAIAKRLQARGIKVKPGTIISYVVLKGSKKISDRVILFDEYDSSRHKYDPDYYIHNQVLPAVLRILEAFGYKEKDLEYQ

SEQ ID NO: 806 - protein, 773 aa, unidentified
  REGION 1..773: note = Description of Unknown: Synthetic polypeptide
MILDTDYITENGKPVIRIFKKEKGEFKIEYDRNFEPYIYALLEDDESIEDIKKITGERHGKKVRIIRVEKVKKKFLGEPIEVWKLVFEHPQDVPAIRDAIRSHPAVREIFEYDIPFAKRYLIDKGLVPMEGGEELKLLAFNIATFYHEGDEFAEGEILMISYADESGAKVITWKKIDLPYVEVVSTEREAIKRFLQVLREKDPDVLLTYNGDNFDFAYIKKRCEKLGLKFTIGRDGSEPQIQRMGDRFAVEVKGRIHLDLAPVVRHTIRLPTYTLEAVYEAVFGKKKEKVYAEEIAEAWKSEEGLKRVAQYSVEDARATYELGREFFPLEVELAKLIGQSVWDVSRSSTGNLVEWYLLRVAYERNELAPNQPGGEEYQRRMRSSYIGGYVKEPEKGLWESIAYLDFRSSAGSIIVTHNVSPDTLEKECKNYDVAPIVGYRFCKDFKGFIPSILEDLIETRQKVKRKMKATIDPIEKKMLDYRQRALKILANSYYGYQGYPKARWYSKECAESVTAWGRHYIETTIKEAEKFGFKVLYADTDGFFATIPNEKPETIKSKAKKFLKHINEKLPGMLELEYEGFYLRGFFVTKKKYALIDEDGHITTRGLEVVRRDWSEIAKETQAKVLEVILREGSIEKAAGIVKKVVEDLANYRVPVEKLIIHEQITRELKRYKATGPHVAIAKRLQARGIKVKPGTIISYVVLKGSKKISDRVILFDEYDSSRHKYDPDYYIHNQVLPAVLRILEAFGYKEKDLEYQRMKQTGLGAWLKMGKK

SEQ ID NO: 807 - protein, 773 aa, unidentified
  REGION 1..773: note = Description of Unknown: Synthetic polypeptide
MILDTDYITENGKPVIRIFKKEKGEFKIEYDRNFEPYIYALLEDDESIEDIKKITGERHGKKVRIIRVEKVKKKFLGEPIEVWKLVFEHPQDVPAIRDAIRSHPAVREIFEYDIPFAKRYLIDKGLVPMEGGEELKLLAFNIATFYHEGDEFAEGEILMISYADESGAKVITWKKIDLPYVEVVSTEREAIKRFLQVLREKDPDVLLTYNGDNFDFAYIKKRCEKLGLKFTIGRDGSEPKIQRMGDRFAVEVKGRIHLDLAPVVRHTIRLPTYTLEAVYEAVFGKKKEKVYAEEIAEAWKSEEGLKRVAQYSMEDARATYELGREFFPLEVELAKLIGQSVWDVSRSSTGNLVEWYLLRVAYERNELAPNKPGGEEYQRRMRSSYIGGYVKEPEKGLWESIAYLDFRSSAGSIIVTHNVSPDTLEKECKNYDVAPIVGYRFCKDFKGFIPSILEDLIETRQKVKRKMKATIDPIEKKMLDYRQRALKILANSYYGYQGYPKARWYSKECAESVTAWGRHYIETTIKEAEKFGFKVLYADTDGFFATIPNEKPETIKSKAKKFLKHINEKLPGMLELEYEGFYLRGFFVTKKKYALIDEDGHITTRGLEVVRRDWSEIAKETQAKVLEVILREGSIEKAAGIVKKVVEDLANYRVPVEKLIIHEQITRELKRYKATGPHVAIAKRLQARGIKVKPGTIQSYVVLKGSKKISDRVILFDEYDSSRHKYDPDYYIHNQVLPAVLRILEAFGYKEKDLEYQRMKQTGLGAWLKMGKK

SEQ ID NO: 808 - protein, 773 aa, unidentified
  REGION 1..773: note = Description of Unknown: Synthetic polypeptide
MILDTDYITENGKPVIRIFKKEKGEFKIEYDRNFEPYIYALLEDDESIEDIKKITGERHGKKVRIIRVEKVKKKFLGEPIEVWKLVFEHPQDYPAIRDAIRSHPAVREIFEYDIPFAKRYLIDKGLVPMEGGEELKLLAFAIATFYHEGDEFAEGEILMISYADESGAKVITWKKIDLPYVEVVSTEREAIKRFLQVLREKDPDVLLTYNGDNFDFAYIKKRCEKLGLKFTIGRDGSEPKIQRMGDRFAVEVKGRIHLDLAPVVRHTIRLPTYTLEAVYEAVFGKKKEKVYAEEIAEAWKSEEGLKRVAQYSMEDARATYELGREFFPMEVELAKLIGQSVWDVSRSSEGNLVEWYLLRVAYERNELAPNKPGGEEYQRRMRSSYIGGYVKEPEKGLWESIAYLDFRSSAGSIIVTHNVSPDTLEKECKNYDVAPIVGYRFCKDFKGFIPSILEDLIETRQKVKRKMKATIDPIEKKMLDYRQRALKILANSYYGYQGYPKARWYSKECAESVTAWGRHYIETTIKEAEKFGFKVLYADTDGFFATIPNEKPETIKSKAKKFLKHINEKLPGMLELEYEGFYLRGFFVTKKKYALIDEDGHITTRGLEVVRRDWSEIAKETQAKVLEVILREGSIEKAAGIVKKVVEDLANYRVPVEKLIIHEQITRELKRYKATGPHVAIAKRLQARGIKVKPGTIISYVVLKGSKKISDRVILFDEYDSSRHKYDPDYYIHNQVLPAVLRILEAFGYKEKDLEYQRMKQTGLGAWLKMGKK

SEQ ID NO: 809 - protein, 766 aa, unidentified
  REGION 1..766: note = Description of Unknown: Synthetic polypeptide
MILDTDYITENGKPVIRIFKKEKGEFKIEYDRNFEPYIYALLEDDESIEDIKKITGERHGKKVRIIRVEKVKKKFLGEPIEVWKLVFEHPQDVPAIRDAIRSHPAVREIFEYDIPFAKRYLIDKGLVPMEGGEELKLLAFNIATFYHEGDEFAEGEILMISYADESGAKVITWKKIDLPYVEVVSTEREAIKRFLQVLREKDPDVLLTYNGDNFDFAYIKKRCEKLGLKFTIGRDGSEPKIQRMGDRFAVEVKGRIHLDLAPVVRHTIRLPTYTLEAVYEAVFGKKKEKVYAEEIAEAWKSEEGLKRVAQYSMEDARATYELGREFFPLEVELAKLIGQSVWDVSRSSTGNLVEWYLLRVAYERNELAPNKPGGEEYQRRMRSSYIGGYVKEPEKGLWESIAYLDFRSSAGSIIVTHNVSPDTLEKECKNYDVAPIVGYRFCKDFKGFIPSILEDLIETRQKVKRKMKATIDPIEKKMLDYRQRALKILANSYYGYQGYPKARWYSKECAESVTAWGRHYIETTIKEAEKFGFKVLYADTDGFFATIPNEKPETIKSKAKKFLKHINEKLPGMLELEYEGFYLRGFFVTKKKYALIDEDGHITTRGLEVVRRDWSEIAKETQAKVLEVILREGSIEKAAGIVKKVVEDLANYRVPVEKLIIHEQITRELKRYKATGPHVAIAKRLQARGIKVKPGTIISYVVLKGSKKISDRVILFDEYDSSRHKYDPDYYIHNQVLPAVLRILEAFGYKEKDLEYQRDKQTGLGA

SEQ ID NO: 810 - protein, 773 aa, unidentified
  REGION 1..773: note = Description of Unknown: Synthetic polypeptide
MILDTDYITENGKPVIRIFKKEKGEFKIEYDRNFEPYIYALLEDDESIEDIKKITGERHGKKVRIIRVEKVKKKFLGEPIEVWKLVFEHPQDYPAIRDAIRSHPAVREIFEYDIPFAKRYLIDKGLVPMEGGEELKLLAFAIATFYHEGDEFAEGEILMISYADESGAKVITWKKIDLPYVEVVSTEREAIKRFLQVLREKDPDVLLTYNGDNFDFAYIKKRCEKLGLKFTIGRDGSEPKIQRMGDRFAVEVKGRIHLDLAPVVRHTIRLPTYTLEAVYEAVFGKKKEKVYAEEIAEAWKSEEGLKRVAQYSMEDARATYELGREFFPMEVELAKLIGQSVWDVSRSSIGNLVEWYLLRVAYERNELAPNKPGGEEYQRRMRSSYIGGYVKEPEKGLWESIAYLDFRSSAGSIIVTHNVSPDTLEKECKNYDVAPIVGYRFCKDFKGFIPSILEDLIETRQKVKRKMKATIDPIEKKMLDYRQRALKILANSYYGYQGYPKARWYSKECAESVTAWGRHYIETTIKEAEKFGFKVLYADTDGFFATIPNEKPETIKSKAKKFLKHINEKLPGMLELEYEGFYLRGFFVTKKKYALIDEDGHITTRGLEVVRRDWSEIAKETQAKVLEVILREGSIEKAAGIVKKVVEDLANYRVPVEKLIIHEQITRELKRYKATGPHVAIAKRLQARGIKVKPGTIISYVVLKGSKKISDRVILFDEYDSSRHKYDPDYYIHNQVLPAVLRILEAFGYKEKDLEYQRMKQTGLGAWLKMGKK

SEQ ID NO: 811 - protein, 773 aa, unidentified
  REGION 1..773: note = Description of Unknown: Synthetic polypeptide
MILDTDYITENGKPVIRIFKKEKGEFKIEYDRNFEPYIYALLEDDESIEDIKKITGERHGKKVRIIRVEKVKKKFLGEPIEVWKLVFENPQDVPAIRDAIRSHPAVREIFEYDIPFAKRYLIDKGLVPMEGGEELKLLAFNIATFYHEGDEFAEGEILMISYADESGAKVITWKKIDLPYVEVVSTEREAIKRFLQVLREKDPDVLLTYNGDNFDFAYIKKRCEKLGLKFTIGRDGSEPKIQRMGDRFAVEVKGRIHLDLAPVVRHTIRLPTYTLEAVYEAVFGKKKEKVYAEEIAEAWKSEEGLKRVAQYSMEDARATYELGREFFPLEVELAKLIGQSVWDVSRSSTGNLVEWYLLRVAYERNELAPNKPGGEEYQRRMRSSYIGGYVKEPEKGLWESIAYLDFRSSAGSIIVTHNVSPDTLEKECKNYDVAPIVGYRFCKDFKGFIPSILEDLIETRQKVKRKMKATIDPIEKKMLDYRQRALKILANSYYGYQGYPKARWYSKECAESVTAWGRHYIETTIKEAEKFGFKVLYADTDGFFATIPNEKPETIKSKAKKFLKHINEKLPGMLELEYEGFYLRGFFVTKKKYALIDEDGHITTRGLEVVRRDWSEIAKETQAKVLEVILREGSIEKAAGIVKKVVEDLANYRVPVEKLIIHEQITRELKRYKATGPHVAIAKRLQARGIKVKPGTIISYVVLKGSKKISDRVILFDEYDSSRHKYDPDYYIHNQVLPAVLRILEAFGYKEKDLEYQRMKQTGLGAWLKMGKK

SEQ ID NO: 812 - protein, 773 aa, unidentified
  REGION 1..773: note = Description of Unknown: Synthetic polypeptide
MILDTDYITENGKPVIRIFKKEKGEFKIEYDRNFEPYIYALLEDDESIEDIKKITGERHGKKVRIIRVEKVKKKFLGEPIEVWKLVFEHPQDYPAIRDAIRSHPAVREIFEYDIPFAKRYLIDKGLVPMEGGEELKLLAFAIATFYHEGDEFAEGEILMISYADESGAKVITWKKIDLPYVEVVSTEREAIKRFLQVLREKDPDVLLTYNGDNFDFAYIKKRCEKLGLKFTIGRDGSEPKIQRMGDRFAVEVKGRIHLDLAPVVRHTIRLPTYNLEAVYEAVFGKKKEKVYAEEIAEAWKSEEGLKRVAQYSMEDARATYELGREFFPMEVELAKLIGQSVWDVSRSSTGNLVEWYLLRVAYERNELAPNKPGGEEYQRRMRSSYIGGYVKEPEKGLWESIAYLDFRSSAGSIIVTHNVSPDTLEKECKNYDVAPIVGYRFCKDFKGFIPSILEDLIETRQKVKRKMKATIDPIEKKMLDYRQRALKILANSYYGYQGYPKARWYSKECAESVTAWGRHYIETTIKEAEKFGFKVLYADTDGFFATIPNEKPETIKSKAKKFLKHINEKLPGMLELEYEGFYLRGFFVTKKKYALIDEDGHITTRGLEVVRRDWSEIAKETQAKVLEVILREGSIEKAAGIVKKVVEDLANYRVPVEKLIIHEQITRELKRYKATGPHVAIAKRLQARGIKVKPGTIISYVVLKGSKKISDRVILFDEYDSSRHKYDPDYYIHNQVLPAVLRILEAFGYKEKDLEYQRMKQTGLGAWLKMGKK

SEQ ID NO: 813 - protein, 773 aa, unidentified
  REGION 1..773: note = Description of Unknown: Synthetic polypeptide
MILDTDYITENGKPVIRIFKKEKGEFKIEYDRNFEPYIYALLEDDESIEDIKKITGERHGKKVRIIRVEKVKKKFLGEPIEVWKLVFEHPQDYPAIRDAIRSHPAVREIFEYDIPFAKRYLIDKGLVPMEGGEELKLLAFAIATFYHEGDEFAEGEILMISYADESGAKVITWKKIDLPYVEVVSTEREAIKRFLQVLREKDPDVLLTYNGDNFDFAYIKKRCEKLGLKFTIGRDGSEPKIQRMGDRFAVEVKGRIHLDLAPVVRHTIRLPTYTLEAVYEAVFGKKKEQVYAEEIAEAWKSEEGLKRVAQYSMEDARATYELGREFFPMEVELAKLIGQSVWDVSRSSTGNLVEWYLLRVAYERNELAPNKPGGEEYQRRMRSSYIGGYVKEPEKGLWESIAYLDFRSSAGSIIVTHNVSPDTLEKECKNYDVAPIVGYRFCKDFKGFIPSILEDLIETRQKVKRKMKATIDPIEKKMLDYRQRALKILANSYYGYQGYPKARWYSKEQAEKVTAWGRHYIETTIKEAEKFGFKVLYADTDGFFATIPNEKPETIKSKAKKFLKHINEKLPGMLELEYEGFYLRGFFVTKKKYALIDEDGHITTRGLEVVRRDWSEIAKETQAKVLEVILREGSIEKAAGIVKKVVEDLANYRVPVEKLIIHEQITRELKRYKATGPHVAIAKRLQARGIKVKPGTIISYVVLKGSKKISDRVILFDEYDSSRHKYDPDYYIHNQVLPAVLRILEAFGYKEKDLEYQRMKQTGLGAWLKMGKK

SEQ ID NO: 814 - protein, 773 aa, unidentified
  REGION 1..773: note = Description of Unknown: Synthetic polypeptide
MILDTDYITENGKPVIRIFKKEKGEFKIEYDRNFEPYIYALLEDDESIEDIKKITGERHGKKVRIIRVEKVKKKFLGEPIEVWKLVFEHPQDYPAIRDAIRSHPAVREIFEYDIPFAKRYLIDKGLVPMEGGEELKLLAFAIATFYHEGDEFAEGEILMISYADESGAKVITWKKIDLPYVEVVSTEREAIKRFLQVLREKDPDVLLTYNGDNFDFAYIKKRCEKLGLKFTIGRDGSEPKIQRMGDRFAVEVKGRIHLDLAPVVRHTIRLPTYTLEAVYEAVFGKKKEKVYAEEIAEAWKSEEGLKRVAQYSMEDARATYELGREFFPMEVELAKLIGQSVWDVSRSSTGNLVEWYLLRVAYERNELAPNKPGGEEYQRRMRSSYIGGYVKEPEKGLWESIAYLDFRSSAGSIIVTHNVSPDTLEKECKNYDVAPIVGYRFCKDFKGFIPSILEDLIETRQKVKRKVKATIDPIEKKMLDYRQRALKILANSYYGYQGYPKARWYSKECAESVTAWGRHYIETTIKEAEKFGFKVLYADTDGFFATIPNEKPETIKSKAKKFLKHINEKLPGMLELEYEGFYLRGFFVTKKKYALIDEDGHITTRGLEVVRRDWSEIAKETQAKVLEVILREGSIEKAAGIVKKVVEDLANYRVPVEKLIIHEQITRELKRYKATGPHVAIAKRLQARGIKVKPGTIISYVVLKGSKKISDRVILFDEYDSSRHKYDPDYYIHNQVLPAVLRILEAFGYKEKDLEYQRMKQTGLGAWLKMGKK

SEQ ID NO: 815 - protein, 757 aa, unidentified
  REGION 1..757: note = Description of Unknown: Synthetic polypeptide
MILDTDYITENGKPVIRIFKKEKGEFKIEYDRNFEPYIYALLEDDESIEDIKKITGERHGKKVRIIRVEKVKKKFLGEPIEVWKLVFEHPQDVPAIRDAIRSHPAVREIFEYDIPFAKRYLIDKGLVPMEGGEELKLLAFAIATFYHEGDEFAEGEILMISYADESGAKVITWKKIDLPYVEVVSTEREAIKRFLQVLREKDPDVLLTYNGDNFDFAYIKKRCEKLGLKFTIGRDGSEPKIQRMGDRFAVEVKGRIHLDLAPVVRHTIRLPTYTLEAVYEAVFGKKKEKVYAEEIAEAWKSEEGLKRVAQYSMEDARATYELGREFFPMEVELAKLIGQSVWDVSRSSTGNLVEWYLLRVAYERNELAPNKPGGEEYQRRMRSSYIGGYVKEPEKGLWESIAYLDFRSSAGSIIVTHNVSPDTLEKECKNYDVAPIVGYRFCKDFKGFIPSILEDLIETRQKVKRKMKATIDPIEKKMLDYRQRALKILANSYYGYQGYPKARWYSKECAESVTAWGRHYIETTIKEAEKFGFKVLYADTDGFFATIPNEKPETIKSKAKKFLKHINEKLPGMLELEYEGFYLRGFFVTKKKYALIDEDGHITTRGLEVVRRDWSEIAKETQAKVLEVILREGSIEKAAGIVKKVVEDLANYRVPVEKLIIHEQITRKLKDYKATGPHVAIAKRLQARGINVKPGTIISYVVLKGSKKISDRVILFDEYDSSRHKYDPDYYIHNQVLPAVLRILEAFGYKEKDLEYQ

SEQ ID NO: 816 - protein, 757 aa, unidentified
  REGION 1..757: note = Description of Unknown: Synthetic polypeptide
MILDTDYITENGKPVIRIFKKEKGEFKIEYDRNFEPYIYALLEDDESIEDIKKITGERHGKKVRIIRVEKVKKKFLGEPIEVWKLVFEHPQDVPAIRDAIRSHPAVREIFEYDIPFAKRYLIDKGLVPMEGGEELKLLAFAIATFYHEGDEFAEGEILMISYADESGAKVITWKKIDLPYVEVVSTEREAIKRFLQVLREKDPDVLLTYNGDNFDFAYIKKRCEKLGLKFTIGRDGSEPKIQRMGDRFAVEVKGRIHLDLAPVVRHTIRLPTYTLEAVYEAVFGKKKEKVYAEEIAEAWKSEEGLKRVAQYSMEDARATYELGREFFPMEVELAKLIGQSVWDVSRSSTGNLVEWYLLRVAYERNELAPNKPGGEEYQRRMRSSYIGGYVKEPEKGLWESIAYLDFRSSAGSIIVTHNVSPDTLEKECKNYDVAPIVGYRFCKDFKGFIPSILEDLIETRQKVKRKMKATIDPIEKKMLDYRQRALKILANSYYGYQGYPKARWYSKECAESVTAWGRHYIETTIKEAEKFGFKVLYADTDGFFATIPNEKPETIKSKAKKFLKHINEKLPGMLELEYEGFYLRGFFVTKKKYALIDEDGHITTRGLEVVRRDWSEIAKETQAKVLEVILREGSIEKAAGIVKKVVEDLANYRVPVEKLIIHEQITRRLKDYKATGPHVAIAKRLQARGIKVAPGTIISYVVLKGSKKISDRVILFDEYDSSRHKYDPDYYIHNQVLPAVLRILEAFGYKEKDLEYQ

SEQ ID NO: 817 - protein, 773 aa, unidentified
  REGION 1..773: note = Description of Unknown: Synthetic polypeptide
MILDTDYITENGKPVIRIFKKEKGEFKIEYDRNFEPYIYALLEDDESIEDIKKITGERHGKKVRIIRVEKVKKKFLGEPIEVWKLVFEHPQDYPAIRDAIRSHPAVREIFEYDIPFAKRYLIDKGLVPMEGGEELKLLAFKIATFYHEGDEFAEGEILMISYADESGAKVITWKKIDLPYVEVVSTEREAIKRFLQVLREKDPDVLLTYNGDNFDFAYIKKRCEKLGLKFTIGRDGSEPKIQRMGDRFAVEVKGRIHLDLAPVVRHTIRLPTYTLEAVYEAVFGKKKEKVYAEEIAEAWKSEEGLKRVAQYSMEDARATYELGREFFPMEVELAKLIGQSVWDVSRSSTGNLVEWYLLRVAYERNELAPNKPGGEEYQRRMRSSYIGGYVKEPEKGLWESIAYLDFRSSAGSIIVTHNVSPDTLEKECKNYDVAPIVGYRFCKDFKGFIPSILEDLIETRQKVKRKMKATIDPIEKKMLDYRQRALKILANSYYGYQGYPKARWYSKECAESVTAWGRHYIETTIKEAEKFGFKVLYADTDGFFATIPNEKPETIKSKAKKFLKHINEKLPGMLELEYEGFYLRGFFVTKKKYALIDEDGHITTRGLEVVRRDWSEIAKETQAKVLEVILREGSIEKAAGIVKKVVEDLANYRVPVEKLIIHEQITRELKRYKATGPHVAIAKRLQARGIKVKPGTIISYVVLKGSKKISDRVILFDEYDSSRHKYDPDYYIHNQVLPAVLRILEAFGYKEKDLEYQRMKQTGLGAWLKMGKK

SEQ ID NO: 818 - protein, 773 aa, unidentified
  REGION 1..773: note = Description of Unknown: Synthetic polypeptide
MILDTDYITENGKPVIRIFKKEKGEFKIEYDRNFEPYIYALLEDDESIEDIKKITGERHGKKVRIIRVEKVKKKFLGEPIEVWKLVFEHPQDYPAIRDAIRSHPAVREIFEYDIPFAKRYLIDKGLVPMEGGEELKLLAFAIATFYHEGDEFAEGEILMISYADESGAKVITWKKIDLPYVEVVSTEREAIKRFLQVLREKDPDVLLTYNGDNFDFAYIKKRCEKLGLKFTIGRDGSEPKIQRMGDRFAVEVKGRIHLDLAPVVRHTIRLPTYTLEAVYEAVFGKKKEKVYAEEIAEAWKSEEGLKRVAQYSMEDARATYELGREFFPMEVELAKLIGQSVWDVSRSSTGNLVEWYLLRVAYERNELAPNKPGGEEYQRRMRSSYIGGYVKEPEKGLWESIAYLDFRSSAGSIIVTHNVSPDTLEKECKNYDVAPIVGYRFCKDFKGFIPSILEDLIETRQKVKRKMKATIDPIEKKMLDYRQRALKILANSYYGYYGYPKARWYSKECAESVTAWGRHYIETTIKEAEKFGFKVLYADTDGFFATIPNEKPETIKSKAKKFLKHINEKLPGMLELEYEGFYLRGFFVTKKKYALIDEDGHITTRGLEVVRRDWSEIAKETQAKVLEVILREGSIEKAAGIVKKVVEDLANYRVPVEKLIIHEQITRELKRYKATGPHVAIAKRLQARGIKVKPGTIISYVVLKGSKKISDRVILFDEYDSSRHKYDPDYYIHNQVLPAVLRILEAFGYKEKDLEYQRMKQTGLGAWLKMGKK

SEQ ID NO: 819 - protein, 773 aa, unidentified
  REGION 1..773: note = Description of Unknown: Synthetic polypeptide
MILDTDYITENGKPVIRIFKKEKGEFKIEYDRNFEPYIYALLEDDESIEDIKKITGERHGKKVRIIRVEKVKKKFLGEPIEVWKLVFEHPADVPAIRDAIRSHPAVREIFEYDIPFAKRYLIDKGLVPMEGGEELKLLAFNIATFYHEGDEFAEGEILMISYADESGAKVITWKKIDLPYVEVVSTEREAIKRFLQVLREKDPDVLLTYNGDNFDFAYIKKRCEKLGLKFTIGRDGSEPKIQRMGDRFAVEVKGRIHLDLAPVVRHTIRLPTYTLEAVYEAVFGKKKEKVYAEEIAEAWKSEEGLKRVAQYSMEDARATYELGREFFPLEVELAKLIGQSVWDVSRSSTGNLVEWYLLRVAYERNELAPNKPGGEEYQRRMRSSYIGGYVKEPEKGLWESIAYLDFRSSAGSIIVTHNVSPDTLEKECKNYDVAPIVGYRFCKDFKGFIPSILEDLIETRQKVKRKMKATIDPIEKKMLDYRQRALKILANSYYGYQGYPKARWYSKECAESVTAWGRHYIETTIKEAEKFGFKVLYADTDGFFATIPNEKPETIKSKAKKFLKHINEKLPGMLELEYEGFYLRGFFVTKKKYALIDEDGHITTRGLEVVRRDWSEIAKETQAKVLEVILREGSIEKAAGIVKKVVEDLANYRVPVEKLIIHEQITRELKRYKATGPHVAIAKRLQARGIKVKPGTIISYVVLKGSKKISDRVILFDEYDSSRHKYDPDYYIHNQVLPAVLRILEAFGYKEKDLEYQRMKQTGLGAWLKMGKK

SEQ ID NO: 820 - protein, 773 aa, unidentified
  REGION 1..773: note = Description of Unknown: Synthetic polypeptide
MILDTDYITENGKPVIRIFKKEKGEFKIEYDRNFEPYIYALLEDDESIEDIKKITGERHGKKVRIIRVEKVKKKFLGEPIEVWKLVFEHPQDYPAIRDAIRSHPAVREIFEYDIPFAKRYLIDKGLVPMEGGEELKLLAFAIATFYHEGDEFAEGEILMISYADESGAKVITWKKIDLPYVEVVSTEREAIKRFLQVLREKDPDVLLTYNGDNFDFAYIKKRCEKLGLKFTIGRDGSEPKIQRMGDRFAVEVKGRIHLDLAPVVRHTIRLPTYTLEAVYEAVFGKKKEKVYAEEIAEAWKSEEGLKRVAQYSMEDARATYELGREFFPMEVELAKLIGQSVWDVSRSSTGNLVEWYLLRVAYERNELAPNKPGGEEYQRRDRSSYIGGYVKEPEKGLWESIAYLDFRSSAGSIIVTHNVSPDTLEKECKNYDVAPIVGYRFCKDFKGFIPSILEDLIETRQKVKRKMKATIDPIEKKMLDYRQRALKILANSYYGYQGYPKARWYSKECAESVTAWGRHYIETTIKEAEKFGFKVLYADTDGFFATIPNEKPETIKSKAKKFLKHINEKLPGMLELEYEGFYLRGFFVTKKKYALIDEDGHITTRGLEVVRRDWSEIAKETQAKVLEVILREGSIEKAAGIVKKVVEDLANYRVPVEKLIIHEQITRELKRYKATGPHVAIAKRLQARGIKVKPGTIISYVVLKGSKKISDRVILFDEYDSSRHKYDPDYYIHNQVLPAVLRILEAFGYKEKDLEYQRMKQTGLGAWLKMGKK

SEQ ID NO: 821 - protein, 773 aa, unidentified
  REGION 1..773: note = Description of Unknown: Synthetic polypeptide
MILDTDYITENGKPVIRIFKKEKGEFKIEYDRNFEPYIYALLEDDESIEDIKKITGERHGKKVRIIRVEKVKKKFLGEPIEVWKLVFEHPQDYPAIRDAIRSHPAVREIFEYDIPFAKRYLIDKGLVPMEGGEELKLLAFAIATFYHEGDEFAEGEILMISYADESGAKVITWKKIDLPYVEVVSTEREAIKRFLQVLREKDPDVLLTYNGDNFDFAYIKKRCEKLGLKFTIGRDGSEPKIQRMGDRFAVEVKGRIHLDLAPVVRHTIRLPTYTLEAVYEAVFGKKKEKVYAEEIAEAWKSEEGLKRVAQYSMEDARATYELGREFFPMEVELAKLIGQSVWDVSRSSTGNLVEWYLLRVAYERNELAPNKPGGEEYQRRMRSSYIGGYVKEPEKGLWESIAYLDFRSSAGSIIVTHNVSPDTLEKECKNYDVAPIVGYRFCKDFKGFIPSILEDLIETRQKVKRKMKATIDPIEKKMLDYRQRALKILANSYYGYQGYPKARWYSKEMAESVTAWGRHYIETTIKEAEKFGFKVLYADTDGFFATIPNEKPETIKSKAKKFLKHINEKLPGMLELEYEGFYLRGFFVTKKKYALIDEDGHITTRGLEVVRRDWSEIAKETQAKVLEVILREGSIEKAAGIVKKVVEDLANYRVPVEKLIIHEQITRELKRYKATGPHVAIAKRLQARGIKVKPGTIISYVVLKGSKKISDRVILFDEYDSSRHKYDPDYYIHNQVLPAVLRILEAFGYKEKDLEYQRMKQTGLGAWLKMGKK

SEQ ID NO: 822 - protein, 773 aa, unidentified
  REGION 1..773: note = Description of Unknown: Synthetic polypeptide
MILDTDYITENGKPVIRIFKKEKGEFKIEYDRNFEPYIYALLEDDESIEDIKKITGERHGKKVRIIRVEKVKKKFLGEPIEVWKLVFEHPQDYPAIRDAIRSHPAVREIFEYDIPFAKRYLIDKGLVPMEGGEELKLLAFRIATFYHEGDEFAEGEILMISYADESGAKVITWKKIDLPYVEVVSTEREAIKRFLQVLREKDPDVLLTYNGDNFDFAYIKKRCEKLGLKFTIGRDGSEPKIQRMGDRFAVEVKGRIHLDLAPVVRHTIRLPTYTLEAVYEAVFGKKKEKVYAEEIAEAWKSEEGLKRVAQYSMEDARATYELGREFFPMEVELAKLIGQSVWDVSRSSTGNLVEWYLLRVAYERNELAPNKPGGEEYQRRMRSSYIGGYVKEPEKGLWESIAYLDFRSSAGSIIVTHNVSPDTLEKECKNYDVAPIVGYRFCKDFKGFIPSILEDLIETRQKVKRKMKATIDPIEKKMLDYRQRALKILANSYYGYQGYPKARWYSKECAESVTAWGRHYIETTIKEAEKFGFKVLYADTDGFFATIPNEKPETIKSKAKKFLKHINEKLPGMLELEYEGFYLRGFFVTKKKYALIDEDGHITTRGLEVVRRDWSEIAKETQAKVLEVILREGSIEKAAGIVKKVVEDLANYRVPVEKLIIHEQITRELKRYKATGPHVAIAKRLQARGIKVKPGTIISYVVLKGSKKISDRVILFDEYDSSRHKYDPDYYIHNQVLPAVLRILEAFGYKEKDLEYQRMKQTGLGAWLKMGKK

SEQ ID NO: 823 - protein, 773 aa, unidentified
  REGION 1..773: note = Description of Unknown: Synthetic polypeptide
MILDTDYITENGKPVIRIFKKEKGEFKIEYDRNFEPYIYALLEDDESIEDIKKITGERHGKKVRIIRVEKVKKKFLGEPIEVWKLVFEHPQDYPAIRDAIRSHPAVREIFEYDIPFAKRYLIDKGLVPMEGGEELKLLAFAIATFYHEGDEFAEGEILMISYADESGAKVITWKKIDLPYVEVVSTEREAIKRFLQVLREKDPDVLLTYNGDNFDFAYIKKRCEKLGLKFTIGRDGSEPKIQRMGDRFAVEVKGRIHLDLAPVVRHTIRLPTYTLEAVYEAVFGKKKEQVYAEEIAEAWKSEEGLKRVAQYSMEDARATYELGREFFPMEVELAKLIGQSVWDVSRSSTGNLVEWYLLRVAYERNELAPNKPGGEEYQRRMRSSYIGGYVKEPEKGLWESIAYLDFRSSAGSIIVTHNVSPDTLEKECKNYDVAPIVGYRFCKDFKGFIPSILEDLIETRQKVKRKMKATIDPIEKKMLDYRQRALKILANSYYGYQGYPKARWYSKEDAEDVTAWGRHYIETTIKEAEKFGFKVLYADTDGFFATIPNEKPETIKSKAKKFLKHINEKLPGMLELEYEGFYLRGFFVTKKKYALIDEDGHITTRGLEVVRRDWSEIAKETQAKVLEVILREGSIEKAAGIVKKVVEDLANYRVPVEKLIIHEQITRELKRYKATGPHVAIAKRLQARGIKVKPGTIISYVVLKGSKKISDRVILFDEYDSSRHKYDPDYYIHNQVLPAVLRILEAFGYKEKDLEYQRMKQTGLGAWLKMGKK

SEQ ID NO: 824 - protein, 773 aa, unidentified
  REGION 1..773: note = Description of Unknown: Synthetic polypeptide
MILDTDYITENGKPVIRIFKKEKGEFKIEYDRNFEPYIYALLEDDESIEDIKKITGERHGKKVRIIRVEKVKKKFLGEPIEVWKLVFEHPQDVPAIRDAIRSHPAVREIFEYDIPFAKRYLIDKGLVPMEGGEELKLLAFNIATFYHEGDEFAEGEILMISYADESGAKVITWKKIDLPYVEVVSTEREAIKRFLQVLREKDPDVLLTYNGDNFDFAYIKKRCEKLGLKFTIGRDGSEPKIQRMGDRFAVEVKGRIHLDLAPVVRHTIRLPTYTLEAVYEAVFGKKKEQVYAEEIAEAWKSEEGLKRVAQYSMEDARATYELGREFFPLEVELAKLIGQSVWDVSRSSTGNLVEWYLLRVAYERNELAPNKPGGEEYQRRMRSSYIGGYVKEPEKGLWESIAYLDFRSSAGSIIVTHNVSPDTLEKECKNYDVAPIVGYRFCKDFKGFIPSILEDLIETRQKVKRKMKATIDPIEKKMLDYRQRALKILANSYYGYQGYPKARWYSKECAESVTAWGRHYIETTIKEAEKFGFKVLYADTDGFFATIPNEKPETIKSKAKKFLKHINEKLPGMLELEYEGFYLRGFFVTKKKYALIDEDGHITTRGLEVVRRDWSEIAKETQAKVLEVILREGSIEKAAGIVKKVVEDLANYRVPVEKLIIHEQITRELKRYKATGPHVAIAKRLQARGIKVKPGTIISYVVLKGSKKISDRVILFDEYDSSRHKYDPDYYIHNQVLPAVLRILEAFGYKEKDLEYQRMKQTGLGAWLKMGKK

SEQ ID NO: 825 - protein, 757 aa, unidentified
  REGION 1..757: note = Description of Unknown: Synthetic polypeptide
MILDTDYITENGKPVIRIFKKEKGEFKIEYDRNFEPYIYALLEDDESIEDIKKITGERHGKKVRIIRVEKVKKKFLGEPIEVWKLVFEHPQDVPAIRDAIRSHPAVREIFEYDIPFAKRYLIDKGLVPMEGGEELKLLAFAIATFYHEGDEFAEGEILMISYADESGAKVITWKKIDLPYVEVVSTEREAIKRFLQVLREKDPDVLLTYNGDNFDFAYIKKRCEKLGLKFTIGRDGSEPKIQRMGDRFAVEVKGRIHLDLAPVVRHTIRLPTYTLEAVYEAVFGKKKEKVYAEEIAEAWKSEEGLKRVAQYSMEDARATYELGREFFPMEVELAKLIGQSVWDVSRSSTGNLVEWYLLRVAYERNELAPNKPGGEEYQRRMRSSYIGGYVKEPEKGLWESIAYLDFRSSAGSIIVTHNVSPDTLEKECKNYDVAPIVGYRFCKDFKGFIPSILEDLIETRQKVKRKMKATIDPIEKKMLDYRQRALKILANSYYGYQGYPKARWYSKECAESVTAWGRHYIETTIKEAEKFGFKVLYADTDGFFATIPNEKPETIKSKAKKFLKHINEKLPGMLELEYEGFYLRGFFVTKKKYALIDEDGHITTRGLEVVRRDWSEIAKETQAKVLEVILREGSIEKAAGIVKKVVEDLANYRVPVEKLIIHEVITRKLKDYKATGPHVAIAKRLQARGIKVKPGTIISYVVLKGSKKISDRVILFDEYDSSRHKYDPDYYIHNQVLPAVLRILEAFGYKEKDLEYQ

SEQ ID NO: 826 - protein, 773 aa, unidentified
  REGION 1..773: note = Description of Unknown: Synthetic polypeptide
MILDTDYITENGKPVIRIFKKEKGEFKIEYDRNFEPYIYALLEDDESIEDIKKITGERHGKKVRIIRVEKVKKKFLGEPIEVWKLVFEHPQDVPAIRDAIRSHPAVREIFEYDIPFAKRYLIDKGLVPMEGGEELKLLAFNIATFYHEGDEFAEGEILMISYADESGAKVITWKKIDLPYVEVVSTEREAIKRFLQVLREKDPDVLLTYNGDNFDFAYIKKRCEKLGLKFTIGRDGSEPKIQRMGDRFAVEVKGRIHLDLAPVVRHTIRLPTYTLEAVYEAVFGKKKEKVYAEEIAEAWKSEEGLKRVAQYSMEDARATYELGREFFPLEVELAKLIGQSVWDVSRSSTGNLVEWYLLRVAYERNELAPNKPGGEEYQRRMRSSYIGGYVKEPEKGLWESIAYLDFRSSAGSIIVTHNVSPDTLEKECKNYDVAPIVGYRFCKDFKGFIPSILEDLIETRQKVKRKMKATIDPIEKKMLDYRQRALKILANSYYGYQGYPKARWYSKECAESVTAWGRHYIETTIKEAEKFGFKVLYADTDGFFATIPNEKPETIKSKAKKFLKHINEKLPGMLELEYEGFYLRGFFVTKKKYALIDEDGHITTRGLEVVRRAWSEIAKETQAKVLEVILREGSIEKAAGIVKKVVEDLANYRVPVEKLIIHEQITRELKRYKATGPHVAIAKRLQARGIKVKPGTIISYVVLKGSKKISDRVILFDEYDSSRHKYDPDYYIHNQVLPAVLRILEAFGYKEKDLEYQRMKQTGLGAWLKMGKK

SEQ ID NO: 827 - protein, 773 aa, unidentified
  REGION 1..773: note = Description of Unknown: Synthetic polypeptide
MILDTDYITENGKPVIRIFKKEKGEFKIEYDRNFEPYIYALLEDDESIEDIKKITGERHGKKVRIIRVEKVKKKFLGEPIEVWKLVFEHPQDVPAIRDAIRSHPAVREIFEYDIPFAKRYLIDKGLVPMEGGEELKLLAFNIATFYHEGDEFAEGEILMISYADESGAKVITWKKIDLPYVEVVSTEREAIKRFLQVLREKDPDVLLTYNGDNFDFAYIKKRCEKLGLKFTIGRDGSEPKIQRMGDRFAVEVKGRIHLDLAPVVRHTIRLPTYTLEAVYEAVFGKKKEKVYAEEIAEAWKSEEGLKRVAQYSMEDARATYELGREFFPLEVELAKLIGQSVWDVSRSSTGNLVEWYLLRVAYERNELAPNKPGGEEYQRRMRSSYIGGYVKEPEKGLWESIAYLDFRSSAGSIIVTHNVSPDTLEKECKNYDVAPIVGYRFCKDFKGFIPSILEDLIETRQKVKRKMKATIDPIEKKMLDYRQRALKILANSYYGYQGYPKARWYSKECAESVTAWGRHYIETTIKEAEKFGFKVLYADTDGFFATIPNEKPETIKSKAKKFLKHINEKLPGMLELEYEGFYLRGFFVTKKKYALIDEDGHITTRGLEVVRRKWSEIAKETQAKVLEVILREGSIEKAAGIVKKVVEDLANYRVPVEKLIIHEQITRELKRYKATGPHVAIAKRLQARGIKVKPGTIISYVVLKGSKKISDRVILFDEYDSSRHKYDPDYYIHNQVLPAVLRILEAFGYKEKDLEYQRMKQTGLGAWLKMGKK

SEQ ID NO: 828 - protein, 773 aa, unidentified
  REGION 1..773: note = Description of Unknown: Synthetic polypeptide
MILDTDYITENGKPVIRIFKKEKGEFKIEYDRNFEPYIYALLEDDESIEDIKKITGERHGKKVRIIRVEKVKKKFLGEPIEVWKLVFEHPQDYPAIRDAIRSHPAVREIFEYDIPFAKRYLIDKGLVPMEGGEELKLLAFAIATFYHEGDEFAEGEILMISYADESGAKVITWKKIDLPYVEVVSTEREAIKRFLQVLREKDPDVLLTYNGDNFDFAYIKKRCEKLGLKFTIGRDGSEPKIQRMGDRFAVEVKGRIHLDLAPVVRHTIRLPTYTLEAVYEAVFGKKKEKVYAEEIAEAWKSEEGLKRVAQYSMEDARATYELGREFFPMEVELAKLIGQSVWDVSRSSTGNLVEWYLLRVAYERNELAPNKPGGEEYQRRMRSSYIGGYVKEPEKGLWESIAYLDFRSSAGSIIVTHNVSPDTLEKECKNYDVAPIVGYRFCKDFKGFIPSILEDLIETRQKVKRKMKATIDPIEKKMLDYRQRALKILANSYYGYQGYPKARWYSKECAESVTAWGRHYIETTIKEAEKFGFKVLYADTDGFFATIPNEKPETIKSKAKKFLKHINEKLPGMLELEYEGFYLRGFFVTKKKYALIDEDGHITTRGLEVVRRDWSEIAKETQAKVLEVILREGSIEKAAGIVKKVVEDLANYRVPVEKLIIHEQITRELKRYKATGPHVAIAKRLQARGIKVKPGTIFSYVVLKGSKKISDRVILFDEYDSSRHKYDPDYYIHNQVLPAVLRILEAFGYKEKDLEYQRMKQTGLGAWLKMGKK

SEQ ID NO: 829 - protein, 757 aa, unidentified
  REGION 1..757: note = Description of Unknown: Synthetic polypeptide
MILDTDYITENGKPVIRIFKKEKGEFKIEYDRNFEPYIYALLEDDESIEDIKKITGERHGKKVRIIRVEKVKKKFLGEPIEVWKLVFEHPQDVPAIRDAIRSHPAVREIFEYDIPFAKRYLIDKGLVPMEGGEELKLLAFAIATFYHEGDEFAEGEILMISYADESGAKVITWKKIDLPYVEVVSTEREAIKRFLQVLREKDPDVLLTYNGDNFDFAYIKKRCEKLGLKFTIGRDGSEPKIQRMGDRFAVEVKGRIHLDLAPVVRHTIRLPTYTLEAVYEAVFGKKKEKVYAEEIAEAWKSEEGLKRVAQYSMEDARATYELGREFFPMEVELAKLIGQSVWDVSRSSTGNLVEWYLLRVAYERNELAPNKPGGEEYQRRMRSSYIGGYVKEPEKGLWESIAYLDFRSSAGSIIVTHNVSPDTLEKECKNYDVAPIVGYRFCKDFKGFIPSILEDLIETRQKVKRKMKATIDPIEKKMLDYRQRALKILANSYYGYQGYPKARWYSKECAESVTAWGRHYIETTIKEAEKFGFKVLYADTDGFFATIPNEKPETIKSKAKKFLKHINEKLPGMLELEYEGFYLRGFFVTKKKYALIDEDGHITTRGLEVVRRDWSEIAKETQAKVLEVILREGSIEKAAGIVKKVVEDLANYRVPVEKLIIHEQITRKLKDYKATGPHVAIAKRLQARGIKVNPGTIISYVVLKGSKKISDRVILFDEYDSSRHKYDPDYYIHNQVLPAVLRILEAFGYKEKDLEYQ

SEQ ID NO: 830 - protein, 773 aa, unidentified
  REGION 1..773: note = Description of Unknown: Synthetic polypeptide
MILDTDYITENGKPVIRIFKKEKGEFKIEYDRNFEPYIYALLEDDESIEDIKKITGERHGKKVRIIRVEKVKKKFLGEPIEVWKLVFEHPQDYPAIRDAIRSHPAVREIFEYDIPFAKRYLIDKGLVPMEGGEELKLLAFAIATFYHEGDEFAEGEILMISYADESGAKVITWKKIDLPYVEVVSTEREAIKRFLQVLREKDPDVLLTYNGDNFDFAYIKKRAEKLGLKFPIGRDGSEPKIQRMGDRFAVEVKGRIHLDLAPVVRHTIRLPTYTLEAVYEAVFGKKKEKVYAEEIAEAWKSEEGLKRVAQYSMEDARATYELGREFFPMEVELAKLIGQSVWDVSRSSTGNLVEWYLLRVAYERNELAPNKPGGEEYQRRMRSSYIGGYVKEPEKGLWESIAYLDFRSSAGSIIVTHNVSPDTLEKECKNYDVAPIVGYRFCKDFKGFIPSILEDLIETRQKVKRKMKATIDPIEKKMLDYRQRALKILANSYYGYQGYPKARWYSKECAESVTAWGRHYIETTIKEAEKFGFKVLYADTDGFFATIPNEKPETIKSKAKKFLKHINEKLPGMLELEYEGFYLRGFFVTKKKYALIDEDGHITTRGLEVVRRDWSEIAKETQAKVLEVILREGSIEKAAGIVKKVVEDLANYRVPVEKLIIHEQITRELKRYKATGPHVAIAKRLQARGIKVKPGTIISYVVLKGSKKISDRVILFDEYDSSRHKYDPDYYIHNQVLPAVLRILEAFGYKEKDLEYQRMKQTGLGAWLKMGKK

SEQ ID NO: 831 - protein, 773 aa, unidentified; identical to SEQ ID NO: 49
  REGION 1..773: note = Description of Unknown: Synthetic polypeptide

SEQ ID NO: 832 - protein, 773 aa, unidentified
  REGION 1..773: note = Description of Unknown: Synthetic polypeptide
MILDTDYITENGKPVIRIFKKEKGEFKIEYDRNFEPYIYALLEDDESIEDIKKITGERHGKKVRIIRVEKVKKKFLGEPIEVWKLVFEHPQDVPAIRDAIRSHPAVREIFEYDIPFAKRYLIDKGLVPMEGGEELKLLAFAIATFYHEGDEFAEGEILMISYADESGAKVITWKKIDLPYVEVVSTEREAIKRFLQVLREKDPDVLLTYNGDNFDFAYIKKRCEKLGLKFTIGRDGSEPKIQRMGDRFAVEVKGRIHLDLAPVVRHTIRLPTYTLEAVYEAVFGKKKEKVYAEEIAEAWKSEEGLKRVAQYSMEDARATYELGREFFPMEVELAKLIGQSVWDVSRSSTGNLVEWYLLRVAYERNELAPNKPGGEEYQRRMRSSYIGGYVKEPEKGLWESIAYLDFRSSAGSIIVTHNVSPDTLEKECKNYDVAPIVGYRFCKDFKGFIPSILEDLIETRQKVKRKMKATIDPIEKKMLDYRQRALKILANSYYGYQGYPKARWYSKENAEHVTAWGRHYIETTIKEAEKFGFKVLYADTDGFFATIPNEKPETIKSKAKKFLKHINEKLPGMLELEYEGFYLRGFFVTKKKYALIDEDGHITTRGLEVVRRDWSEIAKETQAKVLEVILREGSIEKAAGIVKKVVEDLANYRVPVEKLIIHEQITRELKDYKATGPHVAIAKRLQARGIKVKPGTIISYVVLKGSKKISDRVILFDEYDSSRHKYDPDYYIHNQVLPAVLRILEAFGYKEKDLEYQRMKQTGLGAWLKMGKK

SEQ ID NO: 833 - protein, 773 aa, unidentified
  REGION 1..773: note = Description of Unknown: Synthetic polypeptide
MILDTDYITENGKPVIRIFKKEKGEFKIEYDRNFEPYIYALLEDDESIEDIKKITGERHGKKVRIIRVEKVKKKFLGEPIEVWKLVFEHPQDVPAIRDAIRSHPAVREIFEYDIPFAKRYLIDKGLVPMEGGEELKLLAFNIATFYHEGDEFAEGEILMISYADESGAKVITWKKIDLPYVEVVSTEREAIKRFLQVLREKDPDVLLTYNGDNFDFAYIKKRCEKLGLKFTIGRDGSEPKIQRMGDRFAVEVKGRIHLDLAPVVRHTIRLPTYTLEAVYEAVFGKKKEKVYAEEIAEAWKSEEGLKRVAQYSMEDARATYELGREFFPLEVELAKLIGQSVWDVSRSSTGNLVEWYLLRVAYERNELAPNKPGGEEYQRRMRSSYIGGYVKEPEKGLWESIAYLDFRSSAGSIIVTHNVSPDTLEKECKNYDVAPIVGYRFCKDFKGFIPSILEDLIETRQKVKRKMKATIDPIEKKMLDYRQRALKILANSYYGYQGYPKARWYSKECAESVTAWGRHYIETTIKEAEKFGFKVLYADTDGFFATIPNEKPETIKSKAKKFLKHINEKLPGMLELEYEGFYLRGFFVTKKKYALIDEDGHITTRGLEVVRRDWSEIAKETQAKVLEVILREGSIEKAAGIVKKVVEDLANYRVPVEKLIIHEQITRELKRYKATGPWVAIAKRLQARGIKVKPGTIISYVVLKGSKKISDRVILFDEYDSSRHKYDPDYYIHNQVLPAVLRILEAFGYKEKDLEYQRMKQTGLGAWLKMGKK

SEQ ID NO: 834 - protein, 773 aa, unidentified
  REGION 1..773: note = Description of Unknown: Synthetic polypeptide
MILDTDYITENGKPVIRIFKKEKGEFKIEYDRNFEPYIYALLEDDESIEDIKKITGERHGKKVRIIRVEKVKKKFLGEPIEVWKLVFEHPQDYPAIRDAIRSHPAVREIFEYDIPFAKRYLIDKGLVPMEGGEELKLLAFAIATFYHEGDEFAEGEILMISYADESGAKVITWKKIDLPYVEVVSTEREAIKRFLQVLREKDPDVLLTYNGDNFDFAYIKKRCEKLGLKFTIGRDGSEPKIQRMGDRFAVEVKGRIHLDLAPVVRHTIRLPTYTLEAVYEAVFGKKKEKVYAEEIAEAWKSEEGLKRVAQYSMEDARATYELGREFFPMEVELAKLIGQSVWDVSRSSTGNLVEWYLLRVAYERNELAPNKPGGEEYQRRMRSSYIGGYVKEPEKGLWESIAYLDFRSSAGSIIVTHNVSPDTLEKECKNYDVAPIVGYRFCKDFKGFIPSILEDLIETRQKVKRKMKATIDPIEKKMLDYRQDALKILANSYYGYQGYPKARWYSKECAESVTAWGRHYIETTIKEAEKFGFKVLYADTDGFFATIPNEKPETIKSKAKKFLKHINEKLPGMLELEYEGFYLRGFFVTKKKYALIDEDGHITTRGLEVVRRDWSEIAKETQAKVLEVILREGSIEKAAGIVKKVVEDLANYRVPVEKLIIHEQITRELKRYKATGPHVAIAKRLQARGIKVKPGTIISYVVLKGSKKISDRVILFDEYDSSRHKYDPDYYIHNQVLPAVLRILEAFGYKEKDLEYQRMKQTGLGAWLKMGKK

SEQ ID NO: 835 - protein, 757 aa, unidentified
  REGION 1..757: note = Description of Unknown: Synthetic polypeptide
MILDTDYITENGKPVIRIFKKEKGEFKIEYDRNFEPYIYALLEDDESIEDIKKITGERHGKKVRIIRVEKVKKKFLGEPIEVWKLVFEHPQDVPAIRDAIRSHPAVREIFEYDIPFAKRYLIDKGLVPMEGGEELKLLAFAIATFYHEGDEFAEGEILMISYADESGAKVITWKKIDLPYVEVVSTEREAIKRFLQVLREKDPDVLLTYNGDNFDFAYIKKRCEKLGLKFTIGRDGSEPKIQRMGDRFAVEVKGRIHLDLAPVVRHTIRLPTYTLEAVYEAVFGKKKEKVYAEEIAEAWKSEEGLKRVAQYSMEDARATYELGREFFPLEVELAKLIGQSVWDVSRSSTGNLVEWYLLRVAYERNELAPNKPGGEEYQRRMRSSYIGGYVKEPEKGLWESIAYLDFRSSAGSIIVTHNISPDTLEKECKNYDVAPIVGYRFCKDFKGFIPSILEDLIETRQKVKRKMKATIDPIEKKMLDYRQRALKILANSYYGYQGYPKARWYSKECAESVTAWGRHYIETTIKEAEKFGFKVLYADTDGFFATIPNEKPETIKSKAKKFLKHINEKLPGMLELEYEGFYLRGFFVTKKKYALIDEDGHITTRGLEVVRRDWSEIAKETQAKVLEVILREGSIEKAAGIVKKVVEDLANYRVPVEKLIIHEQITRELKRYKATGPHVAIAKRLQARGIKVKPGTIISYVVLKGSKKISDRVILFDEYDSSRHKYDPDYYIHNQVLPAVLRILEAFGYKEKDLEYQ

SEQ ID NO: 836 - protein, 773 aa, unidentified
  REGION 1..773: note = Description of Unknown: Synthetic polypeptide
MILDTDYITENGKPVIRIFKKEKGEFKIEYDRNFEPYIYALLEDDESIEDIKKITGERHGKKVRIIRVEKVKKKFLGEPIEVWKLVFEHPQDYPAIRDAIRSHPAVREIFEYDIPFAKRYLIDKGLVPMEGGEELKLLAFAIATFYHEGDEFAEGEILMISYADESGAKVITWKKIDLPYVEVVSTEREAIKRFLQVLREKDPDVLLTYNGDNFDFAYIKKRCEKLGLKFTIGRDGSEPKIQRMGDRFAVEVKGRIHLDLAPVVRHTIRLPTYTLEAVYEAVFGKKKEKVKAEEIAEAWKSEEGLKRVAQYSMEDARATYELGREFFPMEVELAKLIGQSVWDVSRSSTGNLVEWYLLRVAYERNELAPNKPGGEEYQRRMRSSYIGGYVKEPEKGLWESIAYLDFRSSAGSIIVTHNVSPDTLEKECKNYDVAPIVGYRFCKDFKGFIPSILEDLIETRQKVKRKMKATIDPIEKKMLDYRQRALKILANSYYGYQGYPKARWYSKECAESVTAWGRHYIETTIKEAEKFGFKVLYADTDGFFATIPNEKPETIKSKAKKFLKHINEKLPGMLELEYEGFYLRGFFVTKKKYALIDEDGHITTRGLEVVRRDWSEIAKETQAKVLEVILREGSIEKAAGIVKKVVEDLANYRVPVEKLIIHEQITRELKRYKATGPHVAIAKRLQARGIKVKPGTIISYVVLKGSKKISDRVILFDEYDSSRHKYDPDYYIHNQVLPAVLRILEAFGYKEKDLEYQRMKQTGLGAWLKMGKK

SEQ ID NO: 837 - protein, 766 aa, unidentified
  REGION 1..766: note = Description of Unknown: Synthetic polypeptide
MILDTDYITENGKPVIRIFKKEKGEFKIEYDRNFEPYIYALLEDDESIEDIKKITGERHGKKVRIIRVEKVKKKFLGEPIEVWKLVFEHPQDVPAIRDAIRSHPAVREIFEYDIPFAKRYLIDKGLVPMEGGEELKLLAFNIATFYHEGDEFAEGEILMISYADESGAKVITWKKIDLPYVEVVSTEREAIKRFLQVLREKDPDVLLTYNGDNFDFAYIKKRCEKLGLKFTIGRDGSEPKIQRMGDRFAVEVKGRIHLDLAPVVRHTIRLPTYTLEAVYEAVFGKKKEKVYAEEIAEAWKSEEGLKRVAQYSMEDARATYELGREFFPLEVELAKLIGQSVWDVSRSSTGNLVEWYLLRVAYERNELAPNKPGGEEYQRRMRSSYIGGYVKEPEKGLWESIAYLDFRSSAGSIIVTHNVSPDTLEKECKNYDVAPIVGYRFCKDFKGFIPSILEDLIETRQKVKRKMKATIDPIEKKMLDYRQRALKILANSYYGYQGYPKARWYSKECAESVTAWGRHYIETTIKEAEKFGFKVLYADTDGFFATIPNEKPETIKSKAKKFLKHINEKLPGMLELEYEGFYLRGFFVTKKKYALIDEDGHITTRGLEVVRRDWSEIAKETQAKVLEVILREGSIEKAAGIVKKVVEDLANYRVPVEKLIIHEQITRELKRYKATGPHVAIAKRLQARGIKVKPGTIISYVVLKGSKKISDRVILFDEYDSSRHKYDPDYYIHNQVLPAVLRILEAFGYKEKDLEYQRMKQTGLGA

SEQ ID NO: 838 - protein, 757 aa, unidentified
  REGION 1..757: note = Description of Unknown: Synthetic polypeptide
MILDTDYITENGKPVIRIFKKEKGEFKIEYDRNFEPYIYALLEDDESIEDIKKITGERHGKKVRIIRVEKVKKKFLGEPIEVWKLVFEHPQDVPAIRDAIRSHPAVREIFEYDIPFAKRYLIDKGLVPMEGGEELKLLAFAIATFYHEGDEFAEGEILMISYADESGAKVITWKKIDLPYVEVVSTEREAIKRFLQVLREKDPDVLLTYNGDNFDFAYIKKRCEKLGLKFTIGRDGSEPKIQRMGDRFAVEVKGRIHLDLAPVVRHTIRLPTYTLEAVYEAVFGKKKEKVYAEEIAEAWKSEEGLKRVAQYSMEDARATYELGREFFPMEVELAKLIGQSVWDVSRSSTGNLVEWYLLRVAYERNELAPNKPGGEEYQRRMRSSYIGGYVKEPEKGLWESIAYLDFRSSAGSIIVTHNVSPDTLEKECKNYDVAPIVGYRFCKDFKGFIPSILEDLIETRQKVKRKMKATIDPIEKKMLDYRQRALKILANSYYGYQGYPKARWYSKECAESVTAWGRHYIETTIKEAEKFGFKVLYADTDGFFATIPNEKPETIKSKAKKFLKHINEKLPGMLELEYEGFYLRGFFVTKKKYALIDEDGHITTRGLEVVRRDWSEIAKETQAKVLEVILREGSIEKAAGIVKKVVEDLANYRVPVEKLIIHEQITRKLKDYKATGLHVAIAKRLQARGIKVKPGTIISYVVLKGSKKISDRVILFDEYDSSRHKYDPDYYIHNQVLPAVLRILEAFGYKEKDLEYQ

SEQ ID NO: 839 - protein, 773 aa, unidentified
  REGION 1..773: note = Description of Unknown: Synthetic polypeptide
MILDTDYITENGKPVIRIFKKEKGEFKIEYDRNFEPYIYALLEDDESIEDIKKITGERHGKKVRIIRVEKVKKKFLGEPIEVWKLVFEHPQDVPAIRDAIRSHPAVREIFEYDIPFAKRYLIDKGLVPMEGGEELKLLAFNIATFYHEGDEFAEGEILMISYADESGAKVITWKKIDLPYVEVVSTEREAIKRFLQVLREKDPDVLLTYNGDNFDFAYIKKRCEKLGLKFTIGRDGSEPKDQRMGDRFAVEVKGRIHLDLAPVVRHTIRLPTYTLEAVYEAVFGKKKEKVYAEEIAEAWKSEEGLKRVAQYSMEDARATYELGREFFPLEVELAKLIGQSVWDVSRSSTGNLVEWYLLRVAYERNELAPNKPGGEEYQRRMRSSYIGGYVKEPEKGLWESIAYLDFRSSAGSIIVTHNVSPDTLEKECKNYDVAPIVGYRFCKDFKGFIPSILEDLIETRQKVKRKMKATIDPIEKKMLDYRQRALKILANSYYGYQGYPKARWYSKECAESVTAWGRHYIETTIKEAEKFGFKVLYADTDGFFATIPNEKPETIKSKAKKFLKHINEKLPGMLELEYEGFYLRGFFVTKKKYALIDEDGHITTRGLEVVRRDWSEIAKETQAKVLEVILREGSIEKAAGIVKKVVEDLANYRVPVEKLIIHEQITRELKRYKATGPHVAIAKRLQARGIKVKPGTIISYVVLKGSKKISDRVILFDEYDSSRHKYDPDYYIHNQVLPAVLRILEAFGYKEKDLEYQRMKQTGLGAWLKMGKK

SEQ ID NO: 840 - protein, 772 aa, unidentified; identical to SEQ ID NO: 103
  REGION 1..772: note = Description of Unknown: Synthetic polypeptide

SEQ ID NO: 841 - protein, 773 aa, unidentified
  REGION 1..773: note = Description of Unknown: Synthetic polypeptide
MILDTDYITENGKPVIRIFKKEKGEFKIEYDRNFEPYIYALLEDDESIEDIKKITGERHGKKVRIIRVEKVKKKFLGEPIEVWKLVFEHPQDYPAIRDAIRSHPAVREIFEYDIPFAKRYLIDKGLVPMEGGEELKLLAFAIATFYHEGDEFAEGEILMISYADESGAKVITWKKIDLPYVEVVSTEREAIKRFLQVLREKDPDVLLTYNGDNFDFAYIKKRCEKLGLKFTIGRDGSEPKIQRMGDRFAVEVKGRIHLDLAPVVRHTIRLPTYTLEAVYEAVFGKKKEKVYAEEIAEAWKSEEGLARVAQYSVEDARATYELGREFFPMEVELAKLIGQSVWDVSRSSTGNLVEWYLLRVAYERNELAPNKPGGEEYQRRMRSSYIGGYVKEPEKGLWESIAYLDFRSSAGSIIVTHNVSPDTLEKECKNYDVAPIVGYRFCKDFKGFIPSILEDLIETRQKVKRKMKATIDPIEKKMLDYRQRALKILANSYYGYQGYPKARWYSKECAESVTAWGRHYIETTIKEAEKFGFKVLYADTDGFFATIPNEKPETIKSKAKKFLKHINEKLPGMLELEYEGFYLRGFFVTKKKYALIDEDGHITTRGLEVVRRDWSEIAKETQAKVLEVILREGSIEKAAGIVKKVVEDLANYRVPVEKLIIHEQITRELKRYKATGPHVAIAKRLQARGIKVKPGTIISYVVLKGSKKISDRVILFDEYDSSRHKYDPDYYIHNQVLPAVLRILEAFGYKEKDLEYQRMKQTGLGAWLKMGKK

SEQ ID NO: 842 - protein, 773 aa, unidentified
  REGION 1..773: note = Description of Unknown: Synthetic polypeptide
MILDTDYITENGKPVIRIFKKEKGEFKIEYDRNFEPYIYALLEDDESIEDIKKITGERHGKKVRIIRVEKVKKKFLGEPIEVWKLVFEHPQDVPAIRDAIRSHPAVREIFEYDIPFAKRYLIDKGLVPMEGGEELKLLAFNIATFYHEGDEFAEGEILMISYADESGAKVITWKKIDLPYVEVVSTEREAIKRFLQVLREKDPDVLLTYNGDNFDFAYIKKRCEKLGLKFTIGRDGSEPKIQRMGDRFAVEVKGRIHLDLAPVVRHTIRLPTYTLEAVYEAVFGKKKEKVYAEEIAEAWKSEEGLKRVAQYSMEDARATYELGREFFPLEVELAKLIGQSVWDVSRSSTGNLVEWYLLRVAYERNELAPNKPGGEEYQRRMRSSYIGGYVKEPEKGLWESIAYLDFRSSAGSIIVTHNVSPDTLEKECKNYDVAPIVGYRFCKDFKGFIPSILEDLIETRQKVKRKMKATIDPIEKKMLDYRQRALKILANSYYGYQGYPKARWYSKECAESVTAWGRHYIETTIKEAEKFGFKVLYADTDGFFATIPNEKPETIKSKAKKFLKHINEKLPGMLELEYEGFYLRGFFVTKKKYALIDEDGHITTRGLEVVRRDWSEIAKETQAKVLEVILREGSIEKAAGIVKKVVEDLANYRVPVEKLIIHETITRELKRYKATGPHVAIAKRLQARGIKVKPGTIISYVVLKGSKKISDRVILFDEYDSSRHKYDPDYYIHNQVLPAVLRILEAFGYKEKDLEYQRMKQTGLGAWLKMGKK

SEQ ID NO: 843 - protein, 773 aa, unidentified; identical to SEQ ID NO: 49
  REGION 1..773: note = Description of Unknown: Synthetic polypeptide

SEQ ID NO: 844 - protein, 773 aa, unidentified
  REGION 1..773: note = Description of Unknown: Synthetic polypeptide
MILDTDYITENGKPVIRIFKKEKGEFKIEYDRNFEPYIYALLEDDESIEDIKKITGERHGKKVRIIRVEKVKKKFLGEPIEVWKLVFEHPQDVPAIRDAIRSHPAVREIFEYDIPFAKRYLIDKGLVPMEGGEELKLLAFNIATFYHEGDEFAEGEILMISYADESGAKVITWKKIDLPYVEVVSTEREAIKRFLQVLREKDPDVLLTYNGDNFDFAYIKKRCEKLGLKFTIGRDGSEPKIQRMGDRFAVEVKGRIHLDLAPVVRHTIRLPTYTLEAVYEAVFGKKKEKVYAEEIAEAWKSEEGLKRVAQYSMEDARATYELGREFFPLEVELAKLIGQSVWDVSRSSTGNLVEWYLLRVAYERNELAPNKPGGEEYQRRMRSSYIGGYVKEPEKGLWESIAYLDFRSSAGSIIVTHNVSPDTLEKECKNYDVAPIVGYRFCKDFKGFIPSILEDLIETRQKVKRKMKATIDPIEKKMLDYRQRALKILANSYYGYQGYPKARWYSKECAESVTAWGRHYIETTIKEAEKFGFKVLYADTDGFFATIPNEKPETIKSKAKKFLKHINEKLPGMLELEYEGFYLRGFFVTKKKYALIDEDGHITTRGLEVVRRDWSEIAKETQAKVLEVILREGSIEKAAGIVKKVVEDLANYRVPVEKLIIHEQITRELKRYKATGPHVAIAKRLQARGIKVKPGTIISYVVLKGSKKISDRVILFDEYDSSRHKYDPDYYIHNQVLPAVLRILEAFGYKEKDLEYQRDKQTGLGARLKMGKK

SEQ ID NO: 845 - protein, 773 aa, unidentified
  REGION 1..773: note = Description of Unknown: Synthetic polypeptide
MILDTDYITENGKPVIRIFKKEKGEFKIEYDRNFEPYIYALLEDDESIEDIKKITGERHGKKVRIIRVEKVKKKFLGEPIEVWKLVFEHPQDVPAIRDAIRSHPAVREIFEYDIPFAKRYLIDKGLVPMEGGEELKLLAFKIATFYHEGDEFAEGEILMISYADESGAKVITWKKIDLPYVEVVSTEREAIKRFLQVLREKDPDVLLTYNGDNFDFAYIKKRCEKLGLKFTIGRDGSEPKIQRMGDRFAVEVKGRIHLDLAPVVRHTIRLPTYTLEAVYEAVFGKKKEKVYAEEIAEAWKSEEGLKRVAQYSMEDARATYELGREFFPLEVELAKLIGQSVWDVSRSSTGNLVEWYLLRVAYERNELAPNKPGGEEYQRRMRSSYIGGYVKEPEKGLWESIAYLDFRSSAGSIIVTHNVSPDTLEKECKNYDVAPIVGYRFCKDFKGFIPSILEDLIETRQKVKRKMKATIDPIEKKMLDYRQRALKILANSYYGYQGYPKARWYSKECAESVTAWGRHYIETTIKEAEKFGFKVLYADTDGFFATIPNEKPETIKSKAKKFLKHINEKLPGMLELEYEGFYLRGFFVTKKKYALIDEDGHITTRGLEVVRRDWSEIAKETQAKVLEVILREGSIEKAAGIVKKVVEDLANYRVPVEKLIIHEQITRELKRYKATGLHVAIAKRLQARGIKVKPGTIISYVVLKGSKKISDRVILFDEYDSSRHKYDPDYYIHNQVLPAVLRILEAFGYKEKDLEYQRMKQTGLGAWLKMGKK

SEQ ID NO: 846 - protein, 757 aa, unidentified; identical to SEQ ID NO: 805
  REGION 1..757: note = Description of Unknown: Synthetic polypeptide

SEQ ID NO: 847 - protein, 773 aa, unidentified
  REGION 1..773: note = Description of Unknown: Synthetic polypeptide
MILDTDYIAENGKPVIRIFKKEKGEFKIEYDRNFEPYIYALLEDDESIEDIKKITGERHGKKVRIIRVEKVKKKFLGEPIEVWKLVFEHPQDVPAIRDAIRSHPAVREIFEYDIPFAKRYLIDKGLVPMEGGEELKLLAFNIATFYHEGDEFAEGEILMISYADESGAKVITWKKIDLPYVEVVSTEREAIKRFLQVLREKDPDVLLTYNGDNFDFAYIKKRCEKLGLKFTIGRDGSEPKIQRMGDRFAVEVKGRIHLDLAPVVRHTIRLPTYTLEAVYEAVFGKKKEKVYAEEIAEAWKSEEGLKRVAQYSMEDARATYELGREFFPLEVELAKLIGQSVWDVSRSSTGNLVEWYLLRVAYERNELAPNKPGGEEYQRRMRSSYIGGYVKEPEKGLWESIAYLDFRSSAGSIIVTHNVSPDTLEKECKNYDVAPIVGYRFCKDFKGFIPSILEDLIETRQKVKRKMKATIDPIEKKMLDYRQRALKILANSYYGYQGYPKARWYSKECAESVTAWGRHYIETTIKEAEKFGFKVLYADTDGFFATIPNEKPETIKSKAKKFLKHINEKLPGMLELEYEGFYLRGFFVTKKKYALIDEDGHITTRGLEVVRRDWSEIAKETQAKVLEVILREGSIEKAAGIVKKVVEDLANYRVPVEKLIIHEQITRELKRYKATGPHVAIAKRLQARGIKVKPGTIISYVVLKGSKKISDRVILFDEYDSSRHKYDPDYYIHNQVLPAVLRILEAFGYKEKDLEYQRMKQTGLGAWLKMGKK

SEQ ID NO: 848 - protein, 757 aa, unidentified
  REGION 1..757: note = Description of Unknown: Synthetic polypeptide
MILDTDYITENGKPVIRIFKKEKGEFKIEYDRNFEPYIYALLEDDESIEDIKKITGERHGKKVRIIRVEKVKKKFLGEPIEVWKLVFEHPQDVPAIRDAIRSHPAVREIFEYDIPFAKRYLIDKGLVPMEGGEELKLLAFAIATFYHEGDEFAEGEILMISYADESGAKVITWKKIDLPYVEVVSTEREAIKRFLQVLREKDPDVLLTYNGDNFDFAYIKKRCEKLGLKFTIGRDGSEPKIQRMGDRFAVEVKGRIHLDLAPVVRHTIRLPTYTLEAVYEAVFGKKKEKVYAEEIAEAWKSEEGLKRVAQYSMEDARATYELGREFFPMEVELAKLIGQSVWDVSRSSTGNLVEWYLLRVAYERNELAPNKPGGEEYQRRMRSSYIGGYVKEPEKGLWESIAYLDFRSSAGSIIVTHNVSPDTLEKECKNYDVAPIVGYRFCKDFKGFIPSILEDLIETRQKVKRKMKATIDPIEKKMLDYRQRALKILANSYYGYQGYPKARWYSKECAESVTAWGRHYIETTIKEAEKFGFKVLYADTDGFFATIPNEKPETIKSKAKKFLKHINEKLPGMLELEYEGFYLRGFFVTKKKYALIDEDGHITTRGLEVVRRDWSEIAKETQAKVLEVILREGSIEKAAGIVKKVVEDLANYRVPVEKLIIHEQITRYLKDYKATGPHVAIAKRLQARGIKVKPGTIISYVVLKGSKKISDRVILFDEYDSSRHKYDPDYYIHNQVLPAVLRILEAFGYKEKDLEYQ

SEQ ID NO: 849 - protein, 773 aa, unidentified
  REGION 1..773: note = Description of Unknown: Synthetic polypeptide
MILDTDYITENGKPVIRIFKKEKGEFKIEYDRNFEPYIYALLEDDESIEDIKKITGERHGKKVRIIRVEKVKKKFLGEPIEVWKLVFEHPQDYPAIRDAIRSHPAVREIFEYDIPFAKRYLIDKGLVPMEGGEELKLLAFAIATFYHEGDEFAEGEILMISYADESGAKVITWKKIDLPYVEVVSTEREAIKRFLQVLREKDPDVLLTYNGDNFDFAYIKKRCEKLGLKFTIGRDGSEPKIQRMGDRFAVEVKGRIHLDLAPVVRHTIRLPTYTLEAVYEAVFGKKKEKVYAEEIAEAAKSEEGLARVAQYSVEDARATYELGREFFPMEVELAKLIGQSVWDVSRSSTGNLVEWYLLRVAYERNELAPNKPGGEEYQRRMRSSYIGGYVKEPEKGLWESIAYLDFRSSAGSIIVTHNVSPDTLEKECKNYDVAPIVGYRFCKDFKGFIPSILEDLIETRQKVKRKMKATIDPIEKKMLDYRQRALKILANSYYGYQGYPKARWYSKECAESVTAWGRHYIETTIKEAEKFGFKVLYADTDGFFATIPNEKPETIKSKAKKFLKHINEKLPGMLELEYEGFYLRGFFVTKKKYALIDEDGHITTRGLEVVRRDWSEIAKETQAKVLEVILREGSIEKAAGIVKKVVEDLANYRVPVEKLIIHEQITRELKRYKATGPHVAIAKRLQARGIKVKPGTIISYVVLKGSKKISDRVILFDEYDSSRHKYDPDYYIHNQVLPAVLRILEAFGYKEKDLEYQRMKQTGLGAWLKMGKK

SEQ ID NO: 850 - protein, 773 aa, unidentified
  REGION 1..773: note = Description of Unknown: Synthetic polypeptide
MILDTDYITENGKPVIRIFKKEKGEFKIEYDRNFEPYIYALLEDDESIEDIKKITGERHGKKVRIIRVEKVKKKFLGEPIEVWKLVFEHPQDVPAIRDAIRSHPAVREIFEYDIPFAKRYLIDKGLVPMEGGEELKLLAFNIATFYHEGDEFAEGEILMISYADESGAKVITWKKIDLPYVEVVSTEREAIKRFLQVLREKDPDVLLTYNGDNFDFAYIKKRCEKLGLKFTIGRDGSEPKIQRMGDRFAVEVKGRIHLDLAPVVRHTIRLPTYTLEAVYEAVFGKKKEKVYAEEIAEAWKSEEGLKRVAQYSMEDARATYELGREFFPLEVELAKLIGQSVWDVSRSSTGNLVEWYLLRVAYERNELAPNKPGGEEYQRRMRSSYIGGYVKEPEKGLWESIAYLDFRSSAGSIIVTHNVSPDTLEKECKNYDVAPIVGYRFCKDFKGFIPSILEDLIETRQKVKRKMKATIDPIEKKMLDYRQRALKILANSYYGYQGYPKARWYSKECAESVTAWGRHYIETTIKEAEKFGFKVLYADTDGFFATIPNEKPETIKSKAKKFLKHINEKLPGMLELEYEGFYLRGFFVTKKKYALIDEDGHITTRGLEVVRRDWSEIAKETQAKVLEVILREGSIEKAAGIVKKVVEDLANYRVPVEKLIIHEQITRELKRYKATGAHVAIAKRLQARGIKVKPGTIISYVVLKGSKKISDRVILFDEYDSSRHKYDPDYYIHNQVLPAVLRILEAFGYKEKDLEYQRMKQTGLGAWLKMGKK

SEQ ID NO: 851 - protein, 773 aa, unidentified
  REGION 1..773: note = Description of Unknown: Synthetic polypeptide
MILDTDYITENGKPVIRIFKKEKGEFKIEYDRNFEPYIYALLEDDESIEDIKKITGERHGKKVRIIRVEKVKKKFLGEPIEVWKLVFEHPQDYPAIRDAIRSHPAVREIFEYDIPFAKRYLIDKGLVPMEGGEELKLLAFAIATFYHEGDEFAEGEILMISYADESGAKVITWKKIDLPYVEVVSTEREAIKRFLQVLREKDPDVLLTYNGDNFDFAYIKKRCEKLGLKFTIGRDGSEPKIQRMGDRFAVEVKGRIHLDLAPVVRHTIRLPTYTLEAVYEAVFGKKKEKVYAEEIAEAWKSEEGLKRVAQYSMEDARATYELGREFFPMEVELAKLIGQSVWDVSRSSTGNLVEWYLLRVAYERNELAPNKPGGEEYQRRMRSSYIGGYVKEPEKGLWESIAYLDFRSSAGSIIVTHNVSPDTLEKECKNYDVAPIVGYRFCKDFKGFIPSILEDLIETRQKVKRKMKATIDPIEDKMLDYRQRALKILANSYYGYQGYPKARWYSKECAESVTAWGRHYIETTIKEAEKFGFKVLYADTDGFFATIPNEKPETIKSKAKKFLKHINEKLPGMLELEYEGFYLRGFFVTKKKYALIDEDGHITTRGLEVVRRDWSEIAKETQAKVLEVILREGSIEKAAGIVKKVVEDLANYRVPVEKLIIHEQITRELKRYKATGPHVAIAKRLQARGIKVKPGTIISYVVLKGSKKISDRVILFDEYDSSRHKYDPDYYIHNQVLPAVLRILEAFGYKEKDLEYQRMKQTGLGAWLKMGKK

SEQ ID NO: 852 - protein, 773 aa, unidentified
  REGION 1..773: note = Description of Unknown: Synthetic polypeptide
MILDTDYITENGKPVIRIFKKEKGEFKIEYDRNFEPYIYALLEDDESIEDIKKITGERHGKKVRIIRVEKVKKKFLGEPIEVWKLVFEHPQDYPAIRDAIRSHPAVREIFEYDIPFAKRYLIDKGLVPMEGGEELKLLAFAIATFYHEGDEFAEGEILMISYADESGAKVITWKKIDLPYVEVVSTEREAIKRFLQVLREKDPDVLLTYNGDNFDFAYIKKRCEKLGLKFTIGRDGSEPQIQRMGDRFAVEVKGRIHLDLAPVVRHTIRLPTYTLEAVYEAVFGKKKEKVYAEEIAEAWKSEEGLKRVAQYSVEDARATYELGREFFPMEVELAKLIGQSVWDVSRSSTGNLVEWYLLRVAYERNELAPNQPGGEEYQRRMRSSYIGGYVKEPEKGLWESIAYLDFRSSAGSIIVTHNVSPDTLEKECKNYDVAPIVGYRFCKDFKGFIPSILEDLIETRQKVKRKMRATIDPIEKKMLDYRQRALKILANSYYGYQGYPKARWYSKECAESVTAWGRHYIETTIKEAEKFGFKVLYADTDGFFATIPNEKPETIKSKAKKFLKHINEKLPGMLELEYEGFYLRGFFVTKKKYALIDEDGHITTRGLEVVRRDWSEIAKETQAKVLEVILREGSIEKAAGIVKKVVEDLANYRVPVEKLIIHEQITRELKRYKATGPHVAIAKRLQARGIKVKPGTIISYVVLKGSKKISDRVILFDEYDSSRHKYDPDYYIHNQVLPAVLRILEAFGYKEKDLEYQRMKQTGLGAWLKMGKK

SEQ ID NO: 853 - protein, 757 aa, unidentified
  REGION 1..757: note = Description of Unknown: Synthetic polypeptide
MILDTDYITENGKPVIRIFKKEKGEFKIEYDRNFEPYIYALLEDDESIEDIKKITGERHGKKVRIIRVEKVKKKFLGEPIEVWKLVFEHPQDVPAIRDAIRSHPAVREIFEYDIPFAKRYLIDKGLVPMEGGEELKLLAFAIATFYHEGDEFAEGEILMISYADESGAKVITWKKIDLPYVEVVSTEREAIKRFLQVLREKDPDVLLTYNGDNFDFAYIKKRCEKLGLKFTIGRDGSEPKIQRMGDRFAVEVKGRIHLDLAPVVRHTIRLPTYTLEAVYEAVFGKKKEKVYAEEIAEAWKSEEGLKRVAQYSMEDARATYELGREFFPMEVELAKLIGQSVWDVSRSSTGNLVEWYLLRVAYERNELAPNKPGGEEYQRRMRSSYIGGYVKEPEKGLWESIAYLDFRSSAGSIIVTHNVSPDTLEKECKNYDVAPIVGYRFCKDFKGFIPSILEDLIETRQKVKRKMKATIDPIEKKMLDYRQRALKILANSYYGYQGYPKARWYSKECAESVTAWGRHYIETTIKEAEKFGFKVLYADTDGFFATIPNEKPETIKSKAKKFLKHINEKLPGMLELEYEGFYLRGFFVTKKKYALIDEDGHITTRGLEVVRRYWSEIAKETQAKVLEVILREGSIEKAAGIVKKVVEDLANYRVPVEKLIIHEQITRKLKDYKATGPHVAIAKRLQARGIKVKPGTIISYVVLKGSKKISDRVILFDEYDSSRHKYDPDYYIHNQVLPAVLRILEAFGYKEKDLEYQ

SEQ ID NO: 854 - protein, 773 aa, unidentified
  REGION 1..773: note = Description of Unknown: Synthetic polypeptide
MILDTDYITENGKPVIRIFKKEKGEFKIEYDRNFEPYIYALLEDDESIEDIKKITGERHGKKVRIIRVEKVKKKFLGEPIEVWKLVFEHPQDYPAIRDAIRSHPAVREIFEYDIPFAKRYLIDKGLVPMEGGEELKLLAFAIATFYHEGDEFAEGEILMISYADESGAKVITWKKIDLPYVEVVSTEREAIKRFLQVLREKDPDVLLTYNGDNFDFAYIKKRCEKLGLKFTIGRDGSEPQIQRMGDRFAVEVKGRIHLDLAPVVRHTIRLPTYTLEAVYEAVFGKKKEKVYAEEIAEAWKSEEGLKRVAQYSMEDARATYELGREFFPMEVELAKLIGQSVWDVSRSSTGNLVEWYLLRVAYERNELAPNKPGGEEYQRRMRSSYIGGYVKEPEKGLWESIAYLDFRSSAGSIIVTHNVSPDTLEKECKNYDVAPIVGYRFCKDFKGFIPSILEDLIETRQKVKRKMKATIDPIEKKMLDYRQRALKILANSYYGYQGYPKARWYSKECAESVTAWGRHYIETTIKEAEKFGFKVLYADTDGFFATIPNEKPETIKSKAKKFLKHINEKLPGMLELEYEGFYLRGFFVTKKKYALIDEDGHITTRGLEVVRRDWSEIAKETQAKVLEVILREGSIEKAAGIVKKVVEDLANYRVPVEKLIIHEQITRELKRYKATGPHVAIAKRLQARGIKVKPGTIISYVVLKGSKKISDRVILFDEYDSSRHKYDPDYYIHNQVLPAVLRILEAFGYKEKDLEYQRMKQTGLGAWLKMGKK

SEQ ID NO: 855 - protein, 757 aa, unidentified
  REGION 1..757: note = Description of Unknown: Synthetic polypeptide
MILDTDYITENGKPVIRIFKKEKGEFKIEYDRNFEPYIYALLEDDESIEDIKKITGERHGKKVRIIRVEKVKKKFLGEPIEVWKLVFEHPQDVPAIRDAIRSHPAVREIFEYDIPFAKRYLIDKGLVPMEGGEELKLLAFAIATFYHEGDEFAEGEILMISYADESGAKVITWKKIDLPYVEVVSTEREAIKRFLQVLREKDPDVLLTYNGDNFDFAYIKKRCEKLGLKFTIGRDGSEPKIQRMGDRFAVEVKGRIHLDLAPVVRHTIRLPTYTLEAVYEAVFGKKKEKVYAEEIAEAWKSEEGLKRVAQYSMEDARATYELGREFFPMEVELAKLIGQSVWDVSRSSTGNLVEWYLLRVAYERNELAPNKPGGEEYQRRMRSSYIGGYVKEPEKGLWESIAYLDFRSSAGSIIVTHNVSPDTLEKECKNYDVAPIVGYRFCKDFKGFIPSILEDLIETRQKVKRKMKATIDPIEKKMLDYRQRALKILANSYYGYQGYPKARWYSKECAESVTAWGRHYIETTIKEAEKFGFKVLYADTDGFFATIPNEKPETIKSKAKKFLKHINEKLPGMLELEYEGFYLRGFFVTKKKYALIDEDGHITTRGLEVVRRDWSEIAKETQAKVLEVILREGSIEKAAGIVKKVVEDLANYRVPVEKLIIHEVITRELKRYKATGPHVAIAKRLQARGIKVKPGTIISYVVLKGSKKISDRVILFDEYDSSRHKYDPDYYIHNQVLPAVLRILEAFGYKEKDLEYQ

SEQ ID NO: 856 - protein, 773 aa, unidentified
  REGION 1..773: note = Description of Unknown: Synthetic polypeptide
MILDTDYITENGKPVIRIFKKEKGEFKIEYDRNFEPYIYALLEDDESIEDIKKITGERHGKKVRIIRVEKVKKKFLGEPIEVWKLVFEHPQDVPAIRDAIRSHPAVREIFEYDIPFAKRYLIDKGLVPMEGGEELKLLAFNIATFYHEGDEFAEGEILMISYADESGAKVITWKKIDLPYVEVVSTEREAIKRFLQVLREKDPDVLLTYNGDNFDFAYIKKRCEKLGLKFTIGRDGSEPKIQRMGDRFAVEVKGRIHLDLAPVVRHTIRLPTYTLEAVYEAVFGKKKEKVYAEEIAEAWKSEEGLKRVAQYSMEDARATYELGREFFPLEVELAKLIGQSVWDVSRSSTGNLVEWYLLRVAYERNELAPNKPGGEEYQRRMRSSYIGGYVKEPEKGLWESIAYLDFRSSAGSIIVTHNVSPDTLEKECKNYDVAPIVGYRFCKDFKGFIPSILEDLIETRQKVKRKMKATIDPIEKKMLDYRQRALKILANSYYGYQGYPKARWYSKECAESVTAWGRHYIETTIKEAEKFGFKVLYADTDGFFATIPNEKPETIKSKAKKFLKHINEKLPGMLELEYEGFYLRGFFVTKKKYALIDEDGHITTRGLEVVRRDWSEIAKETQAKVLEVILREGSIEKAAGIVKKVVEDLANYRVPVEKLIIHEQITRELKRYKATGPRVAIAKRLQARGIKVKPGTIISYVVLKGSKKISDRVILFDEYDSSRHKYDPDYYIHNQVLPAVLRILEAFGYKEKDLEYQRMKQTGLGAWLKMGKK

SEQ ID NO: 857 - protein, 773 aa, unidentified
  REGION 1..773: note = Description of Unknown: Synthetic polypeptide
MILDTDYITENGKPVIRIFKKEKGEFKIEYDRNFEPYIYALLEDDESIEDIKKITGERHGKKVRIIRVEKVKKKFLGEPIEVWKLVFEHPQDVPAIRDAIRSHPAVREIFEYDIPFAKRYLIDKGLVPMEGGEELKLLAFAIVTFYHEGDEFAEGEILYISYADESGAKVITWKKIDLPYVEVVSTEREAIKRFLQVLREKDPDVLLTYNGDNFDFAYIKKRCEKLGLKFTIGRDGSEPKIQRMGDRFAVEVKGRIHLDLAPVVRHTIRLPTYTLEAVYEAVFGKKKEKVYAEEIAEAWKSEEGLKRVAQYSMEDARATYELGREFFPMEVELAKLIGQSVWDVSRSSTGNLVEWYLLRVAYERNELAPNKPGGEEYQRRMRSSYIGGYVKEPEKGLWESIAYLDFRSSAGSIIVTHNVSPDTLEKECKNYDVAPIVGYRFCKDFKGFIPSILEDLIETRQKVKRKMKATIDPIEKKMLDYRQRALKILANSYYGYQGYPKARWYSKECAESVTAWGRHYIETTIKEAEKFGFKVLYADTDGFFATIPNEKPETIKSKAKKFLKHINEKLPGMLELEYEGFYLRGFFVTKKKYALIDEDGHITTRGLEVVRRDWSEIAKETQAKVLEVILREGSIEKAAGIVKKVVEDLANYRVPVEKLIIHEQITRELKDYKATGPHVAIAKRLQARGIKVKPGTIISYVVLKGSKKISDRVILFDEYDSSRHKYDPDYYIHNQVLPAVLRILEAFGYKEKDLEYQRMKQTGLGAWLKMGKK

SEQ ID NO: 858 - protein, 773 aa, unidentified
  REGION 1..773: note = Description of Unknown: Synthetic polypeptide
MILDTDYITENGKPVIRIFKKEKGEFKIEYDRNFEPYIYALLEDDESIEDIKKITGERHGKKVRIIRVEKVKKKFLGEPIEVWKLVFEHPQDYPAIRDAIRSHPAVREIFEYDIPFAKRYLIDKGLVPMEGGEELKLLAFAIATFYHEGDEFAEGEILMISYADESGAKVITWKKIDLPYVEVVSTEREAIKRFLQVLREKDPDVLLTYNGDNFDFAYIKKRLEKLGIKFTIGRDGSEPKIQRMGDRFAVEVKGRIHLDLAPVVRHTIRLPTYTLEAVYEAVFGKKKEKVYAEEIAEAWKSEEGLKRVAQYSMEDARATYELGREFFPMEVELAKLIGQSVWDVSRSSTGNLVEWYLLRVAYERNELAPNKPGGEEYQRRMRSSYIGGYVKEPEKGLWESIAYLDFRSSAGSIIVTHNVSPDTLEKECKNYDVAPIVGYRFCKDFKGFIPSILEDLIETRQKVKRKMKATIDPIEKKMLDYRQRALKILANSYYGYQGYPKARWYSKECAESVTAWGRHYIETTIKEAEKFGFKVLYADTDGFFATIPNEKPETIKSKAKKFLKHINEKLPGMLELEYEGFYLRGFFVTKKKYALIDEDGHITTRGLEVVRRDWSEIAKETQAKVLEVILREGSIEKAAGIVKKVVEDLANYRVPVEKLIIHEQITRELKRYKATGPHVAIAKRLQARGIKVKPGTIISYVVLKGSKKISDRVILFDEYDSSRHKYDPDYYIHNQVLPAVLRILEAFGYKEKDLEYQRMKQTGLGAWLKMGKK

SEQ ID NO: 859 - protein, 773 aa, unidentified
  REGION 1..773: note = Description of Unknown: Synthetic polypeptide
MILDTDYITENGKPVIRIFKKEKGEFKIEYDRNFEPYIYALLEDDESIEDIKKITGERHGKKVRIIRVEKVKKKFLGEPIEVWKLVFEHPQDYPAIRDAIRSHPAVREIFEYDIPFAKRYLIDKGLVPMEGGEELKLLAFAIATFYHEGDEFAEGEILMISYADESGAKVITWKKIDLPYVEVVSTEREAIKRFLQVLREKDPDVLLTYNGDNFDFAYIKKRCEKLGLKFTIGRDGSEPKIQRMGDRFAVEVKGRIHLDLAPVVRHTIRLPTYTLEAVYEAVFGKKKEKVYAEEIAEAWKSEEGLKRVAQYSMEDARATYELGREFFPMEVELAKLIGQSVWDVSRSSTGNLVEWYLLRVAYERNELAPNKPGGEEYQRRMRSSYIGGYVKEPEKGLWESIAYLDFRSSAGSIIVTHNVSPDTLEKECKNYDVAPIVGYRFCKDFKGFIPSILEDLIETRQKVKRKMKATIDPIEKKMLDYRQRALKILANSYYGYQGYPKARWYSKECAKSVTAWGRHYIETTIKEAEKFGFKVLYADTDGFFATIPNEKPETIKSKAKKFLKHINEKLPGMLELEYEGFYLRGFFVTKKKYALIDEDGHITTRGLEVVRRDWSEIAKETQAKVLEVILREGSIEKAAGIVKKVVEDLANYRVPVEKLIIHEQITRELKRYKATGPHVAIAKRLQARGIKVKPGTIISYVVLKGSKKISDRVILFDEYDSSRHKYDPDYYIHNQVLPAVLRILEAFGYKEKDLEYQRMKQTGLGAWLKMGKK

SEQ ID NO: 860 - protein, 773 aa, unidentified
  REGION 1..773: note = Description of Unknown: Synthetic polypeptide
MILDTDYITENGKPVIRIFKKEKGEFKIEYDRNFEPYIYALLEDDESIEDIKKITGERHGKKVRIIRVEKVKKKFLGEPIEVWKLVFEHPQDYPAIRDAIRSHPAVREIFEYDIPFAKRYLIDKGLVPMEGGEELKLLAFAIATFYHEGDEFAEGEILMISYADESGAKVITWKKIDLPYVEVVSTEREAIKRFLQVLREKDPDVLLTYNGDNFDFAYIKKRCEKLGLKFTIGRDGSEPKIQRMGDRFAVEVKGRIHLDLAPVVRHTIRLPTYTLEAVYEAVFGKKKEKVYAEEIAEAAKSEEGLKRVAQYSMEDARATYELGREFFPMEVELAKLIGQSVWDVSRSSTGNLVEWYLLRVAYERNELAPNKPGGEEYQRRMRSSYIGGYVKEPEKGLWESIAYLDFRSSAGSIIVTHNVSPDTLEKECKNYDVAPIVGYRFCKDFKGFIPSILEDLIETRQKVKRKMKATIDPIEKKMLDYRQRALKILANSYYGYQGYPKARWYSKECAESVTAWGRHYIETTIKEAEKFGFKVLYADTDGFFATIPNEKPETIKSKAKKFLKHINEKLPGMLELEYEGFYLRGFFVTKKKYALIDEDGHITTRGLEVVRRDWSEIAKETQAKVLEVILREGSIEKAAGIVKKVVEDLANYRVPVEKLIIHEQITRELKRYKATGPHVAIAKRLQARGIKVKPGTIISYVVLKGSKKISDRVILFDEYDSSRHKYDPDYYIHNQVLPAVLRILEAFGYKEKDLEYQRMKQTGLGAWLKMGKK

SEQ ID NO: 861 - protein, 773 aa, unidentified
  REGION 1..773: note = Description of Unknown: Synthetic polypeptide
MILDTDYITENGKPVIRIFKKEKGEFKIEYDRNFEPYIYALLEDDESIEDIKKITGERHGKKVRIIRVEKVKKKFLGEPIEVWKLVFEHPQDVPAIRDAIRSHPAVREIFEYDIPFAKRYLIDKGLVPMEGGEELKLLAFAIITFYHEGDEFAEGEILYISYADESGAKVITWKKIDLPYVEVVSTEREAIKRFLQVLREKDPDVLLTYNGDNFDFAYIKKRCEKLGLKFTIGRDGSEPKIQRMGDRFAVEVKGRIHLDLAPVVRHTIRLPTYTLEAVYEAVFGKKKEKVYAEEIAEAWKSEEGLKRVAQYSMEDARATYELGREFFPMEVELAKLIGQSVWDVSRSSTGNLVEWYLLRVAYERNELAPNKPGGEEYQRRMRSSYIGGYVKEPEKGLWESIAYLDFRSSAGSIIVTHNVSPDTLEKECKNYDVAPIVGYRFCKDFKGFIPSILEDLIETRQKVKRKMKATIDPIEKKMLDYRQRALKILANSYYGYQGYPKARWYSKECAESVTAWGRHYIETTIKEAEKFGFKVLYADTDGFFATIPNEKPETIKSKAKKFLKHINEKLPGMLELEYEGFYLRGFFVTKKKYALIDEDGHITTRGLEVVRRDWSEIAKETQAKVLEVILREGSIEKAAGIVKKVVEDLANYRVPVEKLIIHEQITRELKDYKATGPHVAIAKRLQARGIKVKPGTIISYVVLKGSKKISDRVILFDEYDSSRHKYDPDYYIHNQVLPAVLRILEAFGYKEKDLEYQRMKQTGLGAWLKMGKK

SEQ ID NO: 862 - protein, 773 aa, unidentified
  REGION 1..773: note = Description of Unknown: Synthetic polypeptide
MILDTDYITENGKPVIRIFKKEKGEFKIEYDRNFEPYIYALLEDDESIEDIKKITGERHGKKVRIIRVEKVKKKFLGEPIEVWKLVFEHPQDYPAIRDAIRSHPAVREIFEYDIPFAKRYLIDKGLVPMEGGEELKLLAFAIATFYHEGDEFAEGEILMISYADESGAKVITWKKIDLPYVEVVSTEREAIKRFLQVLREKDPDVLLTYNGDNFDFAYIKKRCEKLGLKFTIGRDGSEPKIQRMGDRFAVEVKGRIHLDLAPVVRHTIRLPTYTLEAVYEAVFGKKKEKVYAEEIAEAWKSEEGLKRVAQYSMEDARATYELGREFFPMEVELAKLIGQSVWDVSRSSTGNLVEWYLLRVAYERNELAPNKPGGEEYQRRMRSSYIGGYVKEPEKGLWESIAYLDFRSSAGSIIVTHNVSPDTLEKECKNYDVAPIVGYRFCKDFKGFIPSILEDLIETRQKVKRKMKATIDPIEKKMLDYRQRALKILANSYYGYRGYPKARWYSKEIAESVTAWGRHYIETTIKEAEKFGFKVLYADTDGFFATIPNEKPETIKSKAKKFLKHINEKLPGMLELEYEGFYLRGFFVTKKKYALIDEDGHITTRGLEVVRRDWSEIAKETQAKVLEVILREGSIEKAAGIVKKVVEDLANYRVPVEKLIIHEQITRELKRYKATGPHVAIAKRLQARGIKVKPGTIISYVVLKGSKKISDRVILFDEYDSSRHKYDPDYYIHNQVLPAVLRILEAFGYKEKDLEYQRMKQTGLGAWLKMGKK

SEQ ID NO: 863 - protein, 773 aa, unidentified
  REGION 1..773: note = Description of Unknown: Synthetic polypeptide
MILDTDYITENGKPVIRIFKKEKGEFKIEYDRNFEPYIYALLEDDESIEDIKKITGERHGKKVRIIRVEKVKKKFLGEPIEVWKLVFEHPVDVPAIRDAIRSHPAVREIFEYDIPFAKRYLIDKGLVPMEGGEELKLLAFNIATFYHEGDEFAEGEILMISYADESGAKVITWKKIDLPYVEVVSTEREAIKRFLQVLREKDPDVLLTYNGDNFDFAYIKKRCEKLGLKFTIGRDGSEPKIQRMGDRFAVEVKGRIHLDLAPVVRHTIRLPTYTLEAVYEAVFGKKKEKVYAEEIAEAWKSEEGLKRVAQYSMEDARATYELGREFFPLEVELAKLIGQSVWDVSRSSTGNLVEWYLLRVAYERNELAPNKPGGEEYQRRMRSSYIGGYVKEPEKGLWESIAYLDFRSSAGSIIVTHNVSPDTLEKECKNYDVAPIVGYRFCKDFKGFIPSILEDLIETRQKVKRKMKATIDPIEKKMLDYRQRALKILANSYYGYQGYPKARWYSKECAESVTAWGRHYIETTIKEAEKFGFKVLYADTDGFFATIPNEKPETIKSKAKKFLKHINEKLPGMLELEYEGFYLRGFFVTKKKYALIDEDGHITTRGLEVVRRDWSEIAKETQAKVLEVILREGSIEKAAGIVKKVVEDLANYRVPVEKLIIHEQITRELKRYKATGPHVAIAKRLQARGIKVKPGTIISYVVLKGSKKISDRVILFDEYDSSRHKYDPDYYIHNQVLPAVLRILEAFGYKEKDLEYQRMKQTGLGAWLKMGKK

SEQ ID NO: 864 - protein, 773 aa, unidentified
  REGION 1..773: note = Description of Unknown: Synthetic polypeptide
MILDTDYITENGKPVIRIFKKEKGEFKIEYDRNFEPYIYALLEDDESIEDIKKITGERHGKKVRIIRVEKVKKKFLGEPIEVWKLVFEHPQDYPAIRDAIRSHPAVREIFEYDIPFAKRYLIDKGLVPMEGGEELKLLAFAIATFYHEGDEFAEGEILMISYADESGAKVITWKKIDLPYVEVVSTEREAIKRFLQVLREKDPDVLLTYNGDNFDFAYIKKRCEKLGLKFTIGRDGSEPKIQRMGDRFAVEVKGRIHLDLYPVVRHTIRLPTYTLEAVYEAVFGKKKEKVYAEEIAEAWKSEEGLKRVAQYSMEDARATYELGREFFPMEVELAKLIGQSVWDVSRSSTGNLVEWYLLRVAYERNELAPNKPGGEEYQRRMRSSYIGGYVKEPEKGLWESIAYLDFRSSAGSIIVTHNVSPDTLEKECKNYDVAPIVGYRFCKDFKGFIPSILEDLIETRQKVKRKMKATIDPIEKKMLDYRQRALKILANSYYGYQGYPKARWYSKECAESVTAWGRHYIETTIKEAEKFGFKVLYADTDGFFATIPNEKPETIKSKAKKFLKHINEKLPGMLELEYEGFYLRGFFVTKKKYALIDEDGHITTRGLEVVRRDWSEIAKETQAKVLEVILREGSIEKAAGIVKKVVEDLANYRVPVEKLIIHEQITRELKRYKATGPHVAIAKRLQARGIKVKPGTIISYVVLKGSKKISDRVILFDEYDSSRHKYDPDYYIHNQVLPAVLRILEAFGYKEKDLEYQRMKQTGLGAWLKMGKK

SEQ ID NO: 865 - protein, 773 aa, unidentified
  REGION 1..773: note = Description of Unknown: Synthetic polypeptide
MILDTDYITENGKPVIRIFKKEKGEFKIEYDRNFEPYIYALLEDDESIEDIKKITGERHGKKVRIIRVEKVKKKFLGEPIEVWKLVFEHPQDYPAIRDAIRSHPAVREIFEYDIPFAKRYLIDKGLVPMEGGEELKLLAFAIATFYHEGDEFAEGEILMISYADESGAKVITWKKIDLPYVEVVSTEREAIKRFLQVLREKDPDVLLTYNGDNFDFAYIKKRLEKLGLKFPIGRDGSEPKIQRMGDRFAVEVKGRIHLDLAPVVRHTIRLPTYTLEAVYEAVFGKKKEKVYAEEIAEAWKSEEGLKRVAQYSMEDARATYELGREFFPMEVELAKLIGQSVWDVSRSSTGNLVEWYLLRVAYERNELAPNKPGGEEYQRRMRSSYIGGYVKEPEKGLWESIAYLDFRSSAGSIIVTHNVSPDTLEKECKNYDVAPIVGYRFCKDFKGFIPSILEDLIETRQKVKRKMKATIDPIEKKMLDYRQRALKILANSYYGYQGYPKARWYSKECAESVTAWGRHYIETTIKEAEKFGFKVLYADTDGFFATIPNEKPETIKSKAKKFLKHINEKLPGMLELEYEGFYLRGFFVTKKKYALIDEDGHITTRGLEVVRRDWSEIAKETQAKVLEVILREGSIEKAAGIVKKVVEDLANYRVPVEKLIIHEQITRELKRYKATGPHVAIAKRLQARGIKVKPGTIISYVVLKGSKKISDRVILFDEYDSSRHKYDPDYYIHNQVLPAVLRILEAFGYKEKDLEYQRMKQTGLGAWLKMGKK

SEQ ID NO: 866 - protein, 773 aa, unidentified
  REGION 1..773: note = Description of Unknown: Synthetic polypeptide
MILDTDYITENGKPVIRIFKKEKGEFKIEYDRNFEPYIYALLEDDESIEDIKKITGERHGKKVRIIRVEKVKKKFLGEPIEVWKLVFEHPQDYPAIRDAIRSHPAVREIFEYDIPFAKRYLIDKGLVPMEGGEELKLLAFAIATFYHEGDEFAEGEILMISYADESGAKVITWKKIDLPYVEVVSTEREAIKRFLQVLREKDPDVLLTYNGDNFDFAYIKKRCEKLGLKFTIGRDGSEPKIQRMGDRFAVEVKGRIHLDLAPVVRHTIRLPTYTLEAVYEAVFGKKKEKVYAEEIAEAWKSEEGLKRVAQYSMEDARATYELGREFFPMEVELAKLIGQSVWDVSRSSTGNLVEWYLLRVAYERNELAPNKPGGEEYQRRMRSSYIGGYVKEPEKGLWESIAYLDFRSSAGSIIVTHNVSPDTLEKECKNYDVAPIVGYRFCKDFKGFIPSILEDLIETRQKVKRKMKATIDPIEKKMLDYRQRALKILANSYYGYQIYPKARWYSKECAESVTAWGRHYIETTIKEAEKFGFKVLYADTDGFFATIPNEKPETIKSKAKKFLKHINEKLPGMLELEYEGFYLRGFFVTKKKYALIDEDGHITTRGLEVVRRDWSEIAKETQAKVLEVILREGSIEKAAGIVKKVVEDLANYRVPVEKLIIHEQITRELKRYKATGPHVAIAKRLQARGIKVKPGTIISYVVLKGSKKISDRVILFDEYDSSRHKYDPDYYIHNQVLPAVLRILEAFGYKEKDLEYQRMKQTGLGAWLKMGKK

SEQ ID NO: 867 - protein, 757 aa, unidentified
  REGION 1..757: note = Description of Unknown: Synthetic polypeptide
MILDTDYITENGKPVIRIFKKEKGEFKIEYDRNFEPYIYALLEDDESIEDIKKITGERHGKKVRIIRVEKVKKKFLGEPIEVWKLVFEHPQDVPAIRDAIRSHPAVREIFEYDIPFAKRYLIDKGLVPMEGGEELKLLAFAIATFYHEGDEFAEGEILMISYADESGAKVITWKKIDLPYVEVVSTEREAIKRFLQVLREKDPDVLLTYNGDNFDFAYIKKRCEKLGLKFTIGRDGSEPKIQRMGDRFAVEVKGRIHLDLAPVVRHTIRLPTYTLEAVYEAVFGKKKEKVYAEEIAEAWKSEEGLKRVAQYSMEDARATYELGREFFPLEVELAKLIGQSVWDVSRSSTGNLVEWYLLRVAYERNELAPNKPGGEEYQRRMRSSYIGGYVKEPEKGLWESIAYLDFRSSAGSIIVTHNVSPDTLEKECKNYDVAPIVGYRFCKDFKGFIPSILEDLIETRQKVKRKMKATIDPIEKKMLDYRQRALKILANSYYGYQGYPKARWYSKEDAEDVTAWGRHYIETTIKEAEKFGFKVLYADTDGFFATIPNEKPETIKSKAKKFLKHINEKLPGMLELEYEGFYLRGFFVTKKKYALIDEDGHITTRGLEVVRRDWSEIAKETQAKVLEVILREGSIEKAAGIVKKVVEDLANYRVPVEKLIIHEQITRELKRYKATGPHVAIAKRLQARGIKVKPGTIISYVVLKGSKKISDRVILFDEYDSSRHKYDPDYYIHNQVLPAVLRILEAFGYKEKDLEYQ

SEQ ID NO: 868 - protein, 773 aa, unidentified
  REGION 1..773: note = Description of Unknown: Synthetic polypeptide
MILDTDYITENGKPVIRIFKKEKGEFKIEYDRNFEPYIYALLEDDESIEDIKKITGERHGKKVRIIRVEKVKKKFLGEPIEVWKLVFEHPQDYPAIRDAIRSHPAVREIFEYDIPFAKRYLIDKGLVPMEGGEELKLLAFAIATFYHEGDEFAEGEILMISYADESGAKVITWKKIDLPYVEVVSTEREAIKRFLQVLREKDPDVLLTYNGDNFDFAYIKKRCEKLGLKFTIGRDGSEPKIQRMGDRFAVEVKGRIHLDLAPVVRHTIRLPTYTLEAVYEAVFGKKKEKVYAEEIAEAWKSEEGLKRVAQYSMEDARATYELGREFFPMEVELAKLIGQSVWDVSRSSTGNLVEWYLLRVAYERNELAPNKPGGEEYQRRMRSSYIGGYVKEPEKGLWESIAYLDFRSSAGSIIVTHNVSPDTLEKECKNYDVAPIVGYRFCKDFKGFIPSILEDLIETRQKVKRKMKATIDPIEKKMLDYRQRALKILANSYYGYQGYPKARWYSKECAESVTAWGRHYIETTIKEAEKFGFKVLYADTDGFFATIPNEKPETIKSKAKKFLKHINEKLPGMLELEYEGFYLRGFFVTKKKYALIDEDGLITTRGLEVVRRDWSEIAKETQAKVLEVILREGSIEKAAGIVKKVVEDLANYRVPVEKLIIHEQITRELKRYKATGPHVAIAKRLQARGIKVKPGTIISYVVLKGSKKISDRVILFDEYDSSRHKYDPDYYIHNQVLPAVLRILEAFGYKEKDLEYQRDKQTGLGAWLKMGKK

SEQ ID NO: 869 - protein, 773 aa, unidentified
  REGION 1..773: note = Description of Unknown: Synthetic polypeptide
MILDTDYITENGKPVIRIFKKEKGEFKIEYDRNFEPYIYALLEDDESIEDIKKITGERHGKKVRIIRVEKVKKKFLGEPIEVWKLVFEHPQDYPAIRDAIRSHPAVREIFEYDIPFAKRYLIDKGLVPMEGGEELKLLAFAIATFYHEGDEFAEGEILMISYADESGAKVITWKKIDLPYVEVVSTEREAIKRFLQVLREKDPDVLLTYNGDNFDFAYIKKRLEKLGLKLTIGRDGSEPKIQRMGDRFAVEVKGRIHLDLAPVVRHTIRLPTYTLEAVYEAVFGKKKEKVYAEEIAEAWKSEEGLKRVAQYSMEDARATYELGREFFPMEVELAKLIGQSVWDVSRSSTGNLVEWYLLRVAYERNELAPNKPGGEEYQRRMRSSYIGGYVKEPEKGLWESIAYLDFRSSAGSIIVTHNVSPDTLEKECKNYDVAPIVGYRFCKDFKGFIPSILEDLIETRQKVKRKMKATIDPIEKKMLDYRQRALKILANSYYGYQGYPKARWYSKECAESVTAWGRHYIETTIKEAEKFGFKVLYADTDGFFATIPNEKPETIKSKAKKFLKHINEKLPGMLELEYEGFYLRGFFVTKKKYALIDEDGHITTRGLEVVRRDWSEIAKETQAKVLEVILREGSIEKAAGIVKKVVEDLANYRVPVEKLIIHEQITRELKRYKATGPHVAIAKRLQARGIKVKPGTIISYVVLKGSKKISDRVILFDEYDSSRHKYDPDYYIHNQVLPAVLRILEAFGYKEKDLEYQRMKQTGLGAWLKMGKK

SEQ ID NO: 870 - protein, 757 aa, unidentified
  REGION 1..757: note = Description of Unknown: Synthetic polypeptide
MILDTDYITENGKPVIRIFKKEKGEFKIEYDRNFEPYIYALLEDDESIEDIKKITGERHGKKVRIIRVEKVKKKFLGEPIEVWKLVFEHPQDVPAIRDAIRSHPAVREIFEYDIPFAKRYLIDKGLVPMEGGEELKLLAFNIATFYHEGDEFAEGEILMISYADESGAKVITWKKIDLPYVEVVSTEREAIKRFLQVLREKDPDVLLTYNGDNFDFAYIKKRCEKLGLKFTIGRDGSEPKIQRMGDRFAVEVKGRIHLDLAPVVRHTIRLPTYTLEAVYEAVFGKKKEKVYAEEIAEAWKSEEGLKRVAQYSMEDARATYELGREFFPLEVELAKLIGQSVWDVSRSSTGNLVEWYLLRVAYERNELAPNKPGGEEYQRRMRSSYIGGYVKEPEKGLWESIAYLDFRSSAGSIIVTHNVSPDTLEKECKNYDVAPIVGYRFCKDFKGFIPSILEDLIETRQKVKRKMKATIDPIEKKMLDYRQRALKILANSYYGYQGYPKARWYSKECAESVTAWGRHYIETTIKEAEKFGFKVLYADTDGFFATIPNEKPETIKSKAKKFLKHINEKLPGMLELEYEGFYLRGFFVTKKKYALIDEDGHITTRGLEVVRRDWSEIAKETQAKVLEVILREGSIEKAAGIVKKVVEDLANYRVPVEKLIIHEFITRELKRYKATGPHVAIAKRLQARGIKVKPGTIISYVVLKGSKKISDRVILFDEYDSSRHKYDPDYYIHNQVLPAVLRILEAFGYKEKDLEYQ

SEQ ID NO: 871 - protein, 773 aa, unidentified
  REGION 1..773: note = Description of Unknown: Synthetic polypeptide
MILDTDYITENGKPVIRIFKKEKGEFKIEYDRNFEPYIYALLEDDESIEDIKKITGERHGKKVRIIRVEKVKKKFLGEPIEVWKLVFEHPQDYPAIRDAIRSHPAVREIFEYDIPFAKRYLIDKGLVPMEGGEELKLLAFAIATFYHEGDEFAEGEILMISYADESGAKVITWKKIDLPYVEVVSTEREAIKRFLQVLREKDPDVLLTYNGDNFDFAYIKKRCEKLGLKFTIGRDGSEPNIQRMGDRFAVEVKGRIHLDLAPVVRHTIRLPTYTLEAVYEAVFGKKKEKVYAEEIAEAWKSEEGLKRVAQYSMEDARATYELGREFFPMEVELAKLIGQSVWDVSRSSTGNLVEWYLLRVAYERNELAPNKPGGEEYQRRMRSSYIGGYVKEPEKGLWESIAYLDFRSSAGSIIVTHNVSPDTLEKECKNYDVAPIVGYRFCKDFKGFIPSILEDLIETRQKVKRKMKATIDPIEKKMLDYRQRALKILANSYYGYQGYPKARWYSKECAESVTAWGRHYIETTIKEAEKFGFKVLYADTDGFFATIPNEKPETIKSKAKKFLKHINEKLPGMLELEYEGFYLRGFFVTKKKYALIDEDGHITTRGLEVVRRDWSEIAKETQAKVLEVILREGSIEKAAGIVKKVVEDLANYRVPVEKLIIHEQITRELKRYKATGPHVAIAKRLQARGIKVKPGTIISYVVLKGSKKISDRVILFDEYDSSRHKYDPDYYIHNQVLPAVLRILEAFGYKEKDLEYQRMKQTGLGAWLKMGKK

SEQ ID NO: 872 - protein, 773 aa, unidentified
  REGION 1..773: note = Description of Unknown: Synthetic polypeptide
MILDTDYITENGKPVIRIFKKEKGEFKIEYDRNFEPYIYALLEDDESIEDIKKITGERHGKKVRIIRVEKVKKKFLGEPIEVWKLVFEHPQDYPAIRDAIRSHPAVREIFEYDIPFAKRYLIDKGLVPMEGGEELKLLAFAIATFYHEGDEFAEGEILMISYADESGAKVITWKKIDLPYVEVVSTEREAIKRFLQVLREKDPDVLLTYNGDNFDFAYIKKRCEKLGLKFTIGRDGSEPKIQRMGDRFAVEVKGRIHLDLAPVVRHTIRLPTYTLEAVYEAVFGKKKEKVYAEEIAEAWKSEEGLKRVAQYSMEDARATYELGREFFPMEVELAKLIGQSVWDVSRSSTGNLVEWYLLRVAYERNELAPNKPGGEEYQRRMRSSYIGGYVKEPEKGLWESIAYLDFRSSAGSIIVTHNISPDTLEKECKNYDVAPIVGYRFCKDFKGFIPSILEDLIETRQKVKRKMKATIDPIEKKMLDYRQRALKILANSYYGYYGYPKARWYLKEAAESVTAWGRHYIETTIKEAEKFGFKVLYADTDGFFATIPNEKPETIKSKAKKFLKHINEKLPGMLELEYEGFYLRGFFVTKKKYALIDEDGHITTRGLEVVRRDWSEIAKETQAKVLEVILREGSIEKAAGIVKKVVEDLANYRVPVEKLIIHEQITRELKRYKATGPHVAIAKRLQARGIKVKPGTIISYVVLKGSKKISDRVILFDEYDSSRHKYDPDYYIHNQVLPAVLRILEAFGYKEKDLEYQRMKQTGLGAWLKMGKK

SEQ ID NO: 873 - protein, 773 aa, unidentified
  REGION 1..773: note = Description of Unknown: Synthetic polypeptide
MILDTDYITENGKPVIRIFKKEKGEFKIEYDRNFEPYIYALLEDDESIEDIKKITGERHGKKVRIIRVEKVKKKFLGEPIEVWKLVFEHPQDYPAIRDAIRSHPAVREIFEYDIPFAKRYLIDKGLVPMEGGEELKLLAFAIATFYHEGDEFAEGEILMISYADESGAKVITWKKIDLPYVEVVSTEREAIKRFLQVLREKDPDVLLTYNGDNFDFAYIKKRCEKLGLKFTIGRDGSEPKIQRMGDRFAVEVKGRIHLDLAPVVRHTIRLPTYTLEAVYEAVFGKKKEKVYAEEIAEAWKSEEGLKRVAQYSMEDARATYELGREFFPMEVELAKLIGQSVWDVSRSSTGNLVEWYLLRVAYERNELAPNKPGGEEYQRRMRSSYIGGYVKEPEKGLWESIAYLDFRSSAGSIIVTHNVSPDTLEKECKNYDVAPIVGYRFCKDFKGFIPSILEDLIETRQKVKRKMKATIDPIEKKMLDYRQRALKILANSYYGYQGYPKARWYSKECAESVTAWGRHYIETTIKEAEKFGFKVLYADTDGFFATIPNEKPETIKSKAKKFLKHINEKLPGMLELEYEGFYLRGFFVTKKKYALIDEDGHITTRGLEVVRRDWSEIAKETQAKVLEVILREGSIEKAAGIVKKVVEDLANYRVPVEKLIIHEQITRELKRYKATYPHVAIAKRLQARGIKVKPGTIISYVVLKGSKKISDRVILFDEYDSSRHKYDPDYYIHNQVLPAVLRILEAFGYKEKDLEYQRMKQTGLGAWLKMGKK

SEQ ID NO: 874 - protein, 757 aa, unidentified
  REGION 1..757: note = Description of Unknown: Synthetic polypeptide
MILDTDYITENGKPVIRIFKKEKGEFKIEYDRNFEPYIYALLEDDESIEDIKKITGERHGKKVRIIRVEKVKKKFLGEPIEVWKLVFEHPQDVPAIRDAIRSHPAVREIFEYDIPFAKRYLIDKGLVPMEGGEELKLLAFAIATFYHEGDEFAEGEILMISYADESGAKVITWKKIDLPYVEVVSTEREAIKRFLQVLREKDPDVLLTYNGDNFDFAYIKKRCEKLGLKFTIGRDGSEPKIQRMGDRFAVEVKGRIHLDLAPVVRHTIRLPTYTLEAVYEAVFGKKKEKVYAEEIAEAWKSEEGLKRVAQYSMEDARATYELGREFFPLEVELAKLIGQSVWDVSRSSTGNLVEWYLLRVAYERNELAPNKPGGEEYQRRMRSSYIGGYVKEPEKGLWESIAYLDFRSSAGSIIVTHNVSPDTLEKECKNYDVAPIVGYRFCKDFKGFIPSILEDLIETRQKVKRKMKATIDPIEKKMLDYRQRALKILANSYYGYQGYPKARWYSKECAESVTAWGRHYIETTIKEAEKFGFKVLYADTDGFFATIPNEKPETIKSKAKKFLKHINEKLPGMLELEYEGFYLRGFFVTKKKYALIDEDGHITTRGLEVVRRDWSEIAKETQAKVLEVILREGSIEKAAGIVKKVVEDLANYRVPVEKLIIHEQITRKLKRYKATGPHVAIAKRLQARGIKVKPGTIISYVVLKGSKKISDRVILFDEYDSSRHKYDPDYYIHNQVLPAVLRILEAFGYKEKDLEYQ

SEQ ID NO: 875 - protein, 773 aa, unidentified
  REGION 1..773: note = Description of Unknown: Synthetic polypeptide
MILDTDYIEENGKPVIRIFKKEKGEFKIEYDRNFEPYIYALLEDDESIEDIKKITGERHGKKVRIIRVEKVKKKFLGEPIEVWKLVFEHPQDVPAIRDAIRSHPAVREIFEYDIPFAKRYLIDKGLVPMEGGEELKLLAFNIATFYHEGDEFAEGEILMISYADESGAKVITWKKIDLPYVEVVSTEREAIKRFLQVLREKDPDVLLTYNGDNFDFAYIKKRCEKLGLKFTIGRDGSEPKIQRMGDRFAVEVKGRIHLDLAPVVRHTIRLPTYTLEAVYEAVFGKKKEKVYAEEIAEAWKSEEGLKRVAQYSMEDARATYELGREFFPLEVELAKLIGQSVWDVSRSSTGNLVEWYLLRVAYERNELAPNKPGGEEYQRRMRSSYIGGYVKEPEKGLWESIAYLDFRSSAGSIIVTHNVSPDTLEKECKNYDVAPIVGYRFCKDFKGFIPSILEDLIETRQKVKRKMKATIDPIEKKMLDYRQRALKILANSYYGYQGYPKARWYSKECAESVTAWGRHYIETTIKEAEKFGFKVLYADTDGFFATIPNEKPETIKSKAKKFLKHINEKLPGMLELEYEGFYLRGFFVTKKKYALIDEDGHITTRGLEVVRRDWSEIAKETQAKVLEVILREGSIEKAAGIVKKVVEDLANYRVPVEKLIIHEQITRELKRYKATGPHVAIAKRLQARGIKVKPGTIISYVVLKGSKKISDRVILFDEYDSSRHKYDPDYYIHNQVLPAVLRILEAFGYKEKDLEYQRMKQTGLGAWLKMGKK

SEQ ID NO: 876 - protein, 773 aa, unidentified
  REGION 1..773: note = Description of Unknown: Synthetic polypeptide
MILDTDYITENGKPVIRIFKKEKGEFKIEYDRNFEPYIYALLEDDESIEDIKKITGERHGKKVRIIRVEKVKKKFLGEPIEVWKLVFEHPQDVPAIRDAIRSHPAVREIFEYDIPFAKRYLIDKGLVPMEGGEELKLLAFAIATFYHEGDEFAEGEILMISYADESGAKVITWKKIDLPYVEVVSTEREAIKRFLQVLREKDPDVLLTYNGDNFDFAYIKKRCEKLGLKFTIGRDGSEPKIQRMGDRFAVEVKGRIHLDLAPVVRHTIRLPTYTLEAVYEAVFGKKKEKVYAEEIAEAWKSEEGLKRVAQYSMEDARATYELGREFFPMEVELAKLIGQSVWDVSRSSTGNLVEWYLLRVAYERNELAPNKPGGEEYQRRMRSSYIGGYVKEPEKGLWESIAYLDFRSSAGSIIVTHNVSPDTLEKECKNYDVAPIVGYRFCKDFKGFIPSILEDLIETRQKVKRKMKATIDPIEKKMLDYRQRALKILANSYYGYQGYPKARWYSKECAESVTAWGRHYIETTIKEAEKFGFKVLYADTDGFFATIPNEKPETIKSKAKKFLKHINEKLPGMLELEYEGFYLRGFFVTKKKYALIDEDGHITTRGLEVVRRDWSEIAKETQAKVLEVILREGSIEKAAGIVKKVVEDLANYRVPVEKLIIHEKITRELKRYKATGPHVAIAKRLQARGIKVKPGTIISYVVLKGSKKISDRVILFDEYDSSRHKYDPDYYIHNQVLPAVLRILEAFGYKEKDLEYQRMKQTGLGAWLKMGKK

SEQ ID NO: 877 - protein, 757 aa, unidentified
  REGION 1..757: note = Description of Unknown: Synthetic polypeptide
MILDTDYITENGKPVIRIFKKEKGEFKIEYDRNFEPYIYALLEDDESIEDIKKITGERHGKKVRIIRVEKVKKKFLGEPIEVWKLVFEHPQDVPAIRDAIRSHPAVREIFEYDIPFAKRYLIDKGLVPMEGGEELKLLAFAIATFYHEGDEFAEGEILMISYADESGAKVITWKKIDLPYVEVVSTEREAIKRFLQVLREKDPDVLLTYNGDNFDFAYIKKRCEKLGLKFTIGRDGSEPKIQRMGDRFAVEVKGRIHLDLAPVVRHTIRLPTYTLEAVYEAVFGKKKEKVYAEEIAEAWKSEEGLKRVAQYSMEDARATYELGREFFPMEVELAKLIGQSVWDVSRSSTGNLVEWYLLRVAYERNELAPNKPGGEEYQRRMRSSYIGGYVKEPEKGLWESIAYLDFRSSAGSIIVTHNVSPDTLEKECKNYDVAPIVGYRFCKDFKGFIPSILEDLIETRQKVKRKMKATIDPIEKKMLDYRQRALKILANSYYGYQGYPKARWYSKECAESVTAWGRHYIETTIKEAEKFGFKVLYADTDGFFATIPNEKPETIKSKAKKFLKHINEKLPGMLELEYEGFYLRGFFVTKKKYALIDEDGHITTRGLEVVRRDWSEIAKETQAKVLEVILREGSIEKAAGIVKKVVEDLANYRVPVEKLIIHEQITRKLKDYKATGPHVAIAKRLQARGIKVDPGTIISYVVLKGSKKISDRVILFDEYDSSRHKYDPDYYIHNQVLPAVLRILEAFGYKEKDLEYQ

SEQ ID NO: 878 - protein, 773 aa, unidentified
  REGION 1..773: note = Description of Unknown: Synthetic polypeptide
YILDTDYITENGKPVIRIFKKEKGEFKIEYDRNFEPYIYALLEDDESIEDIKKITGERHGKKVRIIRVEKVKKKFLGEPIEVWKLVFEHPQDYPAIRDAIRSHPAVREIFEYDIPFAKRYLIDKGLVPLEGGEELKLLAFAIATFYHEGDEFAEGEILMISYADESGAKVITWKKIDLPYVEVVSTEREAIKRFLQVLREKDPDVLLTYNGDNFDFAYIKKRCEKLGLKFTIGRDGSEPKIQRMGDRFAVEVKGRIHLDLAPVVRHTIRLPTYTLEAVYEAVFGKKKEKVYAEEIAEAWKSEEGLKRVAQYSMEDARATYELGREFFPMEVELAKLIGQSVWDVSRSSTGNLVEWYLLRVAYERNELAPNKPGGEEYQRRMRSSYIGGYVKEPEKGLWESIAYLDFRSSAGSIIVTHNVSPDTLEKECKNYDVAPIVGYRFCKDFKGFIPSILEDLIETRQKVKRKMKATIDPIEKKMLDYRQRALKILANSYYGYQGYPKARWYSKECAESVTAWGRHYIETTIKEAEKFGFKVLYADTDGFFATIPNEKPETIKSKAKKFLKHINEKLPGMLELEYEGFYLRGFFVTKKKYALIDEDGHITTRGLEVVRRDWSEIAKETQAKVLEVILREGSIEKAAGIVKKVVEDLANYRVPVEKLIIHEQITRELKRYKATGPHVAIAKRLQARGIKVKPGTIISYVVLKGSKKISDRVILFDEYDSSRHKYDPDYYIHNQVLPAVLRILEAFGYKEKDLEYQRMKQTGLGAWLKMGKK

SEQ ID NO: 879 - protein, 757 aa, unidentified
  REGION 1..757: note = Description of Unknown: Synthetic polypeptide
MILDTDYITENGKPVIRIFKKEKGEFKIEYDRNFEPYIYALLEDDESIEDIKKITGERHGKKVRIIRVEKVKKKFLGEPIEVWKLVFEHPQDVPAIRDAIRSHPAVREIFEYDIPFAKRYLIDKGLVPMEGGEELKLLAFAIATFYHEGDEFAEGEILMISYADESGAKVITWKKIDLPYVEVVSTEREAIKRFLQVLREKDPDVLLTYNGDNFDFAYIKKRCEKLGLKFTIGRDGSEPKIQRMGDRFAVEVKGRIHLDLAPVVRHTIRLPTYTLEAVYEAVFGKKKEKVYAEEIAEAWKSEEGLKRVAQYSMEDARATYELGREFFPMEVELAKLIGQSVWDVSRSSTGNLVEWYLLRVAYERNELAPNKPGGEEYQRRMRSSYIGGYVKEPEKGLWESIAYLDFRSSAGSIIVTHNVSPDTLEKECKNYDVAPIVGYRFCKDFKGFIPSILEDLIETRQKVKRKMKATIDPIEKKMLDYRQRALKILANSYYGYQGYPKARWYSKECAESVTAWGRHYIETTIKEAEKFGFKVLYADTDGFFATIPNEKPETIKSKAKKFLKHINEKLPGMLELEYEGFYLRGFFVTKKKYALIDEDGHITTRGLEVVRRDWSEIAKETQAKVLEVILREGSIEKAAGIVKKVVEDLANYRVPVEKLIIHEQITRKLKDYKATGPHVAIAKRLQARGIKVTPGTIISYVVLKGSKKISDRVILFDEYDSSRHKYDPDYYIHNQVLPAVLRILEAFGYKEKDLEYQ

SEQ ID NO: 880 - protein, 773 aa, unidentified
  REGION 1..773: note = Description of Unknown: Synthetic polypeptide
MILDTDYITENGKPVIRIFKKEKGEFKIEYDRNFEPYIYALLEDDESIEDIKKITGERHGKKVRIIRVEKVKKKFLGEPIEVWKLVFEHPQDYPAIRDAIRSHPAVREIFEYDIPFAKRYLIDKGLVPMEGGEELKLLAFAIATFYHEGDEFAEGEILMISYADESGAKVITWKKIDLPYVEVVSTEREAIKRFLQVLREKDPDVLLTYNGDNFDFAYIKKRCEKLGLKFTIGRDGSEPKIQRMGDRFAVEVKGRIHLDLAPVVRHTIRLPTYTLEAVYEAVFGKKKEKVYAEEIAEAWKSEEGLKRVAQYSMEDARATYELGREFFPMEVELAKLIGQSVWDVSRSSTGNLVEWYLLRVAYERNELAPNKPGGEEYQRRMRSSYIGGYVKEPEKGLWESIAYLDFRSSAGSIIVTHNVSPDTLEKECRNYDVAPIVGYRFCKDFKGFIPSILEDLIETRQKVKRKMKATIDPIEKKMLDYRQRALKILANSYYGYQGYPKARWYSKECAESVTAWGRHYIETTIKEAEKFGFKVLYADTDGFFATIPNEKPETIKSKAKKFLKHINEKLPGMLELEYEGFYLRGFFVTKKKYALIDEDGHITTRGLEVVRRDWSEIAKETQAKVLEVILREGSIEKAAGIVKKVVEDLANYRVPVEKLIIHEQITRELKRYKATGPHVAIAKRLQARGIKVKPGTIISYVVLKGSKKISDRVILFDEYDSSRHKYDPDYYIHNQVLPAVLRILEAFGYKEKDLEYQRMKQTGLGAWLKMGKK

SEQ ID NO: 881 - protein, 773 aa, unidentified
  REGION 1..773: note = Description of Unknown: Synthetic polypeptide
MILDTDYITENGKPVIRIFKKEKGEFKIEYDRNFEPYIYALLEDDESIEDIKKITGERHGKKVRIIRVEKVKKKFLGEPIEVWKLVFEHPQDVPAIRDAIRSHPAVREIFEYDIPFAKRYLIDKGLVPMEGGEELKLLAFNIATFYHEGDEFAEGEILMISYADESGAKVITWKKIDLPYVEVVSTEREAIKRFLQVLREKDPDVLLTYNGDNFDFAYIKKRCEKLGLKFTIGRDGSEPKIQRMGDRFAVEVKGRIHLDLAPVVRHTIRLPTYTLEAVYEAVFGKKKEKVYAEEIAEAWKSEEGLKRVAQYSMEDARATYELGREFFPLEVELAKLIGQSVWDVSRSSTGNLVEWYLLRVAYERNELAPNKPGGEEYQRRMRSSYIGGYVKEPEKGLWESIAYLDFRSSAGSIIVTHNVSPDTLEKECNNYDVAPIVGYRFCKDFKGFIPSILEDLIETRQKVKRKMKATIDPIEKKMLDYRQRALKILANSYYGYQGYPKARWYSKECAESVTAWGRHYIETTIKEAEKFGFKVLYADTDGFFATIPNEKPETIKSKAKKFLKHINEKLPGMLELEYEGFYLRGFFVTKKKYALIDEDGHITTRGLEVVRRDWSEIAKETQAKVLEVILREGSIEKAAGIVKKVVEDLANYRVPVEKLIIHEQITRELKRYKATGPHVAIAKRLQARGIKVKPGTIISYVVLKGSKKISDRVILFDEYDSSRHKYDPDYYIHNQVLPAVLRILEAFGYKEKDLEYQRMKQTGLGAWLKMGKK

SEQ ID NO: 882 - protein, 773 aa, unidentified
  REGION 1..773: note = Description of Unknown: Synthetic polypeptide
MILDTDYITENGKPVIRIFKKEKGEFKIEYDRNFEPYIYALLEDDESIEDIKKITGERHGKKVRIIRVEKVKKKFLGEPIEVWKLVFEHPQDVPAIRDAIRSHPAVREIFEYDIPFAKRYLIDKGLVPMEGGEELKLLAFNIATFYHEGDEFAEGEILMISYADESGAKVITWKKIDLPYVEVVSTEREAIKRFLQVLREKDPDVLLTYNGDNFDFAYIKKRCEKLGLKFTIGRDGSEPKIQRMGDRFAVEVKGRIHLDLAPVVRITIRLPTYTLEAVYEAVFGKKKEKVYAEEIAEAWKSEEGLKRVAQYSMEDARATYELGREFFPLEVELAKLIGQSVWDVSRSSTGNLVEWYLLRVAYERNELAPNKPGGEEYQRRMRSSYIGGYVKEPEKGLWESIAYLDFRSSAGSIIVTHNVSPDTLEKECKNYDVAPIVGYRFCKDFKGFIPSILEDLIETRQKVKRKMKATIDPIEKKMLDYRQRALKILANSYYGYQGYPKARWYSKECAESVTAWGRHYIETTIKEAEKFGFKVLYADTDGFFATIPNEKPETIKSKAKKFLKHINEKLPGMLELEYEGFYLRGFFVTKKKYALIDEDGHITTRGLEVVRRDWSEIAKETQAKVLEVILREGSIEKAAGIVKKVVEDLANYRVPVEKLIIHEQITRELKRYKATGPHVAIAKRLQARGIKVKPGTIISYVVLKGSKKISDRVILFDEYDSSRHKYDPDYYIHNQVLPAVLRILEAFGYKEKDLEYQRMKQTGLGAWLKMGKK

SEQ ID NO: 883 - protein, 757 aa, unidentified
  REGION 1..757: note = Description of Unknown: Synthetic polypeptide
MILDTDYITENGKPVIRIFKKEKGEFKIEYDRNFEPYIYALLEDDESIEDIKKITGERHGKKVRIIRVEKVKKKFLGEPIEVWKLVFEHPQDVPAIRDAIRSHPAVREIFEYDIPFAKRYLIDKGLVPMEGGEELKLLAFAIATFYHEGDEFAEGEILMISYADESGAKVITWKKIDLPYVEVVSTEREAIKRFLQVLREKDPDVLLTYNGDNFDFAYIKKRCEKLGLKFTIGRDGSEPKIQRMGDRFAVEVKGRIHLDLAPVVRHTIRLPTYTLEAVYEAVFGKKKEKVYAEEIAEAWKSEEGLKRVAQYSMEDARATYELGREFFPMEVELAKLIGQSVWDVSRSSTGNLVEWYLLRVAYERNELAPNKPGGEEYQRRMRSSYIGGYVKEPEKGLWESIAYLDFRSSAGSIIVTHNVSPDTLEKECKNYDVAPIVGYRFCKDFKGFIPSILEDLIETRQKVKRKMKATIDPIEKKMLDYRQRALKILANSYYGYQGYPKARWYSKECAESVTAWGRHYIETTIKEAEKFGFKVLYADTDGFFATIPNEKPETIKSKAKKFLKHINEKLPGMLELEYEGFYLRGFFVTKKKYALIDEDGHITTRGLEVVRRDWSEIAKETQAKVLEVILREGSIEKAAGIVKKVVEDLANYRVPVEKLIIHELITRKLKDYKATGPHVAIAKRLQARGIKVKPGTIISYVVLKGSKKISDRVILFDEYDSSRHKYDPDYYIHNQVLPAVLRILEAFGYKEKDLEYQ

SEQ ID NO: 884 - protein, 773 aa, unidentified
  REGION 1..773: note = Description of Unknown: Synthetic polypeptide
MILDTDYITENGKPVIRIFKKEKGEFKIEYDRNFEPYIYALLEDDESIEDIKKITGERHGKKVRIIRVEKVKKKFLGEPIEVWKLVFEHPQDYPAIRDAIRSHPAVREIFEYDIPFAKRYLIDKGLVPMEGGEELKLLAFAIATFYHEGDEFAEGEILMISYADESGAKVITWKKIDLPYVEVVSTEREAIKRFLQVLREKDPDVLLTYNGDNFDFAYIKKRCEKLGLKFTIGRDGSEPKIQRMGDRFAVEVKGRIHLDLAPVVRHTIRLPTYTLEAVYEAVFGKKKEKVYAEEIAEAWKSEEGLARVAQYSMEDARATYELGREFFPMEVELAKLIGQSVWDVSRSSTGNLVEWYLLRVAYERNELAPNQPGGEEYQRRMRSSYIGGYVKEPEKGLWESIAYLDFRSSAGSIIVTHNVSPDTLEKECKNYDVAPIVGYRFCKDFKGFIPSILEDLIETRQKVKRKMKATIDPIEKKMLDYRQRALKILANSYYGYQGYPKARWYSKECAESVTAWGRHYIETTIKEAEKFGFKVLYADTDGFFATIPNEKPETIKSKAKKFLKHINEKLPGMLELEYEGFYLRGFFVTKKKYALIDEDGHITTRGLEVVRRDWSEIAKETQAKVLEVILREGSIEKAAGIVKKVVEDLANYRVPVEKLIIHEQITRELKRYKATGPHVAIAKRLQARGIKVKPGTIISYVVLKGSKKISDRVILFDEYDSSRHKYDPDYYIHNQVLPAVLRILEAFGYKEKDLEYQRMKQTGLGAWLKMGKK

SEQ ID NO: 885 - protein, 773 aa, unidentified
  REGION 1..773: note = Description of Unknown: Synthetic polypeptide
MILDTDYILENGKPVIRIFKKEKGEFKIEYDRNFEPYIYALLEDDESIEDIKKITGERHGKKVRIIRVEKVKKKFLGEPIEVWKLVFEHPQDVPAIRDAIRSHPAVREIFEYDIPFAKRYLIDKGLVPMEGGEELKLLAFNIATFYHEGDEFAEGEILMISYADESGAKVITWKKIDLPYVEVVSTEREAIKRFLQVLREKDPDVLLTYNGDNFDFAYIKKRCEKLGLKFTIGRDGSEPKIQRMGDRFAVEVKGRIHLDLAPVVRHTIRLPTYTLEAVYEAVFGKKKEKVYAEEIAEAWKSEEGLKRVAQYSMEDARATYELGREFFPLEVELAKLIGQSVWDVSRSSTGNLVEWYLLRVAYERNELAPNKPGGEEYQRRMRSSYIGGYVKEPEKGLWESIAYLDFRSSAGSIIVTHNVSPDTLEKECKNYDVAPIVGYRFCKDFKGFIPSILEDLIETRQKVKRKMKATIDPIEKKMLDYRQRALKILANSYYGYQGYPKARWYSKECAESVTAWGRHYIETTIKEAEKFGFKVLYADTDGFFATIPNEKPETIKSKAKKFLKHINEKLPGMLELEYEGFYLRGFFVTKKKYALIDEDGHITTRGLEVVRRDWSEIAKETQAKVLEVILREGSIEKAAGIVKKVVEDLANYRVPVEKLIIHEQITRELKRYKATGPHVAIAKRLQARGIKVKPGTIISYVVLKGSKKISDRVILFDEYDSSRHKYDPDYYIHNQVLPAVLRILEAFGYKEKDLEYQRMKQTGLGAWLKMGKK

SEQ ID NO: 886 - protein, 773 aa, unidentified
  REGION 1..773: note = Description of Unknown: Synthetic polypeptide
MILDTDYITENGKPVIRIFKKEKGEFKIEYDRNFEPYIYALLEDDESIEDIKKITGERHGKKVRIIRVEKVKKKFLGEPIEVWKLVFEHPQDYPAIRDAIRSHPAVREIFEYDIPFAKRYLIDKGLVPMEGGEELKLLAFAIATFYHEGDEFAEGEILMISYADESGAKVITWKKIDLPYVEVVSTEREAIKRFLQVLREKDPDVLLTYNGDNFDFAYIKKRCEKLGLKFTIGRDGSEPKIQRMGDRFAVEVKGRIHLDLAPVVRHTIRLPTYTLEAVYEAVFGKKKEKVYAEEIAEAWKSEEGLKRVAQYSMEDARATYELGREFFPMEVELAKLIGQSVWDVSRSSTGNLVEWYLLRVAYERNELAPNKPGGEEYQRRMRSSYIGGAVKEPEKGLWESIAYLDFRSSAGSIIVTHNVSPDTLEKECKNYDVAPIVGYRFCKDFKGFIPSILEDLIETRQKVKRKMKATIDPIEKKMLDYRQRALKILANSYYGYQGYPKARWYSKECAESVTAWGRHYIETTIKEAEKFGFKVLYADTDGFFATIPNEKPETIKSKAKKFLKHINEKLPGMLELEYEGFYLRGFFVTKKKYALIDEDGHITTRGLEVVRRDWSEIAKETQAKVLEVILREGSIEKAAGIVKKVVEDLANYRVPVEKLIIHEQITRELKRYKATGPHVAIAKRLQARGIKVKPGTIISYVVLKGSKKISDRVILFDEYDSSRHKYDPDYYIHNQVLPAVLRILEAFGYKEKDLEYQRMKQTGLGAWLKMGKK

SEQ ID NO: 887 - protein, 773 aa, unidentified
  REGION 1..773: note = Description of Unknown: Synthetic polypeptide
MILDTDYITENGKPVIRIFKKEKGEFKIEYDRNFEPYIYALLEDDESIEDIKKITGERHGKKVRIIRVEKVKKKFLGEPIEVWKLVFEHPQDYPAIRDAIRSHPAVREIFEYDIPFAKRYLIDKGLVPMEGGEELKLLAFAIATFYHEGDEFAEGEILMISYADESGAKVITWKKIDLPYVEVVSTEREAIKRFLQVLREKDPDVLLTYNGDNFDFAYIKKRCEKLGLKFTIGRDGSEPKIQRMGDRFAVEVKGRIHLDLAPVVRHTIRLPTYTLEAVYEAVFGKKKEQVYAEEIAEAWKSEEGLKRVAQYSMEDARATYELGREFFPMEVELAKLIGQSVWDVSRSSTGNLVEWYLLRVAYERNELAPNKPGGEEYQRRMRSSYIGGYVKEPEKGLWESIAYLDFRSSAGSIIVTHNVSPDTLEKECKNYDVAPIVGYRFCKDFKGFIPSILEDLIETRQKVKRKMKATIDPIEKKMLDYRQRALKILANSYYGYQGYPKARWYSKENAEKVTAWGRHYIETTIKEAEKFGFKVLYADTDGFFATIPNEKPETIKSKAKKFLKHINEKLPGMLELEYEGFYLRGFFVTKKKYALIDEDGHITTRGLEVVRRDWSEIAKETQAKVLEVILREGSIEKAAGIVKKVVEDLANYRVPVEKLIIHEQITRELKRYKATGPHVAIAKRLQARGIKVKPGTIISYVVLKGSKKISDRVILFDEYDSSRHKYDPDYYIHNQVLPAVLRILEAFGYKEKDLEYQRMKQTGLGAWLKMGKK

SEQ ID NO: 888 - protein, 773 aa, unidentified
  REGION 1..773: note = Description of Unknown: Synthetic polypeptide
MILDTDYITENGKPVIRIFKKEKGEFKIEYDRNFEPYIYALLEDDESIEDIKKITGERHGKKVRIIRVEKVKKKFLGEPIEVWKLVFEHPQDVPAIRDAIRSHPAVREIFEYDIPFAKRYLIDKGLVPMEGGEELKLLAFRIATFYHEGDEFAEGEILMISYADESGAKVITWKKIDLPYVEVVSTEREAIKRFLQVLREKDPDVLLTYNGDNFDFAYIKKRCEKLGLKFTIGRDGSEPKIQRMGDRFAVEVKGRIHLDLAPVVRHTIRLPTYTLEAVYEAVFGKKKEKVYAEEIAEAWKSEEGLKRVAQYSMEDARATYELGREFFPLEVELAKLIGQSVWDVSRSSTGNLVEWYLLRVAYERNELAPNKPGGEEYQRRMRSSYIGGYVKEPEKGLWESIAYLDFRSSAGSIIVTHNVSPDTLEKECKNYDVAPIVGYRFCKDFKGFIPSILEDLIETRQKVKRKMKATIDPIEKKMLDYRQRALKILANSYYGYQGYPKARWYSKECAESVTAWGRHYIETTIKEAEKFGFKVLYADTDGFFATIPNEKPETIKSKAKKFLKHINEKLPGMLELEYEGFYLRGFFVTKKKYALIDEDGHITTRGLEVVRRDWSEIAKETQAKVLEVILREGSIEKAAGIVKKVVEDLANYRVPVEKLIIHELITRELKRYKATGPHVAIAKRLQARGIKVKPGTIISYVVLKGSKKISDRVILFDEYDSSRHKYDPDYYIHNQVLPAVLRILEAFGYKEKDLEYQRMKQTGLGAWLKMGKK

SEQ ID NO: 889 - protein, 758 aa, unidentified
  REGION 1..758: note = Description of Unknown: Synthetic polypeptide
MILDTDYITENGKPVIRIFKKEKGEFKIEYDRNFEPYIYALLEDDESIEDIKKITGERHGKKVRIIRVEKVKKKFLGEPIEVWKLVFEHPQDVPAIRDAIRSHPAVREIFEYDIPFAKRYLIDKGLVPMEGGEELKLLAFNIATFYHEGDEFAEGEILMISYADESGAKVITWKKIDLPYVEVVSTEREAIKRFLQVLREKDPDVLLTYNGDNFDFAYIKKRCEKLGLKFTIGRDGSEPKIQRMGDRFAVEVKGRIHLDLAPVVRHTIRLPTYTLEAVYEAVFGKKKEKVYAEEIAEAWKSEEGLKRVAQYSMEDARATYELGREFFPLEVELAKLIGQSVWDVSRSSTGNLVEWYLLRVAYERNELAPNKPGGEEYQRRMRSSYIGGYVKEPEKGLWESIAYLDFRSSAGSIIVTHNVSPDTLEKECKNYDVAPIVGYRFCKDFKGFIPSILEDLIETRQKVKRKMKATIDPIEKKMLDYRQRALKILANSYYGYQGYPKARWYSKECAESVTAWGRHYIETTIKEAEKFGFKVLYADTDGFFATIPNEKPETIKSKAKKFLKHINEKLPGMLELEYEGFYLRGFFVTKKKYALIDEDGHITTRGLEVVRRDWSEIAKETQAKVLEVILREGSIEKAAGIVKKVVEDLANYRVPVEKLIIHEQITRELKRYKATGPHVAIAKRLQARGIKVKPGTIISYVVLKGSKKISDRVILFDEYDSSRHKYDPDYYIHNQVLPAVLRILEAFGYKEKDLEYQR

SEQ ID NO: 890 - protein, 773 aa, unidentified
  REGION 1..773: note = Description of Unknown: Synthetic polypeptide
MILDTDYITENGKPVIRIFKKEKGEFKIEYDRNFEPYIYALLEDDESIEDIKKITGERHGKKVRIIRVEKVKKKFLGEPIEVWKLVFEHPQDYPAIRDAIRSHPAVREIFEYDIPFAKRYLIDKGLVPMEGGEELKLLAFAIATFYHEGDEFAEGEILMISYADESGAKVITWKKIDLPYVEVVSTEREAIKRFLQVLREKDPDVLLTYNGDNFDFAYIKKRCEKLGLKFTIGRDGSEPKIQRMGDRFAVEVKGRIHLDLAPVVRHTIRLPTYTLEAVYEAVFGKKKEQVYAEEIAEAWKSEEGLKRVAQYSMEDARATYELGREFFPMEVELAKLIGQSVWDVSRSSTGNLVEWYLLRVAYERNELAPNKPGGEEYQRRMRSSYIGGYVKEPEKGLWESIAYLDFRSSAGSIIVTHNVSPDTLEKECKNYDVAPIVGYRFCKDFKGFIPSILEDLIETRQKVKRKMKATIDPIEKKMLDYRQRALKILANSYYGYQGYPKARWYSKEDAESVTAWGRHYIETTIKEAEKFGFKVLYADTDGFFATIPNEKPETIKSKAKKFLKHINEKLPGMLELEYEGFYLRGFFVTKKKYALIDEDGHITTRGLEVVRRDWSEIAKETQAKVLEVILREGSIEKAAGIVKKVVEDLANYRVPVEKLIIHEQITRELKRYKATGPHVAIAKRLQARGIKVKPGTIISYVVLKGSKKISDRVILFDEYDSSRHKYDPDYYIHNQVLPAVLRILEAFGYKEKDLEYQRMKQTGLGAWLKMGKK

SEQ ID NO: 891 - protein, 773 aa, unidentified
  REGION 1..773: note = Description of Unknown: Synthetic polypeptide
MILDTDYITENGKPVIRIFKKEKGEFKIEYDRNFEPYIYALLEDDESIEDIKKITGERHGKKVRIIRVEKVKKKFLGEPIEVWKLVFEHPQDYPAIRDAIRSHPAVREIFEYDIPFAKRYLIDKGLVPMEGGEELKLLAFAIATFYHEGDEFAEGEILMISYADESGAKVITWKKIDLPYVEVVSTEREAIKRFLQVLREKDPDVLLTYNGDNFDFAYIKKRCEKLGLKFTIGRDGSEPKIQRMGDRFAVEVKGRIHLDLAPVVRHTIRLPTYTLEAVYEAVFGKKKEKVYAEEIAEAWKSEEGLKRVAQYSMEDARATYELGREFFPMEVELAKLIGQSVWDVSRSSTGNLVEWYLLRVAYERNELAPNKPGGEEYQRRMRSSYIGGYVKEPEKGLWESIAYLDFRSSAGSIIVTHNVSPDTLEKECKNYDVAPRVGYRFCKDFKGFIPSILEDLIETRQKVKRKMKATIDPIEKKMLDYRQRALKILANSYYGYQGYPKARWYSKECAESVTAWGRHYIETTIKEAEKFGFKVLYADTDGFFATIPNEKPETIKSKAKKFLKHINEKLPGMLELEYEGFYLRGFFVTKKKYALIDEDGHITTRGLEVVRRDWSEIAKETQAKVLEVILREGSIEKAAGIVKKVVEDLANYRVPVEKLIIHEQITRELKRYKATGPHVAIAKRLQARGIKVKPGTIISYVVLKGSKKISDRVILFDEYDSSRHKYDPDYYIHNQVLPAVLRILEAFGYKEKDLEYQRMKQTGLGAWLKMGKK

SEQ ID NO: 892 - protein, 773 aa, unidentified
  REGION 1..773: note = Description of Unknown: Synthetic polypeptide
MILDTDYITENGKPVIRIFKKEKGEFKIEYDRNFEPYIYALLEDDESIEDIKKITGERHGKKVRIIRVEKVKKKFLGEPIEVWKLVFEHPQDVPAIRDAIRSHPAVREIFEYDIPFAKRYLIDKGLVPMEGGEELKLLAFNIATFYHEGDEFAEGEILMISYADESGAKVITWKKIDLPYVEVVSTEREAIKRFLQVLREKDPDVLLTYNGDNFDFAYIKKRCEKLGLKFTIGRDGSEPKIQRMGDRFAVEVKGRIHLDLAPVVRHTIRLPTYTLEAVYEAVFGKKKEKVYAEEIAEAWKSEEGLKRVAQYSMEDARATYELGREFFPLEVELAKLIGQSVWDVSRSSTGNLVEWYLLRVAYERNELAPNKPGGEEYQRRMRSSYIGGYVKEPEKGLWESIAYLDFRSSAGSIIVTHNVSPDTLEKECKNYDVAPIVGYRFCKDFKGFIPSILEDLIETRQKVKRKMKATIDPIEKKMLDYRQRALKILANSYYGYQGYPKARWYSKECAESVTAWGRHYIETTIKEAEKFGFKVLYADTDGFFATIPNEKPETIKSKAKKFLKHINEKLPGMLELEYEGFYLRGFFVTKKKYALIDEDGHITTRGLEVVRRDWSEIAKETQAKVLEVILREGSIEKAAGIVKKVVEDLANYRVPVEKLIIHELITRELKRYKATGPHVAIAKRLQARGIKVKPGTIISYVVLKGSKKISDRVILFDEYDSSRHKYDPDYYIHNQVLPAVLRILEAFGYKEKDLEYQRMKQTGLGAWLKRGKK

SEQ ID NO: 893 - protein, 773 aa, unidentified
  REGION 1..773: note = Description of Unknown: Synthetic polypeptide
MILDTDYITENGKPVIRIFKKEKGEFKIEYDRNFEPYIYALLEDDESIEDIKKITGERHGKKVRIIRVEKVKKKFLGEPIEVWKLVFEHPQDVPAIRDAIRSHPAVREIFEYDIPFAKRYLIDKGLVPMEGGEELKLLAFAIATFYHEGDEFAEGEILMISYADESGAKVITWKKIDLPYVEVVSTEREAIKRFLQVLREKDPDVLLTYNGDNFDFAYIKKRPEKLGLKFTIGRDGSEPKIQRMGDRFAVEVKGRIHLDLAPVVRHTIRLPTYTLEAVYEAVFGKKKEKVYAEEIAEAWKSEEGLKRVAQYSMEDARATYELGREFFPMEVELAKLIGQSVWDVSRSSTGNLVEWYLLRVAYERNELAPNKPGGEEYQRRMRSSYIGGYVKEPEKGLWESIAYLDFRSSAGSIIVTHNVSPDTLEKECKNYDVAPIVGYRFCKDFKGFIPSILEDLIETRQKVKRKMKATIDPIEKKMLDYRQRALKILANSYYGYQGYPKARWYSKECAESVTAWGRHYIETTIKEAEKFGFKVLYADTDGFFATIPNEKPETIKSKAKKFLKHINEKLPGMLELEYEGFYLRGFFVTKKKYALIDEDGHITTRGLEVVRRDWSEIAKETQAKVLEVILREGSIEKAAGIVKKVVEDLANYRVPVEKLIIHEQITRELKDYKATGPHVAIAKRLQARGIKVKPGTIISYVVLKGSKKISDRVILFDEYDSSRHKYDPDYYIHNQVLPAVLRILEAFGYKEKDLEYQRMKQTGLGAWLKMGKK

SEQ ID NO: 894 - protein, 773 aa, unidentified
  REGION 1..773: note = Description of Unknown: Synthetic polypeptide
SILDTDYITENGKPVIRIFKKEKGEFKIEYDRNFEPYIYALLEDDESIEDIKKITGERHGKKVRIIRVEKVKKKFLGEPIEVWKLVFEHPQDYPAIRDAIRSHPAVREIFEYDIPFAKRYLIDKGLVPMEGGEELKLLAFAIATFYHEGDEFAEGEILMISYADESGAKVITWKKIDLPYVEVVSTEREAIKRFLQVLREKDPDVLLTYNGDNFDFAYIKKRCEKLGLKFTIGRDGSEPKIQRMGDRFAVEVKGRIHLDLAPVVRHTIRLPTYTLEAVYEAVFGKKKEKVYAEEIAEAWKSEEGLKRVAQYSMEDARATYELGREFFPMEVELAKLIGQSVWDVSRSSTGNLVEWYLLRVAYERNELAPNKPGGEEYQRRMRSSYIGGYVKEPEKGLWESIAYLDFRSSAGSIIVTHNVSPDTLEKECKNYDVAPIVGYRFCKDFKGFIPSILEDLIETRQKVKRKMKATIDPIEKKMLDYRQRALKILANSYYGYQGYPKARWYSKECAESVTAWGRHYIETTIKEAEKFGFKVLYADTDGFFATIPNEKPETIKSKAKKFLKHINEKLPGMLELEYEGFYLRGFFVTKKKYALIDEDGHITTRGLEVVRRDWSEIAKETQAKVLEVILREGSIEKAAGIVKKVVEDLANYRVPVEKLIIHEQITRELKRYKATGPHVAIAKRLQARGIKVKPGTIISYVVLKGSKKISDRVILFDEYDSSRHKYDPDYYIHNQVLPAVLRILEAFGYKEKDLEYQRMKQTGLGAWLKMGKK

SEQ ID NO: 895 - protein, 773 aa, unidentified
  REGION 1..773: note = Description of Unknown: Synthetic polypeptide
MILDTDYITENGKPVIRIFKKEKGEFKIEYDRNFEPYIYALLEDDESIEDIKKITGERHGKKVRIIRVEKVKKKFLGEPIEVWKLVFEHPQDVPAIRDAIRSHPAVREIFEYDIPFAKRYLIDKGLVPMEGGEELKLLAFAIATFYHEGDEFAEGEILMISYADESGAKVITWKKIDLPYVEVVSTEREAIKRFLQVLREKDPDVLLTYNGDNFDFAYIKKRCEKLGLKFTIGRDGSEPKIQRMGDRFAVEVKGRIHLDLAPVVRHTIRLPTYTLEAVYEAVFGKKKEKVYAEEIAEAWKSEEGLKRVAQYSMEDARATYELGREFFPMEVELAKLIGQSVWDVSRSSTGNLVEWYLLRVAYERNELAPNKPGGEEYQRRMRSSYIGGYVKEPEKGLWESIAYLDFRSSAGSIIVTHNVSPDTLEKECKNYDVAPIVGYRFCKDFKGFIPSILEDLIETRQKVKRKMKATIDPIEKKMLDYRQRALKILANSYYGYMGYPKARWYSKEDAESVTAWGRHYIETTIKEAEKFGFKVLYADTDGFFATIPNEKPETIKSKAKKFLKHINEKLPGMLELEYEGFYLRGFFVTKKKYALIDEDGHITTRGLEVVRRDWSEIAKETQAKVLEVILREGSIEKAAGIVKKVVEDLANYRVPVEKLIIHEQITRELKRYKATGPHVAIAKRLQARGIKVKPGTIISYVVLKGSKKISDRVILFDEYDSSRHKYDPDYYIHNQVLPAVLRILEAFGYKEKDLEYQRMKQTGLGAWLKMGKK

SEQ ID NO: 896 - protein, 773 aa, unidentified
  REGION 1..773: note = Description of Unknown: Synthetic polypeptide
MILDTDYITENGKPVIRIFKKEKGEFKIEYDRNFEPYIYALLEDDESIEDIKKITGERHGKKVRIIRVEKVKKKFLGEPIEVWKLVFEHPQDYPAIRDAIRSHPAVREIFEYDIPFAKRYLIDKGLVPMEGGEELKLLAFAIATFYHEGDEFAEGEILMISYADESGAKVITWKKIDLPYVEVVSTEREAIKRFLQVLREKDPDVLLTYNGDNFDFAYIKKRCEKLGLKFTIGRDGSEPKIQRMGDRFAVEVKGRIHLDLAPVVRHTIRLPTYTLEAVYEAVFGKKKEKVYAEEIAEAWKSEEGLKRVAQYSMEDARATYELGREFFPMEVELAKLIGQSVWDVSRSSTGNLVEWYLLRVAYERNELAPNKPGGEEYQRRMRSSYIGGYVKEPEKGLWESIAYLDFRSSAGSIIVTHNVSPDTLEKECKNYDVAPIVGYRFCKDFKGFIPSILEDLIETRQKVKRKMKATIDPIEKKMLDYRQRALKILANSYYGYQGYPKARWYSKECAESVTAWGRHYIETTIKEAEKFGFKVLYADTDGFFATIPNEKPEQIKSKAKKFLKHINEKLPGMLELEYEGFYLRGFFVTKKKYALIDEDGHITTRGLEVVRRDWSEIAKETQAKVLEVILREGSIEKAAGIVKKVVEDLANYRVPVEKLIIHEQITRELKRYKATGPHVAIAKRLQARGIKVKPGTIISYVVLKGSKKISDRVILFDEYDSSRHKYDPDYYIHNQVLPAVLRILEAFGYKEKDLEYQRMKQTGLGAWLKMGKK

SEQ ID NO: 897 - protein, 773 aa, unidentified
  REGION 1..773: note = Description of Unknown: Synthetic polypeptide
MILDTDYITENGKPVIRIFKKEKGEFKIEYDRNFEPYIYALLEDDESIEDIKKITGERHGKKVRIIRVEKVKKKFLGEPIEVWKLVFEHPQDVPAIRDAIRSHPAVREIFEYDIPFAKRYLIDKGLVPMEGGEELKLLAFNIATFYHEGDEFAEGEILMISYADESGAKVITWKKIDLPYVEVVSTEREAIKRFLQVLREKDPDVLLTYNGDNFDFAYIKKRCEKLGLKFTIGRDGSEPKIQRMGDRFAVEVKGRIHLDLAPVVRHTIRLPTYTLEAVYEAVFGKKKEKVYAEEIAEAWKSEEGLKRVAQYSMEDARATYELGREFFPLEVELAKLIGQSVWDVSRSSTGNLVEWYLLRVAYERNELAPNKPGGEEYQRRMRSSYIGGYVKEPEKGLWESIAYLDFRSSAGSIIVTHNVSPDTLEKECKNYDVAPIVGYRFCKDFKGFIPSILEDLIETRQKVKRKMKATIDPIEKKMLDYRQRALKILANSYYGYQGYPKARWYSKECAESVTAWGRHYIETTIKEAEKFGFKVLYADTDGFFATIPNEKPETIKSKAKKFLKHINEKLPGMLELEYEGFYLRGFFVTKKFYALIDEDGHITTRGLEVVRRDWSEIAKETQAKVLEVILREGSIEKAAGIVKKVVEDLANYRVPVEKLIIHEQITRELKRYKATGPHVAIAKRLQARGIKVKPGTIISYVVLKGSKKISDRVILFDEYDSSRHKYDPDYYIHNQVLPAVLRILEAFGYKEKDLEYQRMKQTGLGAWLKMGKK

SEQ ID NO: 898 - protein, 773 aa, unidentified
  REGION 1..773: note = Description of Unknown: Synthetic polypeptide
MILDTDYITENGKPVIRIFKKEKGEFKIEYDRNFEPYIYALLEDDESIEDIKKITGERHGKKVRIIRVEKVKKKFLGEPIEVWKLVFEVPQDVPAIRDAIRSHPAVREIFEYDIPFAKRYLIDKGLVPMEGGEELKLLAFNIATFYHEGDEFAEGEILMISYADESGAKVITWKKIDLPYVEVVSTEREAIKRFLQVLREKDPDVLLTYNGDNFDFAYIKKRCEKLGLKFTIGRDGSEPKIQRMGDRFAVEVKGRIHLDLAPVVRHTIRLPTYTLEAVYEAVFGKKKEKVYAEEIAEAWKSEEGLKRVAQYSMEDARATYELGREFFPLEVELAKLIGQSVWDVSRSSTGNLVEWYLLRVAYERNELAPNKPGGEEYQRRMRSSYIGGYVKEPEKGLWESIAYLDFRSSAGSIIVTHNVSPDTLEKECKNYDVAPIVGYRFCKDFKGFIPSILEDLIETRQKVKRKMKATIDPIEKKMLDYRQRALKILANSYYGYQGYPKARWYSKECAESVTAWGRHYIETTIKEAEKFGFKVLYADTDGFFATIPNEKPETIKSKAKKFLKHINEKLPGMLELEYEGFYLRGFFVTKKKYALIDEDGHITTRGLEVVRRDWSEIAKETQAKVLEVILREGSIEKAAGIVKKVVEDLANYRVPVEKLIIHEQITRELKRYKATGPHVAIAKRLQARGIKVKPGTIISYVVLKGSKKISDRVILFDEYDSSRHKYDPDYYIHNQVLPAVLRILEAFGYKEKDLEYQRMKQTGLGAWLKMGKK

SEQ ID NO: 899 - protein, 773 aa, unidentified
  REGION 1..773: note = Description of Unknown: Synthetic polypeptide
IILDTDYITENGKPVIRIFKKEKGEFKIEYDRNFEPYIYALLEDDESIEDIKKITGERHGKKVRIIRVEKVKKKFLGEPIEVWKLVFEHPQDYPAIRDAIRSHPAVREIFEYDIPFAKRYLIDKGLVPYEGGEELKLLAFAIATFYHEGDEFAEGEILMISYADESGAKVITWKKIDLPYVEVVSTEREAIKRFLQVLREKDPDVLLTYNGDNFDFAYIKKRCEKLGLKFTIGRDGSEPKIQRMGDRFAVEVKGRIHLDLAPVVRHTIRLPTYTLEAVYEAVFGKKKEKVYAEEIAEAWKSEEGLKRVAQYSMEDARATYELGREFFPMEVELAKLIGQSVWDVSRSSTGNLVEWYLLRVAYERNELAPNKPGGEEYQRRMRSSYIGGYVKEPEKGLWESIAYLDFRSSAGSIIVTHNVSPDTLEKECKNYDVAPIVGYRFCKDFKGFIPSILEDLIETRQKVKRKMKATIDPIEKKMLDYRQRALKILANSYYGYQGYPKARWYSKECAESVTAWGRHYIETTIKEAEKFGFKVLYADTDGFFATIPNEKPETIKSKAKKFLKHINEKLPGMLELEYEGFYLRGFFVTKKKYALIDEDGHITTRGLEVVRRDWSEIAKETQAKVLEVILREGSIEKAAGIVKKVVEDLANYRVPVEKLIIHEQITRELKRYKATGPHVAIAKRLQARGIKVKPGTIISYVVLKGSKKISDRVILFDEYDSSRHKYDPDYYIHNQVLPAVLRILEAFGYKEKDLEYQRMKQTGLGAWLKMGKK

SEQ ID NO: 900 - protein, 773 aa, unidentified
  REGION 1..773: note = Description of Unknown: Synthetic polypeptide
MILDTDYITENGKPVIRIFKKEKGEFKIEYDRNFEPYIYALLEDDESIEDIKKITGERHGKKVRIIRVEKVKKKFLGEPIEVWKLVFEHPQDYPAIRDAIRSHPAVREIFEYDIPFAKRYLIDKGLVPMEGGEELKLLAFAIATFYHEGDEFAEGEILMISYADESGAKVITWKKIDLPYVEVVSTEREAIKRFLQVLREKDPDVLLTYNGDNFDFAYIKKRCEKLGLKFTIGRDGSEPKIQRMGDRFAVEVKGRIHLDLAPVVRHTIRLPTYVLEAVYEAVFGKKKEKVYAEEIAEAWKSEEGLKRVAQYSMEDARATYELGREFFPMEVELAKLIGQSVWDVSRSSTGNLVEWYLLRVAYERNELAPNKPGGEEYQRRMRSSYIGGYVKEPEKGLWESIAYLDFRSSAGSIIVTHNVSPDTLEKECKNYDVAPIVGYRFCKDFKGFIPSILEDLIETRQKVKRKMKATIDPIEKKMLDYRQRALKILANSYYGYQGYPKARWYSKECAESVTAWGRHYIETTIKEAEKFGFKVLYADTDGFFATIPNEKPETIKSKAKKFLKHINEKLPGMLELEYEGFYLRGFFVTKKKYALIDEDGHITTRGLEVVRRDWSEIAKETQAKVLEVILREGSIEKAAGIVKKVVEDLANYRVPVEKLIIHEQITRELKRYKATGPHVAIAKRLQARGIKVKPGTIISYVVLKGSKKISDRVILFDEYDSSRHKYDPDYYIHNQVLPAVLRILEAFGYKEKDLEYQRMKQTGLGAWLKMGKK

SEQ ID NO: 901 - protein, 773 aa, unidentified
  REGION 1..773: note = Description of Unknown: Synthetic polypeptide
MILDTDYITENGKPVIRIFKKEKGEFKIEYDRNFEPYIYALLEDDESIEDIKKITGERHGKKVRIIRVEKVKKKFLGEPIEVWKLVFEHPQDYPAIRDAIRSHPAVREIFEYDIPFAKRYLIDKGLVPMEGGEELKLLAFAIATFYHEGDEFAEGEILMISYADESGAKVITWKKIDLPYVEVVSTEREAIKRFLQVLREKDPDVLLTYNGDNFDFAYIKKRCEKLGLKFTIGRDGSEPKIQRMGDRFAVEVKGRIHLDLAPVVRHTIRLPTYTLEAVYEAVFGKKKEKVYAEEIAEAWKSEEGLKRVAQYSMEDARATYELGREFFPMEVELAKLIGQSVWDVSRSSTGNLVEWYLLRVAYERNELAPNKPGGEEYQRRMRSSYIGGYVKEPEKGLWESIAYLDFRSSAGSIIVTHNVSPDTLEKECKNYDVAPIVGYRFCKDFKGFIPSILEDLIETRQKVKRKMKATIDPIEKKMLDYRQRALKILANSYYGYQGYPKARWYSKECAESVTAWGRHYIETTIKEAEKFGFKVLYADTDGFFATIPNEKPETIKSKAKKFLKHINEKLPGMLELEYEGFYLRGFFVTKKKYALIDEDGHITTRGLEVVRRDWSEIAKETQAKVLEVILREGSIEKAAGIVKKVVEDLANYRVPVEKLIIHEQITRELKRYKATGPHVAIAKRLQARGIKVKPGTIISYVVLKGSKKISDRVILFDEYDSSRHKYDPDYYIHNQVLPAVLRILEAFGYKEKDLEYQRMKQTGLGARLKMGKK

SEQ ID NO: 902 - protein, 773 aa, unidentified
  REGION 1..773: note = Description of Unknown: Synthetic polypeptide
MILDTDYITENGKPVIRIFKKEKGEFKIEYDRNFEPYIYALLEDDESIEDIKKITGERHGKKVRIIRVEKVKKKFLGEPIEVWKLVFEHPQDYPAIRDAIRSHPAVREIFEYDIPFAKRYLIDKGLVPMEGGEELKLLAFAIATFYHEGDEFAEGEILMISYADESGAKVITWKKIDLPYVEVVSTEREAIKRFLQVLREKDPDVLLTYNGDNFDFAYIKKRCEKLGLKFTIGRDGSEPKIQRMGDRFAVEVKGRIHLDLAPVVRHTIRLPTYTLEAVYEAVFGKKKEKVYAEEIAEAWKSEEGLKRVAQYSMEDARATYELGREFFPMEVELAKLIGQSVWDVSRSSTGNLVEWYLLRVAYERNELAPNKPGGEEYQRRMRSSYIGGYVKEPEKGLWESIAYLDFRSSAGSIIVTHNVSPDTLEKECKNYDVAPIVGYRFCKDFKGFIPSILEDLIETRQKVKRKMKATIDPIEKKMLDYRQRALKILANSYYGYQGYPKARWYSKECAESVTAWGRHYIETTIKEAEKFGFKVLYADTDGFFATIPNEKPETIKSKAKKFLKHINEKLPGMLELEYEGFYLRGFFVTKKKYALIDEDGHITTRGLEVVRRDWSEIAKETQAKVLEVILREGSIEKAAGIVKKVVEDLANYRVPVEKLIIHEQITRELKRYKATGPHVAIAKRLQARGIKVKPGTIISYVVLKGSKKISDRVILFDEYDSSRHKYDPDYYIHNQVLPAVLRILEAFGYKEKDLEYQRMKQTGLLAWLKMGKK

SEQ ID NO: 903 - protein, 773 aa, unidentified
  REGION 1..773: note = Description of Unknown: Synthetic polypeptide
VILDTDYITENGKPVIRIFKKEKGEFKIEYDRNFEPYIYALLEDDESIEDIKKITGERHGKKVRIIRVEKVKKKFLGEPIEVWKLVFEHPQDYPAIRDAIRSHPAVREIFEYDIPFAKRYLIDKGLVPLEGGEELKLLAFAIATFYHEGDEFAEGEILMISYADESGAKVITWKKIDLPYVEVVSTEREAIKRFLQVLREKDPDVLLTYNGDNFDFAYIKKRCEKLGLKFTIGRDGSEPKIQRMGDRFAVEVKGRIHLDLAPVVRHTIRLPTYTLEAVYEAVFGKKKEKVYAEEIAEAWKSEEGLKRVAQYSMEDARATYELGREFFPMEVELAKLIGQSVWDVSRSSTGNLVEWYLLRVAYERNELAPNKPGGEEYQRRMRSSYIGGYVKEPEKGLWESIAYLDFRSSAGSIIVTHNVSPDTLEKECKNYDVAPIVGYRFCKDFKGFIPSILEDLIETRQKVKRKMKATIDPIEKKMLDYRQRALKILANSYYGYQGYPKARWYSKECAESVTAWGRHYIETTIKEAEKFGFKVLYADTDGFFATIPNEKPETIKSKAKKFLKHINEKLPGMLELEYEGFYLRGFFVTKKKYALIDEDGHITTRGLEVVRRDWSEIAKETQAKVLEVILREGSIEKAAGIVKKVVEDLANYRVPVEKLIIHEQITRELKRYKATGPHVAIAKRLQARGIKVKPGTIISYVVLKGSKKISDRVILFDEYDSSRHKYDPDYYIHNQVLPAVLRILEAFGYKEKDLEYQRMKQTGLGAWLKMGKK

SEQ ID NO: 904 - protein, 773 aa, unidentified
  REGION 1..773: note = Description of Unknown: Synthetic polypeptide
MILDTDYITENGKPVIRIFKKEKGEFKIEYDRNFEPYIYALLEDDESIEDIKKITGERHGKKVRIIRVEKVKKKFLGEPIEVWKLVFEHPQDYPAIRDAIRSHPAVREIFEYDIPFAKRYLIDKGLVPMEGGEELKLLAFAIATFYHEGDEFAEGEILMISYADESGAKVITWKKIDLPYVEVVSTEREAIKRFLQVLREKDPDVLLTYNGDNFDFAYIKKRCEKLGLKFTIGRDGSEPKIQRMGDRFAVEVKGRIHLDLAPVVRHTIRLPTYTLEAVYEAVFGKKKEKVYAEEIAEAWKSEEGLKRVAQYSMEDARATYELGREFFPMEVELAKLIGQSVWDVSRSSTGNLVEWYLLRVAYERNELAPNKPGGEEYQRRMRSSYIGGYVKEPEKGLWESIAYLDFRSSAGSIIVTHNVSPDTLEKECVNYDVAPIVGYRFCKDFKGFIPSILEDLIETRQKVKRKMKATIDPIEKKMLDYRQRALKILANSYYGYQGYPKARWYSKECAESVTAWGRHYIETTIKEAEKFGFKVLYADTDGFFATIPNEKPETIKSKAKKFLKHINEKLPGMLELEYEGFYLRGFFVTKKKYALIDEDGHITTRGLEVVRRDWSEIAKETQAKVLEVILREGSIEKAAGIVKKVVEDLANYRVPVEKLIIHEQITRELKRYKATGPHVAIAKRLQARGIKVKPGTIISYVVLKGSKKISDRVILFDEYDSSRHKYDPDYYIHNQVLPAVLRILEAFGYKEKDLEYQRMKQTGLGAWLKMGKK

SEQ ID NO: 905 - protein, 773 aa, unidentified
  REGION 1..773: note = Description of Unknown: Synthetic polypeptide
MILDTDYITENGKPVIRIFKKEKGEFKIEYDRNFEPYIYALLEDDESIEDIKKITGERHGKKVRIIRVEKVKKKFLGEPIEVWKLVFEHPQDYPAIRDAIRSHPAVREIFEYDIPFAKRYLIDKGLVPMEGGEELKLLAFAIATFYHEGDEFAEGEILMISYADESGAKVITWKKIDLPYVEVVSTEREAIKRFLQVLREKDPDVLLTYNGDNFDFAYIKKRCEKLGLKFTIGRDGSEPKIQRMGDRFAVEVKGRIHLDLAPVVRHTIRLPTYTLEAVYEAVFGKKKEQVYAEEIAEAWKSEEGLKRVAQYSMEDARATYELGREFFPMEVELAKLIGQSVWDVSRSSTGNLVEWYLLRVAYERNELAPNKPGGEEYQRRMRSSYIGGYVKEPEKGLWESIAYLDFRSSAGSIIVTHNVSPDTLEKECKNYDVAPIVGYRFCKDFKGFIPSILEDLIETRQKVKRKMKATIDPIEKKMLDYRQRALKILANSYYGYQGYPKARWYSKECAEEVTAWGRHYIETTIKEAEKFGFKVLYADTDGFFATIPNEKPETIKSKAKKFLKHINEKLPGMLELEYEGFYLRGFFVTKKKYALIDEDGHITTRGLEVVRRDWSEIAKETQAKVLEVILREGSIEKAAGIVKKVVEDLANYRVPVEKLIIHEQITRELKRYKATGPHVAIAKRLQARGIKVKPGTIISYVVLKGSKKISDRVILFDEYDSSRHKYDPDYYIHNQVLPAVLRILEAFGYKEKDLEYQRMKQTGLGAWLKMGKK

SEQ ID NO: 906 - protein, 773 aa, unidentified
  REGION 1..773: note = Description of Unknown: Synthetic polypeptide
MILDTDYITENGKPVIRIFKKEKGEFKIEYDRNFEPYIYALLEDDESIEDIKKITGERHGKKVRIIRVEKVKKKFLGEPIEVWKLVFEHPQDYPAIRDAIRSHPAVREIFEYDIPFAKRYLIDKGLVPMEGGEELKLLAFAIATFYHEGDEFAEGEILMISYADESGAKVITWKKIDLPYVEVVSTEREAIKRFAQVLREKDPDVLLTYNGDNFDFAYIKKRAEKLGLKFTIGRDGSEPKIQRMGDRFAVEVKGRIHLDLAPVVRHTIRLPTYTLEAVYEAVFGKKKEKVYAEEIAEAWKSEEGLKRVAQYSMEDARATYELGREFFPMEVELAKLIGQSVWDVSRSSTGNLVEWYLLRVAYERNELAPNKPGGEEYQRRMRSSYIGGYVKEPEKGLWESIAYLDFRSSAGSIIVTHNVSPDTLEKECKNYDVAPIVGYRFCKDFKGFIPSILEDLIETRQKVKRKMKATIDPIEKKMLDYRQRALKILANSYYGYQGYPKARWYSKECAESVTAWGRHYIETTIKEAEKFGFKVLYADTDGFFATIPNEKPETIKSKAKKFLKHINEKLPGMLELEYEGFYLRGFFVTKKKYALIDEDGHITTRGLEVVRRDWSEIAKETQAKVLEVILREGSIEKAAGIVKKVVEDLANYRVPVEKLIIHEQITRELKRYKATGPHVAIAKRLQARGIKVKPGTIISYVVLKGSKKISDRVILFDEYDSSRHKYDPDYYIHNQVLPAVLRILEAFGYKEKDLEYQRMKQTGLGAWLKMGKK

SEQ ID NO: 907 - protein, 773 aa, unidentified
  REGION 1..773: note = Description of Unknown: Synthetic polypeptide
MILDTDYITENGKPVIRIFKKEKGEFKIEYDRNFEPYIYALLEDDESIEDIKKITGERHGKKVRIIRVEKVKKKFLGEPIEVWKLVFEHPQDYPAIRDAIRSHPAVREIFEYDIPFAKRYLIDKGLVPMEGGEELKLLAFAIATFYHEGDEFAEGEILMISYADESGAKVITWKKIDLPYVEVVSTEREAIKRFLQVLREKDPDVLLTYNGDNFDFAYIKKRCEKLGLKFTIGRDGSEPKIQRMGDRFAVEVKGRIHLDLAPVVRHTIRLPTYTLEAVYEAVFGKKKEKVYAEEIAEAWKSEEGLKRVAQYSMEDARATYELGREFFPMEVELAKLIGQSVWDVSRSSTGNLVEWYLLRVAYERNELAPNKPGGEEYQRRMRSSYIGGYVKEPEKGLWESIAYLDFRSSAGSIIVTHNVSPDTLEKECKNYDVAPIVGYRFCKDFKGFIPSILEDLIETRQKVKRKMKATIDPIEKKMLDYRQRALKILANSYYGYDGYPKARWYSKECAESVTAWGRHYIETTIKEAEKFGFKVLYADTDGFFATIPNEKPETIKSKAKKFLKHINEKLPGMLELEYEGFYLRGFFVTKKKYALIDEDGHITTRGLEVVRRDWSEIAKETQAKVLEVILREGSIEKAAGIVKKVVEDLANYRVPVEKLIIHEQITRELKRYKATGPHVAIAKRLQARGIKVKPGTIISYVVLKGSKKISDRVILFDEYDSSRHKYDPDYYIHNQVLPAVLRILEAFGYKEKDLEYQRMKQTGLGAWLKMGKK

SEQ ID NO: 908 - protein, 773 aa, unidentified
  REGION 1..773: note = Description of Unknown: Synthetic polypeptide
MILDTDYITENGKPVIRIFKKEKGEFKIEYDRNFEPYIYALLEDDESIEDIKKITGERHGKKVRIIRVEKVKKKFLGEPIEVWKLVFEHPQDYPAIRDAIRSHPAVREIFEYDIPFAKRYLIDKGLVPMEGGEELKLLAFAIATFYHEGDEFAEGEILMISYADESGAKVITWKKIDLPYVEVVSTEREAIKRFLQVLREKDPDVLLTYNGDNFDFAYIKKRCEKLGLKFTIGRDGSEPKIQRMGDRFAVEVKGRIHLDLAPVVRHTIRLPTYTLEAVYEAVFGKKKEKVYAEEIAEAWKSEEGLKRVAQYSMEDARATYELGREFFPMEVELAKLIGQSVWDVSRSSTGNLVEWYLLRVAYERNELAPNKPGGEEYQRRMRSSYIGGYVKEPEKGLWESIAYLDFRSSAGSIIVTHNVSPDTLEKECKNYDVAPIVGYRFCKDFKGFIPSILEDLIETRQKVKRKMKATIDPIEKKMLDYRQRALKILANSYYGYQGYPKARWYSKECAESVTAWGRHYIETTIKEAEKFGFKVLYADTDGFFATIPNEKPETIKSKAKKFLKHINEKLPGMLELEYEGFYLRGFFVTKKKYALIDEDGHITTRGLEVVRRDWSEIAKETQAKVLEVILREGSIEKAAGIVKKVVEDLANYRVPVEKLIIHEQITRELKRYKATEPHVAIAKRLQARGIKVKPGTIISYVVLKGSKKISDRVILFDEYDSSRHKYDPDYYIHNQVLPAVLRILEAFGYKEKDLEYQRMKQTGLGAWLKMGKK

SEQ ID NO: 909 - protein, 773 aa, unidentified
  REGION 1..773: note = Description of Unknown: Synthetic polypeptide
MILDTDYITENGKPVIRIFKKEKGEFKIEYDRNFEPYIYALLEDDESIEDIKKITGERHGKKVRIIRVEKVKKKFLGEPIEVWKLVFEHPQDVPAITDAIRSHPAVREIFEYDIPFAKRYLIDKGLVPMEGGEELKLLAFNIATFYHEGDEFAEGEILMISYADESGAKVITWKKIDLPYVEVVSTEREAIKRFLQVLREKDPDVLLTYNGDNFDFAYIKKRCEKLGLKFTIGRDGSEPKIQRMGDRFAVEVKGRIHLDLAPVVRHTIRLPTYTLEAVYEAVFGKKKEKVYAEEIAEAWKSEEGLKRVAQYSMEDARATYELGREFFPLEVELAKLIGQSVWDVSRSSTGNLVEWYLLRVAYERNELAPNKPGGEEYQRRMRSSYIGGYVKEPEKGLWESIAYLDFRSSAGSIIVTHNVSPDTLEKECKNYDVAPIVGYRFCKDFKGFIPSILEDLIETRQKVKRKMKATIDPIEKKMLDYRQRALKILANSYYGYQGYPKARWYSKECAESVTAWGRHYIETTIKEAEKFGFKVLYADTDGFFATIPNEKPETIKSKAKKFLKHINEKLPGMLELEYEGFYLRGFFVTKKKYALIDEDGHITTRGLEVVRRDWSEIAKETQAKVLEVILREGSIEKAAGIVKKVVEDLANYRVPVEKLIIHEQITRELKRYKATGPHVAIAKRLQARGIKVKPGTIISYVVLKGSKKISDRVILFDEYDSSRHKYDPDYYIHNQVLPAVLRILEAFGYKEKDLEYQRMKQTGLGAWLKMGKK

SEQ ID NO: 910 - protein, 773 aa, unidentified
  REGION 1..773: note = Description of Unknown: Synthetic polypeptide
MILDTDWITENGKPVIRIFKKEKGEFKIEYDRNFEPYIYALLEDDESIEDIKKITGERHGKKVRIIRVEKVKKKFLGEPIEVWKLVFEHPQDVPAIRDAIRSHPAVREIFEYDIPFAKRYLIDKGLVPMEGGEELKLLAFNIATFYHEGDEFAEGEILMISYADESGAKVITWKKIDLPYVEVVSTEREAIKRFLQVLREKDPDVLLTYNGDNFDFAYIKKRCEKLGLKFTIGRDGSEPKIQRMGDRFAVEVKGRIHLDLAPVVRHTIRLPTYTLEAVYEAVFGKKKEKVYAEEIAEAWKSEEGLKRVAQYSMEDARATYELGREFFPLEVELAKLIGQSVWDVSRSSTGNLVEWYLLRVAYERNELAPNKPGGEEYQRRMRSSYIGGYVKEPEKGLWESIAYLDFRSSAGSIIVTHNVSPDTLEKECKNYDVAPIVGYRFCKDFKGFIPSILEDLIETRQKVKRKMKATIDPIEKKMLDYRQRALKILANSYYGYQGYPKARWYSKECAESVTAWGRHYIETTIKEAEKFGFKVLYADTDGFFATIPNEKPETIKSKAKKFLKHINEKLPGMLELEYEGFYLRGFFVTKKKYALIDEDGHITTRGLEVVRRDWSEIAKETQAKVLEVILREGSIEKAAGIVKKVVEDLANYRVPVEKLIIHEQITRELKRYKATGPHVAIAKRLQARGIKVKPGTIISYVVLKGSKKISDRVILFDEYDSSRHKYDPDYYIHNQVLPAVLRILEAFGYKEKDLEYQRMKQTGLGAWLKMGKK

SEQ ID NO: 911 - protein, 773 aa, unidentified
  REGION 1..773: note = Description of Unknown: Synthetic polypeptide
MILDTDYITENGKPVIRIFKKEKGEFKIEYDRNFEPYIYALLEDDESIEDIKKITGERHGKKVRIIRVEKVKKKFLGEPIEVWKLVFEHPQDVPAIRDAIRSHPAVREIFEYDIPFAKRYLIDKGLVPMEGGEELKLLAFNIATFYHEGDEFAEGEILMISYADESGAKVITWKKIDLPYVEVVSTEREAIKRFLQVLREKDPDVLLTYNGDNFDFAYIKKRCEKLGLKFTIGRDGSEPKIQRMGDRFAVEVKGRIHLDLAPVVRHTIRLPTYTLEAVYEAVFGKKKEKVYAEEIAEAWKSEEGLKRVAQYSMEDARATYELGREFFPLEVELAKLIGQSVWDVSRSSTGNLVEWYLLRVAYERNELAPNKPGGEEYQRRMRSSYIGGYVKEPEKGLWESIAYLDFRSSAGSIIVTHNVSPDTLEKECKNYDVAPIVGYRFCKDFKGFIPSILEDLIETRQKVKRKMKATIDPIEKKMLDYRQRALKILANSYYGYQGYPKARWYSKECAESVTAWGRHYIETTIKEAEKFGFKVLYADTDGFFATIPNEKPETIKSKAKKFLKHINEKLPGMLELEYEGFYLRGFFVTKKKYALIDEDGHITTRGLEVVRRDWSEIAKETQAKVLEVILREGSIEKAAGIVKKVVEDLANYRVPVEKLIIHELITRELKRYKATGPHVAIAKRLQARGIKVKPGTIISYVVLKGSKKISDRVILFDEYDSSRHKYDPDYYIHNQVLPAVLRILEAFGYKEKDLEYQRMKQTGLGAWLKAGKK

SEQ ID NO: 912 - protein, 773 aa, unidentified
  REGION 1..773: note = Description of Unknown: Synthetic polypeptide
MILDTDYITENGKPVIRIFKKEKGEFKIEYDRNFEPYIYALLEDDESIEDIKKITGERHGKKVRIIRVEKVKKKFLGEPIEVWKLVFEHPQDYPAIRDAIRSHPAVREIFEYDIPFAKRYLIDKGLVPMEGGEELKLLAFAIATFYHEGDEFAEGEILMISYADESGAKVITWKKIDLPYVEVVSTEREAIKRFLQVLREKDPDVLLTYNGDNFDFAYIKKRCEKLGLKFTIGRDGSEPKIQRMGDRFAVEVKGRIHLDLAPVVRHTIRLPTYTLEAVYEAVFGKKKEQVYAEEIAEAWKSEEGLKRVAQYSMEDARATYELGREFFPMEVELAKLIGQSVWDVSRSSTGNLVEWYLLRVAYERNELAPNKPGGEEYQRRMRSSYIGGYVKEPEKGLWESIAYLDFRSSAGSIIVTHNVSPDTLEKECKNYDVAPIVGYRFCKDFKGFIPSILEDLIETRQKVKRKMKATIDPIEKKMLDYRQRALKILANSYYGYQGYPKARWYSKENAERVTAWGRHYIETTIKEAEKFGFKVLYADTDGFFATIPNEKPETIKSKAKKFLKHINEKLPGMLELEYEGFYLRGFFVTKKKYALIDEDGHITTRGLEVVRRDWSEIAKETQAKVLEVILREGSIEKAAGIVKKVVEDLANYRVPVEKLIIHEQITRELKRYKATGPHVAIAKRLQARGIKVKPGTIISYVVLKGSKKISDRVILFDEYDSSRHKYDPDYYIHNQVLPAVLRILEAFGYKEKDLEYQRMKQTGLGAWLKMGKK

SEQ ID NO: 913 - protein, 773 aa, unidentified
  REGION 1..773: note = Description of Unknown: Synthetic polypeptide
MILDTDWITENGKPVIRIFKKEKGEFKIEYDRNFEPYIYALLEDDESIEDIKKITGERHGKKVRIIRVEKVKKKFLGEPIEVWKLVFEHPQDYPAIRDAIRSHPAVREIFEYDIPFAKRYLIDKGLVPMEGGEELKLLAFAIATFYHEGDEFAEGEILMISYADESGAKVITWKKIDLPYVEVVSTEREAIKRFLQVLREKDPDVLLTYNGDNFDFAYIKKRCEKLGLKFTIGRDGSEPKIQRMGDRFAVEVKGRIHLDLAPVVRHTIRLPTYTLEAVYEAVFGKKKEKVYAEEIAEAWKSEEGLKRVAQYSMEDARATYELGREFFPMEVELAKLIGQSVWDVSRSSTGNLVEWYLLRVAYERNELAPNKPGGEEYQRRMRSSYIGGYVKEPEKGLWESIAYLDFRSSAGSIIVTHNVSPDTLEKECKNYDVAPIVGYRFCKDFKGFIPSILEDLIETRQKVKRKMKATIDPIEKKMLDYRQRALKILANSYYGYQGYPKARWYSKECAESVTAWGRHYIETTIKEAEKFGFKVLYADTDGFFATIPNEKPETIKSKAKKFLKHINEKLPGMLELEYEGFYLRGFFVTKKKYALIDEDGHITTRGLEVVRRDWSEIAKETQAKVLEVILREGSIEKAAGIVKKVVEDLANYRVPVEKLIIHEQITRELKRYKATGPHVAIAKRLQARGIKVKPGTIISYVVLKGSKKISDRVILFDEYDSSRHKYDPDYYIHNQVLPAVLRILEAFGYKEKDLEYQRMKQTGLGAWLKMGKK

SEQ ID NO: 914 - protein, 773 aa, unidentified
  REGION 1..773: note = Description of Unknown: Synthetic polypeptide
MILDTDYITENGKPVIRIFKKEKGEFKIEYDRNFEPYIYALLEDDESIEDIKKITGERHGKKVRIIRVEKVKKKFLGEPIEVWKLVFEHPQDVPAIRDAIRSHPAVREIFEYDIPFAKRYLIDKGLVPMEGGEELKLLAFNIATFYHEGDEFAEGEILMISYADESGAKVITWKKIDLPYVEVVSTEREAIKRFLQVLREKDPDVLLTYNGDNFDFAYIKKRCEKLGLKFTIGRDGSEPKIQRMGDRFAVEVKGRIHLDLAPVVRHTIRLPTYTLEAVYEAVFGKKKEKVYAEEIAEAWKSEEGLKRVAQYSMEDARATYELGREFFPLEVELAKLIGQSVWDVSRSSTGNLVEWYLLRVAYERNELAPNRPGGEEYQRRMRSSYIGGYVKEPEKGLWESIAYLDFRSSAGSIIVTHNVSPDTLEKECKNYDVAPIVGYRFCKDFKGFIPSILEDLIETRQKVKRKMKATIDPIEKKMLDYRQRALKILANSYYGYQGYPKARWYSKECAESVTAWGRHYIETTIKEAEKFGFKVLYADTDGFFATIPNEKPETIKSKAKKFLKHINEKLPGMLELEYEGFYLRGFFVTKKKYALIDEDGHITTRGLEVVRRDWSEIAKETQAKVLEVILREGSIEKAAGIVKKVVEDLANYRVPVEKLIIHEQITRELKRYKATGPHVAIAKRLQARGIKVKPGTIISYVVLKGSKKISDRVILFDEYDSSRHKYDPDYYIHNQVLPAVLRILEAFGYKEKDLEYQRMKQTGLGAWLKMGKK

SEQ ID NO: 915 - protein, 773 aa, unidentified
  REGION 1..773: note = Description of Unknown: Synthetic polypeptide
MILDTDYITENGKPVIRIFKKEKGEFKIEYDRNFEPYIYALLEDDESIEDIKKITGERHGKKVRIIRVEKVKKKFLGEPIEVWKLVFEHPQDYPAIRDAIRSHPAVREIFEYDIPFAKRYLIDKGLVPMEGGEELKLLAFAIATFYHEGDEFAEGEILMISYADESGAKVITWKKIDLPYVEVVSTEREAIKRFLQVLREKDPDVLLTYNGDNFDFAYIKKRCEKLGLKFTIGRDGSEPKIQRMGDRFAVEVKGRIHLDLAPVVRHTIRLPTYTLEAVYEAVFGKKKEKVYAEEIAEAWKSEEGLKRVAQYSMEDARATYELGREFFPMEVELAKLIGQSVWDVSRSSTGNLVEWYLLRVAYERNELAPNKPGGEEYQRRMRSSYIGGYVKEPEKGLWESIAYLDFRSSAGSIIVTHNVSPDTLEKECKNYDVAPIVGYRFCKDFKGFIPSILEDLIETRQKVKRKMKATIDPIEKKMLDYRQRALKILANSYYGYQGYPKARWYSKEAAESVTAWGRHYIETTIKEAEKFGFKVLYADTDGFFATIPNEKPETIKSKAKKFLKHINEKLPGMLELEYEGFYLRGFFVTKKKYALIDEDGHITTRGLEVVRRDWSEIAKETQAKVLEVILREGSIEKAAGIVKKVVEDLANYRVPVEKLIIHEQITRELKRYKATGPHVAIAKRLQARGIKVKPGTIISYVVLKGSKKISDRVILFDEYDSSRHKYDPDYYIHNQVLPAVLRILEAFGYKEKDLEYQRMKQTGLGAWLKMGKK

SEQ ID NO: 916 - protein, 773 aa, unidentified
  REGION 1..773: note = Description of Unknown: Synthetic polypeptide
MILDTDYITENGKPVIRIFKKEKGEFKIEYDRNFEPYIYALLEDDESIEDIKKITGERHGKKVRIIRVEKVKKKFLGEPIEVWKLVFEHPQDYPAIRDAIRSHPAVREIFEYDIPFAKRYLIDKGLVPMEGGEELKLLAFAIATFYHEGDEFAEGEILMISYADESGAKVITWKKIDLPYVEVVSTEREAIKRFLQVLREKDPDVLLTYNGDNFDFAYIKKRCEKLGLKFTIGRDGSEPKIQRMGDRFAVEVKGRIHLDLAPVVRHTIRLPTYTLEAVYEAVFGKKKEKVYAEEIAEAWKSEEGLARVAQYSMEDARATYELGREFFPMEVELAKLIGQSVWDVSRSSTGNLVEWYLLRVAYERNELAPNKPGGEEYQRRMRSSYIGGYVKEPEKGLWESIAYLDFRSSAGSIIVTHNVSPDTLEKECKNYDVAPIVGYRFCKDFKGFIPSILEDLIETRQKVKRKMKATIDPIEKKMLDYRQRALKILANSYYGYQGYPKARWYSKECAESVTAWGRHYIETTIKEAEKFGFKVLYADTDGFFATIPNEKPETIKSKAKKFLKHINEKLPGMLELEYEGFYLRGFFVTKKKYALIDEDGHITTRGLEVVRRDWSEIAKETQAKVLEVILREGSIEKAAGIVKKVVEDLANYRVPVEKLIIHEQITRELKRYKATGPHVAIAKRLQARGIKVKPGTIISYVVLKGSKKISDRVILFDEYDSSRHKYDPDYYIHNQVLPAVLRILEAFGYKEKDLEYQRMKQTGLGAWLKMGKK

SEQ ID NO: 917 - protein, 773 aa, unidentified
  REGION 1..773: note = Description of Unknown: Synthetic polypeptide
MILDTDYITENGKPVIRIFKKEKGEFKIEYDRNFEPYIYALLEDDESIEDIKKITGERHGKKVRIIRVEKVKKKFLGEPIEVWKLVFEHPQDVPAIRDAIRSHPAVREIFEYDIPFAKRYLIDKGLVPMEGGEELKLLAFNIATFYHEGDEFAEGEILMISYADESGAKVITWKKIDLPYVEVVSTEREAIKRFLQVLREKDPDVLLTYNGDNFDFAYIKKRCEKLGLKFTIGRDGSEPKIQRMGDRFAVEVKGRIHLDLAPVVRHTIRLPTYTLEAVYEAVFGKKKEKVYAEEIAEAFKSEEGLKRVAQYSMEDARATYELGREFFPLEVELAKLIGQSVWDVSRSSTGNLVEWYLLRVAYERNELAPNKPGGEEYQRRMRSSYIGGYVKEPEKGLWESIAYLDFRSSAGSIIVTHNVSPDTLEKECKNYDVAPIVGYRFCKDFKGFIPSILEDLIETRQKVKRKMKATIDPIEKKMLDYRQRALKILANSYYGYQGYPKARWYSKECAESVTAWGRHYIETTIKEAEKFGFKVLYADTDGFFATIPNEKPETIKSKAKKFLKHINEKLPGMLELEYEGFYLRGFFVTKKKYALIDEDGHITTRGLEVVRRDWSEIAKETQAKVLEVILREGSIEKAAGIVKKVVEDLANYRVPVEKLIIHEQITRELKRYKATGPHVAIAKRLQARGIKVKPGTIISYVVLKGSKKISDRVILFDEYDSSRHKYDPDYYIHNQVLPAVLRILEAFGYKEKDLEYQRMKQTGLGAWLKMGKK

SEQ ID NO: 918 - protein, 773 aa, unidentified
  REGION 1..773: note = Description of Unknown: Synthetic polypeptide
MILDTDYITENGKPVIRIFKKEKGEFKIEYDRNFEPYIYALLEDDESIEDIKKITGERHGKKVRIIRVEKVKKKFLGEPIEVWKLVFEHPQDYPAIRDAIRSHPAVREIFEYDIPFAKRYLIDKGLVPMEGGEELKLLAFAIATFYHEGDEFAEGEILMISYADESGAKVITWKKIDLPYVEVVSTEREAIKRFLQVLREKDPDVLLTYNGDNFDFAYIKKRCEKLGLKFTIGRDGSEPKIQRMGDRFAVEVKGRIHLDLAPVVRHTIRLPTYTLEAVYEAVFGKKKEKVYAEEIAEAWKSEEGLKRVAQYSMEDARATYELGREFFPMEVELAKLIGQSVWDVSRSSTGNLVEWYLLRVAYERNELAPNKPGGEEYQRRMRSSYIGGYVKEPEKGLWESIAYLDFRSSAGSIIVTHNVSPDTLEKECKNYDVAPIVGYRFCKDFKGFIPSILEDLIETRQKVKRKMKATIDPIEKKMLDYRQRALKILANSYYGYQGYPKARWYSKECAESVTAWGRHYIETTIKEAEKFGFKVLYADTDGFFATIPNEKPETIKSKAKKFLKHINEKLPGDLELEYEGFYLRGFFVTKKKYALIDEDGHITTRGLEVVRRDWSEIAKETQAKVLEVILREGSIEKAAGIVKKVVEDLANYRVPVEKLIIHEQITRELKRYKATGPHVAIAKRLQARGIKVKPGTIISYVVLKGSKKISDRVILFDEYDSSRHKYDPDYYIHNQVLPAVLRILEAFGYKEKDLEYQRMKQTGLGAWLKMGKK

SEQ ID NO: 919 - protein, 773 aa, unidentified; identical to SEQ ID NO: 49
  REGION 1..773: note = Description of Unknown: Synthetic polypeptide

SEQ ID NO: 920 - protein, 757 aa, unidentified
  REGION 1..757: note = Description of Unknown: Synthetic polypeptide
MILDTDYITENGKPVIRIFKKEKGEFKIEYDRNFEPYIYALLEDDESIEDIKKITGERHGKKVRIIRVEKVKKKFLGEPIEVWKLVFEHPQDVPAIRDAIRSHPAVREIFEYDIPFAKRYLIDKGLVPMEGGEELKLLAFAIATFYHEGDEFAEGEILMISYADESGAKVITWKKIDLPYVEVVSTEREAIKRFLQVLREKDPDVLLTYNGDNFDFAYIKKRCEKLGLKFTIGRDGSEPKIQRMGDRFAVEVKGRIHLDLAPVVRHTIRLPTYTLEAVYEAVFGKKKEKVYAEEIAEAWKSEEGLKRVAQYSMEDARATYELGREFFPMEVELAKLIGQSVWDVSRSSTGNLVEWYLLRVAYERNELAPNKPGGEEYQRRMRSSYIGGYVKEPEKGLWESIAYLDFRSSAGSIIVTHNVSPDTLEKECKNYDVAPIVGYRFCKDFKGFIPSILEDLIETRQKVKRKMKATIDPIEKKMLDYRQRALKILANSYYGYQGYPKARWYSKECAESVTAWGRHYIETTIKEAEKFGFKVLYADTDGFFATIPNEKPETIKSKAKKFLKHINEKLPGMLELEYEGFYLRGFFVTKKKYALIDEDGHITTRGLEVVRRDWSEIAKETQAKVLEVILREGSIEKAAGIVKKVVEDLANYRVPVEKLIIHEFITRELKRYKATGPHVAIAKRLQARGIKVKPGTIISYVVLKGSKKISDRVILFDEYDSSRHKYDPDYYIHNQVLPAVLRILEAFGYKEKDLEYQ

SEQ ID NO: 921 - protein, 773 aa, unidentified
  REGION 1..773: note = Description of Unknown: Synthetic polypeptide
MILDTDYITENGKPVIRIFKKEKGEFKIEYDRNFEPYIYALLEDDESIEDIKKITGERHGKKVRIIRVEKVKKKFLGEPIEVWKLVFEHPQDVPAIKDAIRSHPAVREIFEYDIPFAKRYLIDKGLVPMEGGEELKLLAFNIATFYHEGDEFAEGEILMISYADESGAKVITWKKIDLPYVEVVSTEREAIKRFLQVLREKDPDVLLTYNGDNFDFAYIKKRCEKLGLKFTIGRDGSEPKIQRMGDRFAVEVKGRIHLDLAPVVRHTIRLPTYTLEAVYEAVFGKKKEKVYAEEIAEAWKSEEGLKRVAQYSMEDARATYELGREFFPLEVELAKLIGQSVWDVSRSSTGNLVEWYLLRVAYERNELAPNKPGGEEYQRRMRSSYIGGYVKEPEKGLWESIAYLDFRSSAGSIIVTHNVSPDTLEKECKNYDVAPIVGYRFCKDFKGFIPSILEDLIETRQKVKRKMKATIDPIEKKMLDYRQRALKILANSYYGYQGYPKARWYSKECAESVTAWGRHYIETTIKEAEKFGFKVLYADTDGFFATIPNEKPETIKSKAKKFLKHINEKLPGMLELEYEGFYLRGFFVTKKKYALIDEDGHITTRGLEVVRRDWSEIAKETQAKVLEVILREGSIEKAAGIVKKVVEDLANYRVPVEKLIIHEQITRELKRYKATGPHVAIAKRLQARGIKVKPGTIISYVVLKGSKKISDRVILFDEYDSSRHKYDPDYYIHNQVLPAVLRILEAFGYKEKDLEYQRMKQTGLGAWLKMGKK

SEQ ID NO: 922 - protein, 773 aa, unidentified
  REGION 1..773: note = Description of Unknown: Synthetic polypeptide
MILDTDYITENGKPVIRIFKKEKGEFKIEYDRNFEPYIYALLEDDESIEDIKKITGERHGKKVRIIRVEKVKKKFLGEPIEVWKLVFEHPQDVPAIRDAIRSHPAVREIFEYDIPFAKRYLIDKGLVPMEGGEELKLLAFNIATFYHEGDEFAEGEILMISYADESGAKVITWKKIDLPYVEVVSTEREAIKRFLQVLREKDPDVLLTYNGDNFDFAYIKKRAEKLGLKFTIGRDGSEPKIQRMGDRFAVEVKGRIHLDLAPVVRHTIRLPTYTLEAVYEAVFGKKKEKVYAEEIAEAWKSEEGLKRVAQYSMEDARATYELGREFFPLEVELAKLIGQSVWDVSRSSTGNLVEWYLLRVAYERNELAPNKPGGEEYQRRMRSSYIGGYVKEPEKGLWESIAYLDFRSSAGSIIVTHNVSPDTLEKECKNYDVAPIVGYRFCKDFKGFIPSILEDLIETRQKVKRKMKATIDPIEKKMLDYRQRALKILANSYYGYQGYPKARWYSKEAAESVTAWGRHYIETTIKEAEKFGFKVLYADTDGFFATIPNEKPETIKSKAKKFLKHINEKLPGMLELEYEGFYLRGFFVTKKKYALIDEDGHITTRGLEVVRRDWSEIAKETQAKVLEVILREGSIEKAAGIVKKVVEDLANYRVPVEKLIIHEQITRELKRYKATGPHVAIAKRLQARGIKVKPGTIISYVVLKGSKKISDRVILFDEYDSSRHKYDPDYYIHNQVLPAVLRILEAFGYKEKDLEYQRMKQTGLGAWLKMGKK

SEQ ID NO: 923 - protein, 773 aa, unidentified
  REGION 1..773: note = Description of Unknown: Synthetic polypeptide
MILDTDYITENGKPVIRIFKKEKGEFKIEYDRNFEPYIYALLEDDESIEDIKKITGERHGKKVRIIRVEKVKKKFLGEPIEVWKLVFEHPQDVPAIRDAIRSHPAVREIFEYDIPFAKRYLIDKGLVPMEGGEELKLLAFRIATFYHEGDEFAEGEILMISYADESGAKVITWKKIDLPYVEVVSTEREAIKRFLQVLREKDPDVLLTYNGDNFDFAYIKKRCEKLGLKFTIGRDGSEPKIQRMGDRFAVEVKGRIHLDLAPVVRHTIRLPTYTLEAVYEAVFGKKKEKVYAEEIAEAWKSEEGLKRVAQYSMEDARATYELGREFFPLEVELAKLIGQSVWDVSRSSTGNLVEWYLLRVAYERNELAPNKPGGEEYQRRMRSSYIGGYVKEPEKGLWESIAYLDFRSSAGSIIVTHNVSPDTLEKECKNYDVAPIVGYRFCKDFKGFIPSILEDLIETRQKVKRKMKATIDPIEKKMLDYRQRALKILANSYYGYMGYPKARWYSKECAESVTAWGRHYIETTIKEAEKFGFKVLYADTDGFFATIPNEKPETIKSKAKKFLKHINEKLPGMLELEYEGFYLRGFFVTKKKYALIDEDGHITTRGLEVVRRDWSEIAKETQAKVLEVILREGSIEKAAGIVKKVVEDLANYRVPVEKLIIHEQITRELKRYKATGPHVAIAKRLQARGIKVKPGTIISYVVLKGSKKISDRVILFDEYDSSRHKYDPDYYIHNQVLPAVLRILEAFGYKEKDLEYQRMKQTGLGAWLKMGKK

SEQ ID NO: 924 - protein, 773 aa, unidentified
  REGION 1..773: note = Description of Unknown: Synthetic polypeptide
MILDTDYITENGKPVIRIFKKEKGEFKIEYDRNFEPYIYALLEDDESIEDIKKITGERHGKKVRIIRVEKVKKKFLGEPIEVWKLVFEHPQDYPAIRDAIRSHPAVREIFEYDIPFAKRYLIDKGLVPMEGGEELKLLAFAIATFYHEGDEFAEGEILMISYADESGAKVITWKKIDLPYVEVVSTEREAIKRFLQVLREKDPDVLLTYNGDNFDFAYIKKRCEKLGLKFTIGRDGSEPKIQRMGDRFAVEVKGRIHLDLAPVVRHTIRLPTYTLEAVYEAVFGKKKEKVYAEEIAEAWKSEEGLKRVAQYSMEDARATYELGREFFPMEVELAKLIGQSVWDVSRSSTGNLVEWYLLRVAYERNELAPNKPGGEEYQRRMRSSYIGGYVKEPEKGLWESIAYLDFRSSAGSIIVTHNVSPDTLEKECKNYDVAPIVGYRFCKDFKGFIPSILEDLIETRQKVKRKMKATIDPIEKKMLDYRQRALKILANSYYGYYGYPKARWYLKEAAESVTAWGRHYIETTIKEAEKFGFKVLYADTDGFFATIPNEKPETIKSKAKKFLKHINEKLPGMLELEYEGFYLRGFFVTKKKYALIDEDGHITTRGLEVVRRDWSEIAKETQAKVLEVILREGSIEKAAGIVKKVVEDLANYRVPVEKLIIHEQITRELKRYKATGPHVAIAKRLQARGIKVKPGTIISYVVLKGSKKISDRVILFDEYDSSRHKYDPDYYIHNQVLPAVLRILEAFGYKEKDLEYQRMKQTGLGAWLKMGKK

SEQ ID NO: 925 - protein, 773 aa, unidentified
  REGION 1..773: note = Description of Unknown: Synthetic polypeptide
MILDTDYITERGKPVIRIFKKEKGEFKIEYDRNFEPYIYALLEDDESIEDIKKITGERHGKKVRIIRVEKVKKKFLGEPIEVWKLVFEHPQDYPAIRDAIRSHPAVREIFEYDIPFAKRYLIDKGLVPMEGGEELKLLAFAIATFYHEGDEFAEGEILMISYADESGAKVITWKKIDLPYVEVVSTEREAIKRFLQVLREKDPDVLLTYNGDNFDFAYIKKRCEKLGLKFTIGRDGSEPKIQRMGDRFAVEVKGRIHLDLAPVVRHTIRLPTYTLEAVYEAVFGKKKEKVYAEEIAEAWKSEEGLKRVAQYSMEDARATYELGREFFPMEVELAKLIGQSVWDVSRSSTGNLVEWYLLRVAYERNELAPNKPGGEEYQRRMRSSYIGGYVKEPEKGLWESIAYLDFRSSAGSIIVTHNVSPDTLEKECKNYDVAPIVGYRFCKDFKGFIPSILEDLIETRQKVKRKMKATIDPIEKKMLDYRQRALKILANSYYGYQGYPKARWYSKECAESVTAWGRHYIETTIKEAEKFGFKVLYADTDGFFATIPNEKPETIKSKAKKFLKHINEKLPGMLELEYEGFYLRGFFVTKKKYALIDEDGHITTRGLEVVRRDWSEIAKETQAKVLEVILREGSIEKAAGIVKKVVEDLANYRVPVEKLIIHEQITRELKRYKATGPHVAIAKRLQARGIKVKPGTIISYVVLKGSKKISDRVILFDEYDSSRHKYDPDYYIHNQVLPAVLRILEAFGYKEKDLEYQRMKQTGLGAWLKMGKK

SEQ ID NO: 926 - protein, 773 aa, unidentified
  REGION 1..773: note = Description of Unknown: Synthetic polypeptide
MILDTDYITENGKPVIRIFKKEKGEFKIEYDRNFEPYIYALLEDDESIEDIKKITGERHGKKVRIIRVEKVKKKFLGEPIEVWKLVFEHPQDYPAIRDAIRSHPAVREIFEYDIPFAKRYLIDKGLVPMEGGEELKLLAFAIATFYHEGDEFAEGEILMISYADESGAKVITWKKIDLPYVEVVSTEREAIKRFLQVLREKDPDVLLTYNGDNFDFAYIKKRCEKLGLKFTIGRDGSEPKIQRMGDRFAVEVKGRIHLDLAPVVRHTIRLPTYTLEAVYEAVFGKKKEKVNAEEIAEAWKSEEGLKRVAQYSMEDARATYELGREFFPMEVELAKLIGQSVWDVSRSSTGNLVEWYLLRVAYERNELAPNKPGGEEYQRRMRSSYIGGYVKEPEKGLWESIAYLDFRSSAGSIIVTHNVSPDTLEKECKNYDVAPIVGYRFCKDFKGFIPSILEDLIETRQKVKRKMKATIDPIEKKMLDYRQRALKILANSYYGYQGYPKARWYSKECAESVTAWGRHYIETTIKEAEKFGFKVLYADTDGFFATIPNEKPETIKSKAKKFLKHINEKLPGMLELEYEGFYLRGFFVTKKKYALIDEDGHITTRGLEVVRRDWSEIAKETQAKVLEVILREGSIEKAAGIVKKVVEDLANYRVPVEKLIIHEQITRELKRYKATGPHVAIAKRLQARGIKVKPGTIISYVVLKGSKKISDRVILFDEYDSSRHKYDPDYYIHNQVLPAVLRILEAFGYKEKDLEYQRMKQTGLGAWLKMGKK

SEQ ID NO: 927 - protein, 773 aa, unidentified
  REGION 1..773: note = Description of Unknown: Synthetic polypeptide
MILDTDYITENGKPVIRIFKKEKGEFKIEYDRNFEPYIYALLEDDESIEDIKKITGERHGKKVRIIRVEKVKKKFLGEPIEVWKLVFEHPQDYPAIRDAIRSHPAVREIFEYDIPFAKRYLIDKGLVPMEGGEELKLLAFAIATFYHEGDEFAEGEILMISYADESGAKVITWKKIDLPYVEVVSTEREAIKRFLQVLREKDPDVLLTYNGDNFDFAYIKKRCEKLGLKFTIGRDGSEPKIQRMGDRFAVEVKGRIHLDLAPVVRHTIRLPTYTLEAVYEAVFGKKKEKVYAEEIAEAWKSEEGLKRVAQYSMEDARATYELGREFFPMEVELAKLIGQSVWDVSRSSTGNLVEWYLLRVAYERNELAPNKPGGEEYQRRMRSSYIGGYVKEPEKGLWESIAYLDFRSSAGSIIVTHNVSPDTLEKECKNYDVAPIVGYRFCKDFKGFIPSILEDLIETRQKVKRKMKATIDPIEKKMLDYRQRALKILANSYYGYQFYPKARWYSKECAESVTAWGRHYIETTIKEAEKFGFKVLYADTDGFFATIPNEKPETIKSKAKKFLKHINEKLPGMLELEYEGFYLRGFFVTKKKYALIDEDGHITTRGLEVVRRDWSEIAKETQAKVLEVILREGSIEKAAGIVKKVVEDLANYRVPVEKLIIHEQITRELKRYKATGPHVAIAKRLQARGIKVKPGTIISYVVLKGSKKISDRVILFDEYDSSRHKYDPDYYIHNQVLPAVLRILEAFGYKEKDLEYQRMKQTGLGAWLKMGKK

SEQ ID NO: 928 - protein, 773 aa, unidentified
  REGION 1..773: note = Description of Unknown: Synthetic polypeptide
MILDTDYITENGKPVIRIFKKEKGEFKIEYDRNFEPYIYALLEDDESIEDIKKITGERHGKKVRIIRVEKVKKKFLGEPIEVWKLVFEHPQDYPAIRDAIRSHPAVREIFEYDIPFAKRYLIDKGLVPMEGGEELKLLAFAIATFYHEGDEFAEGEILMISYADESGAKVITWKKIDLPYVEVVSTEREAIKRFLQVLREKDPDVLLTYNGDNFDFAYIKKRCEKLGLKFTIGRDGSEPKIQRMGDRFAVEVKGRIHLDLAPVVRHTIRLPTYTLEAVYEAVFGKKKEKVYAEEIAEAWKSEEGLKRVAQYSMEDARATYELGREFFPMEVELAKLIGQSVWDVSRSSTGNLVEWYLLRVAYERNELAPNKPGGEEYQRRMRSSYIGGYVKEPEKGLWESIAYLDFRSSAGSIIVTHNVSPDTLEKECKNYDVAPIVGYRFCKDFKGFIPSILEDLIETRQKVKRKMKATIDPIEKKMLDYRQRALKILANSYYGYQGYPKARWYSKECAESVTAWGRHYIETTIKEAEKFGFKVLYADTDGFFATIPNEKPETIKSKAKKFLKHINEKLPGRLELEYEGFYLRGFFVTKKKYALIDEDGHITTRGLEVVRRDWSEIAKETQAKVLEVILREGSIEKAAGIVKKVVEDLANYRVPVEKLIIHEQITRELKRYKATGPHVAIAKRLQARGIKVKPGTIISYVVLKGSKKISDRVILFDEYDSSRHKYDPDYYIHNQVLPAVLRILEAFGYKEKDLEYQRMKQTGLGAWLKMGKK

SEQ ID NO: 929 - protein, 773 aa, unidentified
  REGION 1..773: note = Description of Unknown: Synthetic polypeptide
MILDTDYITENGKPVIRIFKKEKGEFKIEYDRNFEPYIYALLEDDESIEDIKKITGERHGKKVRIIRVEKVKKKFLGEPIEVWKLVFEHPQDVPAIRDAIRSHPAVREIFEYDIPFAKRYLIDKGLVPMEGGEELKLLAFAIATFYHEGDEFAEGEILMISYADESGAKVITWKKIDLPYVEVVSTEREAIKRFLQVLREKDPDVLLTYNGDNFDFAYIKKRKEKLGLKFTIGRDGSEPKIQRMGDRFAVEVKGRIHLDLAPVVRHTIRLPTYTLEAVYEAVFGKKKEKVYAEEIAEAWKSEEGLKRVAQYSMEDARATYELGREFFPMEVELAKLIGQSVWDVSRSSTGNLVEWYLLRVAYERNELAPNKPGGEEYQRRMRSSYIGGYVKEPEKGLWESIAYLDFRSSAGSIIVTHNVSPDTLEKECKNYDVAPIVGYRFCKDFKGFIPSILEDLIETRQKVKRKMKATIDPIEKKMLDYRQRALKILANSYYGYQGYPKARWYSKECAESVTAWGRHYIETTIKEAEKFGFKVLYADTDGFFATIPNEKPETIKSKAKKFLKHINEKLPGMLELEYEGFYLRGFFVTKKKYALIDEDGHITTRGLEVVRRDWSEIAKETQAKVLEVILREGSIEKAAGIVKKVVEDLANYRVPVEKLIIHEQITRELKDYKATGPHVAIAKRLQARGIKVKPGTIISYVVLKGSKKISDRVILFDEYDSSRHKYDPDYYIHNQVLPAVLRILEAFGYKEKDLEYQRMKQTGLGAWLKMGKK

SEQ ID NO: 930 - protein, 773 aa, unidentified
  REGION 1..773: note = Description of Unknown: Synthetic polypeptide
MILDTDYITENGKPVIRIFKKEKGEFKIEYDRNFEPYIYALLEDDESIEDIKKITGERHGKKVRIIRVEKVKKKFLGEPIEVWKLVFEHPQDYPAIRDAIRSHPAVREIFEYDIPFAKRYLIDKGLVPMEGGEELKLLAFAIATFYHEGDEFAEGEILMISYADESGAKVITWKKIDLPYVEVVSTEREAIKRFLQVLREKDPDVLLTYNGDNFDFAYIKKRCEKLGLKFTIGRDGSEPKIQRMGDRFAVEVKGRIHLDLAPVVRHTIRLPTYTLEAVYEAVFGKKKEQVYAEEIAEAWKSEEGLKRVAQYSMEDARATYELGREFFPMEVELAKLIGQSVWDVSRSSTGNLVEWYLLRVAYERNELAPNKPGGEEYQRRMRSSYIGGYVKEPEKGLWESIAYLDFRSSAGSIIVTHNVSPDTLEKECKNYDVAPIVGYRFCKDFKGFIPSILEDLIETRQKVKRKMKATIDPIEKKMLDYRQRALKILANSYYGYQGYPKARWYSKEQAEFVTAWGRHYIETTIKEAEKFGFKVLYADTDGFFATIPNEKPETIKSKAKKFLKHINEKLPGMLELEYEGFYLRGFFVTKKKYALIDEDGHITTRGLEVVRRDWSEIAKETQAKVLEVILREGSIEKAAGIVKKVVEDLANYRVPVEKLIIHEQITRELKRYKATGPHVAIAKRLQARGIKVKPGTIISYVVLKGSKKISDRVILFDEYDSSRHKYDPDYYIHNQVLPAVLRILEAFGYKEKDLEYQRMKQTGLGAWLKMGKK

SEQ ID NO: 931 - protein, 757 aa, unidentified
  REGION 1..757: note = Description of Unknown: Synthetic polypeptide
MILDTDYITENGKPVIRIFKKEKGEFKIEYDRNFEPYIYALLEDDESIEDIKKITGERHGKKVRIIRVEKVKKKFLGEPIEVWKLVFEHPQDVPAIRDAIRSHPAVREIFEYDIPFAKRYLIDKGLVPMEGGEELKLLAFKIATFYHEGDEFAEGEILMISYADESGAKVITWKKIDLPYVEVVSTEREAIKRFLQVLREKDPDVLLTYNGDNFDFAYIKKRCEKLGLKFTIGRDGSEPKIQRMGDRFAVEVKGRIHLDLAPVVRHTIRLPTYTLEAVYEAVFGKKKEKVYAEEIAEAWKSEEGLKRVAQYSMEDARATYELGREFFPLEVELAKLIGQSVWDVSRSSTGNLVEWYLLRVAYERNELAPNKPGGEEYQRRMRSSYIGGYVKEPEKGLWESIAYLDFRSSAGSIIVTHNVSPDTLEKECKNYDVAPIVGYRFCKDFKGFIPSILEDLIETRQKVKRKMKATIDPIEKKMLDYRQRALKILANSYYGYQGYPKARWYSKECAESVTAWGRHYIETTIKEAEKFGFKVLYADTDGFFATIPNEKPETIKSKAKKFLKHINEKLPGMLELEYEGFYLRGFFVTKKKYALIDEDGHITTRGLEVVRRDWSEIAKETQAKVLEVILREGSIEKAAGIVKKVVEDLANYRVPVEKLIIHEQITRELKRYKATGPHVAIAKRLQARGIKVKPGTIISYVVLKGSKKISDRVILFDEYDSSRHKYDPDYYIHNQVLPAVLRILEAFGYKEKDLEYQ

SEQ ID NO: 932 - protein, 773 aa, unidentified
  REGION 1..773: note = Description of Unknown: Synthetic polypeptide
MILDTDYITENGKPVIRIFKKEKGEFKIEYDRNFEPYIYALLEDDESIEDIKKITGERHGKKVRIIRVEKVKKKFLGEPIEVWKLVFEHPQDYPAIRDAIRSHPAVREIFEYDIPFAKRYLIDKGLVPMEGGEELKLLAFAIATFYHEGDEFAEGEILMISYADESGAKVITWKKIDLPYVEVVSTEREAIKRFLQVLREKDPDVLLTYNGDNFDFAYIKKRCEKLGLKFTIGRDGSEPKIQRMGDRFAVEVKGRIHLDLAPVVRHTIRLPTYTLEAVYEAVFGKKKEKVYAEEIAEAWKSEEGLKRVAQYSMEDARATYELGREFFPMEVELAKLIGQSVWDVSRSSTGNLVEWYLLRVAYERNELAPNKPGGEEYQRRMRSSYIGGYVKEPEKGLWESIAYLDFRSSAGSIIVTHNVSPDTLEKECKNYDVAPIVGYRFCKDFKGFIPSILEDLIETRQKVKRKMKATIDPIEKKMLDYRQRALKILANSYYGYQGYPKARWYSAECAESVTAWGRHYIETTIKEAEKFGFKVLYADTDGFFATIPNEKPETIKSKAKKFLKHINEKLPGMLELEYEGFYLRGFFVTKKKYALIDEDGHITTRGLEVVRRDWSEIAKETQAKVLEVILREGSIEKAAGIVKKVVEDLANYRVPVEKLIIHEQITRELKRYKATGPHVAIAKRLQARGIKVKPGTIISYVVLKGSKKISDRVILFDEYDSSRHKYDPDYYIHNQVLPAVLRILEAFGYKEKDLEYQRMKQTGLGAWLKMGKK

SEQ ID NO: 933 - protein, 773 aa, unidentified
  REGION 1..773: note = Description of Unknown: Synthetic polypeptide
MILDTDYITENGKPVIRIFKKEKGEFKIEYDRNFEPYIYALLEDDESIEDIKKITGERHGKKVRIIRVEKVKKKFLGEPIEVWKLVFEHPQDYPAIRDAIRSHPAVREIFEYDIPFAKRYLIDKGLVPMEGGEELKLLAFAIATFYHEGDEFAEGEILMISYADESGAKVITWKKIDLPYVEVVSTEREAIKRFLQVLREKDPDVLLTYNGDNFDFSYIKKRCEKLGLKFTIGRDGSEPKIQRMGDRFAVEVKGRIHLDLAPVVRHTIRLPTYTLEAVYEAVFGKKKEKVYAEEIAEAWKSEEGLKRVAQYSMEDARATYELGREFFPMEVELAKLIGQSVWDVSRSSTGNLVEWYLLRVAYERNELAPNKPGGEEYQRRMRSSYIGGYVKEPEKGLWESIAYLDFRSSAGSIIVTHNVSPDTLEKECKNYDVAPIVGYRFCKDFKGFIPSILEDLIETRQKVKRKMKATIDPIEKKMLDYRQRALKILANSYYGYQGYPKARWYSKECAESVTAWGRHYIETTIKEAEKFGFKVLYADTDGFFATIPNEKPETIKSKAKKFLKHINEKLPGMLELEYEGFYLRGFFVTKKKYALIDEDGHITTRGLEVVRRDWSEIAKETQAKVLEVILREGSIEKAAGIVKKVVEDLANYRVPVEKLIIHEQITRELKRYKATGPHVAIAKRLQARGIKVKPGTIISYVVLKGSKKISDRVILFDEYDSSRHKYDPDYYIHNQVLPAVLRILEAFGYKEKDLEYQRMKQTGLGAWLKMGKK

SEQ ID NO: 934 - protein, 773 aa, unidentified
  REGION 1..773: note = Description of Unknown: Synthetic polypeptide
FILDTDYITENGKPVIRIFKKEKGEFKIEYDRNFEPYIYALLEDDESIEDIKKITGERHGKKVRIIRVEKVKKKFLGEPIEVWKLVFEHPQDYPAIRDAIRSHPAVREIFEYDIPFAKRYLIDKGLVPFEGGEELKLLAFAIATFYHEGDEFAEGEILMISYADESGAKVITWKKIDLPYVEVVSTEREAIKRFLQVLREKDPDVLLTYNGDNFDFAYIKKRCEKLGLKFTIGRDGSEPKIQRMGDRFAVEVKGRIHLDLAPVVRHTIRLPTYTLEAVYEAVFGKKKEKVYAEEIAEAWKSEEGLKRVAQYSMEDARATYELGREFFPMEVELAKLIGQSVWDVSRSSTGNLVEWYLLRVAYERNELAPNKPGGEEYQRRMRSSYIGGYVKEPEKGLWESIAYLDFRSSAGSIIVTHNVSPDTLEKECKNYDVAPIVGYRFCKDFKGFIPSILEDLIETRQKVKRKMKATIDPIEKKMLDYRQRALKILANSYYGYQGYPKARWYSKECAESVTAWGRHYIETTIKEAEKFGFKVLYADTDGFFATIPNEKPETIKSKAKKFLKHINEKLPGMLELEYEGFYLRGFFVTKKKYALIDEDGHITTRGLEVVRRDWSEIAKETQAKVLEVILREGSIEKAAGIVKKVVEDLANYRVPVEKLIIHEQITRELKRYKATGPHVAIAKRLQARGIKVKPGTIISYVVLKGSKKISDRVILFDEYDSSRHKYDPDYYIHNQVLPAVLRILEAFGYKEKDLEYQRMKQTGLGAWLKMGKK

SEQ ID NO: 935 - protein, 757 aa, unidentified
  REGION 1..757: note = Description of Unknown: Synthetic polypeptide
MILDTDYITENGKPVIRIFKKEKGEFKIEYDRNFEPYIYALLEDDESIEDIKKITGERHGKKVRIIRVEKVKKKFLGEPIEVWKLVFEHPQDVPAIRDAIRSHPAVREIFEYDIPFAKRYLIDKGLVPMEGGEELKLLAFAIATFYHEGDEFAEGEILMISYADESGAKVITWKKIDLPYVEVVSTEREAIKRFLQVLREKDPDVLLTYNGDNFDFAYIKKRCEKLGLKFTIGRDGSEPKIQRMGDRFAVEVKGRIHLDLAPVVRHTIRLPTYTLEAVYEAVFGKKKEKVYAEEIAEAWKSEEGLKRVAQYSMEDARATYELGREFFPMEVELAKLIGQSVWDVSRSSTGNLVEWYLLRVAYERNELAPNKPGGEEYQRRMRSSYIGGYVKEPEKGLWESIAYLDFRSSAGSIIVTHNVSPDTLEKECKNYDVAPIVGYRFCKDFKGFIPSILEDLIETRQKVKRKMKATIDPIEKKMLDYRQRALKILANSYYGYQGYPKARWYSKECAESVTAWGRHYIETTIKEAEKFGFKVLYADTDGFFATIPNEKPETIKSKAKKFLKHINEKLPGMLELEYEGFYLRGFFVTKKKYALIDEDGHITTRGLEVVRRDWSEIAKETQAKVLEVILREGSIEKAAGIVKKVVEDLANYRVPVEKLIIHEQITRKLKDYKATGPHVAIAKRLQARGYKVKPGTIISYVVLKGSKKISDRVILFDEYDSSRHKYDPDYYIHNQVLPAVLRILEAFGYKEKDLEYQ

SEQ ID NO: 936 - protein, 773 aa, unidentified
  REGION 1..773: note = Description of Unknown: Synthetic polypeptide
YILDTDYITENGKPVIRIFKKEKGEFKIEYDRNFEPYIYALLEDDESIEDIKKITGERHGKKVRIIRVEKVKKKFLGEPIEVWKLVFEHPQDYPAIRDAIRSHPAVREIFEYDIPFAKRYLIDKGLVPMEGGEELKLLAFAIATFYHEGDEFAEGEILMISYADESGAKVITWKKIDLPYVEVVSTEREAIKRFLQVLREKDPDVLLTYNGDNFDFAYIKKRCEKLGLKFTIGRDGSEPKIQRMGDRFAVEVKGRIHLDLAPVVRHTIRLPTYTLEAVYEAVFGKKKEKVYAEEIAEAWKSEEGLKRVAQYSMEDARATYELGREFFPMEVELAKLIGQSVWDVSRSSTGNLVEWYLLRVAYERNELAPNKPGGEEYQRRMRSSYIGGYVKEPEKGLWESIAYLDFRSSAGSIIVTHNVSPDTLEKECKNYDVAPIVGYRFCKDFKGFIPSILEDLIETRQKVKRKMKATIDPIEKKMLDYRQRALKILANSYYGYQGYPKARWYSKECAESVTAWGRHYIETTIKEAEKFGFKVLYADTDGFFATIPNEKPETIKSKAKKFLKHINEKLPGMLELEYEGFYLRGFFVTKKKYALIDEDGHITTRGLEVVRRDWSEIAKETQAKVLEVILREGSIEKAAGIVKKVVEDLANYRVPVEKLIIHEQITRELKRYKATGPHVAIAKRLQARGIKVKPGTIISYVVLKGSKKISDRVILFDEYDSSRHKYDPDYYIHNQVLPAVLRILEAFGYKEKDLEYQRMKQTGLGAWLKMGKK

SEQ ID NO: 937 - protein, 773 aa, unidentified
  REGION 1..773: note = Description of Unknown: Synthetic polypeptide
MILDTDYITENGKPVIRIFKKEKGEFKIEYDRNFEPYIYALLEDDESIEDIKKITGERHGKKVRIIRVEKVKKKFLGEPIEVWKLVFEHPQDYPAIRDAIRSHPAVREIFEYDIPFAKRYLIDKGLVPMEGGEELKLLAFAIATFYHEGDEFAEGEILMISYADESGAKVITWKKIDLPYVEVVSTEREAIKRFLQVLREKDPDVLLTYNGDNFDFAYIKKRCEKLGLKFTIGRDGSEPKIQRMGDRFAVEVKGRIHLDLAPVVRHTIRLPTYTLEAVYEAVFGKKKEKVYAEEIAEAWKSEEGLKRVAQYSMEDARATYELGREFFPMEVELAKLIGQSVWDVSRSSTGNLVEWYLLRVAYERNELAPNKPGGEEYQRRMRSSYIGGYVKEPEKGLWESIAYLDFRSSAGSIIVTHNVSPDTLEKECKNYDVAPIVGYRFCKDFKGFIPSILEDLIETRQKVKRKMKATIDPIEKKMLDYRQRALKILANSYYGYQGYPKARWYSLECAESVTAWGRHYIETTIKEAEKFGFKVLYADTDGFFATIPNEKPETIKSKAKKFLKHINEKLPGMLELEYEGFYLRGFFVTKKKYALIDEDGHITTRGLEVVRRDWSEIAKETQAKVLEVILREGSIEKAAGIVKKVVEDLANYRVPVEKLIIHEQITRELKRYKATGPHVAIAKRLQARGIKVKPGTIISYVVLKGSKKISDRVILFDEYDSSRHKYDPDYYIHNQVLPAVLRILEAFGYKEKDLEYQRMKQTGLGAWLKMGKK

SEQ ID NO: 938 - protein, 757 aa, unidentified
  REGION 1..757: note = Description of Unknown: Synthetic polypeptide
MILDTDYITENGKPVIRIFKKEKGEFKIEYDRNFEPYIYALLEDDESIEDIKKITGERHGKKVRIIRVEKVKKKFLGEPIEVWKLVFEHPQDVPAIRDAIRSHPAVREIFEYDIPFAKRYLIDKGLVPMEGGEELKLLAFAIATFYHEGDEFAEGEILMISYADESGAKVITWKKIDLPYVEVVSTEREAIKRFLQVLREKDPDVLLTYNGDNFDFAYIKKRCEKLGLKFTIGRDGSEPKIQRMGDRFAVEVKGRIHLDLAPVVRHTIRLPTYTLEAVYEAVFGKKKEKVYAEEIAEAWKSEEGLKRVAQYSMEDARATYELGREFFPMEVELAKLIGQSVWDVSRSSTGNLVEWYLLRVAYERNELAPNKPGGEEYQRRMRSSYIGGYVKEPEKGLWESIAYLDFRSSAGSIIVTHNVSPDTLEKECKNYDVAPIVGYRFCKDFKGFIPSILEDLIETRQKVKRKMKATIDPIEKKMLDYRQRALKILANSYYGYQGYPKARWYSKECAESVTAWGRHYIETTIKEAEKFGFKVLYADTDGFFATIPNEKPETIKSKAKKFLKHINEKLPGMLELEYEGFYLRGFFVTKKKYALIDEDGHITTRGLEVVRRDWSEIAKETQAKVLEVILREGSIEKAAGIVKKVVEDLANYRVPVEKLIIHEQITRQLKDYKATGPHVAIAKRLQARGIKVKPGTIISYVVLKGSKKISDRVILFDEYDSSRHKYDPDYYIHNQVLPAVLRILEAFGYKEKDLEYQ

SEQ ID NO: 939 - protein, 773 aa, unidentified
  REGION 1..773: note = Description of Unknown: Synthetic polypeptide
MILDTDYITENGKPVIRIFKKEKGEFKIEYDRNFEPYIYALLEDDESIEDIKKITGERHGKKVRIIRVEKVKKKFLGEPIEVWKLVFEHPQDVPAIRDAIRSHPAVREIFEYDIPFAKRYLIDKGLVPMEGGEELKLLAFNIATFYHEGDEFAEGEILMISYADESGAKVITWKKIDLPYVEVVSTEREAIKRFLQVLREKDPDVLLTYNGDNFDFAYIKKRCEKLGLKFTIGRDGSEPKIQRMGDRFAVEVKGRIHLDLAPVVRHTIRLPTYTLEAVYEAVFGKKKEKVYAEEIAEAWKSEEGLKRVAQYSMEDARATYELGREFFPLEVELAKLIGQSVWDVSRSSTGNLVEWYLLRVAYERNELAPNKPGGEEYQRRMRSSYIGGYVKEPEKGLWESIAYLDFRSSAGSIIVTHNISPDTLEKECKNYDVAPIVGYRFCKDFKGFIPSILEDLIETRQKVKRKMKATIDPIEKKMLDYRQRALKILANSYYGYQGYPKARWYSKECAESVTAWGRHYIETTIKEAEKFGFKVLYADTDGFFATIPNEKPETIKSKAKKFLKHINEKLPGMLELEYEGFYLRGFFVTKKKYALIDEDGHITTRGLEVVRRDWSEIAKETQAKVLEVILREGSIEKAAGIVKKVVEDLANYRVPVEKLIIHEQITRRLKRYKATGPHVAIAKRLQARGIKVKPGTIISYVVLKGSKKISDRVILFDEYDSSRHKYDPDYYIHNQVLPAVLRILEAFGYKEKDLEYQRMKQTGLGAWLKMGKK

SEQ ID NO: 940 - protein, 773 aa, unidentified
  REGION 1..773: note = Description of Unknown: Synthetic polypeptide
MILDTDYITENGKPVIRIFKKEKGEFKIEYDRNFEPYIYALLEDDESIEDIKKITGERHGKKVRIIRVEKVKKKFLGEPIEVWKLVFEHPQDYPAIRDAIRSHPAVREIFEYDIPFAKRYLIDKGLVPMEGGEELKLLAFAIATFYHEGDEFAEGEILMISYADESGAKVITWKKIDLPYVEVVSTEREAIKRFLQVLREKDPDVLLTYNGDNFDFAYIKKRCEKLGLKFTIGRDGSEPKIQRMGDRFAVEVKGRIHLDLAPVVRHTIRLPTYTLEAVYEAVFGKKKEKVYAEEIAEAWKSEEGLKRVAQYSMEDARATYELGREFFPMEVELAKLIGQSVWDVSRSSTGNLVEWYLLRVAYERNELAPNKPGGEEYQRRMRSSYIGGYVKEPEKGLWESIAYLDFRSSAGSIIVTHNISPDTLEKECKNYDVAPIVGYRFCKDFKGFIPSILEDLIETRQKVKRKMKATIDPIEKKMLDYRQRALKILANSYYGYNGYPKARWYSKECAESVTAWGRHYIETTIKEAEKFGFKVLYADTDGFFATIPNEKPETIKSKAKKFLKHINEKLPGMLELEYEGFYLRGFFVTKKKYALIDEDGHITTRGLEVVRRDWSEIAKETQAKVLEVILREGSIEKAAGIVKKVVEDLANYRVPVEKLIIHEQITRELKRYKATGPHVAIAKRLQARGIKVKPGTIISYVVLKGSKKISDRVILFDEYDSSRHKYDPDYYIHNQVLPAVLRILEAFGYKEKDLEYQRMKQTGLGAWLKMGKK

SEQ ID NO: 941 - protein, 773 aa, unidentified
  REGION 1..773: note = Description of Unknown: Synthetic polypeptide
MILDTDYITENGKPVIRIFKKEKGEFKIEYDRNFEPYIYALLEDDESIEDIKKITGERHGKKVRIIRVEKVKKKFLGEPIEVWKLVFEHPQDVPAIRDAIRSHPAVREIFEYDIPFAKRYLIDKGLVPMEGGEELKLLAFNIATFYHEGDEFAEGEILMISYADESGAKVITWKKIDLPYVEVVSTEREAIKRFLQVLREKDPDVLLTYNGDNFDFAYIKKRCEKLGLKFTIGRDGSEPKIQRMGDRFAVEVKGRIHLDLAPVVRHTIRLPTYTLEAVYEAVFGKKKEKVYAEEIAEAWKSEEGLKRVAQYSMEDARATYELGREFFPLEVELAKLIGQSVWDVSRSSTGNLVEWYLLRVAYERNELAPNKPGGEEYQRRMRSSYIGGYVKEPEKGLWESIAYLDFRSSAGSIIVTHNVSPDTLEKECKNYDVAPIVGYRFCKDFKGFIPSILEDLIETRQKVKRKMKATIDPIEKKMLDYRQRALKILANSYYGYQGYPKARWYSKECAESVTAWGRHYIETTIKEAEKFGFKVLYADTDGFFATIPNEKPETIKSKAKKFLKHINEKLPGMLELEYEGFYLRGFFVTKKKYALIDEDGHITTRGLEVVRRQWSEIAKETQAKVLEVILREGSIEKAAGIVKKVVEDLANYRVPVEKLIIHEQITRELKRYKATGPHVAIAKRLQARGIKVKPGTIISYVVLKGSKKISDRVILFDEYDSSRHKYDPDYYIHNQVLPAVLRILEAFGYKEKDLEYQRMKQTGLGAWLKMGKK

SEQ ID NO: 942 - protein, 773 aa, unidentified
  REGION 1..773: note = Description of Unknown: Synthetic polypeptide
MILDTDYITENGKPVIRIFKKEKGEFKIEYDRNFEPYIYALLEDDESIEDIKKITGERHGKKVRIIRVEKVKKKFLGEPIEVWKLVFEHPQDYPAIRDAIRSHPAVREIFEYDIPFAKRYLIDKGLVPMEGGEELKLLAFAIATFYHEGDEFAEGEILMISYADESGAKVITWKKIDLPYVEVVSTEREAIKRFLQVLREKDPDVLLTYNGDNFDFAYIKKRCEKLGLKFTIGRDGSEPKIQRMGDRFAVEVKGRIHLDLAPVVRHTIRLPTYTLEAVYEAVFGKKKEKVYAEEIAEAWKSEEGLKRVAQYSMEDARATYELGREFFPMEVELAKLIGQSVWDVSRSSTGNLVEWYLLRVAYERNELAPNKPGGEEYQRRMRSSYIGGYVKEPEKGLWESIAYLDFRSSAGSIIVTHNVSPDTLEKECKNYDVAPIVGYRFCKDFKGFIPSILEDLIETRQKVKRKMKATIDPIEKKMLDYRQRALKILANSYYGYQGYPKARWYSKECAESVTAWGRHYIETTIKEAEKFGFKVLYADTDGFFATIPNEKPETIKSQAKKFLKHINEKLPGMLELEYEGFYLRGFFVTKKKYALIDEDGHITTRGLEVVRRDWSEIAKETQAKVLEVILREGSIEKAAGIVKKVVEDLANYRVPVEKLIIHEQITRELKRYKATGPHVAIAKRLQARGIKVKPGTIISYVVLKGSKKISDRVILFDEYDSSRHKYDPDYYIHNQVLPAVLRILEAFGYKEKDLEYQRMKQTGLGAWLKMGKK

SEQ ID NO: 943 - protein, 773 aa, unidentified
  REGION 1..773: note = Description of Unknown: Synthetic polypeptide
MILDTDYITENGKPVIRIFKKEKGEFKIEYDRNFEPYIYALLEDDESIEDIKKITGERHGKKVRIIRVEKVKKKFLGEPIEVWKLVFEHPQDVPAIRDAIRSHPAVREIFEYDIPFAKRYLIDKGLVPMEGGEELKLLAFNIATFYHEGDEFAEGEILMISYADESGAKVITWKKIDLPYVEVVSTEREAIKRFLQVLREKDPDVLLTYNGDNFDFAYIKKRCEKLGLKFTIGRDGSEPKIQRMGDRFAVEVKGRIHLDLAPVVRHTIRLPTYTLEAVYEAVFGKKKEKVYAEEIAEAWKSEEGLKRVAQYSAEDARATYELGREFFPLEVELAKLIGQSVWDVSRSSTGNLVEWYLLRVAYERNELAPNKPGGEEYQRRMRSSYIGGYVKEPEKGLWESIAYLDFRSSAGSIIVTHNVSPDTLEKECKNYDVAPIVGYRFCKDFKGFIPSILEDLIETRQKVKRKMKATIDPIEKKMLDYRQRALKILANSYYGYQGYPKARWYSKECAESVTAWGRHYIETTIKEAEKFGFKVLYADTDGFFATIPNEKPETIKSKAKKFLKHINEKLPGMLELEYEGFYLRGFFVTKKKYALIDEDGIITTRGLEVVRRDWSEIAKETQAKVLEVILREGSIEKAAGIVKKVVEDLANYRVPVEKLIIHEQITRELKRYKATGPHVAIAKRLQARGIKVKPGTIISYVVLKGSKKISDRVILFDEYDSSRHKYDPDYYIHNQVLPAVLRILEAFGYKEKDLEYQRMKQTGLGAWLKMGKK

SEQ ID NO: 944 - protein, 773 aa, unidentified
  REGION 1..773: note = Description of Unknown: Synthetic polypeptide
AILDTDYITENGKPVIRIFKKEKGEFKIEYDRNFEPYIYALLEDDESIEDIKKITGERHGKKVRIIRVEKVKKKFLGEPIEVWKLVFEHPQDVPAIRDAIRSHPAVREIFEYDIPFAKRYLIDKGLVPMEGGEELKLLAFNIATFYHEGDEFAEGEILMISYADESGAKVITWKKIDLPYVEVVSTEREAIKRFLQVLREKDPDVLLTYNGDNFDFAYIKKRCEKLGLKFTIGRDGSEPKIQRMGDRFAVEVKGRIHLDLAPVVRHTIRLPTYTLEAVYEAVFGKKKEKVYAEEIAEAWKSEEGLKRVAQYSAEDARATYELGREFFPLEVELAKLIGQSVWDVSRSSTGNLVEWYLLRVAYERNELAPNKPGGEEYQRRMRSSYIGGYVKEPEKGLWESIAYLDFRSSAGSIIVTHNVSPDTLEKECKNYDVAPIVGYRFCKDFKGFIPSILEDLIETRQKVKRKMKATIDPIEKKMLDYRQRALKILANSYYGYQGYPKARWYSKECAESVTAWGRHYIETTIKEAEKFGFKVLYADTDGFFATIPNEKPETIKSKAKKFLKHINEKLPGMLELEYEGFYLRGFFVTKKKYALIDEDGHITTRGLEVVRRDWSEIAKETQAKVLEVILREGSIEKAAGIVKKVVEDLANYRVPVEKLIIHEQITRELKRYKATGPHVAIAKRLQARGIKVKPGTIISYVVLKGSKKISDRVILFDEYDSSRHKYDPDYYIHNQVLPAVLRILEAFGYKEKDLEYQRMKQTGLGAWLKMGKK

SEQ ID NO: 945 - protein, 773 aa, unidentified
  REGION 1..773: note = Description of Unknown: Synthetic polypeptide
MILDTDYITENGKPVIRIFKKEKGEFKIEYDRNFEPYIYALLEDDESIEDIKKITGERHGKKVRIIRVEKVKKKFLGEPIEVWKLVFEHPQDYPAIRDAIRSHPAVREIFEYDIPFAKRYLIDKGLVPMEGGEELKLLAFAIATFYHEGDEFAEGEILMISYADESGAKVITWKKIDLPYVEVVSTEREAIKRFLQVLREKDPDVLLTYNGDNFDFAYIKKRCEKLGLKFTIGRDGSEPKIQRMGDRFAVEVKGRIHLDLAPVVRHTIRLPTYTLEAVYEAVFGKKKEKVYAEEIAEAWKSEEGLKRVAQYSVEDARATYELGREFFPMEVELAKLIGQSVWDVSRSSTGNLVEWYLLRVAYERNELAPNKPGGEEYQRRMRSSYIGGYVKEPEKGLWESIAYLDFRSSAGSIIVTHNVSPDTLEKECKNYDVAPIVGYRFCKDFKGFIPSILEDLIETRQKVKRKMKATIDPIEKKMLDYRQRALKILANSYYGYQGYPKARWYSKECAESVTAWGRHYIETTIKEAEKFGFKVLYADTDGFFATIPNEKPETIKSKAKKFLKHINEKLPGMLELEYEGFYLRGFFVTKKKYALIDEDGHITTRGLEVVRRDWSEIAKETQAKVLEVILREGSIEKAAGIVKKVVEDLANYRVPVEKLIIHEQITRELKRYKATGPHVAIAKRLQARGIKVKPGTIISYVVLKGSKKISDRVILFDEYDSSRHKYDPDYYIHNQVLPAVLRILEAFGYKEKDLEYQRDKQTGLGAWLKMGKK

SEQ ID NO: 946 - protein, 773 aa, unidentified
  REGION 1..773: note = Description of Unknown: Synthetic polypeptide
MILDTDYITENGKPVIRIFKKEKGEFKIEYDRNFEPYIYALLEDDESIEDIKKITGERHGKKVRIIRVEKVKKKFLGEPIEVWKLVFEHPQDYPAIRDAIRSHPAVREIFEYDIPFAKRYLIDKGLVPMEGGEELKLLAFAIATFYHEGDEFAEGEILMISYADESGAKVITWKKIDLPYVEVVSTEREAIKRFLQVLREKDPDVLLTYNGDNFDFAYIKKRCEKLGLKFTIGRDGSEPKIQRMGDRFAVEVKGRIHLDLAPVVRHTIRLPTYTLEAVYEAVFGKKKEKVYAEEIAEAWKSEEGLKRVAQYSMEDARATYELGREFFPMEVELAKLIGQSVWDVSRSSTGNLVEWYLLRVAYERNELAPNKPGGEEYQRRMRSSYIGGYVKEPEKGLWESIAYLDFRSSAGSIIVTHNVSPDTLEKECKNYDVAPIVGYRFCKDFKGFIPSILEDLIETRQKVKRKMKATIDPIEKKMLDYRQRALKILANSYYGYKGYPKARWYSKECAESVTAWGRHYIETTIKEAEKFGFKVLYADTDGFFATIPNEKPETIKSKAKKFLKHINEKLPGMLELEYEGFYLRGFFVTKKKYALIDEDGHITTRGLEVVRRDWSEIAKETQAKVLEVILREGSIEKAAGIVKKVVEDLANYRVPVEKLIIHEQITRELKRYKATGPHVAIAKRLQARGIKVKPGTIISYVVLKGSKKISDRVILFDEYDSSRHKYDPDYYIHNQVLPAVLRILEAFGYKEKDLEYQRMKQTGLGAWLKMGKK

SEQ ID NO: 947 - protein, 773 aa, unidentified
  REGION 1..773: note = Description of Unknown: Synthetic polypeptide
MILDTDYITENGKPVIRIFKKEKGEFKIEFDRNFEPYIYALLEDDESIEDIKKITGERHGKKVRIIRVEKVKKKFLGEPIEVWKLVFEHPQDYPAIRDAIRSHPAVREIFEYDIPFAKRYLIDKGLVPMEGGEELKLLAFAIATFYHEGDEFAEGEILMISYADESGAKVITWKKIDLPYVEVVSTEREAIKRFLQVLREKDPDVLLTYNGDNFDFAYIKKRCEKLGLKFTIGRDGSEPKIQRMGDRFAVEVKGRIHLDLAPVVRHTIRLPTYTLEAVYEAVFGKKKEKVYAEEIAEAWKSEEGLKRVAQYSMEDARATYELGREFFPMEVELAKLIGQSVWDVSRSSTGNLVEWYLLRVAYERNELAPNKPGGEEYQRRMRSSYIGGYVKEPEKGLWESIAYLDFRSSAGSIIVTHNVSPDTLEKECKNYDVAPIVGYRFCKDFKGFIPSILEDLIETRQKVKRKMKATIDPIEKKMLDYRQRALKILANSYYGYQGYPKARWYSKECAESVTAWGRHYIETTIKEAEKFGFKVLYADTDGFFATIPNEKPETIKSKAKKFLKHINEKLPGMLELEYEGFYLRGFFVTKKKYALIDEDGHITTRGLEVVRRDWSEIAKETQAKVLEVILREGSIEKAAGIVKKVVEDLANYRVPVEKLIIHEQITRELKRYKATGPHVAIAKRLQARGIKVKPGTIISYVVLKGSKKISDRVILFDEYDSSRHKYDPDYYIHNQVLPAVLRILEAFGYKEKDLEYQRMKQTGLGAWLKMGKK

SEQ ID NO: 948 - protein, 757 aa, unidentified
  REGION 1..757: note = Description of Unknown: Synthetic polypeptide
MILDTDYITENGKPVIRIFKKEKGEFKIEYDRNFEPYIYALLEDDESIEDIKKITGERHGKKVRIIRVEKVKKKFLGEPIEVWKLVFEHPQDVPAIRDAIRSHPAVREIFEYDIPFAKRYLIDKGLVPMEGGEELKLLAFAIATFYHEGDEFAEGEILMISYADESGAKVITWKKIDLPYVEVVSTEREAIKRFLQVLREKDPDVLLTYNGDNFDFAYIKKRCEKLGLKFTIGRDGSEPKIQRMGDRFAVEVKGRIHLDLAPVVRHTIRLPTYTLEAVYEAVFGKKKEKVYAEEIAEAWKSEEGLKRVAQYSMEDARATYELGREFFPLEVELAKLIGQSVWDVSRSSTGNLVEWYLLRVAYERNELAPNKPGGEEYQRRMRSSYIGGYVKEPEKGLWESIAYLDFRSSAGSIIVTHNVSPDTLEKECKNYDVAPIVGYRFCKDFKGFIPSILEDLIETRQKVKRKMKATIDPIEKKMLDYRQRALKILANSYYGYQGYPKARWYSKECAESVTAWGRHYIETTIKEAEKFGFKVLYADTDGFFATIPNEKPETIKSKAKKFLKHINEKLPGMLELEYEGFYLRGFFVTKKKYALIDEDGHITTRGLEVVRRYWSEIAKETQAKVLEVILREGSIEKAAGIVKKVVEDLANYRVPVEKLIIHEQITRELKRYKATGPHVAIAKRLQARGIKVKPGTIISYVVLKGSKKISDRVILFDEYDSSRHKYDPDYYIHNQVLPAVLRILEAFGYKEKDLEYQ

SEQ ID NO: 949 - protein, 773 aa, unidentified
  REGION 1..773: note = Description of Unknown: Synthetic polypeptide
MILDTDYITENGKPVIRIFKKEKGEFKIEYDRNFEPYIYALLEDDESIEDIKKITGERHGKKVRIIRVEKVKKKFLGEPIEVWKLVFEHPQDYPAIRDAIRSHPAVREIFEYDIPFAKRYLIDKGLVPMEGGEELKLLAFAIATFYHEGDEFAEGEILMISYADESGAKVITWKKIDLPYVEVVSTEREAIKRFLQVLREKDPDVLLTYNGDNFDFAYIKKRCEKLGLKFTIGRDGSEPKIQRMGDRFAVEVKGRIHLDLAPVVRHTIRLPTYTLEAVYEAVFGKKKEQVYAEEIAEAWKSEEGLKRVAQYSMEDARATYELGREFFPMEVELAKLIGQSVWDVSRSSTGNLVEWYLLRVAYERNELAPNKPGGEEYQRRMRSSYIGGYVKEPEKGLWESIAYLDFRSSAGSIIVTHNVSPDTLEKECKNYDVAPIVGYRFCKDFKGFIPSILEDLIETRQKVKRKMKATIDPIEKKMLDYRQRALKILANSYYGYQGYPKARWYSKENAEWVTAWGRHYIETTIKEAEKFGFKVLYADTDGFFATIPNEKPETIKSKAKKFLKHINEKLPGMLELEYEGFYLRGFFVTKKKYALIDEDGHITTRGLEVVRRDWSEIAKETQAKVLEVILREGSIEKAAGIVKKVVEDLANYRVPVEKLIIHEQITRELKRYKATGPHVAIAKRLQARGIKVKPGTIISYVVLKGSKKISDRVILFDEYDSSRHKYDPDYYIHNQVLPAVLRILEAFGYKEKDLEYQRMKQTGLGAWLKMGKK

SEQ ID NO: 950 - protein, 773 aa, unidentified
  REGION 1..773: note = Description of Unknown: Synthetic polypeptide
MILDTDYITENGKPVIRIFKKEKGEFKIEYDRNFEPYIYALLEDDESIEDIKKITGERHGKKVRIIRVEKVKKKFLGEPIEVWKLVFEHPQDQPAIRDAIRSHPAVREIFEYDIPFAKRYLIDKGLVPMEGGEELKLLAFNIATFYHEGDEFAEGEILMISYADESGAKVITWKKIDLPYVEVVSTEREAIKRFLQVLREKDPDVLLTYNGDNFDFAYIKKRCEKLGLKFTIGRDGSEPKIQRMGDRFAVEVKGRIHLDLAPVVRHTIRLPTYTLEAVYEAVFGKKKEKVYAEEIAEAWKSEEGLKRVAQYSMEDARATYELGREFFPLEVELAKLIGQSVWDVSRSSTGNLVEWYLLRVAYERNELAPNKPGGEEYQRRMRSSYIGGYVKEPEKGLWESIAYLDFRSSAGSIIVTHNVSPDTLEKECKNYDVAPIVGYRFCKDFKGFIPSILEDLIETRQKVKRKMKATIDPIEKKMLDYRQRALKILANSYYGYQGYPKARWYSKECAESVTAWGRHYIETTIKEAEKFGFKVLYADTDGFFATIPNEKPETIKSKAKKFLKHINEKLPGMLELEYEGFYLRGFFVTKKKYALIDEDGHITTRGLEVVRRDWSEIAKETQAKVLEVILREGSIEKAAGIVKKVVEDLANYRVPVEKLIIHEQITRELKRYKATGPHVAIAKRLQARGIKVKPGTIISYVVLKGSKKISDRVILFDEYDSSRHKYDPDYYIHNQVLPAVLRILEAFGYKEKDLEYQRMKQTGLGAWLKMGKK

SEQ ID NO: 951 - protein, 773 aa, unidentified
  REGION 1..773: note = Description of Unknown: Synthetic polypeptide
MILDTDYITENGKPVIRIFKKEKGEFKIEYDRNFEPYIYALLEDDESIEDIKKITGERHGKKVRIIRVEKVKKKFLGEPIEVWKLVFEHPQDYPAIRDAIRSHPAVREIFEYDIPFAKRYLIDKGLVPMEGGEELKLLAFAIATFYHEGDEFAEGEILMISYADESGAKVITWKKIDLPYVEVVSTEREAIKRFLQVLREKDPDVLLTYNGDNFDFAYIKKRCEKLGLKFTIGRDGSEPKIQRMGDRFAVEVKGRIHLDLAPVVRHTIRLPTYTLEAVYEAVFGKKKEKVYAEEIAEAWKSEEGLKRVAQYSMEDARATYELGREFFPMEVELAKLIGQSVWDVSRSSTGNLVEWYLLRVAYERNELAPNKPGGEEYQRRMRSSYIGGYVKEPEKGLWESIAYLDFRSSAGSIIVTHNVSPDTLEKECKNYDVAPIVGYRFCKDFKGFIPSILEDLIETRQKVKRKMKATIDPIEKKMLDYRQRALKILANSYYGYQGYPKARWYSKECAESVTAWGRHYIETTIKEAEKFGFKVLYADTDGFFATIPNEKPETIKSKAKKFLKNINEKLPGMLELEYEGFYLRGFFVTKKKYALIDEDGHITTRGLEVVRRDWSEIAKETQAKVLEVILREGSIEKAAGIVKKVVEDLANYRVPVEKLIIHEQITRELKRYKATGPHVAIAKRLQARGIKVKPGTIISYVVLKGSKKISDRVILFDEYDSSRHKYDPDYYIHNQVLPAVLRILEAFGYKEKDLEYQRMKQTGLGAWLKMGKK

SEQ ID NO: 952 - protein, 773 aa, unidentified
  REGION 1..773: note = Description of Unknown: Synthetic polypeptide
MILDTDYITENGKPVIRIFKKEKGEFKIEYDRNFEPYIYALLEDDESIEDIKKITGERHGKKVRIIRVEKVKKKFLGEPIEVWKLVFEHPQDYPAIRDAIRSHPAVREIFEYDIPFAKRYLIDKGLVPMEGGEELKLLAFAIATFYHEGDEFAEGEILMISYADESGAKVITWKKIDLPYVEVVSTEREAIKRFLQVLREKDPDVLLTYNGDNFDFAYIKKRCEKLGLKFTIGRDGSEPKIQRMGDRFAVEVKGRIHLDLAPVVRHTIRLPTYTLEAVYEAVFGKKKEKVYAEEIAEAWKSEEGLKRVAQYSMEDARATYELGREFFPMEVELAKLIGQSVWDVSRSSTGNLVEWYLLRVAYERNELAPNKPGGEEYQRRMRSSYIGGYVKEPEKGLWESIAYLDFRSSAGSIIVTHNVSPDTLEKECKNYDVAPIVGYRFCKDFKGFIPSILEDLIETRQKVKRKMKATIDPIEKKMLDYRQRALKILANSYYGYQGYPKARWYSKECAESVTAWGRHYIETTIKEAEKFGFKVLYADTDGFFATIPNEKPETIKSKAKKFLKHINEKLPGMLELEYEGFYLRGFFVTKKKYALIDEDGHITTRGLEVVRRDWSEIAKETQAKVLEVILREGSIEEAAGIVKKVVEDLANYRVPVEKLIIHEQITRELKRYKATGPHVAIAKRLQARGIKVKPGTIISYVVLKGSKKISDRVILFDEYDSSRHKYDPDYYIHNQVLPAVLRILEAFGYKEKDLEYQRMKQTGLGAWLKMGKK

SEQ ID NO: 953 - protein, 773 aa, unidentified
  REGION 1..773: note = Description of Unknown: Synthetic polypeptide
MILDTDYITENGKPVIRIFKKEKGEFKIEYDRNFEPYIYALLEDDESIEDIKKITGERHGKKVRIIRVEKVKKKFLGEPIEVWKLVFEHPQDVPAIRDAIRSHPAVREIFEYDIPFAKRYLIDKGLVPMEGGEELKLLAFNIATFYHEGDEFAEGEILMISYADESGAKVITWKKIDLPYVEVVSTEREAIKRFLQVLREKDPDVLLTYNGDNFDFAYIKKRCEKLGLKFTIGRDGSEPKIQRMGDRFAVEVKGRIHLDLAPVVRHTIRLPTYTLEAVYEAVFGKKKEKVYAEEIAEAWKSEEGLKRVAQYSMEDARATYELGREFFPLEVELAKLIGQSVWDVSRSSTGNLVEWYLLRVAYERNELAPNKPGGEEYQRRMRSSYIGGYVKEPEKGLWESIAYLDFRSSAGSIIVTHNVSPDTLEKECKNYDVAPIVGYRFCKDFKGFIPSILEDLIETRQKVKRKMLATIDPIEKKMLDYRQRALKILANSYYGYQGYPKARWYSKECAESVTAWGRHYIETTIKEAEKFGFKVLYADTDGFFATIPNEKPETIKSKAKKFLKHINEKLPGMLELEYEGFYLRGFFVTKKKYALIDEDGHITTRGLEVVRRDWSEIAKETQAKVLEVILREGSIEKAAGIVKKVVEDLANYRVPVEKLIIHEQITRELKRYKATGPHVAIAKRLQARGIKVKPGTIISYVVLKGSKKISDRVILFDEYDSSRHKYDPDYYIHNQVLPAVLRILEAFGYKEKDLEYQRMKQTGLGAWLKMGKK

SEQ ID NO: 954 - protein, 773 aa, unidentified
  REGION 1..773: note = Description of Unknown: Synthetic polypeptide
MILDTDYITENGKPVIRIFKKEKGEFKIEYDRNFEPYIYALLEDDESIEDIKKITGERHGKKVRIIRVEKVKKKFLGEPIEVWKLVFEHPQDYPAIRDAIRSHPAVREIFEYDIPFAKRYLIDKGLVPMEGGEELKLLAFAIATFYHEGDEFAEGEILMISYADESGAKVITWKKIDLPYVEVVSTEREAIKRFLQVLREKDPDVLLTYNGDNFDFAYIKKRCEKLGLKFTIGRDGSEPKIQRMGDRFAVEVKGRIHLDLAPVVRHTIRLPTYTLEAVYEAVFGKKKEKVYAEEIAEAWKSEEGLKRVAQYSMEDARATYELGREFFPMEVELAKLIGQSVWDVSRSSTGNLVEWYLLRVAYERNELAPNKPGGEEYQRRMRSSYIGGYVKEPEKGLWESIAYLDFRSSAGSIIVTHNVSPDTLEKECKNYDVAPIVGYRFCKDFKGFIPSILEDLIETRQKVKRKMKATIDPIEKKMLDYRQRALKILANSYYGYFGYPKARWYSKECAESVTAWGRHYIETTIKEAEKFGFKVLYADTDGFFATIPNEKPETIKSKAKKFLKHINEKLPGMLELEYEGFYLRGFFVTKKKYALIDEDGHITTRGLEVVRRDWSEIAKETQAKVLEVILREGSIEKAAGIVKKVVEDLANYRVPVEKLIIHEQITRELKRYKATGPHVAIAKRLQARGIKVKPGTIISYVVLKGSKKISDRVILFDEYDSSRHKYDPDYYIHNQVLPAVLRILEAFGYKEKDLEYQRMKQTGLGAWLKMGKK

SEQ ID NO: 955 - protein, 773 aa, unidentified
  REGION 1..773: note = Description of Unknown: Synthetic polypeptide
AILDTDYITENGKPVIRIFKKEKGEFKIEYDRNFEPYIYALLEDDESIEDIKKITGERHGKKVRIIRVEKVKKKFLGEPIEVWKLVFEHPQDVPAIRDAIRSHPAVREIFEYDIPFAKRYLIDKGLVPMEGGEELKLLAFNIATFYHEGDEFAEGEILMISYADESGAKVITWKKIDLPYVEVVSTEREAIKRFLQVLREKDPDVLLTYNGDNFDFAYIKKRCEKLGLKFTIGRDGSEPKIQRMGDRFAVEVKGRIHLDLAPVVRHTIRLPTYTLEAVYEAVFGKKKEKVYAEEIAEAWKSEEGLKRVAQYSMEDARATYELGREFFPLEVELAKLIGQSVWDVSRSSTGNLVEWYLLRVAYERNELAPNKPGGEEYQRRMRSSYIGGYVKEPEKGLWESIAYLDFRSSAGSIIVTHNVSPDTLEKECKNYDVAPIVGYRFCKDFKGFIPSILEDLIETRQKVKRKMKATIDPIEKKMLDYRQRALKILANSYYGYQGYPKARWYSKECAESVTAWGRHYIETTIKEAEKFGFKVLYADTDGFFATIPNEKPETIKSKAKKFLKHINEKLPGMLELEYEGFYLRGFFVTKKKYALIDEDGHITTRGLEVVRRDWSEIAKETQAKVLEVILREGSIEKAAGIVKKVVEDLANYRVPVEKLIIHEQITRELKRYKATGPHVAIAKRLQARGIKVKPGTIISYVVLKGSKKISDRVILFDEYDSSRHKYDPDYYIHNQVLPAVLRILEAFGYKEKDLEYQRDKQTGLGAWLKMGKK

SEQ ID NO: 956 - protein, 773 aa, unidentified
  REGION 1..773: note = Description of Unknown: Synthetic polypeptide
MILDTDYITENGKPVIRIFKKEKGEFKIEYDRNFEPYIYALLEDDESIEDIKKITGERHGKKVRIIRVEKVKKKFLGEPIEVWKLVFEHPQDYPAIRDAIRSHPAVREIFEYDIPFAKRYLIDKGLVPMEGGEELKLLAFAIATFYHEGDEFAEGEILMISYADESGAKVITWKKIDLPYVEVVSTEREAIKRFLQVLREKDPDVLLTYNGDNFDFAYIKKRCEKLGLKFTIGRDGSEPKIQRMGDRFAVEVKGRIHLDLAPVVRHTIRLPTYTLEAVYEAVFGKKKEKVYAEEIAEAWKSEEGLKRVAQYSMEDARATYELGREFFPMEVELAKLIGQSVWDVSRSSTGNLVEWYLLRVAYERNELAPNKPGGEEYQRRMRSSYIGGYVKEPEKGLWESIAYLDFRSSAGSIIVTHNVSPDTLEKECKNYDVAPSVGYRFCKDFKGFIPSILEDLIETRQKVKRKMKATIDPIEKKMLDYRQRALKILANSYYGYQGYPKARWYSKECAESVTAWGRHYIETTIKEAEKFGFKVLYADTDGFFATIPNEKPETIKSKAKKFLKHINEKLPGMLELEYEGFYLRGFFVTKKKYALIDEDGHITTRGLEVVRRDWSEIAKETQAKVLEVILREGSIEKAAGIVKKVVEDLANYRVPVEKLIIHEQITRELKRYKATGPHVAIAKRLQARGIKVKPGTIISYVVLKGSKKISDRVILFDEYDSSRHKYDPDYYIHNQVLPAVLRILEAFGYKEKDLEYQRMKQTGLGAWLKMGKK

SEQ ID NO: 957 - protein, 773 aa, unidentified
  REGION 1..773: note = Description of Unknown: Synthetic polypeptide
MILDTDYITENGKPVIRIFKKEKGEFKIEYDRNFEPYIYALLEDDESIEDIKKITGERHGKKVRIIRVEKVKKKFLGEPIEVWKLVFEHPQDVPAIRDAIRSHPAVREIFEYDIPFAKRYLIDKGLVPMEGGEELKLLAFNIATFYHEGDEFAEGEILMISYADESGAKVITWKKIDLPYVEVVSTEREAIKRFLQVLREKDPDVLLTYNGDNFDFAYIKKRCEKLGLKFTIGRDGSEPKIQRMGDRFAVEVKGRIHLDLAPVVRHTIRLPTYTLEAVYEAVFGKKKEKVYAEEIAEAWKSEEGLKRVAQYSMEDARATYELGREFFPLEVELAKLIGQSVWDVSRSSTGNLVEWYLLRVAYERNELAPNKPGGEEYQRRMRSSYIGGYVKEPEKGLWESIAYLDFRSSAGSIIVTHNVSPDTLEKECKNYDVAPIVGYRFCKDFKGFIPSILEDLIETRQKVKRKMKATIDPIEKKMLDYRQRALKILANSYYGYQGYPKARWYSKECAESVTAWGRHYIETTIKEAEKFGFKVLYADTDGFFATIPNEKPETIKSKAKKFLKHINEKLPGMLELEYEGFYLRGFFVTKKKYALIDEDGHITTRGLEVVRRDWSEIAKETQAKVLEVILREGSIEKAAGIVKKVVEDLANYRVPVEKLIIHEVITRELKRYKATGPHVAIAKRLQARGIKVKPGTIISYVVLKGSKKISDRVILFDEYDSSRHKYDPDYYIHNQVLPAVLRILEAFGYKEKDLEYQRMKQTGLGAWLKMGKK

SEQ ID NO: 958 - protein, 773 aa, unidentified
  REGION 1..773: note = Description of Unknown: Synthetic polypeptide
MILDTDYITENGKPVIRIFKKEKGEFKIEYDRNFEPYIYALLEDDESIEDIKKITGERHGKKVRIIRVEKVKKKFLGEPIEVWKLVFEHPQDVPAIRDAIRSHPAVREIFEYDIPFAKRYLIDKGLVPMEGGEELKLLAFNIATFYHEGDEFAEGEILMISYADESGAKVITWKKIDLPYVEVVSTEREAIKRFLQVLREKDPDVLLTYNGDNFDFAYIKKRCEKLGLKFTIGRDGSEPKIQRMGDRFAVEVKGRIHLDLAPVVRWTIRLPTYTLEAVYEAVFGKKKEKVYAEEIAEAWKSEEGLKRVAQYSMEDARATYELGREFFPLEVELAKLIGQSVWDVSRSSTGNLVEWYLLRVAYERNELAPNKPGGEEYQRRMRSSYIGGYVKEPEKGLWESIAYLDFRSSAGSIIVTHNVSPDTLEKECKNYDVAPIVGYRFCKDFKGFIPSILEDLIETRQKVKRKMKATIDPIEKKMLDYRQRALKILANSYYGYQGYPKARWYSKECAESVTAWGRHYIETTIKEAEKFGFKVLYADTDGFFATIPNEKPETIKSKAKKFLKHINEKLPGMLELEYEGFYLRGFFVTKKKYALIDEDGHITTRGLEVVRRDWSEIAKETQAKVLEVILREGSIEKAAGIVKKVVEDLANYRVPVEKLIIHEQITRELKRYKATGPHVAIAKRLQARGIKVKPGTIISYVVLKGSKKISDRVILFDEYDSSRHKYDPDYYIHNQVLPAVLRILEAFGYKEKDLEYQRMKQTGLGAWLKMGKK

SEQ ID NO: 959 - protein, 757 aa, unidentified
  REGION 1..757: note = Description of Unknown: Synthetic polypeptide
MILDTDYITENGKPVIRIFKKEKGEFKIEYDRNFEPYIYALLEDDESIEDIKKITGERHGKKVRIIRVEKVKKKFLGEPIEVWKLVFEHPQDVPAIRDAIRSHPAVREIFEYDIPFAKRYLIDKGLVPMEGGEELKLLAFAIATFYHEGDEFAEGEILMISYADESGAKVITWKKIDLPYVEVVSTEREAIKRFLQVLREKDPDVLLTYNGDNFDFAYIKKRCEKLGLKFTIGRDGSEPKIQRMGDRFAVEVKGRIHLDLAPVVRHTIRLPTYTLEAVYEAVFGKKKEKVYAEEIAEAWKSEEGLKRVAQYSMEDARATYELGREFFPMEVELAKLIGQSVWDVSRSSTGNLVEWYLLRVAYERNELAPNKPGGEEYQRRMRSSYIGGYVKEPEKGLWESIAYLDFRSSAGSIIVTHNVSPDTLEKECKNYDVAPIVGYRFCKDFKGFIPSILEDLIETRQKVKRKMKATIDPIEKKMLDYRQRALKILANSYYGYQGYPKARWYSKECAESVTAWGRHYIETTIKEAEKFGFKVLYADTDGFFATIPNEKPETIKSKAKKFLKHINEKLPGMLELEYEGFYLRGFFVTKKKYALIDEDGHITTRGLEVVRRDWSEIAKETQAKVLEVILREGSIEKAAGIVKKVVEDLANYRVPVEKLIIHEQITRQLKDYKATGPHVAIAKRLQARGIKVQPGTIISYVVLKGSKKISDRVILFDEYDSSRHKYDPDYYIHNQVLPAVLRILEAFGYKEKDLEYQ

SEQ ID NO: 960 - protein, 773 aa, unidentified
  REGION 1..773: note = Description of Unknown: Synthetic polypeptide
MILDTDYITENGKPVIRIFKKEKGEFKIEYDRNFEPYIYALLEDDESIEDIKKITGERHGKKVRIIRVEKVKKKFLGEPIEVWKLVFEHPQDYPAIRDAIRSHPAVREIFEYDIPFAKRYLIDKGLVPMEGGEELKLLAFAIATFYHEGDEFAEGEILMISYADESGAKVITWKKIDLPYVEVVSTEREAIKRFLQVLREKDPDVLLTYNGDNFDFAYIKKRCEKLGLKFTIGRDGSEPKIQRMGDRFAVEVKGRIHLDLAPVVRHTIRLPTYTLEAVYEAVFGKKKEKVYAEEIAEAWKSEEGLKRVAQYSMEDARATYELGREFFPMEVELAKLIGQSVWDVSRSSTGNLVEWYLLRVAYERNELAPNKPGGEEYQRRMRSSYIGGYVKEPEKGLWESIAYLDFRSSAGSIIVTHNVSPDTLEKECKNYDVAPIVGYRFCKDFKGFIPSILEDLIETRQKVKRKMKATIDPIEKKMLDYRQRALKILANSYYGYQGYPKARWYSKECAESVTAWGRHYIETTIKEAEKFGFKVLYADTDGFFATIPNEKPETIKSKAKKFLKHINEKLPGMLELEYEGFYLRGFFVTKKKYALIDEDGHITTRGLEVVRRDWSEIAKETQAKVLEVILREGSIEKAAGIVKKVVEDLANYRVPVEKLIIHEQFTRELKRYKATGPHVAIAKRLQARGIKVKPGTIISYVVLKGSKKISDRVILFDEYDSSRHKYDPDYYIHNQVLPAVLRILEAFGYKEKDLEYQRMKQTGLGAWLKMGKK

SEQ ID NO: 961 - protein, 773 aa, unidentified
  REGION 1..773: note = Description of Unknown: Synthetic polypeptide
MILDTDYITENGKPVIRIFKKEKGEFKIEYDRNFEPYIYALLEDDESIEDIKKITGERHGKKVRIIRVEKVKKKFLGEPIEVWKLVFEHPQDVPAIRDAIRSHPAVREIFEYDIPFAKRYLIDKGLVPMEGGEELKLLAFNIATFYHEGDEFAEGEILMISYADESGAKVITWKKIDLPYVEVVSTEREAIKRFLQVLREKDPDVLLTYNGDNFDFAYIKKRCEKLGLKFTIGRDGSEPKIQRMGDRFAVEVKGRIHLDLAPVVRHTIRLPTYTLEAVYEAVFGKKKEKVYAEEIAEAWKSEEGLKRVAQYSMEDARATYELGREFFPLEVELAKLIGQSVWDVSRSSTGNLVEWYLLRVAYERNELAPNKPGGEEYQRRMRSSYIGGYVKEPEKGLWESIAYLDFRSSAGSIIVTHNVSPDTLEKECKNYDVAPIVGYRFCKDFKGFIPSILEDLIETRQKVKRKMKATIDPIEKKMLDYRQRALKILANSYYGYQGYPKARWYSKEDAEDVTAWGRHYIETTIKEAEKFGFKVLYADTDGFFATIPNEKPETIKSKAKKFLKHINEKLPGMLELEYEGFYLRGFFVTKKKYALIDEDGHITTRGLEVVRRDWSEIAKETQAKVLEVILREGSIEKAAGIVKKVVEDLANYRVPVEKLIIHEQITRELKRYKATGPHVAIAKRLQARGIKVKPGTIISYVVLKGSKKISDRVILFDEYDSSRHKYDPDYYIHNQVLPAVLRILEAFGYKEKDLEYQRMKQTGLGAWLKMGKK

SEQ ID NO: 962 - protein, 773 aa, unidentified
  REGION 1..773: note = Description of Unknown: Synthetic polypeptide
MILDTDYITENGKPVIRIFKKEKGEFKIEYDRNFEPYIYALLEDDESIEDIKKITGERHGKKVRIIRVEKVKKKFLGEPIEVWKLVFEHPQDVPAIRDAIRSHPAVREIFEYDIPFAKRYLIDKGLVPMEGGEELKLLAFNIATFYHEGDEFAEGEILMISYADESGAKVITWKKIDLPYVEVVSTEREAIKRFLQVLREKDPDVLLTYNGDNFDFAYIKKRCEKLGLKFTIGRDGSEPKIQRMGDRFAVEVKGRIHLDLAPVVRHTIRLPTYTLEAVYEAVFGKKKEKVYAEEIAEAWKSEEGLKRVAQYSMEDARATYELGREFFPLEVELAKLIGQSVWDVSRSSTGNLVEWYLLRVAYERNELAPNKPGGEEYQRRMRSSYIGGYVKEPEKGLWESIAYLDFRSSAGSIIVTHNVSPDTLEKECKNYDVAPIVGYRFCKDFKGFIPSILEDLIETRQKVKRKMKATIDPIEKKMLDYRQRALKILANSYYGYQGYPKARWYSKECAESVTAWGRHYIETTIKEAEKFGFKVLYADTDGFFATIPNEKPETIKSKAKKFLKHINEKLPGMLELEYEGFYLRGFFVTKKKYALIDEDGHITTRGLEVVRRDWSEIAKETQAKVLEVILREGSIEKAAGIVKKVVEDLANYRVPVEKLIIHEQITRKLKRYKATGPHVAIAKRLQARGIKVKPGTIISYVVLKGSKKISDRVILFDEYDSSRHKYDPDYYIHNQVLPAVLRILEAFGYKEKDLEYQRMKQTGLGAWLKMGKK

SEQ ID NO: 963 - protein, 773 aa, unidentified
  REGION 1..773: note = Description of Unknown: Synthetic polypeptide
MILDTDYITENGKPVIRIFKKEKGEFKIEYDRNFEPYIYALLEDDESIEDIKKITGERHGKKVRIIRVEKVKKKFLGEPIEVWKLVFEHPQDVPAIRDAIRSHPAVREIFEYDIPFAKRYLIDKGLVPMEGGEELKLLAFNIATFYHEGDEFAEGEILMISYADESGAKVITWKKIDLPYVEVVSTEREAIKRFLQVLREKDPDVLLTYNGDNFDFAYIKKRCEKLGLKFTIGRDGSEPKIQRMGDRFAVEVKGRIHLDLAPVVRHTIRLPTYTLEAVYEAVFGKKKEKVYAEEIAEAWKSEEGLKRVAQYSMEDARATYELGREFFPLEVELAKLIGQSVWDVSRSSTGNLVEWYLLRVAYERNELAPNKPGGEEYQRRMRSSYIGGYVKEPEKGLWESIAYLDFRSSAGSIIVTHNVSPDTLEKECKNYDVAPIVGYRFCKDFKGFIPSILEDLIETRQKVKRKMKATIDPIEKKMLDYRQRALKILANSYYGYQGYPKARWYSKECAESVTAWGRHYIETTIKEAEKFGFKVLYADTDGFFATIPNEKPETIKSKAKKFLKHINEKLPGMLELEYEGFYLRGFFVTKKKYALIDEDGHITTRGLEVVRRNWSEIAKETQAKVLEVILREGSIEKAAGIVKKVVEDLANYRVPVEKLIIHEQITRELKRYKATGLHVAIAKRLQARGIKVKPGTIISYVVLKGSKKISDRVILFDEYDSSRHKYDPDYYIHNQVLPAVLRILEAFGYKEKDLEYQRMKQTGLGAWLKMGKK

SEQ ID NO: 964 - protein, 773 aa, unidentified
  REGION 1..773: note = Description of Unknown: Synthetic polypeptide
MILDTDYITENGKPVIRIFKKEKGEFKIEYDRNFEPYIYALLEDDESIEDIKKITGERHGKKVRIIRVEKVKKKFLGEPIEVWKLVFEHPQDVPAIRDAIRSHPAVREIFEYDIPFAKRYLIDKGLVPMEGGEELKLLAFNIATFYHEGDEFAEGEILMISYADESGAKVITWKKIDLPYVEVVSTEREAIKRFLQVLREKDPDVLLTYNGDNFDFAYIKKRCEKLGLKFTIGRDGSEPKSQRMGDRFAVEVKGRIHLDLAPVVRHTIRLPTYTLEAVYEAVFGKKKEKVYAEEIAEAWKSEEGLKRVAQYSMEDARATYELGREFFPLEVELAKLIGQSVWDVSRSSTGNLVEWYLLRVAYERNELAPNKPGGEEYQRRMRSSYIGGYVKEPEKGLWESIAYLDFRSSAGSIIVTHNVSPDTLEKECKNYDVAPIVGYRFCKDFKGFIPSILEDLIETRQKVKRKMKATIDPIEKKMLDYRQRALKILANSYYGYQGYPKARWYSKECAESVTAWGRHYIETTIKEAEKFGFKVLYADTDGFFATIPNEKPETIKSKAKKFLKHINEKLPGMLELEYEGFYLRGFFVTKKKYALIDEDGHITTRGLEVVRRDWSEIAKETQAKVLEVILREGSIEKAAGIVKKVVEDLANYRVPVEKLIIHEQITRELKRYKATGPHVAIAKRLQARGIKVKPGTIISYVVLKGSKKISDRVILFDEYDSSRHKYDPDYYIHNQVLPAVLRILEAFGYKEKDLEYQRMKQTGLGAWLKMGKK

SEQ ID NO: 965 - protein, 773 aa, unidentified
  REGION 1..773: note = Description of Unknown: Synthetic polypeptide
MILDTDYITENGKPVIRIFKKEKGEFKIEYDRNFEPYIYALLEDDESIEDIKKITGERHGKKVRIIRVEKVKKKFLGEPIEVWKLVFEHPQDMPAIRDAIRSHPAVREIFEYDIPFAKRYLIDKGLVPMEGGEELKLLAFNIATFYHEGDEFAEGEILMISYADESGAKVITWKKIDLPYVEVVSTEREAIKRFLQVLREKDPDVLLTYNGDNFDFAYIKKRCEKLGLKFTIGRDGSEPKIQRMGDRFAVEVKGRIHLDLAPVVRHTIRLPTYTLEAVYEAVFGKKKEKVYAEEIAEAWKSEEGLKRVAQYSMEDARATYELGREFFPLEVELAKLIGQSVWDVSRSSTGNLVEWYLLRVAYERNELAPNKPGGEEYQRRMRSSYIGGYVKEPEKGLWESIAYLDFRSSAGSIIVTHNVSPDTLEKECKNYDVAPIVGYRFCKDFKGFIPSILEDLIETRQKVKRKMKATIDPIEKKMLDYRQRALKILANSYYGYQGYPKARWYSKECAESVTAWGRHYIETTIKEAEKFGFKVLYADTDGFFATIPNEKPETIKSKAKKFLKHINEKLPGMLELEYEGFYLRGFFVTKKKYALIDEDGHITTRGLEVVRRDWSEIAKETQAKVLEVILREGSIEKAAGIVKKVVEDLANYRVPVEKLIIHEQITRELKRYKATGPHVAIAKRLQARGIKVKPGTIISYVVLKGSKKISDRVILFDEYDSSRHKYDPDYYIHNQVLPAVLRILEAFGYKEKDLEYQRMKQTGLGAWLKMGKK

SEQ ID NO: 966 - protein, 757 aa, unidentified
  REGION 1..757: note = Description of Unknown: Synthetic polypeptide
MILDTDYITENGKPVIRIFKKEKGEFKIEYDRNFEPYIYALLEDDESIEDIKKITGERHGKKVRIIRVEKVKKKFLGEPIEVWKLVFEHPQDVPAIRDAIRSHPAVREIFEYDIPFAKRYLIDKGLVPMEGGEELKLLAFAIATFYHEGDEFAEGEILMISYADESGAKVITWKKIDLPYVEVVSTEREAIKRFLQVLREKDPDVLLTYNGDNFDFAYIKKRCEKLGLKFTIGRDGSEPKIQRMGDRFAVEVKGRIHLDLAPVVRHTIRLPTYTLEAVYEAVFGKKKEKVYAEEIAEAWKSEEGLKRVAQYSMEDARATYELGREFFPMEVELAKLIGQSVWDVSRSSTGNLVEWYLLRVAYERNELAPNKPGGEEYQRRMRSSYIGGYVKEPEKGLWESIAYLDFRSSAGSIIVTHNVSPDTLEKECKNYDVAPIVGYRFCKDFKGFIPSILEDLIETRQKVKRKMKATIDPIEKKMLDYRQRALKILANSYYGYQGYPKARWYSKECAESVTAWGRHYIETTIKEAEKFGFKVLYADTDGFFATIPNEKPETIKSKAKKFLKHINEKLPGMLELEYEGFYLRGFFVTKKKYALIDEDGHITTRGLEVVRRAWSEIAKETQAKVLEVILREGSIEKAAGIVKKVVEDLANYRVPVEKLIIHEQITRKLKDYKATGPHVAIAKRLQARGIKVKPGTIISYVVLKGSKKISDRVILFDEYDSSRHKYDPDYYIHNQVLPAVLRILEAFGYKEKDLEYQ

SEQ ID NO: 967 - protein, 773 aa, unidentified
  REGION 1..773: note = Description of Unknown: Synthetic polypeptide
MILDTDYITENGKPVIRIFKKEKGEFKIEYDRNFEPYIYALLEDDESIEDIKKITGERHGKKVRIIRVEKVKKKFLGEPIEVWKLVFEHPQDVPAIRDAIRSHPAVREIFEYDIPFAKRYLIDKGLVPMEGGEELKLLAFNIATFYHEGDEFAEGEILMISYADESGAKVITWKKIDLPYVEVVSTEREAIKRFLQVLREKDPDVLLTYNGDNFDFAYIKKRCEKLGLKFTIGRDGSEPKIQRMGDRFAVEVKGRIHLDLAPVVRFTIRLPTYTLEAVYEAVFGKKKEKVYAEEIAEAWKSEEGLKRVAQYSMEDARATYELGREFFPLEVELAKLIGQSVWDVSRSSTGNLVEWYLLRVAYERNELAPNKPGGEEYQRRMRSSYIGGYVKEPEKGLWESIAYLDFRSSAGSIIVTHNVSPDTLEKECKNYDVAPIVGYRFCKDFKGFIPSILEDLIETRQKVKRKMKATIDPIEKKMLDYRQRALKILANSYYGYQGYPKARWYSKECAESVTAWGRHYIETTIKEAEKFGFKVLYADTDGFFATIPNEKPETIKSKAKKFLKHINEKLPGMLELEYEGFYLRGFFVTKKKYALIDEDGHITTRGLEVVRRDWSEIAKETQAKVLEVILREGSIEKAAGIVKKVVEDLANYRVPVEKLIIHEQITRELKRYKATGPHVAIAKRLQARGIKVKPGTIISYVVLKGSKKISDRVILFDEYDSSRHKYDPDYYIHNQVLPAVLRILEAFGYKEKDLEYQRMKQTGLGAWLKMGKK

SEQ ID NO: 968 - protein, 773 aa, unidentified
  REGION 1..773: note = Description of Unknown: Synthetic polypeptide
MILDTDYITENGKPVIRIFKKEKGEFKIEYDRNFEPYIYALLEDDESIEDIKKITGERHGKKVRIIRVEKVKKKFLGEPIEVWKLVFEHPQDVPAIRDAIRSHPAVREIFEYDIPFAKRYLIDKGLVPMEGGEELKLLAFNIATFYHEGDEFAEGEILMISYADESGAKVITWKKIDLPYVEVVSTEREAIKRFLQVLREKDPDVLLTYNGDNFDFAYIKKRCEKLGLKFTIGRDGSEPKIQRMGDRFAVEVKGRIHLDLAPVVRHTIRLPTYTLEAVYEAVFGKKKEKVYAEEIAEAWKSEEGLKRVAQYSAEDARATYELGREFFPLEVELAKLIGQSVWDVSRSSTGNLVEWYLLRVAYERNELAPNKPGGEEYQRRMRSSYIGGYVKEPEKGLWESIAYLDFRSSAGSIIVTHNVSPDTLEKECKNYDVAPIVGYRFCKDFKGFIPSILEDLIETRQKVKRKMKATIDPIEKKMLDYRQRALKILANSYYGYQGYPKARWYSKECAESVTAWGRHYIETTIKEAEKFGFKVLYADTDGFFATIPNEKPETIKSKAKKFLKHINEKLPGMLELEYEGFYLRGFFVTKKKYALIDEDGHITTRGLEVVRRDWSEIAKETQAKVLEVILREGSIEKAAGIVKKVVEDLANYRVPVEKLIIHEQITRELKRYKATGPHVAIAKRLQARGIKVKPGTIISYVVLKGSKKISDRVILFDEYDSSRHKYDPDYYIHNQVLPAVLRILEAFGYKEKDLEYQRMKQTGLGAWLKMGKK

SEQ ID NO: 969 - protein, 773 aa, unidentified
  REGION 1..773: note = Description of Unknown: Synthetic polypeptide
MILDTDYITENGKPVIRIFKKEKGEFKIEYDRNFEPYIYALLEDDESIEDIKKITGERHGKKVRIIRVEKVKKKFLGEPIEVWKLVFEHPQDYPAIRDAIRSHPAVREIFEYDIPFAKRYLIDKGLVPMEGGEELKLLAFAIATFYHEGDEFAEGEILMISYADESGAKVITWKKIDLPYVEVVSTEREAIKRFLQVLREKDPDVLLTYNGDNFDFAYIKKRCEKLGLKFTIGRDGSEPKIQRMGDRFAVEVKGRIHLDLAPVVRHTIRLPTYTLEAVYEAVFGKKKEKVYAEEIAEAWKSEEGLKRVAQYSMEDARATYELGREFFPMEVELAKLIGQSVWDVSRSSTGNLVEWYLLRVAYERNELAPNKPGGEEYQRRMRSSYIGGYVKEPEKGLWESIAYLDFRSSAGSIIVTHNVSPDTLEKECKNYDVAPIVGYRFCKDFKGFIPSILEDLIETRQKVKRKMKATIDPIEKKMLDYRQRALKILANSYYGYQGYPKARWYSKECARSVTAWGRHYIETTIKEAEKFGFKVLYADTDGFFATIPNEKPETIKSKAKKFLKHINEKLPGMLELEYEGFYLRGFFVTKKKYALIDEDGHITTRGLEVVRRDWSEIAKETQAKVLEVILREGSIEKAAGIVKKVVEDLANYRVPVEKLIIHEQITRELKRYKATGPHVAIAKRLQARGIKVKPGTIISYVVLKGSKKISDRVILFDEYDSSRHKYDPDYYIHNQVLPAVLRILEAFGYKEKDLEYQRMKQTGLGAWLKMGKK

SEQ ID NO: 970 - protein, 773 aa, unidentified
  REGION 1..773: note = Description of Unknown: Synthetic polypeptide
MILDTDYITENGKPVIRIFKKEKGEFKIEYDRNFEPYIYALLEDDESIEDIKKITGERHGKKVRIIRVEKVKKKFLGEPIEVWKLVFEHPQDVPAIRDAIRSHPAVREIFEYDIPFAKRYLIDKGLVPMEGGEELKLLAFAIATFYHEGDEFAEGEILMISYADESGAKVITWKKIDLPYVEVVSTEREAIKRFLQVLREKDPDVLLTYNGDNFDFAYIKKRCEKLGLKFTIGRDGSEPKIQRMGDRFAVEVKGRIHLDLAPVVRHTIRLPTYTLEAVYEAVFGKKKEKVYAEEIAEAWKSEEGLKRVAQYSMEDARATYELGREFFPMEVELAKLIGQSVWDVSRSSTGNLVEWYLLRVAYERNELAPNKPGGEEYQRRMRSSYIGGYVKEPEKGLWESIAYLDFRSSAGSIIVTHNVSPDTLEKECKNYDVAPIVGYRFCKDFKGFIPSILEDLIETRQKVKRKMKATIDPIEKKMLDYRQRALKILANSYYGYQGYPKARWYSKEDAEWVTAWGRHYIETTIKEAEKFGFKVLYADTDGFFATIPNEKPETIKSKAKKFLKHINEKLPGMLELEYEGFYLRGFFVTKKKYALIDEDGHITTRGLEVVRRDWSEIAKETQAKVLEVILREGSIEKAAGIVKKVVEDLANYRVPVEKLIIHEQITRELKDYKATGPHVAIAKRLQARGIKVKPGTIISYVVLKGSKKISDRVILFDEYDSSRHKYDPDYYIHNQVLPAVLRILEAFGYKEKDLEYQRMKQTGLGAWLKMGKK

SEQ ID NO: 971 - protein, 773 aa, unidentified; identical to SEQ ID NO: 460
  REGION 1..773: note = Description of Unknown: Synthetic polypeptide

SEQ ID NO: 972 - protein, 773 aa, unidentified
  REGION 1..773: note = Description of Unknown: Synthetic polypeptide
MILDTDYITENGKPVIRIFKKEKGEFKIEYDRNFEPYIYALLEDDESIEDIKKITGERHGKKVRIIRVEKVKKKFLGEPIEVWKLVFEHPQDVPAIRDAIRSHPAVREIFEYDIPFAKRYLIDKGLVPMEGGEELKLLAFNIATFYHEGDEFAEGEILMISYADESGAKVITWKKIDLPYVEVVSTEREAIKRFLQVLREKDPDVLLTYNGDNFDFAYIKKRCEKLGLKFTIGRDGSEPKIQRMGDRFAVEVKGRIHLDLAPVVRHTIRLPTYTLEAVYEAVFGKKKEKVYAEEIAEAWKSEEGLKRVAQYSMEDARATYELGREFFPLEVELAKLIGQSVWDVSRSSTGNLVEWYLLRVAYERNELAPNYPGGEEYQRRMRSSYIGGYVKEPEKGLWESIAYLDFRSSAGSIIVTHNVSPDTLEKECKNYDVAPIVGYRFCKDFKGFIPSILEDLIETRQKVKRKMKATIDPIEKKMLDYRQRALKILANSYYGYQGYPKARWYSKECAESVTAWGRHYIETTIKEAEKFGFKVLYADTDGFFATIPNEKPETIKSKAKKFLKHINEKLPGMLELEYEGFYLRGFFVTKKKYALIDEDGHITTRGLEVVRRDWSEIAKETQAKVLEVILREGSIEKAAGIVKKVVEDLANYRVPVEKLIIHEQITRELKRYKATGPHVAIAKRLQARGIKVKPGTIISYVVLKGSKKISDRVILFDEYDSSRHKYDPDYYIHNQVLPAVLRILEAFGYKEKDLEYQRMKQTGLGAWLKMGKK

SEQ ID NO: 973 - protein, 773 aa, unidentified
  REGION 1..773: note = Description of Unknown: Synthetic polypeptide
MILDTDYITENGKPVIRIFKKEKGEFKIEYDRNFEPYIYALLEDDESIEDIKKITGERHGKKVRIIRVEKVKKKFLGEPIEVWKLVFEHPQDVPAIRDAIRSHPAVREIFEYDIPFAKRYLIDKGLVPMEGGEELKLLAFKIATFYHEGDEFAEGEILMISYADESGAKVITWKKIDLPYVEVVSTEREAIKRFLQVLREKDPDVLLTYNGDNFDFAYIKKRCEKLGLKFTIGRDGSEPKIQRMGDRFAVEVKGRIHLDLAPVVRHTIRLPTYTLEAVYEAVFGKKKEQVYAEEIAEAWKSEEGLKRVAQYSMEDARATYELGREFFPLEVELAKLIGQSVWDVSRSSTGNLVEWYLLRVAYERNELAPNKPGGEEYQRRMRSSYIGGYVKEPEKGLWESIAYLDFRSSAGSIIVTHNVSPDTLEKECKNYDVAPIVGYRFCKDFKGFIPSILEDLIETRQKVKRKMKATIDPIEKKMLDYRQRALKILANSYYGYQGYPKARWYSKECAESVTAWGRHYIETTIKEAEKFGFKVLYADTDGFFATIPNEKPETIKSKAKKFLKHINEKLPGMLELEYEGFYLRGFFVTKKKYALIDEDGHITTRGLEVVRRDWSEIAKETQAKVLEVILREGSIEKAAGIVKKVVEDLANYRVPVEKLIIHEQITRELKRYKATGPHVAIAKRLQARGIKVKPGTIISYVVLKGSKKISDRVILFDEYDSSRHKYDPDYYIHNQVLPAVLRILEAFGYKEKDLEYQRMKQTGLGAWLKMGKK

SEQ ID NO: 974 - protein, 773 aa, unidentified
  REGION 1..773: note = Description of Unknown: Synthetic polypeptide
MILDTDYITENGKPVIRIFKKEKGEFKIEYDRNFEPYIYALLEDDESIEDIKKITGERHGKKVRIIRVEKVKKKFLGEPIEVWKLVFEKPQDVPAIRDAIRSHPAVREIFEYDIPFAKRYLIDKGLVPMEGGEELKLLAFNIATFYHEGDEFAEGEILMISYADESGAKVITWKKIDLPYVEVVSTEREAIKRFLQVLREKDPDVLLTYNGDNFDFAYIKKRCEKLGLKFTIGRDGSEPKIQRMGDRFAVEVKGRIHLDLAPVVRHTIRLPTYTLEAVYEAVFGKKKEKVYAEEIAEAWKSEEGLKRVAQYSMEDARATYELGREFFPLEVELAKLIGQSVWDVSRSSTGNLVEWYLLRVAYERNELAPNKPGGEEYQRRMRSSYIGGYVKEPEKGLWESIAYLDFRSSAGSIIVTHNVSPDTLEKECKNYDVAPIVGYRFCKDFKGFIPSILEDLIETRQKVKRKMKATIDPIEKKMLDYRQRALKILANSYYGYQGYPKARWYSKECAESVTAWGRHYIETTIKEAEKFGFKVLYADTDGFFATIPNEKPETIKSKAKKFLKHINEKLPGMLELEYEGFYLRGFFVTKKKYALIDEDGHITTRGLEVVRRDWSEIAKETQAKVLEVILREGSIEKAAGIVKKVVEDLANYRVPVEKLIIHEQITRELKRYKATGPHVAIAKRLQARGIKVKPGTIISYVVLKGSKKISDRVILFDEYDSSRHKYDPDYYIHNQVLPAVLRILEAFGYKEKDLEYQRMKQTGLGAWLKMGKK

SEQ ID NO: 975 - protein, 773 aa, unidentified
  REGION 1..773: note = Description of Unknown: Synthetic polypeptide
MILDTDYITENGKPVIRIFKKEKGEFKIEYDRNFEPYIYALLEDDESIEDIKKITGERHGKKVRIIRVEKVKKKFLGEPIEVWKLVFEHPQDVPAIRDAIRSHPAVREIFEYDIPFAKRYLIDKGLVPMEGGEELKLLAFNIATFYHEGDEFAEGEILMISYADESGAKVITWKKIDLPYVEVVSTEREAIKRFLQVLREKDPDVLLTYNGDNFDFAYIKKRCEKLGLKFTIGRDGSEPKIQRMGDRFAVEVKGRIHLDLAPVVRHTIRLPTYTLEAVYEAVFGKKKEKVYAEEIAEAWKSEEGLKRVAQYSMEDARATYELGREFFPNEVELAKLIGQSVWDVSRSSTGNLVEWYLLRVAYERNELAPNKPGGEEYQRRMRSSYIGGYVKEPEKGLWESIAYLDFRSSAGSIIVTHNVSPDTLEKECKNYDVAPIVGYRFCKDFKGFIPSILEDLIETRQKVKRKMKATIDPIEKKMLDYRQRALKILANSYYGYQGYPKARWYSKECAESVTAWGRHYIETTIKEAEKFGFKVLYADTDGFFATIPNEKPETIKSKAKKFLKHINEKLPGMLELEYEGFYLRGFFVTKKKYALIDEDGHITTRGLEVVRRDWSEIAKETQAKVLEVILREGSIEKAAGIVKKVVEDLANYRVPVEKLIIHEQITRELKRYKATGPHVAIAKRLQARGIKVKPGTIISYVVLKGSKKISDRVILFDEYDSSRHKYDPDYYIHNQVLPAVLRILEAFGYKEKDLEYQRMKQTGLGAWLKMGKK

SEQ ID NO: 976 - protein, 773 aa, unidentified; identical to SEQ ID NO: 75
  REGION 1..773: note = Description of Unknown: Synthetic polypeptide

SEQ ID NO: 977 - protein, 773 aa, unidentified
  REGION 1..773: note = Description of Unknown: Synthetic polypeptide
MILDTDYITENGKPVIRIFKKEKGEFKIEYDRNFEPYIYALLEDDESIEDIKKITGERHGKKVRIIRVEKVKKKFLGEPIEVWKLVFEHPQDYPAIRDAIRSHPAVREIFEYDIPFAKRYLIDKGLVPMEGGEELKLLAFAIATFYHEGDEFAEGEILMISYADESGAKVITWKKIDLPYVEVVSTEREAIKRFLQVLREKDPDVLLTYNGDNFDFAYIKKRCEKLGLKFTIGRDGSEPKIQRMGDRFAVEVKGRIHLDLAPVVRHTIRLPTYTLEAVYEAVFGKKKEKVYAEEIAEAWKSEEGLKRVAQYSMEDARATYELGREFFPMEVELAKLIGQSVWDVSRSSTGNLVEWYLLRVAYERNELAPNKPGGEEYQRRMRSSYIGGYVKEPEKGLWESIAYLDFRSSAGSIIVTHNVSPDTLEKECKNYDVAPIVGYRFCKDFKGFIPSILEDLIETRQKVKRKMKATIDPIEKKMLDYRQRALKILANSYYGYQGYPKARWYSKECAESVTAWGRHYIETTIKEAEKFGFKVLYADTDGFFATIPNEKPETIKSKAKKFLKHINEKLPGMLELEYEGFYLRGFFVTKKKYALIDEDGHITTRGLEVVRRDWSEIAKETQAKVLEVILREGSIEKAAGIVKKVVEDLANYRVPVEKLIIHEQITRELKRYKATGPHVAIAKRLQARGIKVAPGTIISYVVLKGSKKISDRVILFDEYDSSRHKYDPDYYIHNQVLPAVLRILEAFGYKEKDLEYQRMKQTGLGAWLKMGKK

SEQ ID NO: 978 - protein, 773 aa, unidentified
  REGION 1..773: note = Description of Unknown: Synthetic polypeptide
MILDTDYITENGKPVIRIFKKEKGEFKIEYDRNFEPYIYALLEDDESIEDIKKITGERHGKKVRIIRVEKVKKKFLGEPIEVWKLVFEHPQDVPAIRDAIRSHPAVREIFEYDIPFAKRYLIDKGLVPMEGGEELKLLAFAIVTFYHEGDEFAEGEILFISYADESGAKVITWKKIDLPYVEVVSTEREAIKRFLQVLREKDPDVLLTYNGDNFDFAYIKKRCEKLGLKFTIGRDGSEPKIQRMGDRFAVEVKGRIHLDLAPVVRHTIRLPTYTLEAVYEAVFGKKKEKVYAEEIAEAWKSEEGLKRVAQYSMEDARATYELGREFFPMEVELAKLIGQSVWDVSRSSTGNLVEWYLLRVAYERNELAPNKPGGEEYQRRMRSSYIGGYVKEPEKGLWESIAYLDFRSSAGSIIVTHNVSPDTLEKECKNYDVAPIVGYRFCKDFKGFIPSILEDLIETRQKVKRKMKATIDPIEKKMLDYRQRALKILANSYYGYQGYPKARWYSKECAESVTAWGRHYIETTIKEAEKFGFKVLYADTDGFFATIPNEKPETIKSKAKKFLKHINEKLPGMLELEYEGFYLRGFFVTKKKYALIDEDGHITTRGLEVVRRDWSEIAKETQAKVLEVILREGSIEKAAGIVKKVVEDLANYRVPVEKLIIHEQITRELKDYKATGPHVAIAKRLQARGIKVKPGTIISYVVLKGSKKISDRVILFDEYDSSRHKYDPDYYIHNQVLPAVLRILEAFGYKEKDLEYQRMKQTGLGAWLKMGKK

SEQ ID NO: 979 - protein, 773 aa, unidentified
  REGION 1..773: note = Description of Unknown: Synthetic polypeptide
IILDTDYITENGKPVIRIFKKEKGEFKIEYDRNFEPYIYALLEDDESIEDIKKITGERHGKKVRIIRVEKVKKKFLGEPIEVWKLVFEHPQDYPAIRDAIRSHPAVREIFEYDIPFAKRYLIDKGLVPREGGEELKLLAFAIATFYHEGDEFAEGEILMISYADESGAKVITWKKIDLPYVEVVSTEREAIKRFLQVLREKDPDVLLTYNGDNFDFAYIKKRCEKLGLKFTIGRDGSEPKIQRMGDRFAVEVKGRIHLDLAPVVRHTIRLPTYTLEAVYEAVFGKKKEKVYAEEIAEAWKSEEGLKRVAQYSMEDARATYELGREFFPMEVELAKLIGQSVWDVSRSSTGNLVEWYLLRVAYERNELAPNKPGGEEYQRRMRSSYIGGYVKEPEKGLWESIAYLDFRSSAGSIIVTHNVSPDTLEKECKNYDVAPIVGYRFCKDFKGFIPSILEDLIETRQKVKRKMKATIDPIEKKMLDYRQRALKILANSYYGYQGYPKARWYSKECAESVTAWGRHYIETTIKEAEKFGFKVLYADTDGFFATIPNEKPETIKSKAKKFLKHINEKLPGMLELEYEGFYLRGFFVTKKKYALIDEDGHITTRGLEVVRRDWSEIAKETQAKVLEVILREGSIEKAAGIVKKVVEDLANYRVPVEKLIIHEQITRELKRYKATGPHVAIAKRLQARGIKVKPGTIISYVVLKGSKKISDRVILFDEYDSSRHKYDPDYYIHNQVLPAVLRILEAFGYKEKDLEYQRMKQTGLGAWLKMGKK

SEQ ID NO: 980 - protein, 773 aa, unidentified
  REGION 1..773: note = Description of Unknown: Synthetic polypeptide
MILDTDYITENGKPVIRIFKKEKGEFKIEYDRNFEPYIYALLEDDESIEDIKKITGERHGKKVRIIRVEKVKKKFLGEPIEVWKLVFEHPQDYPAIRDAIRSHPAVREIFEYDIPFAKRYLIDKGLVPMEGGEELKLLAFAIATFYHEGDEFAEGEILMISYADESGAKVITWKKIDLPYVEVVSTEREAIKRFLQVLREKDPDVLLTYNGDNFDFAYIKKRCEKLGLKFTIGRDGSEPKIQRMGDRFAVEVKGRIHLDLAPVVRHTIRLPTYTLEAVYEAVFGKKKEKVYAEEIAEAWKSEEGLKRVAQYSMEDARATYELGREFFPMEVELAKLIGQSVWDVSRSSTGNLVEWYLLRVAYERNELAPNKPGGEEYQRRVRSSYIGGYVKEPEKGLWESIAYLDFRSSAGSIIVTHNVSPDTLEKECKNYDVAPIVGYRFCKDFKGFIPSILEDLIETRQKVKRKMKATIDPIEKKMLDYRQRALKILANSYYGYQGYPKARWYSKECAESVTAWGRHYIETTIKEAEKFGFKVLYADTDGFFATIPNEKPETIKSKAKKFLKHINEKLPGMLELEYEGFYLRGFFVTKKKYALIDEDGHITTRGLEVVRRDWSEIAKETQAKVLEVILREGSIEKAAGIVKKVVEDLANYRVPVEKLIIHEQITRELKRYKATGPHVAIAKRLQARGIKVKPGTIISYVVLKGSKKISDRVILFDEYDSSRHKYDPDYYIHNQVLPAVLRILEAFGYKEKDLEYQRMKQTGLGAWLKMGKK

SEQ ID NO: 981 - protein, 773 aa, unidentified
  REGION 1..773: note = Description of Unknown: Synthetic polypeptide
MILDTDYITENGKPVIRIFKKEKGEFKIEYDRNFEPYIYALLEDDESIEDIKKITGERHGKKVRIIRVEKVKKKFLGEPIEVWKLVFEHPQDVPAIRDAIRSHPAVREIFEYDIPFAKRYLIDKGLVPMEGGEELKLLAFNIATFYHEGDEFAEGEILMISYADESGAKVITWKKIDLPYVEVVSTEREAIKRFLQVLREKDPDVLLTYNGDNFDFAYIKKRCEKLGLKFTIGRDGSEPKIQRMGDRFAVEVKGRIHLDLAPVVRHTIRLPTYTLEAVYEAVFGKKKEKVYAEEIAEAWKSEEGLKRVAQYSMEDARATYELGREFFPLEVELAKLIGQSVWDVSRSSTGNLVEWYLLRVAYERNELAPNKPGGEEYQRRMRSSYIGGYVKEPEKGLWESIAYLDFRSSAGSIIVTHNVSPDTLEKECKNYDVAPIVGYRFCKDFKGFIPSILEDLIETRQKVKRKMKATIDPIEKKMLDYRQRALKILANSYYGYQGYPKARWYSKECAESVTAWGRHYIETTIKEAEKFGFKVLYADTDGFFATIPNEKPETIKSKAKKFLKHINEKLPGMLELEYEGFYLRGFFVTKKKYALIDEDGHITTRQLEVVRRDWSEIAKETQAKVLEVILREGSIEKAAGIVKKVVEDLANYRVPVEKLIIHEQITRELKRYKATGPHVAIAKRLQARGIKVKPGTIISYVVLKGSKKISDRVILFDEYDSSRHKYDPDYYIHNQVLPAVLRILEAFGYKEKDLEYQRMKQTGLGAWLKMGKK

SEQ ID NO: 982 - protein, 773 aa, unidentified
  REGION 1..773: note = Description of Unknown: Synthetic polypeptide
MILDTDYITENGKPVIRIFKKEKGEFKIEYDRNFEPYIYALLEDDESIEDIKKITGERHGKKVRIIRVEKVKKKFLGEPIEVWKLVFEHPQDVPAIRDAIRSHPAVREIFEYDIPFAKRYLIDKGLVPMEGGEELKLLAFRIATFYHEGDEFAEGEILMISYADESGAKVITWKKIDLPYVEVVSTEREAIKRFLQVLREKDPDVLLTYNGDNFDFAYIKKRCEKLGLKFTIGRDGSEPKIQRMGDRFAVEVKGRIHLDLAPVVRHTIRLPTYTLEAVYEAVFGKKKEKVYAEEIAEAWKSEEGLKRVAQYSMEDARATYELGREFFPLEVELAKLIGQSVWDVSRSSTGNLVEWYLLRVAYERNELAPNKPGGEEYQRRMRSSYIGGYVKEPEKGLWESIAYLDFRSSAGSIIVTHNVSPDTLEKECKNYDVAPIVGYRFCKDFKGFIPSILEDLIETRQKVKRKMKATIDPIEKKMLDYRQRALKILANSYYGYQGYPKARWYSKECAESVTAWGRHYIETTIKEAEKFGFKVLYADTDGFFATIPNEKPETIKSKAKKFLKHINEKLPGMLELEYEGFYLRGFFVTKKKYALIDEDGHITTRGLEVVRRDWSEIAKETQAKVLEVILREGSIEKAAGIVKKVVEDLANYRVPVEKLIIHEQITRELKRYKATGLHVAIAKRLQARGIKVKPGTIISYVVLKGSKKISDRVILFDEYDSSRHKYDPDYYIHNQVLPAVLRILEAFGYKEKDLEYQRMKQTGLGAWLKMGKK

SEQ ID NO: 983 - protein, 773 aa, unidentified
  REGION 1..773: note = Description of Unknown: Synthetic polypeptide
MILDTDYITENGKPVIRIFKKEKGEFKIEYDRNFEPYIYALLEDDESIEDIKKITGERHGKKVRIIRVEKVKKKFLGEPIEVWKLVFEHPQDYPAIRDAIRSHPAVREIFEYDIPFAKRYLIDKGLVPMEGGEELKLLAFAIATFYHEGDEFAEGEILMISYADESGAKVITWKKIDLPYVEVVSTEREAIKRFLQVLREKDPDVLLTYNGDNFDFAYIKKRCEKLGLKFTIGRDGSEPAIQRMGDRFAVEVKGRIHLDLAPVVRHTIRLPTYTLEAVYEAVFGKKKEKVYAEEIAEAWKSEEGLARVAQYSMEDARATYELGREFFPMEVELAKLIGQSVWDVSRSSTGNLVEWYLLRVAYERNELAPNKPGGEEYQRRMRSSYIGGYVKEPEKGLWESIAYLDFRSSAGSIIVTHNVSPDTLEKECKNYDVAPIVGYRFCKDFKGFIPSILEDLIETRQKVKRKMKATIDPIEKKMLDYRQRALKILANSYYGYQGYPKARWYSKECAESVTAWGRHYIETTIKEAEKFGFKVLYADTDGFFATIPNEKPETIKSKAKKFLKHINEKLPGMLELEYEGFYLRGFFVTKKKYALIDEDGLITTRGLEVVRRDWSEIAKETQAKVLEVILREGSIEKAAGIVKKVVEDLANYRVPVEKLIIHEQITRELKRYKATGPHVAIAKRLQARGIKVKPGTIISYVVLKGSKKISDRVILFDEYDSSRHKYDPDYYIHNQVLPAVLRILEAFGYKEKDLEYQRMKQTGLGAWLKMGKK

SEQ ID NO: 984 - protein, 773 aa, unidentified
  REGION 1..773: note = Description of Unknown: Synthetic polypeptide
MILDTDYITENGKPVIRIFKKEKGEFKIEYDRNFEPYIYALLEDDESIEDIKKITGERHGKKVRIIRVEKVKKKFLGEPIEVWKLVFEHPQDYPAIRDAIRSHPAVREIFEYDIPFAKRYLIDKGLVPMEGGEELKLLAFAIATFYHEGDEFAEGEILMISYADESGAKVITWKKIDLPYVEVVSTEREAIKRFLQVLREKDPDVLLTYNGDNFDFAYIKKRCEKLGLKFTIGRDGSEPKIQRMGDRFAVEVKGRIHLDLAPVVRHTIRLPTYTLEAVYEAVFGKKKEKVYAEEIAEAWKSEEGLKRVAQYSMEDARATYELGREFFPIEVELAKLIGQSVWDVSRSSTGNLVEWYLLRVAYERNELAPNKPGGEEYQRRMRSSYIGGYVKEPEKGLWESIAYLDFRSSAGSIIVTHNVSPDTLEKECKNYDVAPIVGYRFCKDFKGFIPSILEDLIETRQKVKRKMKATIDPIEKKMLDYRQRALKILANSYYGYQGYPKARWYSKECAESVTAWGRHYIETTIKEAEKFGFKVLYADTDGFFATIPNEKPETIKSKAKKFLKHINEKLPGMLELEYEGFYLRGFFVTKKKYALIDEDGHITTRGLEVVRRDWSEIAKETQAKVLEVILREGSIEKAAGIVKKVVEDLANYRVPVEKLIIHEQITRELKRYKATGPHVAIAKRLQARGIKVKPGTIISYVVLKGSKKISDRVILFDEYDSSRHKYDPDYYIHNQVLPAVLRILEAFGYKEKDLEYQRMKQTGLGAWLKMGKK

SEQ ID NO: 985 - protein, 773 aa, unidentified
  REGION 1..773: note = Description of Unknown: Synthetic polypeptide
MILDTDYITENGKPVIRIFKKEKGEFKIEYDRNFEPYIYALLEDDESIEDIKKITGERHGKKVRIIRVEKVKKKFLGEPIEVWKLVFEHPQDYPAIRDAIRSHPAVREIFEYDIPFAKRYLIDKGLVPMEGGEELKLLAFAIATFYHEGDEFAEGEILMISYADESGAKVITWKKIDLPYVEVVSTEREAIKRFLQVLREKDPDVLLTYNGDNFDFAYIKKRCEKLGLKFTIGRDGSEPKIQRMGDRFAVEVKGRIHLDLAPVVRHTIRLPTYTLEAVYEAVFGKKKEKVYAEEIAEAWKSEEGLKRVAQYSMEDARATYELGREFFPMEVELAKLIGQSVWDVSRSSTGNLVEWYLLRVAYERNELAPNKPGGEEYQRRMRSSYIGGYVKEPEKGLWESIAYLDFRSSAGSIIVTHNVSPDTLEKECKNYDVAPIVGYRFCKDFKGFIPSILEDLIETRQKVKRKMKATIDPIEKKMLDYRQRALKILANSYYGYQGYPKARWYSKECAESVTAWGRHYIETTIKEAEKFGFKVLYADTDGFFATIPNEKPETIKSKAKKFLKHINEKLPGMLELEYEGFYLRGFFVTKKKYALIDEDGHITTRGLEVVRRDWSEIAKETQAKVLEVILREGSIEKAAGIVKKVVEDLANYRVPVEKLIIHEQITRELKRYKATGPHVAIAKRLQARGIKVKPGTIISYVVLKGSKKISDRVILFDEYDSSRHKYDPDYYIHNQVLPAVLRILEAFGYKEKDLEYQRMKQTGLGAALKMGKK

SEQ ID NO: 986 - protein, 773 aa, unidentified
  REGION 1..773: note = Description of Unknown: Synthetic polypeptide
MILDTDYITENGKPVIRIFKKEKGEFKIEYDRNFEPYIYALLEDDESIEDIKKITGERHGKKVRIIRVEKVKKKFLGEPIEVWKLVFEHPQDYPAIRDAIRSHPAVREIFEYDIPFAKRYLIDKGLVPMEGGEELKLLAFAIATFYHEGDEFAEGEILMISYADESGAKVITWKKIDLPYVEVVSTEREAIKRFLQVLREKDPDVLLTYNGDNFDFAYIKKRCEKLGLKFTIGRDGSEPKIQRMGDRFAVEVKGRIHLDLAPVVRHTIRLPTYTLEAVYEAVFGKKKEKVDAEEIAEAWKSEEGLKRVAQYSMEDARATYELGREFFPMEVELAKLIGQSVWDVSRSSTGNLVEWYLLRVAYERNELAPNKPGGEEYQRRMRSSYIGGYVKEPEKGLWESIAYLDFRSSAGSIIVTHNVSPDTLEKECKNYDVAPIVGYRFCKDFKGFIPSILEDLIETRQKVKRKMKATIDPIEKKMLDYRQRALKILANSYYGYQGYPKARWYSKECAESVTAWGRHYIETTIKEAEKFGFKVLYADTDGFFATIPNEKPETIKSKAKKFLKHINEKLPGMLELEYEGFYLRGFFVTKKKYALIDEDGHITTRGLEVVRRDWSEIAKETQAKVLEVILREGSIEKAAGIVKKVVEDLANYRVPVEKLIIHEQITRELKRYKATGPHVAIAKRLQARGIKVKPGTIISYVVLKGSKKISDRVILFDEYDSSRHKYDPDYYIHNQVLPAVLRILEAFGYKEKDLEYQRMKQTGLGAWLKMGKK

SEQ ID NO: 987 - protein, 773 aa, unidentified
  REGION 1..773: note = Description of Unknown: Synthetic polypeptide
MILDTDYITENGKPVIRIFKKEKGEFKIEYDRNFEPYIYALLEDDESIEDIKKITGERHGKKVRIIRVEKVKKKFLGEPIEVWKLVFEHPQDVPAIRDAIRSHPAVREIFEYDIPFAKRYLIDKGLVPMEGGEELKLLAFKIATFYHEGDEFAEGEILMISYADESGAKVITWKKIDLPYVEVVSTEREAIKRFLQVLREKDPDVLLTYNGDNFDFAYIKKRCEKLGLKFTIGRDGSEPKIQRMGDRFAVEVKGRIHLDLAPVVRHTIRLPTYTLEAVYEAVFGKKKEKVYAEEIAEAWKSEEGLKRVAQYSMEDARATYELGREFFPMEVELAKLIGQSVWDVSRSSTGNLVEWYLLRVAYERNELAPNKPGGEEYQRRMRSSYIGGYVKEPEKGLWESIAYLDFRSSAGSIIVTHNVSPDTLEKECKNYDVAPIVGYRFCKDFKGFIPSILEDLIETRQKVKRKMKATIDPIEKKMLDYRQRALKILANSYYGYQGYPKARWYSKECAESVTAWGRHYIETTIKEAEKFGFKVLYADTDGFFATIPNEKPETIKSKAKKFLKHINEKLPGMLELEYEGFYLRGFFVTKKKYALIDEDGHITTRGLEVVRRDWSEIAKETQAKVLEVILREGSIEKAAGIVKKVVEDLANYRVPVEKLIIHEQITRELKDYKATGPHVAIAKRLQARGIKVKPGTIISYVVLKGSKKISDRVILFDEYDSSRHKYDPDYYIHNQVLPAVLRILEAFGYKEKDLEYQRMKQTGLGAWLKMGKK

SEQ ID NO: 988 - protein, 773 aa, unidentified
  REGION 1..773: note = Description of Unknown: Synthetic polypeptide
MILDTDYITENGKPVIRIFKKEKGEFKIEYDRNFEPYIYALLEDDESIEDIKKITGERHGKKVRIIRVEKVKKKFLGEPIEVWKLVFEHPQDYPAIRDAIRSHPAVREIFEYDIPFAKRYLIDKGLVPMEGGEELKLLAFAIATFYHEGDEFAEGEILMISYADESGAKVITWKKIDLPYVEVVSTEREAIKRFLQVLREKDPDVLLTYNGDNFDFAYIKKRCEKLGLKFTIGRDGSEPKIQRMGDRFAVEVKGRIHLDLAPVVRHTIRLPTYTLEAVYEAVFGKKKEKVYAEEIAEAWKSEEGLKRVAQYSMEDARATYELGREFFPMEVELAKLIGQSVWDVSRSSTGNLVEWYLLRVAYERNELAPNKPGGEEYQRRMRSSYIGGNVKEPEKGLWESIAYLDFRSSAGSIIVTHNVSPDTLEKECKNYDVAPIVGYRFCKDFKGFIPSILEDLIETRQKVKRKMKATIDPIEKKMLDYRQRALKILANSYYGYQGYPKARWYSKECAESVTAWGRHYIETTIKEAEKFGFKVLYADTDGFFATIPNEKPETIKSKAKKFLKHINEKLPGMLELEYEGFYLRGFFVTKKKYALIDEDGHITTRGLEVVRRDWSEIAKETQAKVLEVILREGSIEKAAGIVKKVVEDLANYRVPVEKLIIHEQITRELKRYKATGPHVAIAKRLQARGIKVKPGTIISYVVLKGSKKISDRVILFDEYDSSRHKYDPDYYIHNQVLPAVLRILEAFGYKEKDLEYQRMKQTGLGAWLKMGKK

SEQ ID NO: 989 - protein, 773 aa, unidentified
  REGION 1..773: note = Description of Unknown: Synthetic polypeptide
MILDTDYITEEGKPVIRIFKKEKGEFKIEYDRNFEPYIYALLEDDESIEDIKKITGERHGKKVRIIRVEKVKKKFLGEPIEVWKLVFEHPQDYPAIRDAIRSHPAVREIFEYDIPFAKRYLIDKGLVPMEGGEELKLLAFAIATFYHEGDEFAEGEILMISYADESGAKVITWKKIDLPYVEVVSTEREAIKRFLQVLREKDPDVLLTYNGDNFDFAYIKKRCEKLGLKFTIGRDGSEPKIQRMGDRFAVEVKGRIHLDLAPVVRHTIRLPTYTLEAVYEAVFGKKKEKVYAEEIAEAWKSEEGLKRVAQYSMEDARATYELGREFFPMEVELAKLIGQSVWDVSRSSTGNLVEWYLLRVAYERNELAPNKPGGEEYQRRMRSSYIGGYVKEPEKGLWESIAYLDFRSSAGSIIVTHNVSPDTLEKECKNYDVAPIVGYRFCKDFKGFIPSILEDLIETRQKVKRKMKATIDPIEKKMLDYRQRALKILANSYYGYQGYPKARWYSKECAESVTAWGRHYIETTIKEAEKFGFKVLYADTDGFFATIPNEKPETIKSKAKKFLKHINEKLPGMLELEYEGFYLRGFFVTKKKYALIDEDGHITTRGLEVVRRDWSEIAKETQAKVLEVILREGSIEKAAGIVKKVVEDLANYRVPVEKLIIHEQITRELKRYKATGPHVAIAKRLQARGIKVKPGTIISYVVLKGSKKISDRVILFDEYDSSRHKYDPDYYIHNQVLPAVLRILEAFGYKEKDLEYQRMKQTGLGAWLKMGKK

SEQ ID NO: 990 - protein, 773 aa, unidentified
  REGION 1..773: note = Description of Unknown: Synthetic polypeptide
MILDTDYITENGKPVIRIFKKEKGEFKIEYDRNFEPYIYALLEDDESIEDIKKITGERHGKKVRIIRVEKVKKKFLGEPIEVWKLVFEHPQDYPAIRDAIRSHPAVREIFEYDIPFAKRYLIDKGLVPMEGGEELKLLAFAIATFYHEGDEFAEGEILMISYADESGAKVITWKKIDLPYVEVVSTEREAIKRFLQVLREKDPDVLLTYNGDNFDFAYIKKRCEKLGLKFTIGRDGSEPRIQRMGDRFAVEVKGRIHLDLAPVVRHTIRLPTYTLEAVYEAVFGKKKEKVYAEEIAEAWKSEEGLKRVAQYSMEDARATYELGREFFPMEVELAKLIGQSVWDVSRSSTGNLVEWYLLRVAYERNELAPNKPGGEEYQRRMRSSYIGGYVKEPEKGLWESIAYLDFRSSAGSIIVTHNVSPDTLEKECKNYDVAPIVGYRFCKDFKGFIPSILEDLIETRQKVKRKMKATIDPIEKKMLDYRQRALKILANSYYGYQGYPKARWYSKECAESVTAWGRHYIETTIKEAEKFGFKVLYADTDGFFATIPNEKPETIKSKAKKFLKHINEKLPGMLELEYEGFYLRGFFVTKKKYALIDEDGHITTRGLEVVRRDWSEIAKETQAKVLEVILREGSIEKAAGIVKKVVEDLANYRVPVEKLIIHEQITRELKRYKATGPHVAIAKRLQARGIKVKPGTIISYVVLKGSKKISDRVILFDEYDSSRHKYDPDYYIHNQVLPAVLRILEAFGYKEKDLEYQRMKQTGLGAWLKMGKK

SEQ ID NO: 991 - protein, 773 aa, unidentified
  REGION 1..773: note = Description of Unknown: Synthetic polypeptide
MILDTDYITENGKPVIRIFKKEKGEFKIEYDRNFEPYIYALLEDDESIEDIKKITGERHGKKVRIIRVEKVKKKFLGEPIEVWKLVFEHPQDVPAIRDAIRSHPAVREIFEYDIPFAKRYLIDKGLVPMEGGEELKLLAFNIATFYHEGDEFAEGEILMISYADESGAKVITWKKIDLPYVEVVSTEREAIKRFLQVLREKDPDVLLTYNGDNFDFAYIKKRCEKLGLKFTIGRDGSEPKIQRMGDRFAVEVKGRIHLDLAPVVRHTIRLPTYTLEAVYEAVFGKKKEKVYAEEIAEAWKSEEGLARVAQYSMEDARATYELGREFFPLEVELAKLIGQSVWDVSRSSTGNLVEWYLLRVAYERNELAPNQPGGEEYQRRMRSSYIGGYVKEPEKGLWESIAYLDFRSSAGSIIVTHNVSPDTLEKECKNYDVAPIVGYRFCKDFKGFIPSILEDLIETRQKVKRKLKATIDPIEKKMLDYRQRALKILANSYYGYQGYPKARWYSKECAESVTAWGRHYIETTIKEAEKFGFKVLYADTDGFFATIPNEKPETIKSKAKKFLKHINEKLPGMLELEYEGFYLRGFFVTKKKYALIDEDGHITTRGLEVVRRDWSEIAKETQAKVLEVILREGSIEKAAGIVKKVVEDLANYRVPVEKLIIHEQITRELKRYKATGPHVAIAKRLQARGIKVKPGTIISYVVLKGSKKISDRVILFDEYDSSRHKYDPDYYIHNQVLPAVLRILEAFGYKEKDLEYQRMKQTGLGAWLKMGKK

SEQ ID NO: 992 - protein, 773 aa, unidentified
  REGION 1..773: note = Description of Unknown: Synthetic polypeptide
MILDTDYITENGKPVIRIFKKEKGEFKIEYDRNFEPYIYALLEDDESIEDIKKITGERHGKKVRIIRVEKVKKKFLGEPIEVWKLVFEHPQDVPAIRDAIRSHPAVREIFEYDIPFAKRYLIDKGLVPMEGGEELKLLAFNIATFYHEGDEFAEGEILMISYADESGAKVITWKKIDLPYVEVVSTEREAIKRFLQVLREKDPDVLLTYNGDNFDFAYIKKRCEKLGLKFTIGRDGSEPKIQRMGDRFAVEVKGRIHLDLAPVVRHTIRLPTYTLEAVYEAVFGKKKEKVYAEEIAEAWKSEEGLKRVAQYSVEDARATYELGREFFPLEVELAKLIGQSVWDVSRSSTGNLVEWYLLRVAYERNELAPNKPGGEEYQRRMRSSYIGGYVKEPEKGLWESIAYLDFRSSAGSIIVTHNVSPDTLEKECKNYDVAPIVGYRFCKDFKGFIPSILEDLIETRQKVKRKMKATIDPIEKKMLDYRQRALKILANSYYGYQGYPKARWYSKECAESVTAWGRHYIETTIKEAEKFGFKVLYADTDGFFATIPNEKPETIKSKAKKFLKHINEKLPGMLELEYEGFYLRGFFVTKKKYALIDEDGHITTRGLEVVRRDWSEIAKETQAKVLEVILREGSIEKAAGIVKKVVEDLANYRVPVEKLIIHEQITRELKRYKATGPHVAIAKRLQARGIKVKPGTIISYVVLKGSKKISDRVILFDEYDSSRHKYDPDYYIHNQVLPAVLRILEAFGYKEKDLEYQRDKQTGLGAWLKMGKK

SEQ ID NO: 993 - protein, 773 aa, unidentified
  REGION 1..773: note = Description of Unknown: Synthetic polypeptide
MILDTDYITENGKPVIRIFKKEKGEFKIEYDRNFEPYIYALLEDDESIEDIKKITGERHGKKVRIIRVEKVKKKFLGEPIEVWKLVFEHPLDVPAINDAIRSHPAVREIFEYDIPFAKRYLIDKGLVPMEGGEELKLLAFNIATFYHEGDEFAEGEILMISYADESGAKVITWKKIDLPYVEVVSTEREAIKRFLQVLREKDPDVLLTYNGDNFDFAYIKKRCEKLGLKFTIGRDGSEPKIQRMGDRFAVEVKGRIHLDLAPVVRHTIRLPTYTLEAVYEAVFGKKKEKVYAEEIAEAWKSEEGLKRVAQYSMEDARATYELGREFFPLEVELAKLIGQSVWDVSRSSTGNLVEWYLLRVAYERNELAPNKPGGEEYQRRMRSSYIGGYVKEPEKGLWESIAYLDFRSSAGSIIVTHNVSPDTLEKECKNYDVAPIVGYRFCKDFKGFIPSILEDLIETRQKVKRKMKATIDPIEKKMLDYRQRALKILANSYYGYQGYPKARWYSKECAESVTAWGRHYIETTIKEAEKFGFKVLYADTDGFFATIPNEKPETIKSKAKKFLKHINEKLPGMLELEYEGFYLRGFFVTKKKYALIDEDGHITTRGLEVVRRDWSEIAKETQAKVLEVILREGSIEKAAGIVKKVVEDLANYRVPVEKLIIHEQITRELKRYKATGPHVAIAKRLQARGIKVKPGTIISYVVLKGSKKISDRVILFDEYDSSRHKYDPDYYIHNQVLPAVLRILEAFGYKEKDLEYQRMKQTGLGAWLKMGKK

SEQ ID NO: 994 - protein, 773 aa, unidentified
  REGION 1..773: note = Description of Unknown: Synthetic polypeptide
MILDTDYITENGKPVIRIFKKEKGEFKIEYDRNFEPYIYALLEDDESIEDIKKITGERHGKKVRIIRVEKVKKKFLGEPIEVWKLVFEHPQDYPAIRDAIRSHPAVREIFEYDIPFAKRYLIDKGLVPMEGGEELKLLAFAIATFYHEGDEFAEGEILMISYADESGAKVITWKKIDLPYVEVVSTEREAIKRFLQVLREKDPDVLLTYNGDNFDFAYIKKRCEKLGLKFTIGRDGSEPKIQRMGDRFAVEVKGRIHLDLAPVVRHTIRLPTYTLEAVYEAVFGKKKEKVYAEEIAEAWKSEEGLKRVAQYSMEDARATYELGREFFPMEVELAKLIGQSVWDVSRSSTGNLVEWYLLRAAYERNELAPNKPGGEEYQRRMRSSYIGGYVKEPEKGLWESIAYLDFRSSAGSIIVTHNVSPDTLEKECKNYDVAPIVGYRFCKDFKGFIPSILEDLIETRQKVKRKMKATIDPIEKKMLDYRQRALKILANSYYGYQGYPKARWYSKECAESVTAWGRHYIETTIKEAEKFGFKVLYADTDGFFATIPNEKPETIKSKAKKFLKHINEKLPGMLELEYEGFYLRGFFVTKKKYALIDEDGHITTRGLEVVRRDWSEIAKETQAKVLEVILREGSIEKAAGIVKKVVEDLANYRVPVEKLIIHEQITRELKRYKATGPHVAIAKRLQARGIKVKPGTIISYVVLKGSKKISDRVILFDEYDSSRHKYDPDYYIHNQVLPAVLRILEAFGYKEKDLEYQRMKQTGLGAWLKMGKK

SEQ ID NO: 995 - protein, 773 aa, unidentified
  REGION 1..773: note = Description of Unknown: Synthetic polypeptide
MILDTDYITENGKPVIRIFKKEKGEFKIEYDRNFEPYIYALLEDDESIEDIKKITGERHGKKVRIIRVEKVKKNFLGEPIEVWKLVFEHPQDYPAIRDAIRSHPAVREIFEYDIPFAKRYLIDKGLVPMEGGEELKLLAFAIATFYHEGDEFAEGEILMISYADESGAKVITWKKIDLPYVEVVSTEREAIKRFLQVLREKDPDVLLTYNGDNFDFAYIKKRCEKLGLKFTIGRDGSEPKIQRMGDRFAVEVKGRIHLDLAPVVRHTIRLPTYTLEAVYEAVFGKKKEKVYAEEIAEAWKSEEGLKRVAQYSMEDARATYELGREFFPMEVELAKLIGQSVWDVSRSSTGNLVEWYLLRVAYERNELAPNKPGGEEYQRRMRSSYIGGYVKEPEKGLWESIAYLDFRSSAGSIIVTHNVSPDTLEKECKNYDVAPIVGYRFCKDFKGFIPSILEDLIETRQKVKRKMKATIDPIEKKMLDYRQRALKILANSYYGYQGYPKARWYSKECAESVTAWGRHYIETTIKEAEKFGFKVLYADTDGFFATIPNEKPETIKSKAKKFLKHINEKLPGMLELEYEGFYLRGFFVTKKKYALIDEDGHITTRGLEVVRRDWSEIAKETQAKVLEVILREGSIEKAAGIVKKVVEDLANYRVPVEKLIIHEQITRELKRYKATGPHVAIAKRLQARGIKVKPGTIISYIVLKGSKKISDRVILFDEYDSSRHKYDPDYYIHNQVLPAVLRILEAFGYKEKDLEYQRMKQTGLGAWLKMGKK

SEQ ID NO: 996 - protein, 766 aa, unidentified
  REGION 1..766: note = Description of Unknown: Synthetic polypeptide
MILDTDYITENGKPVIRIFKKEKGEFKIEYDRNFEPYIYALLEDDESIEDIKKITGERHGKKVRIIRVEKVKKKFLGEPIEVWKLVFEHPQDVPAIRDAIRSHPAVREIFEYDIPFAKRYLIDKGLVPMEGGEELKLLAFRIATFYHEGDEFAEGEILMISYADESGAKVITWKKIDLPYVEVVSTEREAIKRFLQVLREKDPDVLLTYNGDNFDFAYIKKRCEKLGLKFTIGRDGSEPKIQRMGDRFAVEVKGRIHLDLAPVVRHTIRLPTYTLEAVYEAVFGKKKEKVYAEEIAEAWKSEEGLARVAQYSMEDARATYELGREFFPLEVELAKLIGQSVWDVSRSSTGNLVEWYLLRVAYERNELAPNKPGGEEYQRRMRSSYIGGYVKEPEKGLWESIAYLDFRSSAGSIIVTHNVSPDTLEKECKNYDVAPIVGYRFCKDFKGFIPSILEDLIETRQKVKRKMKATIDPIEKKMLDYRQRALKILANSYYGYQGYPKARWYSKECAESVTAWGRHYIETTIKEAEKFGFKVLYADTDGFFATIPNEKPETIKSKAKKFLKHINEKLPGMLELEYEGFYLRGFFVTKKKYALIDEDGHITTRGLEVVRRDWSEIAKETQAKVLEVILREGSIEKAAGIVKKVVEDLANYRVPVEKLIIHEQITRELKRYKATGPHVAIAKRLQARGIKVKPGTIISYVVLKGSKKISDRVILFDEYDSSRHKYDPDYYIHNQVLPAVLRILEAFGYKEKDLEYQRDKQTGLGA

SEQ ID NO: 997 - protein, 766 aa, unidentified
  REGION 1..766: note = Description of Unknown: Synthetic polypeptide
MILDTDYITENGKPVIRIFKKEKGEFKIEYDRNFEPYIYALLEDDESIEDIKKITGERHGKKVRIIRVEKVKKKFLGEPIEVWKLVFEHPQDVPAIRDAIRSHPAVREIFEYDIPFAKRYLIDKGLVPMEGGEELKLLAFNIATFEHEGDEFAEGEILMISYADESGAKVITWKKIDLPYVEVVSTEREAIKRFLQVLREKDPDVLLTYNGDNFDFAYIKKRCEKLGLKFTIGRDGSEPKIQRMGDRFAVEVKGRIHLDLAPVVRHTIRLPTYTLEAVYEAVFGKKKEKVYAEEIAEAWKSEEGLKRVAQYSMEDARATYELGREFFPLEVELAKLIGQSVWDVSRSSTGNLVEWYLLRVAYERNELAPNKPGGEEYQRRMRSSYIGGYVKEPEKGLWESIAYLDFRSSAGSIIVTHNVSPDTLEKECKNYDVAPIVGYRFCKDFKGFIPSILEDLIETRQKVKRKMKATIDPIEKKMLDYRQRALKILANSYYGYQGYPKARWYSKECAESVTAWGRHYIETTIKEAEKFGFKVLYADTDGFFATIPNEKPETIKSKAKKFLKHINEKLPGMLELEYEGFYLRGFFVTKKKYALIDEDGHITTRGLEVVRRDWSEIAKETQAKVLEVILREGSIEKAAGIVKKVVEDLANYRVPVEKLIIHEQITRELKRYKATGPHVAIAKRLQARGIKVKPGTIISYVVLKGSKKISDRVILFDEYDSSRHKYDPDYYIHNQVLPAVLRILEAFGYKEKDLEYQRDKQTGLGA

SEQ ID NO: 998 - protein, 773 aa, unidentified; identical to SEQ ID NO: 916
  REGION 1..773: note = Description of Unknown: Synthetic polypeptide

SEQ ID NO: 999 - protein, 773 aa, unidentified
  REGION 1..773: note = Description of Unknown: Synthetic polypeptide
MILDTDYITENGKPVIRIFKKEKGEFKIEYDRNFEPYIYALLEDDESIEDIKKITGERHGKKVRIIRVEKVKKKFLGEPIEVWKLVFEHPQDYPAIRDAIRSHPAVREIFEYDIPFAKRYLIDKGLVPMEGGEELKLLAFAIATFYHEGDEFAEGEILMISYADESGAKVITWKKIDLPYVEVVSTEREAIKRFLQVLREKDPDVLLTYNGDNFDFAYIKKRCEKLGLKFTIGRDGSEPKINRMGDRFAVEVKGRIHLDLAPVVRHTIRLPTYTLEAVYEAVFGKKKEKVYAEEIAEAWKSEEGLKRVAQYSMEDARATYELGREFFPMEVELAKLIGQSVWDVSRSSTGNLVEWYLLRVAYERNELAPNKPGGEEYQRRMRSSYIGGYVKEPEKGLWESIAYLDFRSSAGSIIVTHNVSPDTLEKECKNYDVAPIVGYRFCKDFKGFIPSILEDLIETRQKVKRKMKATIDPIEKKMLDYRQRALKILANSYYGYQGYPKARWYSKECAESVTAWGRHYIETTIKEAEKFGFKVLYADTDGFFATIPNEKPETIKSKAKKFLKHINEKLPGMLELEYEGFYLRGFFVTKKKYALIDEDGHITTRGLEVVRRDWSEIAKETQAKVLEVILREGSIEKAAGIVKKVVEDLANYRVPVEKLIIHEQITRELKRYKATGPHVAIAKRLQARGIKVKPGTIISYVVLKGSKKISDRVILFDEYDSSRHKYDPDYYIHNQVLPAVLRILEAFGYKEKDLEYQRMKQTGLGAWLKMGKK

SEQ ID NO: 1000 - protein, 773 aa, unidentified
  REGION 1..773: note = Description of Unknown: Synthetic polypeptide
MILDTDYITENGKPVIRIFKKEKGEFKIEYDRNFEPYIYALLEDDESIEDIKKITGERHGKKVRIIRVEKVKKKFLGEPIEVWKLVFEHPQDVPAIRDAIRSHPAVREIFEYDIPFAKRYLIDKGLVPMEGGEELKLLAFNIATFYHEGDEFAEGEILMISYADESGAKVITWKKIDLPYVEVVSTEREAIKRFLQVLREKDPDVLLTYNGDNFDFAYIKKRCEKLGLKFTIGRDGSEPKIQRMGDRFAVEVKGRIHLDLAPVVRHTIRLPTYTLEAVYEAVFGKKKEKVYAEEIAEAWKSEEGLARVAQYSMEDARATYELGREFFPLEVELAKLIGQSVWDVSRSSTGNLVEWYLLRVAYERNELAPNKPGGEEYQRRMRSSYIGGYVKEPEKGLWESIAYLDFRSSAGSIIVTHNVSPDTLEKECKNYDVAPIVGYRFCKDFKGFIPSILEDLIETRQKVKRKMKATIDPIEKKMLDYRQRALKILANSYYGYQGYPKARWYSKECAESVTAWGRHYIETTIKEAEKFGFKVLYADTDGFFATIPNEKPETIKSKAKKFLKHINEKLPGMLELEYEGFYLRGFFVTKKKYALIDEDGHITTRGLEVVRRDWSEIAKETQAKVLEVILREGSIEKAAGIVKKVVEDLANYRVPVEKLIIHEFITRELKRYKATGPHVAIAKRLQARGIKVKPGTIISYVVLKGSKKISDRVILFDEYDSSRHKYDPDYYIHNQVLPAVLRILEAFGYKEKDLEYQRDKQTGLGAWLKMGKK

SEQ ID NO: 1001 - protein, 773 aa, unidentified; identical to SEQ ID NO: 782
  REGION 1..773: note = Description of Unknown: Synthetic polypeptide

SEQ ID NO: 1002 - protein, 773 aa, unidentified
  REGION 1..773: note = Description of Unknown: Synthetic polypeptide
MILDTDYITENGKPVIRIFKKEKGEFKIEYDRNFEPYIYALLEDDESIEDIKKITGERHGKKVRIIRVEKVKKKFLGEPIEVWKLVFEHPQDYPAIRDAIRSHPAVREIFEYDIPFAKRYLIDKGLVPMEGGEELKLLAFAIATFYHEGDEFAEGEILMISYADESGAKVITWKKIDLPYVEVVSTEREAIKRFLQVLREKDPDVLLTYNGDNFDFAYIKKRCEKLGLKFTIGRDGSEPKIQRMGDRFAVEVKGRIHLDLAPVVRHTIRLPTYTLEAVYEAVFGKKKEKVYAEEIAEAWKSEEGLKRVAQYSMEDARATYELGREFFPMEVELAKLIGQSVWDVSRSSTGILVEWYLLRVAYERNELAPNKPGGEEYQRRMRSSYIGGYVKEPEKGLWESIAYLDFRSSAGSIIVTHNVSPDTLEKECKNYDVAPIVGYRFCKDFKGFIPSILEDLIETRQKVKRKMKATIDPIEKKMLDYRQRALKILANSYYGYQGYPKARWYSKECAESVTAWGRHYIETTIKEAEKFGFKVLYADTDGFFATIPNEKPETIKSKAKKFLKHINEKLPGMLELEYEGFYLRGFFVTKKKYALIDEDGHITTRGLEVVRRDWSEIAKETQAKVLEVILREGSIEKAAGIVKKVVEDLANYRVPVEKLIIHEQITRELKRYKATGPHVAIAKRLQARGIKVKPGTIISYVVLKGSKKISDRVILFDEYDSSRHKYDPDYYIHNQVLPAVLRILEAFGYKEKDLEYQRMKQTGLGAWLKMGKK

SEQ ID NO: 1003 - protein, 773 aa, unidentified
  REGION 1..773: note = Description of Unknown: Synthetic polypeptide
MILDTDYITENGKPVIRIFKKEKGEFKIEYDRNFEPYIYALLEDDESIEDIKKITGERHGKKVRIIRVEKVKKKFLGEPIEVWKLVFEHPQDYPAIRDAIRSHPAVREIFEYDIPFAKRYLIDKGLVPMEGGEELKLLAFAIATFYHEGDEFAEGEILMISYADESGAKVITWKKIDLPYVEVVSTEREAIKRFLQVLREKDPDVLLTYNGDNFDFQYIKKRCEKLGLKFTIGRDGSEPKIQRMGDRFAVEVKGRIHLDLAPVVRHTIRLPTYTLEAVYEAVFGKKKEKVYAEEIAEAWKSEEGLARVAQYSMEDARATYELGREFFPMEVELAKLIGQSVWDVSRSSTGNLVEWYLLRVAYERNELAPNKPGGEEYQRRMRSSYIGGYVKEPEKGLWESIAYLDFRSSAGSIIVTHNVSPDTLEKECKNYDVAPIVGYRFCKDFKGFIPSILEDLIETRQKVKRKMKATIDPIEKKMLDYRQRALKILANSYYGYQGYPKARWYSKECAESVTAWGRHYIETTIKEAEKFGFKVLYADTDGFFATIPNEKPETIKSKAKKFLKHINEKLPGMLELEYEGFYLRGFFVTKKKYALIDEDGHITTRGLEVVRRDWSEIAKETQAKVLEVILREGSIEKAAGIVKKVVEDLANYRVPVEKLIIHEQITRELKRYKATGPHVAIAKRLQARGIKVKPGTIISYVVLKGSKKISDRVILFDEYDSSRHKYDPDYYIHNQVLPAVLRILEAFGYKEKDLEYQRDKQTGLGAWLKMGKK

SEQ ID NO: 1004 - protein, 773 aa, unidentified
  REGION 1..773: note = Description of Unknown: Synthetic polypeptide
MILDTDYITENGKPVIRIFKKEKGEFKIEYDRNFEPYIYALLEDDESIEDIKKITGERHGKKVRIIRVEKVKKKFLGEPIEVWKLVFEHPQDYPAIRDAIRSHPAVREIFEYDIPFAKRYLIDKGLVPMEGGEELKLLAFAIATFYHEGDEFAEGEILMISYADESGAKVITWKKIDLPYVEVVSTEREAIKRFLQVLREKDPDVLLTYNGDNFDFAYIKKRCEKLGLKFTIGRDGSEPKIQRMGDRFAVEVKGRIHLDLAPVVRHTIRLPTYTLEAVYEAVFGKKKEKVYAEEIAEAWKSEEGLKRVAQYSMEDARATYELGREFFPMEVELAKLIGQSVWDVSRSSTGNLVEWYLLRVAYERNELAPNKPGGEEYQRRMRSSYIGGYVKEPEKGLWESIAYLDFRSSGASIIVTHNVSPDTLEKECKNYDVAPIVGYRFCKDFKGFIPSILEDLIETRQKVKRKMKATIDPIEKKMLDYRQRALKILANSYYGYQGYPKARWYSKECAESVTAWGRHYIETTIKEAEKFGFKVLYADTDGFFATIPNEKPETIKSKAKKFLKHINEKLPGMLELEYEGFYLRGFFVTKKKYALIDEDGHITTRGLEVVRRDWSEIAKETQAKVLEVILREGSIEKAAGIVKKVVEDLANYRVPVEKLIIHEQITRELKRYKATGPHVAIAKRLQARGIKVKPGTIISYVVLKGSKKISDRVILFDEYDSSRHKYDPDYYIHNQVLPAVLRILEAFGYKEKDLEYQRMKQTGLGAWLKMGKK

SEQ ID NO: 1005 - protein, 773 aa, unidentified
  REGION 1..773: note = Description of Unknown: Synthetic polypeptide
MILDTDYITENGKPVIRIFKKEKGEFKIEYDRNFEPYIYALLEDDESIEDIKKITGERHGKKVRIIRVEKVKKKFLGEPIEVWKLVFEHPQDVPAIRDAIRSHPAVREIFEYDIPFAKRYLIDKGLVPMEGGEELKLLAFNIATFYHEGDEFAEGEILMISYADESGAKVITWKKIDLPYVEVVSTEREAIKRFLQVLREKDPDVLLTYNGDNFDFAYIKKRCEKLGLKFTIGRDGSEPKIQRMGDRFAVEVKGRIHLDLAPVVRHTIRLPTYTLEAVYEAVFGKKKEKVYAEEIAEAWKSEEGLARVAQYSVEDARATYELGREFFPLEVELAKLIGQSVWDVSRSSTGNLVEWYLLRVAYERNELAPNKPGGEEYQRRMRSSYIGGYVKEPEKGLWESIAYLDFRSSAGSIIVTHNVSPDTLEKECKNYDVAPIVGYRFCKDFKGFIPSILEDLIETRQKVKRKMKATIDPIEKKMLDYRQRALKILANSYYGYQGYPKARWYSKECAESVTAWGRHYIETTIKEAEKFGFKVLYADTDGFFATIPNEKPETIKSKAKKFLKHINEKLPGMLELEYEGFYLRGFFVTKKKYALIDEDGHITTRGLEVVRRDWSEIAKETQAKVLEVILREGSIEKAAGIVKKVVEDLANYRVPVEKLIIHEQITRELKRYKATGPHVAIAKRLQARGIKVKPGTIISYVVLKGSKKISDRVILFDEYDSSRHKYDPDYYIHNQVLPAVLRILEAFGYKEKDLEYQRDKQTGLGAWLKMGKK

SEQ ID NO: 1006 - protein, 773 aa, unidentified
  REGION 1..773: note = Description of Unknown: Synthetic polypeptide
MILDTDYITENGKPVIRIFKKEKGEFKIEYDRNFEPYIYALLEDDESIEDIKKITGERHGKKVRIIRVEKVKKKFLGEPIEVWKLVFEHPQDYPAIRDAIRSHPAVREIFEYDIPFAKRYLIDKGLVPMEGGEELKLLAFAIATFYHEGDEFAEGEILMISYADESGAKVITWKKIDLPYVEVVSTEREAIKRFLQVLREKDPDVLLTYNGDNFDFAYIKKRCEKLGLKFTIGRDGSEPKIQRMGDRFAVEVKGRIHLDLAPVVRHTIRLPTYTLEAVYEAVFGKKKEKVYAEEIAEAWKSEEGLARVAQYSMEDARATYELGREFFPMEVELAKLIGQSVWDVSRSSTGNLVEWYLLRVAYERNELAPNKPGGEEYQRRMRSSYIGGYVKEPEKGLWESIAYLDFRSSAASIIVTHNVSPDTLEKECKNYDVAPIVGYRFCKDFKGFIPSILEDLIETRQKVKRKMKATIDPIEKKMLDYRQRALKILANSYYGYQGYPKARWYSKECAESVTAWGRHYIETTIKEAEKFGFKVLYADTDGFFATIPNEKPETIKSKAKKFLKHINEKLPGMLELEYEGFYLRGFFVTKKKYALIDEDGHITTRGLEVVRRDWSEIAKETQAKVLEVILREGSIEKAAGIVKKVVEDLANYRVPVEKLIIHEQITRELKRYKATGPHVAIAKRLQARGIKVKPGTIISYVVLKGSKKISDRVILFDEYDSSRHKYDPDYYIHNQVLPAVLRILEAFGYKEKDLEYQRMKQTGLGAWLKMGKK

SEQ ID NO: 1007 - protein, 773 aa, unidentified
  REGION 1..773: note = Description of Unknown: Synthetic polypeptide
MILDTDYITENGKPVIRIFKKEKGEFKIEYDRNFEPYIYALLEDDESIEDIKKITGERHGKKVRIIRVEKVKKKFLGEPIEVWKLVFEHPQDYPAIRDAIRSHPAVREIFEYDIPFAKRYLIDKGLVPMEGGEELKLLAFAIATFYHEGDEFAEGEILMISYADESGAKVITAKKIDLPYVEVVSTEREAIKRFLQVLREKDPDVLLTYNGDNFDFAYIKKRCEKLGLKFTIGRDGSEPKIQRMGDRFAVEVKGRIHLDLAPVVRHTIRLPTYTLEAVYEAVFGKKKEKVYAEEIAEAWKSEEGLKRVAQYSMEDARATYELGREFFPMEVELAKLIGQSVWDVSRSSTGNLVEWYLLRVAYERNELAPNKPGGEEYQRRMRSSYIGGYVKEPEKGLWESIAYLDFRSSAGSIIVTHNVSPDTLEKECKNYDVAPIVGYRFCKDFKGFIPSILEDLIETRQKVKRKMKATIDPIEKKMLDYRQRALKILANSYYGYQGYPKARWYSKECAESVTAWGRHYIETTIKEAEKFGFKVLYADTDGFFATIPNEKPETIKSKAKKFLKHINEKLPGMLELEYEGFYLRGFFVTKKKYALIDEDGHITTRGLEVVRRDWSEIAKETQAKVLEVILREGSIEKAAGIVKKVVEDLANYRVPVEKLIIHEQITRELKRYKATGPHVAIAKRLQARGIKVKPGTIISYVVLKGSKKISDRVILFDEYDSSRHKYDPDYYIHNQVLPAVLRILEAFGYKEKDLEYQRMKQTGLGAWLKMGKK

SEQ ID NO: 1008 - protein, 773 aa, unidentified
  REGION 1..773: note = Description of Unknown: Synthetic polypeptide
MILDTDYITENGKPVIRIFKKEKGEFKIEYDRNFEPYIYALLEDDESIEDIKKITGERHGKKVRIIRVEKVKKKFLGEPIEVWKLVFEHPQDYPAIRDAIRSHPAVREIFEYDIPFAKRYLIDKGLVPMEGGEELKLLAFAIATFYHEGDEFAEGEILMISYADESGAKVITWKKIDLPYVEVVSTEREAIKRFLQVLREKDPDVLLTYNGDNFDFAYIKKRCEKLGLKFTIGRDGSEPKIQRMGDRFAVEVKGRIHLDLAPVVRHTIRLPTYTLEAVYEAVFGKKKEKVYAEEIAEAWKSEEGLKRVAQYSMEDARATYELGREFFPMEVELAKLIGQSVWDVSRSSTGNLVEWYLLRVAYERNELAPNKPGGEEYQRRMRSSYIGGYVKEPEKGLWESIAYLDFRSLAASIIVTHNVSPDTLEKECKNYDVAPIVGYRFCKDFKGFIPSILEDLIETRQKVKRKMKATIDPIEKKMLDYRQRALKILANSYYGYQGYPKARWYSKECAESVTAWGRHYIETTIKEAEKFGFKVLYADTDGFFATIPNEKPETIKSKAKKFLKHINEKLPGMLELEYEGFYLRGFFVTKKKYALIDEDGHITTRGLEVVRRDWSEIAKETQAKVLEVILREGSIEKAAGIVKKVVEDLANYRVPVEKLIIHEQITRELKRYKATGPHVAIAKRLQARGIKVKPGTIISYVVLKGSKKISDRVILFDEYDSSRHKYDPDYYIHNQVLPAVLRILEAFGYKEKDLEYQRMKQTGLGAWLKMGKK

SEQ ID NO: 1009 - protein, 766 aa, unidentified
  REGION 1..766: note = Description of Unknown: Synthetic polypeptide
MILDTDYITENGKPVIRIFKKEKGEFKIEYDRNFEPYIYALLEDDESIEDIKKITGERHGKKVRIIRVEKVKKKFLGEPIEVWKLVFEHPQDVPAIRDAIRSHPAVREIFEYDIPFAKRYLIDKGLVPMEGGEELKLLAFRIATFYHEGDEFAEGEILMISYADESGAKVITWKKIDLPYVEVVSTEREAIKRFLQVLREKDPDVLLTYNGDNFDFAYIKKRCEKLGLKFTIGRDGSEPKIQRMGDRFAVEVKGRIHLDLAPVVRHTIRLPTYTLEAVYEAVFGKKKEKVYAEEIAEAWKSEEGLKRVAQYSMEDARATYELGREFFPLEVELAKLIGQSVWDVSRSSTGNLVEWYLLRVAYERNELAPNQPGGEEYQRRMRSSYIGGYVKEPEKGLWESIAYLDFRSSAGSIIVTHNVSPDTLEKECKNYDVAPIVGYRFCKDFKGFIPSILEDLIETRQKVKRKMKATIDPIEKKMLDYRQRALKILANSYYGYQGYPKARWYSKECAESVTAWGRHYIETTIKEAEKFGFKVLYADTDGFFATIPNEKPETIKSKAKKFLKHINEKLPGMLELEYEGFYLRGFFVTKKKYALIDEDGHITTRGLEVVRRDWSEIAKETQAKVLEVILREGSIEKAAGIVKKVVEDLANYRVPVEKLIIHEQITRELKRYKATGPHVAIAKRLQARGIKVKPGTIISYVVLKGSKKISDRVILFDEYDSSRHKYDPDYYIHNQVLPAVLRILEAFGYKEKDLEYQRDKQTGLGA

SEQ ID NO: 1010 - protein, 773 aa, unidentified
  REGION 1..773: note = Description of Unknown: Synthetic polypeptide
MILDTDYITENGKPVIRIFKKEKGEFKIEYDRNFEPYIYALLEDDESIEDIKKITGERHGKKVRIIRVEKVKKKFLGEPIEVWKLVFEHPQDYPAIRDAIRSHPAVREIFEYDIPFAKRYLIDKGLVPMEGGEELKLLAFNIATFYHEGDEFAEGEILMISYADESGAKVITWKKIDLPYVEVVSTEREAIKRFLQVLREKDPDVLLTYNGDNFDFAYIKKRCEKLGLKFTIGRDGSEPKIQRMGDRFAVEVKGRIHLDLAPVVRHTIRLPTYTLEAVYEAVFGKKKEKVYAEEIAEAWKSEEGLKRVAQYSMEDARATYELGREFFPLEVELAKLIGQSVWDVSRSSTGNLVEWYLLRVAYERNELAPNKPGGEEYQRRMRSSYIGGYVKEPEKGLWESIAYLDFRSASGSIIVTHNVSPDTLEKECKNYDVAPIVGYRFCKDFKGFIPSILEDLIETRQKVKRKMKATIDPIEKKMLDYRQRALKILANSYYGYQGYPKARWYSKECAESVTAWGRHYIETTIKEAEKFGFKVLYADTDGFFATIPNEKPETIKSKAKKFLKHINEKLPGMLELEYEGFYLRGFFVTKKKYALIDEDGHITTRGLEVVRRDWSEIAKETQAKVLEVILREGSIEKAAGIVKKVVEDLANYRVPVEKLIIHEQITRELKRYKATGPHVAIAKRLQARGIKVKPGTIISYVVLKGSKKISDRVILFDEYDSSRHKYDPDYYIHNQVLPAVLRILEAFGYKEKDLEYQRMKQTGLGAWLKMGKK

SEQ ID NO: 1011 - protein, 773 aa, unidentified
  REGION 1..773: note = Description of Unknown: Synthetic polypeptide
MILDTDYITENGKPVIRIFKKEKGEFKIEYDRNFEPYIYALLEDDESIEDIKKITGERHGKKVRIIRVEKVKKNFLGEPIEVWKLVFEHPQDYPAIRDAIRSHPAVREIFEYDIPFAKRYLIDKGLVPMEGGEELKLLAFAIATFYHEGDEFAEGEILMISYADESGAKVITWKKIDLPYVEVVSTEREAIKRFLQVLREKDPDVLLTYNGDNFDFAYIKKRCEKLGLKFTIGRDGSEPKIQRMGDRFAVEVKGRIHLDLAPVVRHTIRLPTYTLEAVYEAVFGKKKEKVYAEEIAEAWKSEEGLKRVAQYSMEDARATYELGREFFPMEVELAKLIGQSVWDVSRSSTGNLVEWFLLRVAYERNELAPNKPGGEEYQRRMRSSYIGGYVKEPEKGLWESIAYLDFRSSAGSIIVTHNVSPDTLEKECKNYDVAPIVGYRFCKDFKGFIPSILEDLIETRQKVKRKMKATIDPIEKKMLDYRQRALKILANSYYGYQGYPKARWYSKECAESVTAWGRHYIETTIKEAEKFGFKVLYADTDGFFATIPNEKPETIKSKAKKFLKHINEKLPGMLELEYEGFYLRGFFVTKKKYALIDEDGHITTRGLEVVRRDWSEIAKETQAKVLEVILREGSIEKAAGIVKKVVEDLANYRVPVEKLIIHEQITRELKRYKATGPHVAIAKRLQARGIKVKPGTIISYVVLKGSKKISDRVILFDEYDSSRHKYDPDYYIHNQVLPAVLRILEAFGYKEKDLEYQRMKQTGLGAWLKMGKK

SEQ ID NO: 1012 - protein, 773 aa, unidentified
  REGION 1..773: note = Description of Unknown: Synthetic polypeptide
MILDTDYITENGKPVIRIFKKEKGEFKIEYDRNFEPYIYALLEDDESIEDIKKITGERHGKKVRIIRVEKVKKKFLGEPIEVWKLVFEHPQDYPAIRDAIRSHPAVREIFEYDIPFAKRYLIDKGLVPMEGGEELKLLAFAIATFYHEGDEFAEGEILMISYADESGAKVITWKKIDLPYVEVVSTEREAIKRFLQVLREKDPDVLLTYNGDNFDFAYIKKRCEKLGLKFTIGRDGSEPKIQRMGDRFAVEVKGRIHLDLAPVVRHTIRLPTYTLEAVYEAVFGKKKEKVYAEEIAEAWKSEEGLARVAQYSMEDARATYELGREFFPMEVELAKLIGQSVWDVSRSSTGNLVEWYLLRVAYERNELAPNKPGGEEYQRRMRSSYIGGYVKEPEKGLWESIAYLDFRSSAGSIIVTHNVSPDTLEKECKNYDVAPIVGYRFCKDFKGFIPSILEDLIETRQKVKRKMKATIDPIEKKMLDYRQRALKILANSYYGYQGYPKARWYSKECAESVTAWGRHYIETTIKEAEKFGFKVLYADTDGFFATIPNEKPETIKSKAKKFLKHINEKLPGMLELEYEGFYLRGFFVTKKKYALIDEDGHITTRGLEVVRRDWSEIAKETQAKVLEVILREGSIEQAAGIVKKVVEDLANYRVPVEKLIIHEQITRELKRYKATGPHVAIAKRLQARGIKVKPGTIISYVVLKGSKKISDRVILFDEYDSSRHKYDPDYYIHNQVLPAVLRILEAFGYKEKDLEYQRDKQTGLGAWLKMGKK

SEQ ID NO: 1013 - protein, 773 aa, unidentified
  REGION 1..773: note = Description of Unknown: Synthetic polypeptide
MILDTDYITENGKPVIRIFKKEKGEFKIEYDRNFEPYIYALLEDDESIEDIKKITGERHGKKVRIIRVEKVKKNFLGEPIEVWKLVFEHPQDYPAIRDAIRSHPAVREIFEYDIPFAKRYLIDKGLVPMEGGEELKLLAFAIATFYHEGDEFAEGEILMISYADESGAKVITWKKIDLPYVEVVSTEREMIKRFLQVLREKDPDVLLTYNGDNFDFAYIKKRCEKLGLKFTIGRDGSEPKIQRMGDRFAVEVKGRIHLDLAPVVRHTIRLPTYTLEAVYEAVFGKKKEKVYAEEIAEAWKSEEGLKRVAQYSMEDARATYELGREFFPMEVELAKLIGQSVWDVSRSSTGNLVEWYLLRVAYERNELAPNKPGGEEYQRRMRSSYIGGYVKEPEKGLWESIAYLDFRSSAGSIIVTHNVSPDTLEKECKNYDVAPIVGYRFCKDFKGFIPSILEDLIETRQKVKRKMKATIDPIEKKMLDYRQRALKILANSYYGYQGYPKARWYSKECAESVTAWGRHYIETTIKEAEKFGFKVLYADTDGFFATIPNEKPETIKSKAKKFLKHINEKLPGMLELEYEGFYLRGFFVTKKKYALIDEDGHITTRGLEVVRRDWSEIAKETQAKVLEVILREGSIEKAAGIVKKVVEDLANYRVPVEKLIIHEQITRELKRYKATGPHVAIAKRLQARGIKVKPGTIISYVVLKGSKKISDRVILFDEYDSSRHKYDPDYYIHNQVLPAVLRILEAFGYKEKDLEYQRMKQTGLGAWLKMGKK

SEQ ID NO: 1014 - protein, 773 aa, unidentified
  REGION 1..773: note = Description of Unknown: Synthetic polypeptide
MILDTDYITENGKPVIRIFKKEKGEFKIEYDRNFEPYIYALLEDDESIEDIKKITGERHGKKVRIIRVEKVKKKFLGEPIEVWKLVFEHPQDYPAIRDAIRSHPAVREIFEYDIPFAKRYLIDKGLVPMEGGEELKLLAFAIATFYHEGDEFAEGEILMISYADESGAKVITWKKIDLPYVEVVSTEREAIKRFLQVLREKDPDVLLTYNGDNFDFAYIKKRCEKLGLKFTIGRDGSEPKIQRMGDRFAVEVKGRIHLDLAPVVRHTIRLPTYTLEAVYEAVFGKKKEKVYAEEIAEAWKSEEGLKRVAQYSMEDARATYELGREFFPMEVELAKLIGQSVWDVSRSSTGNLVEWYLLRVAYERNELAPNKPGGEEYQRRMRSSYIGGYVKEPEKGLWESIAYLDFRSSAGSIIVTHNVSPDTLEKECKNYDVAPIVGYRFCKDFKGFIPSILEDLIETRQKVKRKMKATIDPIEKKMLDYRQRALKILANSYYGYQGYPRARWYSKECAESVTAWGRHYIETTIKEAEKFGFKVLYADTDGFFATIPNEKPETIKSKAKKFLKHINEKLPGMLELEYEGFYLRGFFVTKKKYALIDEDGHITTRGLEVVRRDWSEIAKETQAKVLEVILREGSIEKAAGIVKKVVEDLANYRVPVEKLIIHEQITRELKRYKATGPHVAIAKRLQARGIKVKPGTIISYVVLKGSKKISDRVILFDEYDSSRHKYDPDYYIHNQVLPAVLRILEAFGYKEKDLEYQRMKQTGLGAWLKMGKK

SEQ ID NO: 1015 - protein, 773 aa, unidentified
  REGION 1..773: note = Description of Unknown: Synthetic polypeptide
MILDTDYITENGKPVIRIFKKEKGEFKIEYDRNFEPYIYALLEDDESIEDIKKITGERHGKKVRIIRVEKVKKKFLGEPIEVWKLVFEHPQDVPAIRDAIRSHPAVREIFEYDIPFAKRYLIDKGLVPMEGGEELKLLAFNIATFYHEGDEFAEGEILMISYADESGAKVITWKKIDLPYVEVVSTEREAIKRFLQVLREKDPDVLLTYNGDNFDFAYIKKRCEKLGLKFTIGRDGSEPKIQRMGDRFAVEVKGRIHLDLAPVVRHTIRLPTYTLEAVYEAVFGKKKEKVYAEEIAEAWKSEEGLARVAQYSMEDARATYELGREFFPLEVELAKLIGQSVWDVSRSSTGNLVEWYLLRVAYERNELAPNKPGGEEYQRRMRSSYIGGYVKEPEKGLWESIAYLDFRSSAGSIIVTHNVSPDTLEKECKNYDVAPIVGYRFCKDFKGFIPSILEDLIETRQKVKRKMKATIDPIEKKMLDYRQRALKILANSYYGYQGYPKARWYSKECAESVTAWGRHYIETTIKEAEKFGFKVLYADTDGFFATIPNEKPETIKSKAKKFLKHINEKLPGMLELEYEGFYLRGFFVTKKKYALIDEDGHITTRGLEVVRRDWSEIAKETQAKVLEVILREGSIEKAAGIVKKVVEDLANYRVPVEKLIIHEQITRKLKRYKATGPHVAIAKRLQARGIKVKPGTIISYVVLKGSKKISDRVILFDEYDSSRHKYDPDYYIHNQVLPAVLRILEAFGYKEKDLEYQRDKQTGLGAWLKMGKK

SEQ ID NO: 1016 - protein, 766 aa, unidentified
  REGION 1..766: note = Description of Unknown: Synthetic polypeptide
MILDTDYITENGKPVIRIFKKEKGEFKIEYDRNFEPYIYALLEDDESIEDIKKITGERHGKKVRIIRVEKVKKKFLGEPIEVWKLVFEHPQDLPAIRDAIRSHPAVREIFEYDIPFAKRYLIDKGLVPMEGGEELKLLAFNIATFYHEGDEFAEGEILMISYADESGAKVITWKKIDLPYVEVVSTEREAIKRFLQVLREKDPDVLLTYNGDNFDFAYIKKRCEKLGLKFTIGRDGSEPKIQRMGDRFAVEVKGRIHLDLAPVVRHTIRLPTYTLEAVYEAVFGKKKEKVYAEEIAEAWKSEEGLARVAQYSMEDARATYELGREFFPLEVELAKLIGQSVWDVSRSSTGNLVEWYLLRVAYERNELAPNKPGGEEYQRRMRSSYIGGYVKEPEKGLWESIAYLDFRSSAGSIIVTHNVSPDTLEKECKNYDVAPIVGYRFCKDFKGFIPSILEDLIETRQKVKRKMKATIDPIEKKMLDYRQRALKILANSYYGYQGYPKARWYSKECAESVTAWGRHYIETTIKEAEKFGFKVLYADTDGFFATIPNEKPETIKSKAKKFLKHINEKLPGMLELEYEGFYLRGFFVTKKKYALIDEDGHITTRGLEVVRRDWSEIAKETQAKVLEVILREGSIEKAAGIVKKVVEDLANYRVPVEKLIIHEQITRELKRYKATGPHVAIAKRLQARGIKVKPGTIISYVVLKGSKKISDRVILFDEYDSSRHKYDPDYYIHNQVLPAVLRILEAFGYKEKDLEYQRDKQTGLGA

SEQ ID NO: 1017 - protein, 773 aa, unidentified
  REGION 1..773: note = Description of Unknown: Synthetic polypeptide
MILDTDYITENGKPVIRIFKKEKGEFKIEYDRNFEPYIYALLEDDESIEDIKKITGERHGKKVRIIRVEKVKKNFLGEPIEVWKLVFEHPQDYPAIRDAIRSHPAVREIFEYDIPFAKRYLIDKGLVPMEGGEELKLLAFNIATFYHEGDEFAEGEILMISYADESGAKVITWKKIDLPYVEVVSTEREAIKRFLQVLREKDPDVLLTYNGDNFDFAYIKKRCEKLGLKFTIGRDGSEPKIQRMGDRFAVEVKGRIHLDLAPVVRHTIRLPTYTLEAVYEAVFGKKKEKVYAEEIAEAWKSEEGLARVAQYSVEDARATYELGREFFPMEVELAKLIGQSVWDVSRSSTGNLVEWYLLRVAYERNELAPNQPGGEEYQRRMRSSYIGGYVKEPEKGLWESIAYLDFRSSAGSIIVTHNVSPDTLEKECKNYDVAPIVGYRFCKDFKGFIPSILEDLIETRQKVKRKMKATIDPIEKKMLDYRQRALKILANSYYGYQGYPKARWYSKECAESVTAWGRHYIETTIKEAEKFGFKVLYADTDGFFATIPNEKPETIKSKAKKFLKHINEKLPGMLELEYEGFYLRGFFVTKKKYALIDEDGHITTRGLEVVRRDWSEIAKETQAKVLEVILREGSIEKAAGIVKKVVEDLANYRVPVEKLIIHEQITRELKRYKATGPHVAIAKRLQARGIKVKPGTIISYVVLKGSKKISDRVILFDEYDSSRHKYDPDYYIHNQVLPAVLRILEAFGYKEKDLEYQRDKQTGLGAWLKMGKK

SEQ ID NO: 1018 - protein, 773 aa, unidentified
  REGION 1..773: note = Description of Unknown: Synthetic polypeptide
MILDTDYITENGKPVIRIFKKEKGEFKIEYDRNFEPYIYALLEDDESIEDIKKITGERHGKKVRIIRVEKVKKKFLGEPIEVWKLVFEHPQDYPAIRDAIRSHPAVREIFEYDIPFAKRYLIDKGLVPMEGGEELKLLAFAIATFYHEGDEFAEGEILMISYADESGAKVITWKKIDLPYVEVVSTEREAIKRFLQVLREKDPDVLLTYNGDNFDFAYIKKRCEKLGLKFTIGRDGSEPKIQRMGDRFAVEVKGRIHLDLAPVVRHTIRLPTYTLEAVYEAVFGKKKEKVYAEEIAEAWKSEEGLARVAQYSVEDARATYELGREFFPMEVELAKLIGQSVWDVSRSSTGNLVEWYLLRVAYERNELAPNQPGGEEYQRRMRSSYIGGYVKEPEKGLWESIAYLDFRSSAGSIIVTHNVSPDTLEKECKNYDVAPIVGYRFCKDFKGFIPSILEDLIETRQKVKRKMKATIDPIEKKMLDYRQRALKILANSYYGYQGYPKARWYSKECARSVTAWGRHYIETTIKEAEKFGFKVLYADTDGFFATIPNEKPETIKSKAKKFLKHINEKLPGMLELEYEGFYLRGFFVTKKKYALIDEDGHITTRGLEVVRRDWSEIAKETQAKVLEVILREGSIEKAAGIVKKVVEDLANYRVPVEKLIIHEQITRELKRYKATGPHVAIAKRLQARGIKVKPGTIISYVVLKGSKKISDRVILFDEYDSSRHKYDPDYYIHNQVLPAVLRILEAFGYKEKDLEYQRDKQTGLGAWLKMGKK

SEQ ID NO: 1019 - protein, 773 aa, unidentified
  REGION 1..773: note = Description of Unknown: Synthetic polypeptide
MILDTDYITENGKPVIRIFKKEKGEFKIEYDRNFEPYIYALLEDDESIEDIKKITGERHGKKVRIIRVEKVKKKFLGEPIEVWKLVFEHPQDYPAIRDAIRSHPAVREIFEYDIPFAKRYLIDKGLVPMEGGEELKLLAFAIATFYHEGDEFAEGEILMISYADESGAKVITWKKIDLPYVEVVSTEREAIKRFLQVLREKDPDVLLTYNGDNFDFAYIKKRCEKLGLKFTIGRDGSEPKIDRMGDRFAVEVKGRIHLDLAPVVRHTIRLPTYTLEAVYEAVFGKKKEKVYAEEIAEAWKSEEGLKRVAQYSMEDARATYELGREFFPMEVELAKLIGQSVWDVSRSSTGNLVEWYLLRVAYERNELAPNKPGGEEYQRRMRSSYIGGYVKEPEKGLWESIAYLDFRSSAGSIIVTHNVSPDTLEKECKNYDVAPIVGYRFCKDFKGFIPSILEDLIETRQKVKRKMKATIDPIEKKMLDYRQRALKILANSYYGYQGYPKARWYSKECAESVTAWGRHYIETTIKEAEKFGFKVLYADTDGFFATIPNEKPETIKSKAKKFLKHINEKLPGMLELEYEGFYLRGFFVTKKKYALIDEDGHITTRGLEVVRRDWSEIAKETQAKVLEVILREGSIEKAAGIVKKVVEDLANYRVPVEKLIIHEQITRELKRYKATGPHVAIAKRLQARGIKVKPGTIISYVVLKGSKKISDRVILFDEYDSSRHKYDPDYYIHNQVLPAVLRILEAFGYKEKDLEYQRMKQTGLGAWLKMGKK

SEQ ID NO: 1020 - protein, 773 aa, unidentified
  REGION 1..773: note = Description of Unknown: Synthetic polypeptide
MILDTDYITENGKPVIRIFKKEKGEFKVEYDRNFEPYIYALLEDDESIEDIKKITGERHGKKVRIIRVEKVKKNFLGEPIEVWKLVFEHPQDYPAIRDAIRSHPAVREIFEYDIPFAKRYLIDKGLVPMEGGEELKLLAFAIATFYHEGDEFAEGEILMISYADESGAKVITWKKIDLPYVEVVSTEREAIKRFLQVLREKDPDVLLTYNGDNFDFAYIKKRCEKLGLKFTIGRDGSEPKIQRMGDRFAVEVKGRIHLDLAPVVRHTIRLPTYTLEAVYEAVFGKKKEKVYAEEIAEAWKSEEGLKRVAQYSMEDARATYELGREFFPMEVELAKLIGQSVWDVSRSSTGNLVEWYLLRVAYERNELAPNKPGGEEYQRRMRSSYIGGYVKEPEKGLWESIAYLDFRSSAGSIIVTHNVSPDTLEKECKNYDVAPIVGYRFCKDFKGFIPSILEDLIETRQKVKRKMKATIDPIEKKMLDYRQRALKILANSYYGYQGYPKARWYSKECAESVTAWGRHYIETTIKEAEKFGFKVLYADTDGFFATIPNEKPETIKSKAKKFLKHINEKLPGMLELEYEGFYLRGFFVTKKKYALIDEDGHITTRGLEVVRRDWSEIAKETQAKVLEVILREGSIEKAAGIVKKVVEDLANYRVPVEKLIIHEQITRELKRYKATGPHVAIAKRLQARGIKVKPGTIISYVVLKGSKKISDRVILFDEYDSSRHKYDPDYYIHNQVLPAVLRILEAFGYKEKDLEYQRMKQTGLGAWLKMGKK

SEQ ID NO: 1021 - protein, 766 aa, unidentified
  REGION 1..766: note = Description of Unknown: Synthetic polypeptide
MILDTDYITENGKPVIRIFKKEKGEFKIEYDRNFEPYIYALLEDDESIEDIKKITGERHGKKVRIIRVEKVKKKFLGEPIEVWKLVFEHPQDVPAIRDAIRSHPAVREIFEYDIPFAKRYLIDKGLVPMEGGEELKLLAFNIATFYHEGDEFAEGEILMISYADESGAKVITWKKIDLPYVEVVSTEREAIKRFLQVLREKDPDVLLTYNGDNFDFAYIKKRCEKLGLKFTIGRDGSEPKIQRMGDRFAVEVKGRIHLDLAPVVRHTIRLPTYTLEAVYEAVFGKKKEKVYAEEIAEAWKSEEGLARVAQYSVEDARATYELGREFFPLEVELAKLIGQSVWDVSRSSTGNLVEWYLLRVAYERNELAPNKPGGEEYQRRMRSSYIGGYVKEPEKGLWESIAYLDFRSSAGSIIVTHNVSPDTLEKECKNYDVAPIVGYRFCKDFKGFIPSILEDLIETRQKVKRKMKATIDPIEKKMLDYRQRALKILANSYYGYQGYPKARWYSKECAESVTAWGRHYIETTIKEAEKFGFKVLYADTDGFFATIPNEKPETIKSKAKKFLKHINEKLPGMLELEYEGFYLRGFFVTKKKYALIDEDGHITTRGLEVVRRDWSEIAKETQAKVLEVILREGSIEKAAGIVKKVVEDLANYRVPVEKLIIHEQITRELKRYKATGPHVAIAKRLQARGIKVKPGTIISYVVLKGSKKISDRVILFDEYDSSRHKYDPDYYIHNQVLPAVLRILEAFGYKEKDLEYQRDKQTGLGA

SEQ ID NO: 1022 - protein, 773 aa, unidentified
  REGION 1..773: note = Description of Unknown: Synthetic polypeptide
MILDTDYITENGKPVIRIFKKEKGEFKIEYDRNFEPYIYALLEDDESIEDIKKITGERHGKKVRIIRVEKVKKKFLGEPIEVWKLVFEHPQDYPAIRDAIRSHPAVREIFEYDIPFAKRYLIDKGLVPMEGGEELKLLAFNIATFEHEGDEFAEGEILMISYADESGAKVITWKKIDLPYVEVVSTEREAIKRFLQVLREKDPDVLLTYNGDNFDFAYIKKRCEKLGLKFTIGRDGSEPKIQRMGDRFAVEVKGRIHLDLAPVVRHTIRLPTYTLEAVYEAVFGKKKEKVYAEEIAEAWKSEEGLKRVAQYSMEDARATYELGREFFPLEVELAKLIGQSVWDVSRSSTGNLVEWYLLRVAYERNELAPNKPGGEEYQRRMRSSYIGGYVKEPEKGLWESIAYLDFRSSAGSIIVTHNVSPDTLEKECKNYDVAPIVGYRFCKDFKGFIPSILEDLIETRQKVKRKMKATIDPIEKKMLDYRQRALKILANSYYGYQGYPKARWYSKECAESVTAWGRHYIETTIKEAEKFGFKVLYADTDGFFATIPNEKPETIKSKAKKFLKHINEKLPGMLELEYEGFYLRGFFVTKKKYALIDEDGHITTRGLEVVRRDWSEIAKETQAKVLEVILREGSIEKAAGIVKKVVEDLANYRVPVEKLIIHELITRELKRYKATGPHVAIAKRLQARGIKVKPGTIISYVVLKGSKKISDRVILFDEYDSSRHKYDPDYYIHNQVLPAVLRILEAFGYKEKDLEYQRMKQTGLGAWLKMGKK

SEQ ID NO: 1023 - protein, 773 aa, unidentified
  REGION 1..773: note = Description of Unknown: Synthetic polypeptide
MILDTDYITENGKPVIRIFKKEKGEFKIEYDRNFEPYIYALLEDDESIEDIKKITGERHGKKVRIIRVEKVKKKFLGEPIEVWKLVFEHPQDYPAIRDAIRSHPAVREIFEYDIPFAKRYLIDKGLVPMEGGEELKLLAFAIATFYHEGDEFAEGEILMISYADESGAKVITWKKIDLPYVEVVSTEREAIKRFLQVLREKDPDVLLTYNGDNFDFAYIKKRCEKLGLKFTIGRDGSEPKIQRMGDRFAVEVKGRIHLDLAPVVRHTIRLPTYTLEAVYEAVFGKKKEKVYAEEIAEAWKSEEGLKRVAQYSMEDARATYELGREFFPMEVELAKLIGQSVWDVSRSSTGNLVEWYLLRVAYERNELAPNKPGGEEYQRRMRSSYIGGYVKEPEKGLWESIAYLDFRSSAASIIVTHNVSPDTLEKECKNYDVAPIVGYRFCKDFKGFIPSILEDLIETRQKVKRKMKATIDPIEKKMLDYRQRALKILANSYYGYQGYPKARWYSKECAESVTAWGRHYIETTIKEAEKFGFKVLYADTDGFFATIPNEKPETIKSKAKKFLKHINEKLPGMLELEYEGFYLRGFFVTKKKYALIDEDGHITTRGLEVVRRDWSEIAKETQAKVLEVILREGSIEKAAGIVKKVVEDLANYRVPVEKLIIHEQITRELKRYKATGPHVAIAKRLQARGIKVKPGTIISYVVLKGSKKISDRVILFDEYDSSRHKYDPDYYIHNQVLPAVLRILEAFGYKEKDLEYQRMKQTGLGAWLKMGKK

SEQ ID NO: 1024 - protein, 773 aa, unidentified
  REGION 1..773: note = Description of Unknown: Synthetic polypeptide
MILDTDYITENGKPVIRIFKKERGEFKIEYDRNFEPYIYALLEDDESIEDIKKITGERHGKKVRIIRVEKVKKKFLGEPIEVWKLVFEHPQDYPAIRDAIRSHPAVREIFEYDIPFAKRYLIDKGLVPMEGGEELKLLAFAIATFYHEGDEFAEGEILMISYADESGAKVITWKKIDLPYVEVVSTEREAIKRFLQVLREKDPDVLLTYNGDNFDFAYIKKRCEKLGLKFTIGRDGSEPKIQRMGDRFAVEVKGRIHLDLAPVVRHTIRLPTYTLEAVYEAVFGKKKEKVYAEEIAEAWKSEEGLARVAQYSMEDARATYELGREFFPMEVELAKLIGQSVWDVSRSSTGNLVEWYLLRVAYERNELAPNQPGGEEYQRRMRSSYIGGYVKEPEKGLWESIAYLDFRSSAGSIIVTHNVSPDTLEKECKNYDVAPIVGYRFCKDFKGFIPSILEDLIETRQKVKRKMKATIDPIEKKMLDYRQRALKILANSYYGYQGYPKARWYSKECAESVTAWGRHYIETTIKEAEKFGFKVLYADTDGFFATIPNEKPETIKSKAKKFLKHINEKLPGMLELEYEGFYLRGFFVTKKKYALIDEDGHITTRGLEVVRRDWSEIAKETQAKVLEVILREGSIEKAAGIVKKVVEDLANYRVPVEKLIIHEQITRELKRYKATGPHVAIAKRLQARGIKVKPGTIISYVVLKGSKKISDRVILFDEYDSSRHKYDPDYYIHNQVLPAVLRILEAFGYKEKDLEYQRDKQTGLGAWLKMGKK

SEQ ID NO: 1025 - protein, 766 aa, unidentified
  REGION 1..766: note = Description of Unknown: Synthetic polypeptide
MILDTDYITENGKPVIRIFKKEKGEFKIEYDRNFEPYIYALLEDDESIEDIKKITGERHGKKVRIIRVEKVKKKFLGEPIEVWKLVFEHPQDLPAIRDAIRSHPAVREIFEYDIPFAKRYLIDKGLVPMEGGEELKLLAFNIATFYHEGDEFAEGEILMISYADESGAKVITWKKIDLPYVEVVSTEREAIKRFLQVLREKDPDVLLTYNGDNFDFAYIKKRCEKLGLKFTIGRDGSEPKIQRMGDRFAVEVKGRIHLDLAPVVRHTIRLPTYTLEAVYEAVFGKKKEKVYAEEIAEAWKSEEGLKRVAQYSMEDARATYELGREFFPLEVELAKLIGQSVWDVSRSSTGNLVEWYLLRVAYERNELAPNKPGGEEYQRRMRSSYIGGYVKEPEKGLWESIAYLDFRSSAGSIIVTHNVSPDTLEKECKNYDVAPIVGYRFCKDFKGFIPSILEDLIETRQKVKRKMKATIDPIEKKMLDYRQRALKILANSYYGYQGYPKARWYSKECAESVTAWGRHYIETTIKEAEKFGFKVLYADTDGFFATIPNEKPETIKSKAKKFLKHINEKLPGMLELEYEGFYLRGFFVTKKKYALIDEDGHITTRGLEVVRRDWSEIAKETQAKVLEVILREGSIEKAAGIVKKVVEDLANYRVPVEKLIIHEQITRELKRYKATGPHVAIAKRLQARGIKVKPGTIISYVVLKGSKKISDRVILFDEYDSSRHKYDPDYYIHNQVLPAVLRILEAFGYKEKDLEYQRDKQTGLGA

SEQ ID NO: 1026 - protein, 773 aa, unidentified
  REGION 1..773: note = Description of Unknown: Synthetic polypeptide
MILDTDYITENGKPVIRIFKKEKGEFKIEYDRNFEPYIYALLEDDESIEDIKKITGERHGKKVRIIRVEKVKKKFLGEPIEVWKLVFEHPQDYPAIRDAIRSHPAVREIFEYDIPFAKRYLIDKGLVPMEGGEELKLLAFAIATFYHEGDEFAEGEILMISYADESGAKVITWKKIDLPYVEVVSTEREAIKRFLQVLREKDPDVLLTYNGDNFDFAYIKKRCEKLGLKFTIGRDGSEPKIQRMGDRFAVEVKGRIHLDLAPVVRHTIRLPTYTLEAVYEAVFGKKKEKVYAEEIAEAWKSEEGLARVAQYSMEDARATYELGREFFPMEVELAKLIGQSVWDVSRSSTGNLVEWYLLRVAYERNELAPNKPGGEEYQRRMRSSYIGGYVKEPEKGLWESIAYLDFRSSAPSIIVTHNVSPDTLEKECKNYDVAPIVGYRFCKDFKGFIPSILEDLIETRQKVKRKMKATIDPIEKKMLDYRQRALKILANSYYGYQGYPKARWYSKECAESVTAWGRHYIETTIKEAEKFGFKVLYADTDGFFATIPNEKPETIKSKAKKFLKHINEKLPGMLELEYEGFYLRGFFVTKKKYALIDEDGHITTRGLEVVRRDWSEIAKETQAKVLEVILREGSIEKAAGIVKKVVEDLANYRVPVEKLIIHEQITRELKRYKATGPHVAIAKRLQARGIKVKPGTIISYVVLKGSKKISDRVILFDEYDSSRHKYDPDYYIHNQVLPAVLRILEAFGYKEKDLEYQRMKQTGLGAWLKMGKK

SEQ ID NO: 1027 - protein, 773 aa, unidentified
  REGION 1..773: note = Description of Unknown: Synthetic polypeptide
MILDTDYITENGKPVIRIFKKEKGEFKIEYDRNFEPYIYALLEDDESIEDIKKITGERHGKKVRIIRVEKVKKKFLGEPIEVWKLVFEHPQDYPAIRDAIRSHPAVREIFEYDIPFAKRYLIDKGLVPMEGGEELKLLAFAIATFYHEGDEFAEGEILMISYADESGAKVITWKKIDLPYVEVVSTEREAIKRFLQVLREKDPDVLLTYNGDNFDFAYIKKRCEKLGLKFTIGRDGSEPKIQRMGDRFAVEVKGRIHLDLAPVVRHTIRLPTYTLEAVYEAVFGKKKEKVYAEEIAEAWKSEEGLKRVAQYSMEDARATYELGREFFPMEVELAKLIGQSVWDVSRSSTGNLVEWYLLRVAYERNELAPNKPGGEEYQRRMRSSYIGGYVKEPEKGLWESIAYLDFRSSAPSIIVTHNVSPDTLEKECKNYDVAPIVGYRFCKDFKGFIPSILEDLIETRQKVKRKMKATIDPIEKKMLDYRQRALKILANSYYGYQGYPKARWYSKECAESVTAWGRHYIETTIKEAEKFGFKVLYADTDGFFATIPNEKPETIKSKAKKFLKHINEKLPGMLELEYEGFYLRGFFVTKKKYALIDEDGHITTRGLEVVRRDWSEIAKETQAKVLEVILREGSIEKAAGIVKKVVEDLANYRVPVEKLIIHEQITRELKRYKATGPHVAIAKRLQARGIKVKPGTIISYVVLKGSKKISDRVILFDEYDSSRHKYDPDYYIHNQVLPAVLRILEAFGYKEKDLEYQRDKQTGLGAWLKMGKK

SEQ ID NO: 1028 - protein, 773 aa, unidentified
  REGION 1..773: note = Description of Unknown: Synthetic polypeptide
MILDTDYITENGKPVIRIFKKEKGEFKIEYDRNFEPYIYALLEDDESIEDIKKITGERHGKKVRIIRVEKVKKKFLGEPIEVWKLVFEHPQDYPAIRDAIRSHPAVREIFEYDIPFAKRYLIDKGLVPMEGGEELKLLAFAIATFYHEGDEFAEGEILMISYADESGAKVITWKKIDLPYVEVVSTEREAIKRFLQVLREKDPDVLLTYNGDNFDFAYIKKRCEKLGLKFTIGRDGSEPKIQRMGDRFAVEVKGRIHLDLAPVVRHTIRLPTYTLEAVYEAVFGKKKEKVYAEEIAEAWKSEEGLKRVAQYSMEDARATYELGREFFPMEVELAKLIGQSVWDVSRSSTGNLVEWYLLRVAYERNELAPNKPGGEEYQRRMRSSYIGGYVKEPEKGLWESIAYLDFRSSAGSIIVTHNVSPDTLEKECKNYDVAPEVGYRFCKDFKGFIPSILEDLIETRQKVKRKMKATIDPIEKKMLDYRQRALKILANSYYGYQGYPKARWYSKECAESVTAWGREYIETTIKEAEKFGFKVLYADTDGFFATIPNEKPETIKSKAKKFLKHINEKLPGMLELEYEGFYLRGFFVTKKKYALIDEDGHITTRGLEVVRRDWSEIAKETQAKVLEVILREGSIEKAAGIVKKVVEDLANYRVPVEKLIIHEQITRELKRYKATGPHVAIAKRLQARGIKVKPGTIISYVVLKGSKKISDRVILFDEYDSSRHKYDPDYYIHNQVLPAVLRILEAFGYKEKDLEYQRMKQTGLGAWLKMGKK

SEQ ID NO: 1029 - protein, 773 aa, unidentified
  REGION 1..773: note = Description of Unknown: Synthetic polypeptide
MILDTDYITENGKPVIRIFKKEKGEFKIEYDRNFEPYIYALLEDDESIEDIKKITGERHGKKVRIIRVEKVKKKFLGEPIEVWKLVFEHPQDYPAIRDAIRSHPAVREIFEYDIPFAKRYLIDKGLVPMEGGEELKLLAFAIATFYHEGDEFAEGEILMISYADESGAKVITWKKIDLPYVEVVSTEREAIKRFLQVLREKDPDVLLTYNGDNFDFAYIKKRCEKLGLKFTIGRDGSEPKIQRMGDRFAVEVKGRIHLDLAPVVRHTIRLPTYTLEAVYEAVFGKKKEKVYAEEIAEAWKSEEGLKRVAQYSMEDARATYELGREFFPMEVELAKLIGQSVWDVSRSSTGNLVEWYLLRVAYERNELAPNKPGGEEYQRRMRSSYIGGYVKEPEKGLWESIAYLDFRSSAGSIIVTHNVSPDTLEKECKNYDVAPIVGYRFCKDFKGFIPSILEDLIETRQKVKRKMKATIDPIEKKMLDYRQRALKILANSYYGYQGYPKARWYSKECAESVTAWGRHYIETTIKEAEKFGFKVLYADTDGFFATIPNEKPETIKSKAKKFLKHINEKLPGMLELEYEGFYLRGFFVTKKKYALIDEDGHITTRGLEVVRRDWSEIAKETQAKVLEVILREGSIEKAAGIVKKVVEDLANYRVPVEKLIIHELITRELKRYKATGPHVAIAKRLQARGIKVKPGTIISYVVLKGSKKISDRVILFDEYDSSRHKYDPDYYIHNQVLPAVLRILEAFGYKEKDLEYQRMKQTGLGAWLKMGKK

SEQ ID NO: 1030 - protein, 773 aa, unidentified
  REGION 1..773: note = Description of Unknown: Synthetic polypeptide
MILDTDYITENGKPVIRIFKKEKGEFKIEYDRNFEPYIYALLEDDESIEDIKKITGERHGKKVRIIRVEKVKKKFLGEPIEVWKLVFEHPQDLPAIRDAIRSHPAVREIFEYDIPFAKRYLIDKGLVPMEGGEELKLLAFAIATFYHEGDEFAEGEILMISYADESGAKVITWKKIDLPYVEVVSTEREAIKRFLQVLREKDPDVLLTYNGDNFDFAYIKKRCEKLGLKFTIGRDGSEPKIQRMGDRFAVEVKGRIHLDLAPVVRHTIRLPTYTLEAVYEAVFGKKKEKVYAEEIAEAWKSEEGLKRVAQYSMEDARATYELGREFFPLEVELAKLIGQSVWDVSRSSTGNLVEWYLLRVAYERNELAPNKPGGEEYQRRMRSSYIGGYVKEPEKGLWESIAYLDFRSSAGSIIVTHNVSPDTLEKECKNYDVAPIVGYRFCKDFKGFIPSILEDLIETRQKVKRKMKATIDPIEKKMLDYRQRALKILANSYYGYQGYPKARWYSKECAESVTAWGRHYIETTIKEAEKFGFKVLYADTDGFFATIPNEKPETIKSKAKKFLKHINEKLPGMLELEYEGFYLRGFFVTKKKYALIDEDGHITTRGLEVVRRDWSEIAKETQAKVLEVILREGSIEKAAGIVKKVVEDLANYRVPVEKLIIHEQITRELKRYKATGPHVAIAKRLQARGIKVKPGTIISYVVLKGSKKISDRVILFDEYDSSRHKYDPDYYIHNQVLPAVLRILEAFGYKEKDLEYQRMKQTGLGAWLKMGKK

SEQ ID NO: 1031 - protein, 773 aa, unidentified
  REGION 1..773: note = Description of Unknown: Synthetic polypeptide
MILDTDYITENGKPVIRIFKKEKGEFKIEYDRNFEPYIYALLEDDESIEDIKKITGERHGKKVRIIRVEKVKKKFLGEPIEVWKLVFEHPQDYPAIRDAIRSHPAVREIFEYDIPFAKRYLIDKGLVPMEGGEELKLLAFAIATFYHEGDEFAEGEILMISYADESGAKVITWKKIDLPYVEVVSTEREAIKRFLQVLREKDPDVLLTYNGDNFDFAYIKKRCEKLGLKFTIGRDGSEPKIQRMGDRFAVEVKGRIHLDLAPVVRHTIRLPTYTLEAVYEAVFGKKKEKVYAEEIAEAWKSEEGLKRVAQYSMEDARATYELGREFFPMEVELAKLIGQSVWDVSRSSTGNLVEWYLLRVAYERNELAPNKPGGEEYQRRMRSSYIGGYVKEPEKGLWESIAYLDFRSLAGSIIVTHNVSPDTLEKECKNYDVAPIVGYRFCKDFKGFIPSILEDLIETRQKVKRKMKATIDPIEKKMLDYRQRALKILANSYYGYQGYPKARWYSKECAESVTAWGRHYIETTIKEAEKFGFKVLYADTDGFFATIPNEKPETIKSKAKKFLKHINEKLPGMLELEYEGFYLRGFFVTKKKYALIDEDGHITTRGLEVVRRDWSEIAKETQAKVLEVILREGSIEKAAGIVKKVVEDLANYRVPVEKLIIHEQITRELKRYKATGPHVAIAKRLQARGIKVKPGTIISYVVLKGSKKISDRVILFDEYDSSRHKYDPDYYIHNQVLPAVLRILEAFGYKEKDLEYQRMKQTGLGAWLKMGKK

SEQ ID NO: 1032 - protein, 773 aa, unidentified
  REGION 1..773: note = Description of Unknown: Synthetic polypeptide
MILDTDYIEENGKPVIRIFKKEKGEFKIEYDRNFEPYIYALLEDDESIEDIKKITGERHGKKVRIIRVEKVKKKFLGEPIEVWKLVFEHPQDVPAIRDAIRSHPAVREIFEYDIPFAKRYLIDKGLVPMEGGEELKLLAFNIATFYHEGDEFAEGEILMISYADESGAKVITWKKIDLPYVEVVSTEREAIKRFLQVLREKDPDVLLTYNGDNFDFAYIKKRCEKLGLKFTIGRDGSEPKIQRMGDRFAVEVKGRIHLDLAPVVRHTIRLPTYTLEAVYEAVFGKKKEKVYAEEIAEAWKSEEGLKRVAQYSMEDARATYELGREFFPLEVELAKLIGQSVWDVSRSSTGNLVEWYLLRVAYERNELAPNKPGGEEYQRRMRSSYIGGYVKEPEKGLWESIAYLDFRSSAGSIIVTHNVSPDTLEKECKNYDVAPIVGYRFCKDFKGFIPSILEDLIETRQKVKRKMKATIDPIEKKMLDYRQRALKILANSYYGYQGYPKARWYSKECAESVTAWGRHYIETTIKEAEKFGFKVLYADTDGFFATIPNEKPETIKSKAKKFLKHINEKLPGMLELEYEGFYLRGFFVTKKKYALIDEDGHITTRGLEVVRRDWSEIAKETQAKVLEVILREGSIEKAAGIVKKVVEDLANYRVPVEKLIIHELITRELKRYKATGPHVAIAKRLQARGIKVKPGTIISYVVLKGSKKISDRVILFDEYDSSRHKYDPDYYIHNQVLPAVLRILEAFGYKEKDLEYQRMKQTGLGAWLKMGKK

SEQ ID NO: 1033 - protein, 773 aa, unidentified
  REGION 1..773: note = Description of Unknown: Synthetic polypeptide
MILDTDYITENGKPVIRIFKKEKGEFKIEYDRNFEPYIYALLEDDESIEDIKKITGERHGKKVRIIRVEKVKKNFLGEPIEVWKLVFEHPQDYPAIRDAIRSHPAVREIFEYDIPFAKRYLIDKGLVPMEGGEELKLLAFAIATFYHEGDEFAEGEILMISYADESGAKVITWKKIDLPYVEVVSTEREAIKRFLQVLREKDPDVLLTYNGDNFDFAYIKKRCEKLGLKFTIGRDGSEPKIQRMGDRFAVEVKGRIHLDLAPVVRHTIRLPTYTLEAVYEAVFGKKKEKVYAEEIAEAWKSEEGLKRVAQYSMEDARATYELGREFFPMEVELAKLIGQSVWDVSRSSTGNLVEWYLLRVAYERNELAPNKPGGEEYQRRMRSSYIGGYVKEPEKGLWESIAYLDFRSSAGSIIVTHNVSPDTLEKECKNYDVAPIVGYRFCKDFKGFIPSILEDLIETRQKVKRKMKATIDPIEKKMLDYRQRALKILANSYYGYQGYPKARWYCKECAESVTAWGRHYIETTIKEAEKFGFKVLYADTDGFFATIPNEKPETIKSKAKKFLKHINEKLPGMLELEYEGFYLRGFFVTKKKYALIDEDGHITTRGLEVVRRDWSEIAKETQAKVLEVILREGSIEKAAGIVKKVVEDLANYRVPVEKLIIHEQITRELKRYKATGPHVAIAKRLQARGIKVKPGTIISYVVLKGSKKISDRVILFDEYDSSRHKYDPDYYIHNQVLPAVLRILEAFGYKEKDLEYQRMKQTGLGAWLKMGKK

SEQ ID NO: 1034 - protein, 773 aa, unidentified
  REGION 1..773: note = Description of Unknown: Synthetic polypeptide
MILDTDYITENGKPVIRIFKKEKGEFKIEYDRNFEPYIYALLEDDESIEDIKKITGERHGKKVRIIRVEKVKKNFLGEPIEVWKLVFEHPQDYPAIRDAIRSHPAVREIFEYDIPFAKRYLIDKGLVPMEGGEELKLLAFAIATFYHEGDEFAEGEILMISYADESGAKVITWKKIDLPYVEVVSTEREAIKRFLQVLREKDPDVLLTYNGDNFDFAYIKKRCEKLGLKFTIGRDGSEPKIQRMGDRFAVEVKGRIHLDLAPVVRHTIRLPTYTLEAVYEAVFGKKKEKVYAEEIAEAWKSEEGLKRVAQYSMEDARATYELGREFFPMEVELAKLIGQSVWDVSRSSTGNLVEWYLLRVAYERNELAPNKPGGEEYQRRMRSSYIGGYVKEPEKGLWESIAYLDFRSSAGSIIVTHNVSPDTLEKECKNYDVAPIVGYRFCKDFKGFIPSILEDLIETRQKVKRKMKATIDPIEKKMLDYRQRALKILANSYYGYQGYPKARWYSKECAESVTAWGRHYIETTIKEAEKFGFKVLYADTDGFFATIPNEKPETIKSKAKKFLKHINEKLPGLLELEYEGFYLRGFFVTKKKYALIDEDGHITTRGLEVVRRDWSEIAKETQAKVLEVILREGSIEKAAGIVKKVVEDLANYRVPVEKLIIHEQITRELKRYKATGPHVAIAKRLQARGIKVKPGTIISYVVLKGSKKISDRVILFDEYDSSRHKYDPDYYIHNQVLPAVLRILEAFGYKEKDLEYQRMKQTGLGAWLKMGKK

SEQ ID NO: 1035 - protein, 773 aa, unidentified
  REGION 1..773: note = Description of Unknown: Synthetic polypeptide
MILDTDYITENGKPVIRIFKKEKGEFKIEYDRNFEPYIYALLEDDESIEDIKKITGERHGKKVRIIRVEKVKKKFLGEPIEVWKLVFEHPQDYPAIRDAIRSHPAVREIFEYDIPFAKRYLIDKGLVPMEGGEELKLLAFAIATFYHEGDEFAEGEILMISYADESGAKVITWKKIDLPYVEVVSTEREAIKRFLQVLREKDPDVLLTYNGDNFDFAYIKKRCEKLGLKFTIGRDGSEPKIQRMGDRFAVEVKGRIHLDLAPVVRHTIRLPTYTLEAVYEAVFGKKKEKVYAEEIAEAWKSEEGLKRVAQYSMEDARATYELGREFFPMEVELAKLIGQSVWDVSRSSTGNLVEWYLLRVAYERNELAPNKPGGEEYQRRMRSSYIGGYVKEPEKGLWESIAYLDFRSMAPSIIVTHNVSPDTLEKECKNYDVAPIVGYRFCKDFKGFIPSILEDLIETRQKVKRKMKATIDPIEKKMLDYRQRALKILANSYYGYQGYPKARWYSKECAESVTAWGRHYIETTIKEAEKFGFKVLYADTDGFFATIPNEKPETIKSKAKKFLKHINEKLPGMLELEYEGFYLRGFFVTKKKYALIDEDGHITTRGLEVVRRDWSEIAKETQAKVLEVILREGSIEKAAGIVKKVVEDLANYRVPVEKLIIHEQITRELKRYKATGPHVAIAKRLQARGIKVKPGTIISYVVLKGSKKISDRVILFDEYDSSRHKYDPDYYIHNQVLPAVLRILEAFGYKEKDLEYQRMKQTGLGAWLKMGKK

SEQ ID NO: 1036 - protein, 773 aa, unidentified
  REGION 1..773: note = Description of Unknown: Synthetic polypeptide
MILDTDYITENGKPVIRIFKKEKGEFKIEYDRNFEPYIYALLEDDESIEDIKKITGERHGKKVRIIRVEKVKKNFLGEPIEVWKLVFEHPQDYPAIRDAIRSHPAVREIFEYDIPFAKRYLIDKGLVPMEGGEELKLLAFAIATFYHEGDEFAEGEILMISYADESGAKVITWKKIDLPYVEVVSTEREAIKRFLQVLREKDPDVLLTYNGDNFDFAYIKKRCEKLGLKFTIGRDGSEPKIQRMGDRFAVEVKGRIHLDLAPVVRHTIRLPTYTLEAVYEAVFGKKKEKVYAEEIAEAWKSEEGLKRVAQYSMEDARATYELGREFFPMEVELAKLIGQSLWDVSRSSTGNLVEWYLLRVAYERNELAPNKPGGEEYQRRMRSSYIGGYVKEPEKGLWESIAYLDFRSSAGSIIVTHNVSPDTLEKECKNYDVAPIVGYRFCKDFKGFIPSILEDLIETRQKVKRKMKATIDPIEKKMLDYRQRALKILANSYYGYQGYPKARWYSKECAESVTAWGRHYIETTIKEAEKFGFKVLYADTDGFFATIPNEKPETIKSKAKKFLKHINEKLPGMLELEYEGFYLRGFFVTKKKYALIDEDGHITTRGLEVVRRDWSEIAKETQAKVLEVILREGSIEKAAGIVKKVVEDLANYRVPVEKLIIHEQITRELKRYKATGPHVAIAKRLQARGIKVKPGTIISYVVLKGSKKISDRVILFDEYDSSRHKYDPDYYIHNQVLPAVLRILEAFGYKEKDLEYQRMKQTGLGAWLKMGKK

SEQ ID NO: 1037 - protein, 773 aa, unidentified
  REGION 1..773: note = Description of Unknown: Synthetic polypeptide
MILDTDYITENGKPVIRIFKKEKGEFKIEYDRNFEPYIYALLEDDESIEDIKKITGERHGKKVRIIRVEKVKKNFLGEPIEVWKLVFEHPQDYPAIRDAIRSHPAVREIFEYDIPFAKRYLIDKGLVPMEGGEELKLLAFAIATFYHEGDEFAEGEILMISYADESGAKVITWKKIDLPYVEVVSTEREAIKRFLQVLREKDPDVLLTYNGDNFDFAYIKKRCEKLGLKFTIGRDGSEPKIQRMGDRFAVEVKGRIHLDLAPVVRHTIRLPTYTLEAVYEAVFGKKKEKVYAEEIAEAWKSEEGLKRVAQYSMEDARATYELGREFFPMEVELAKLIGQSVWDVSRSSTGNLVEWYLLRVAYERNELAPNKPGGEEYQRRMRSSYIGGYVKEPEKGLWESIAYLDFRSSAGSIIVTHNVSPDTLEKECKNYDVAPIVGYRFCKDFKGFIPSILEDLIETRQKVKRKMKATIDPIEKKMLDYRQRALKILANSYYGYQGYPKARWYSKECAESVTAWGRHYIETTIKEIEKFGFKVLYADTDGFFATIPNEKPETIKSKAKKFLKHINEKLPGMLELEYEGFYLRGFFVTKKKYALIDEDGHITTRGLEVVRRDWSEIAKETQAKVLEVILREGSIEKAAGIVKKVVEDLANYRVPVEKLIIHEQITRELKRYKATGPHVAIAKRLQARGIKVKPGTIISYVVLKGSKKISDRVILFDEYDSSRHKYDPDYYIHNQVLPAVLRILEAFGYKEKDLEYQRMKQTGLGAWLKMGKK

SEQ ID NO: 1038 - protein, 773 aa, unidentified; identical to SEQ ID NO: 78
  REGION 1..773: note = Description of Unknown: Synthetic polypeptide

SEQ ID NO: 1039 - protein, 773 aa, unidentified
  REGION 1..773: note = Description of Unknown: Synthetic polypeptide
MILDTDYITENGKPVIRIFKKEKGEFKIEYDRNFEPYIYALLEDDESIEDIKKITGERHGKKVRIIRVEKVKKNFLGEPIEVWKLVFEHPQDYPAIRDAIRSHPAVREIFEYDIPFAKRYLIDKGLVPMEGGEELKLLAFAIATFYHEGDEFAEGEILMISYADESGAKVITWKKIDLPYVEVVSTEREAIKRFLQVLREKDPDVLLTYNGDNFDFAYIKKRCEKLGLKFTIGRDGSEPKIQRMGDRFAVEVKGRIHLDLAPVVRHTIRLPTYTLEAVYEAVFGKKKEKVYAEEIAEAWKSEEGLKRVAQYSMEDARATYELGREFFPMEVELAKLIGQSVWDVSRSSTGNLVEWYLLRVAYERNELAPNKPGGEEYQRRMRSSYIGGYVKEPEKGLWESIAYLDFRSSAGSIIVTHNVSPDTLEKECKNYDVAPIVGYRFCKDFKGFIPSILEDLIETRQKVKRKMKATIDPIEKKMLDYRQRALKILANSYYGYQGYAKARWYSKECAESVTAWGRHYIETTIKEAEKFGFKVLYADTDGFFATIPNEKPETIKSKAKKFLKHINEKLPGMLELEYEGFYLRGFFVTKKKYALIDEDGHITTRGLEVVRRDWSEIAKETQAKVLEVILREGSIEKAAGIVKKVVEDLANYRVPVEKLIIHEQITRELKRYKATGPHVAIAKRLQARGIKVKPGTIISYVVLKGSKKISDRVILFDEYDSSRHKYDPDYYIHNQVLPAVLRILEAFGYKEKDLEYQRMKQTGLGAWLKMGKK

SEQ ID NO: 1040 - protein, 773 aa, unidentified
  REGION 1..773: note = Description of Unknown: Synthetic polypeptide
MILDTDYITENGKPVIRIFKKEKGEFKIEYDRNFEPYIYALLEDDESIEDIKKITGERHGKKVRIIRVEKVKKNFLGEPIEVWKLVFEHPQDYPAIRDAIRSHPAVREIFEYDIPFAKRYLIDKGLVPMEGGEELKLLAFAIATFYHEGDEFAEGEILMISYADESGAKVITWKKIDLPYVEVVSTEREAIKRFLQVLREKDPDVLLTYNGDNFDFAYIKKRCEKLGLKFTIGRDGSEPKIQRMGDRFAVEVKGRIHLDLAPVVRHTIRLPTYTLEAVYEAVFGKKKEKVYAEEIAEAWKSEEGLKRVAQYSMEDARATYELGREFFPMEVELAKLIGQSVWDVSRSSTGNLVEWYLLRVAYERNELAPNKPGGEEYQRRMRSSYIGGYVKEPEKGLWESIAYLDFRSSAGSIIVTHNVSPDTLEKECKNYDVAPIVGYRFCKDFKGFIPSILEDLIETRQKVKRKMKATIDPIEKKMLDYRQRALKILANSYYGYQGYPKARWYSKECAESVTAWGRHYIETTIKEAEKFGFKVLYADTDGFFATIPNEKPETIKSKAKKFLKHINEKLPGMLELEYEGFYLRGFFVTKKKYALIDEDGHITTRGLEVVRRDWSEIAKETQAKVLEVILREGSIEKAAGIVKKVVEDLANYRVPVEKLIIHEQITRELKRYKATGPHVAVAKRLQARGIKVKPGTIISYVVLKGSKKISDRVILFDEYDSSRHKYDPDYYIHNQVLPAVLRILEAFGYKEKDLEYQRMKQTGLGAWLKMGKK

SEQ ID NO: 1041 - protein, 766 aa, unidentified
  REGION 1..766: note = Description of Unknown: Synthetic polypeptide
MILDTDYITENGKPVIRIFKKEKGEFKIEYDRNFEPYIYALLEDDESIEDIKKITGERHGKKVRIIRVEKVKKKFLGEPIEVWKLVFEHPQDVPAIRDAIRSHPAVREIFEYDIPFAKRYLIDKGLVPMEGGEELKLLAFNIATFYHEGDEFAEGEILMISYADESGAKVITWKKIDLPYVEVVSTEREAIKRFLQVLREKDPDVLLTYNGDNFDFAYIKKRCEKLGLKFTIGRDGSEPKIQRMGDRFAVEVKGRIHLDLAPVVRHTIRLPTYTLEAVYEAVFGKKKEKVYAEEIAEAWKSEEGLARVAQYSMEDARATYELGREFFPLEVELAKLIGQSVWDVSRSSTGNLVEWYLLRVAYERNELAPNKPGGEEYQRRMRSSYIGGYVKEPEKGLWESIAYLDFRSSAGSIIVTHNVSPDTLEKECKNYDVAPIVGYRFCKDFKGFIPSILEDLIETRQKVKRKMKATIDPIEKKMLDYRQRALKILANSYYGYQGYPKARWYSKECAESVTAWGRHYIETTIKEAEKFGFKVLYADTDGFFATIPNEKPETIKSKAKKFLKHINEKLPGMLELEYEGFYLRGFFVTKKKYALIDEDGHITTRGLEVVRRDWSEIAKETQAKVLEVILREGSIEKAAGIVKKVVEDLANYRVPVEKLIIHEFITRELKRYKATGPHVAIAKRLQARGIKVKPGTIISYVVLKGSKKISDRVILFDEYDSSRHKYDPDYYIHNQVLPAVLRILEAFGYKEKDLEYQRDKQTGLGA

SEQ ID NO: 1042 - protein, 773 aa, unidentified
  REGION 1..773: note = Description of Unknown: Synthetic polypeptide
MILDTDYITENGKPVIRIFKKEKGEFKIEYDRNFEPYIYALLEDDESIEDIKKITGERHGKKVRIIRVEKVKKKFLGEPIEVWKLVFEHPQDYPAIRDAIRSHPAVREIFEYDIPFAKRYLIDKGLVPMEGGEELKLLAFAIATFYHEGDEFAEGEILMISYADESGAKVITWKKIDLPYVEVVSTEREAIKRFLQVLREKDPDVLLTYNGDNFDFAYIKKRCEKLGLKFTIGRDGSEPKIQRMGDRFAVEVKGRIHLDLAPVVRHTIRLPTYTLEAVYEAVFGKKKEKVYAEEIAEAWKSEEGLKRVAQYSMEDARATYELGREFFPMEVELAKLIGQSVWDVSRSSTGNLVEWYLLRVAYERNELAPNKPGGEEYQRRMRSSYIGGYVKEPEKGLWESIAYLDFRSSAASIIVTHNVSPDTLEKECKNYDVAPIVGYRFCKDFKGFIPSILEDLIETRQKVKRKMKATIDPIEKKMLDYRQRALKILANSYYGYQGYPKARWYSKECAESVTAWGRHYIETTIKEAEKFGFKVLYADTDGFFATIPNEKPETIKSKAKKFLKHINEKLPGMLELEYEGFYLRGFFVTKKKYALIDEDGHITTRGLEVVRRDWSEIAKETQAKVLEVILREGSIEKAAGIVKKVVEDLANYRVPVEKLIIHEQITRELKRYKATGPHVAIAKRLQARGIKVKPGTIISYVVLKGSKKISDRVILFDEYDSSRHKYDPDYYIHNQVLPAVLRILEAFGYKEKDLEYQRDKQTGLGAWLKMGKK

SEQ ID NO: 1043 - protein, 773 aa, unidentified
  REGION 1..773: note = Description of Unknown: Synthetic polypeptide
MILDTDYITENGKPVIRIFKKEKGEFKIEYDRNFEPYIYALLEDDESIEDIKKITGERHGKKVRIIRVEKVKKKFLGEPIEVWKLVFEHPQDYPAIRDAIRSHPAVREIFEYDIPFAKRYLIDKGLVPMEGGEELKLLAFAIATFYHEGDEFAEGEILMISYADESGAKVITWKKIDLPYVEVVSTEREAIKRFLQVLREKDPDVLLTYNGDNFDFAYIKKRCEKLGLKFTIGRDGSEPKIQRMGDRFAVEVKGRIHLDLAPVVRHTIRLPTYTLEAVYEAVFGKKKEKVYAEEIAEAWKSEEGLKRVAQYSMEDARATYELGREFFPMEVELAKLIGQSVWDVSRSSTGNLVEWYLLRVAYERNELAPNKPGGEEYQRRMRSSYIGGYVKEPEKGLWESIAYLDFRSSAGSIIVTHNVSPDTLEKECKNYDVAPIVGYRFCKDFKGFIPTILEDLIETRQKVKRKMKATIDPIEKKMLDYRQRALKILANSYYGYQGYPKARWYSKECAESVTAWGRHYIETTIKEAEKFGFKVLYADTDGFFATIPNEKPETIKSKAKKFLKHINEKLPGMLELEYEGFYLRGFFVTKKKYALIDEDGHITTRGLEVVRRDWSEIAKETQAKVLEVILREGSIEKAAGIVKKVVEDLANYRVPVEKLIIHEQITRELKRYKATGPHVAIAKRLQARGIKVKPGTIISYVVLKGSKKISDRVILFDEYDSSRHKYDPDYYIHNQVLPAVLRILEAFGYKEKDLEYQRMKQTGLGAWLKMGKK

SEQ ID NO: 1044 - protein, 766 aa, unidentified
  REGION 1..766: note = Description of Unknown: Synthetic polypeptide
MILDTDYITENGKPVIRIFKKEKGEFKIEYDRNFEPYIYALLEDDESIEDIKKITGERHGKKVRIIRVEKVKKKFLGEPIEVWKLVFEHPQDYPAIRDAIRSHPAVREIFEYDIPFAKRYLIDKGLVPMEGGEELKLLAFNIATFYHEGDEFAEGEILMISYADESGAKVITWKKIDLPYVEVVSTEREAIKRFLQVLREKDPDVLLTYNGDNFDFAYIKKRCEKLGLKFTIGRDGSEPKIQRMGDRFAVEVKGRIHLDLAPVVRHTIRLPTYTLEAVYEAVFGKKKEKVYAEEIAEAWKSEEGLKRVAQYSMEDARATYELGREFFPLEVELAKLIGQSVWDVSRSSTGNLVEWYLLRVAYERNELAPNKPGGEEYQRRMRSSYIGGYVKEPEKGLWESIAYLDFRSSAGSIIVTHNVSPDTLEKECKNYDVAPIVGYRFCKDFKGFIPSILEDLIETRQKVKRKMKATIDPIEKKMLDYRQRALKILANSYYGYQGYPKARWYSKECAESVTAWGRHYIETTIKEAEKFGFKVLYADTDGFFATIPNEKPETIKSKAKKFLKHINEKLPGMLELEYEGFYLRGFFVTKKKYALIDEDGHITTRGLEVVRRDWSEIAKETQAKVLEVILREGSIEKAAGIVKKVVEDLANYRVPVEKLIIHEQITRELKRYKATGPHVAIAKRLQARGIKVKPGTIISYVVLKGSKKISDRVILFDEYDSSRHKYDPDYYIHNQVLPAVLRILEAFGYKEKDLEYQRDKQTGLGA

SEQ ID NO: 1045 - protein, 773 aa, unidentified
  REGION 1..773: note = Description of Unknown: Synthetic polypeptide
MILDTDYITENGKPVIRIFKKEKGEFKIEYDRNFEPYIYALLEDDESIEDIKKITGERHGKKVRIIRVEKVKKKFLGEPIEVWKLVFEHPQDYPAIRDAIRSHPAVREIFEYDIPFAKRYLIDKGLVPMEGGEELKLLAFAIATFYHEGDEFAEGEILMISYADESGAKVITWKKIDLPYVEVVSTEREAIKRFLQVLREKDPDVLLTYNGDNFDFAYIKKRCEKLGLKFTIGRDGSEPKIQRMGDRFAVEVKGRIHLDLAPVVRHTIRLPTYTLEAVYEAVFGKKKEKVYAEEIAEAWKSEEGLKRVAQYSMEDARATYELGREFFPMEVELAKLIGQSVWDVSRSSTGNLVEWYLLRVAYERNELAPNKPGGEEYQRRMRSSYIGGYVKEPEKGLWESIAYLDFRSSYASIIVTHNVSPDTLEKECKNYDVAPIVGYRFCKDFKGFIPSILEDLIETRQKVKRKMKATIDPIEKKMLDYRQRALKILANSYYGYQGYPKARWYSKECAESVTAWGRHYIETTIKEAEKFGFKVLYADTDGFFATIPNEKPETIKSKAKKFLKHINEKLPGMLELEYEGFYLRGFFVTKKKYALIDEDGHITTRGLEVVRRDWSEIAKETQAKVLEVILREGSIEKAAGIVKKVVEDLANYRVPVEKLIIHEQITRELKRYKATGPHVAIAKRLQARGIKVKPGTIISYVVLKGSKKISDRVILFDEYDSSRHKYDPDYYIHNQVLPAVLRILEAFGYKEKDLEYQRMKQTGLGAWLKMGKK

SEQ ID NO: 1046 - protein, 773 aa, unidentified
  REGION 1..773: note = Description of Unknown: Synthetic polypeptide
MILDTDYITENGKPVIRIFKKEKGEFKIEYDRNFEPYIYALLEDDESIEDIKKITGERHGKKVRIIRVEKVKKKFLGEPIEVWKLVFEHPQDYPAIRDAIRSHPAVREIFEYDIPFAKRYLIDKGLVPMEGGEELKLLAFAIATFYHEGDEFAEGEILMISYADESGAKVITWKKIDLPYVEVVSTEREAIKRFLQVLREKDPDVLLTYNGDNFDFAYIKKRCEKLGLKFTIGRDGSEPKIQRMGDRFAVEVKGRIHLDLAPVVRHTIRLPTYTLEAVYEAVFGKKKEKVYAEEIAEAWKSEEGLKRVAQYSMEDARATYELGREFFPMEVELAKLIGQSVWDVSRSSTGRLVEWYLLRVAYERNELAPNKPGGEEYQRRMRSSYIGGYVKEPEKGLWESIAYLDFRSSAGSIIVTHNVSPDTLEKECKNYDVAPIVGYRFCKDFKGFIPSILEDLIETRQKVKRKMKATIDPIEKKMLDYRQRALKILANSYYGYQGYPKARWYSKECAESVTAWGRHYIETTIKEAEKFGFKVLYADTDGFFATIPNEKPETIKSKAKKFLKHINEKLPGMLELEYEGFYLRGFFVTKKKYALIDEDGHITTRGLEVVRRDWSEIAKETQAKVLEVILREGSIEKAAGIVKKVVEDLANYRVPVEKLIIHEQITRELKRYKATGPHVAIAKRLQARGIKVKPGTIISYVVLKGSKKISDRVILFDEYDSSRHKYDPDYYIHNQVLPAVLRILEAFGYKEKDLEYQRMKQTGLGAWLKMGKK

SEQ ID NO: 1047 - protein, 773 aa, unidentified
  REGION 1..773: note = Description of Unknown: Synthetic polypeptide
MILDTDYITENGKPVIRIFKKEKGEFKIEYDRNFEPYIYALLEDDESIEDIKKITGERHGKKVRIIRVEKVKKKFLGEPIEVWKLVFEHPQDYPAIRDAIRSHPAVREIFEYDIPFAKRYLIDKGLVPMEGGEELKLLAFAIATFRHEGDEFAEGEILMISYADESGAKVITWKKIDLPYVEVVSTEREAIKRFLQVLREKDPDVLLTYNGDNFDFAYIKKRCEKLGLKFTIGRDGSEPKIQRMGDRFAVEVKGRIHLDLAPVVRHTIRLPTYTLEAVYEAVFGKKKEKVYAEEIAEAWKSEEGLKRVAQYSMEDARATYELGREFFPMEVELAKLIGQSVWDVSRSSTGNLVEWYLLRVAYERNELAPNKPGGEEYQRRMRSSYIGGYVKEPEKGLWESIAYLDFRSSAGSIIVTHNVSPDTLEKECKNYDVAPIVGYRFCKDFKGFIPSILEDLIETRQKVKRKMKATIDPIEKKMLDYRQRALKILANSYYGYQGYPKARWYSKECAESVTAWGRHYIETTIKEAEKFGFKVLYADTDGFFATIPNEKPETIKSKAKKFLKHINEKLPGMLELEYEGFYLRGFFVTKKKYALIDEDGHITTRGLEVVRRDWSEIAKETQAKVLEVILREGSIEKAAGIVKKVVEDLANYRVPVEKLIIHEQITRELKRYKATGPHVAIAKRLQARGIKVKPGTIISYVVLKGSKKISDRVILFDEYDSSRHKYDPDYYIHNQVLPAVLRILEAFGYKEKDLEYQRMKQTGLGAWLKMGKK

SEQ ID NO: 1048 - protein, 773 aa, unidentified
  REGION 1..773: note = Description of Unknown: Synthetic polypeptide
MILDTDYITENGKPVIRIFKKEKGEFKIEYDRNFEPYIYALLEDDESIEDIKKITGERHGKKVRIIRVEKVKKKFLGEPIEVWKLVFEHPQDYPAIRDAIRSHPAVREIFEYDIPFAKRYLIDKGLVPMEGGEELKLLAFAIATFYHEGDEFAEGEILMISYADESGAKVITWKKIDLPYVEVVSTEREAIKRFLQVLREKDPDVLLTYNGDNFDFAYIKKRCEKLGLKFTIGRDGSEPKIQRMGDRFAVEVKGRIHLDLAPVVRHTIRLPTYTLEAVYEAVFGKKKEKVYAEEIAEAWKSEEGLKRVAQYSMEDARATYELGREFFPMEVELAKLIGQSVWDVSRSSTGNLVEWYLLRVAYERNELAPNKPGGEEYQRRMRSSYIGGYVKEPEKGLWESIAYLDFRSLYASIIVTHNVSPDTLEKECKNYDVAPIVGYRFCKDFKGFIPSILEDLIETRQKVKRKMKATIDPIEKKMLDYRQRALKILANSYYGYQGYPKARWYSKECAESVTAWGRHYIETTIKEAEKFGFKVLYADTDGFFATIPNEKPETIKSKAKKFLKHINEKLPGMLELEYEGFYLRGFFVTKKKYALIDEDGHITTRGLEVVRRDWSEIAKETQAKVLEVILREGSIEKAAGIVKKVVEDLANYRVPVEKLIIHEQITRELKRYKATGPHVAIAKRLQARGIKVKPGTIISYVVLKGSKKISDRVILFDEYDSSRHKYDPDYYIHNQVLPAVLRILEAFGYKEKDLEYQRMKQTGLGAWLKMGKK

SEQ ID NO: 1049 - protein, 773 aa, unidentified
  REGION 1..773: note = Description of Unknown: Synthetic polypeptide
MILDTDYITENGKPVIRIFKKEKGEFKIEYDRNFEPYIYALLEDDESIEDIKKITGERHGKKVRIIRVEKVKKKFLGEPIEVWKLVFEHPQDYPAIRDAIRSHPAVREIFEYDIPFAKRYLIDKGLVPMEGGEELKLLAFAIATFYHEGDEFAEGEILMISYADESGAKVITWKKIDLPYVEVVSTEREAIKRFLQVLREKDPDVLLTYNGDNFDFAYIKKRCEKLGLKFTIGRDGSEPKIERMGDRFAVEVKGRIHLDLAPVVRHTIRLPTYTLEAVYEAVFGKKKEKVYAEEIAEAWKSEEGLKRVAQYSMEDARATYELGREFFPMEVELAKLIGQSVWDVSRSSTGNLVEWYLLRVAYERNELAPNKPGGEEYQRRMRSSYIGGYVKEPEKGLWESIAYLDFRSSAGSIIVTHNVSPDTLEKECKNYDVAPIVGYRFCKDFKGFIPSILEDLIETRQKVKRKMKATIDPIEKKMLDYRQRALKILANSYYGYQGYPKARWYSKECAESVTAWGRHYIETTIKEAEKFGFKVLYADTDGFFATIPNEKPETIKSKAKKFLKHINEKLPGMLELEYEGFYLRGFFVTKKKYALIDEDGHITTRGLEVVRRDWSEIAKETQAKVLEVILREGSIEKAAGIVKKVVEDLANYRVPVEKLIIHEQITRELKRYKATGPHVAIAKRLQARGIKVKPGTIISYVVLKGSKKISDRVILFDEYDSSRHKYDPDYYIHNQVLPAVLRILEAFGYKEKDLEYQRMKQTGLGAWLKMGKK

SEQ ID NO: 1050 - protein, 773 aa, unidentified
  REGION 1..773: note = Description of Unknown: Synthetic polypeptide
MILDTDYITENGKPVIRIFKKEKGEFKIEYDRNFEPYIYALLEDDESIEDIKKITGERHGKKVRIIRVEKVKKNFLGEPIEVWKLVFEHPQDYPAIRDAIRSHPAVREIFEYDIPFAKRYLIDKGLVPMEGGEELKLLAFAIATFEHEGDEFAEGEILMISYADESGAKVITWKKIDLPYVEVVSTEREAIKRFLQVLREKDPDVLLTYNGDNFDFAYIKKRCEKLGLKFTIGRDGSEPKIQRMGDRFAVEVKGRIHLDLAPVVRHTIRLPTYTLEAVYEAVFGKKKEKVYAEEIAEAWKSEEGLKRVAQYSMEDARATYELGREFFPMEVELAKLIGQSVWDVSRSSTGNLVEWYLLRVAYERNELAPNKPGGEEYQRRMRSSYIGGYVKEPEKGLWESIAYLDFRSSAGSIIVTHNVSPDTLEKECKNYDVAPIVGYRFCKDFKGFIPSILEDLIETRQKVKRKMKATIDPIEKKMLDYRQRALKILANSYYGYQGYPKARWYSKECAESVTAWGRHYIETTIKEAEKFGFKVLYADTDGFFATIPNEKPETIKSKAKKFLKHINEKLPGMLELEYEGFYLRGFFVTKKKYALIDEDGHITTRGLEVVRRDWSEIAKETQAKVLEVILREGSIEKAAGIVKKVVEDLANYRVPVEKLIIHEQITRELKRYKATGPHVAIAKRLQARGIKVKPGTIISYVVLKGSKKISDRVILFDEYDSSRHKYDPDYYIHNQVLPAVLRILEAFGYKEKDLEYQRMKQTGLGAWLKMGKK

SEQ ID NO: 1051 - protein, 773 aa, unidentified
  REGION 1..773: note = Description of Unknown: Synthetic polypeptide
MILDTDYITENGKPVIRIFKKEKGEFKIEYDRNFEPYIYALLEDDESIEDIKKITGERHGKKVRIIRVEKVKKKFLGEPIEVWKLVFEHPQDYPAIRDAIRSHPAVREIFEYDIPFAKRYLIDKGLVPMEGGEELKLLAFAIATFYHEGDEFAEGEILMISYADESGAKVITWKKIDLPYVEVVSTEREAIKRFLQVLREKDPDVLLTYNGDNFDFAYIKKRCEKLGLKFTIGRDGSEPKIQRMGDRFAVEVKGRIHLDLAPVVRHTIRLPTYTLEAVYEAVFGKKKEKVYAEEIAEAWKSEEGLKRVAQYSMEDARATYELGREFFPMEVELAKLIGQSVWDVSRSSTGNLVEWYLLRVAYERNELAPNKPGGEEYQRRMRSSYIGGYVKEPEKGLWESIAYLDFRSLFGSIIVTHNVSPDTLEKECKNYDVAPIVGYRFCKDFKGFIPSILEDLIETRQKVKRKMKATIDPIEKKMLDYRQRALKILANSYYGYQGYPKARWYSKECAESVTAWGRHYIETTIKEAEKFGFKVLYADTDGFFATIPNEKPETIKSKAKKFLKHINEKLPGMLELEYEGFYLRGFFVTKKKYALIDEDGHITTRGLEVVRRDWSEIAKETQAKVLEVILREGSIEKAAGIVKKVVEDLANYRVPVEKLIIHEQITRELKRYKATGPHVAIAKRLQARGIKVKPGTIISYVVLKGSKKISDRVILFDEYDSSRHKYDPDYYIHNQVLPAVLRILEAFGYKEKDLEYQRMKQTGLGAWLKMGKK

SEQ ID NO: 1052 - protein, 773 aa, unidentified
  REGION 1..773: note = Description of Unknown: Synthetic polypeptide
MILDTDYITENGKPVIRIFKKEKGEFKIEYDRNFEPYIYALLEDDESIEDIKKITGERHGKKVRIIRVEKVKKKFLGEPIEVWKLVFEHPQDVPAIRDAIRSHPAVREIFEYDIPFAKRYLIDKGLVPMEGGEELKLLAFRIATFYHEGDEFAEGEILMISYADESGAKVITWKKIDLPYVEVVSTEREAIKRFLQVLREKDPDVLLTYNGDNFDFAYIKKRCEKLGLKFTIGRDGSEPKIQRMGDRFAVEVKGRIHLDLAPVVRHTIRLPTYTLEAVYEAVFGKKKEKVYAEEIAEAWKSEEGLKRVAQYSMEDARATYELGREFFPLEVELAKLIGQSVWDVSRSSTGNLVEWYLLRVAYERNELAPNKPGGEEYQRRMRSSYIGGYVKEPEKGLWESIAYLDFRSSAGSIIVTHNVSPDTLEKECKNYDVAPIVGYRFCKDFKGFIPSILEDLIETRQKVKRKMKATIDPIEKKMLDYRQRALKILANSYYGYQGYPKARWYSKECAESVTAWGRHYIETTIKEAEKFGFKVLYADTDGFFATIPNEKPETIKSKAKKFLKHINEKLPGMLELEYEGFYLRGFFVTKKKYALIDEDGHITTRGLEVVRRDWSEIAKETQAKVLEVILREGSIEKAAGIVKKVVEDLANYRVPVEKLIIHEQITRELKRYKATGPHVAIAKRLQARGIKVKPGTIISYVVLKGSKKISDRVILFDEYDSSRHKYDPDYYIHNQVLPAVLRILEAFGYKEKDLEYQRDKQTGLGAWLKMGKK

SEQ ID NO: 1053 - protein, 773 aa, unidentified
  REGION 1..773: note = Description of Unknown: Synthetic polypeptide
MILDTDYITENGKPVIRIFKKEKGEFKIEYDRNFEPYIYALLEDDESIEDIKKITGERHGKKVRIIRVEKVKKKFLGEPIEVWKLVFEHPQDYPAIRDAIRSHPAVREIFEYDIPFAKRYLIDKGLVPMEGGEELKLLAFAIATFYHEGDEFAEGEILMISYADESGAKVITWKKIDLPYVEVVSTEREAIKRFLQVLREKDPDVLLTYNGDNFDFAYIKKRCEKLGLKFTIGRDGSEPKIQRMGDRFAVEVKGRIHLDLAPVVRHTIRLPTYTLEAVYEAVFGKKKEKVYAEEIAEAWKSEEGLKRVAQYSMEDARATYELGREFFPMEVELAKLIGQSVWDVSRSSTGNLVEWYLLRVAYERNELAPNKPGGEEYQRRMRSSYIGGYVKEPEKGLWESIAYLDFRSSAPSIIVTHNVSPDTLEKECKNYDVAPIVGYRFCKDFKGFIPSILEDLIETRQKVKRKMKATIDPIEKKMLDYRQRALKILANSYYGYQGYPKARWYSKECAESVTAWGRHYIETTIKEAEKFGFKVLYADTDGFFATIPNEKPETIKSKAKKFLKHINEKLPGMLELEYEGFYLRGFFVTKKKYALIDEDGHITTRGLEVVRRDWSEIAKETQAKVLEVILREGSIEKAAGIVKKVVEDLANYRVPVEKLIIHEQITRELKRYKATGPHVAIAKRLQARGIKVKPGTIISYVVLKGSKKISDRVILFDEYDSSRHKYDPDYYIHNQVLPAVLRILEAFGYKEKDLEYQRMKQTGLGAWLKMGKK

SEQ ID NO: 1054 - protein, 773 aa, unidentified
  REGION 1..773: note = Description of Unknown: Synthetic polypeptide
MILDTDYITENGKPVIRIFKKEKGEFKIEYDRNFEPYIYALLEDDESIEDIKKITGERHGKKVRIIRVEKVKKKFLGEPIEVWKLVFEHPQDYPAIRDAIRSHPAVREIFEYDIPFAKRYLIDKGLVPMEGGEELKLLAFDIATFYHEGDEFAEGEILMISYADESGAKVITWKKIDLPYVEVVSTEREAIKRFLQVLREKDPDVLLTYNGDNFDFAYIKKRCEKLGLKFTIGRDGSEPKIQRMGDRFAVEVKGRIHLDLAPVVRHTIRLPTYTLEAVYEAVFGKKKEKVYAEEIAEAWKSEEGLARVAQYSMEDARATYELGREFFPMEVELAKLIGQSVWDVSRSSTGNLVEWYLLRVAYERNELAPNKPGGEEYQRRMRSSYIGGYVKEPEKGLWESIAYLDFRSSAGSIIVTHNVSPDTLEKECKNYDVAPIVGYRFCKDFKGFIPSILEDLIETRQKVKRKMKATIDPIEKKMLDYRQRALKILANSYYGYQGYPKARWYSKECAESVTAWGRHYIETTIKEAEKFGFKVLYADTDGFFATIPNEKPETIKSKAKKFLKHINEKLPGMLELEYEGFYLRGFFVTKKKYALIDEDGHITTRGLEVVRRDWSEIAKETQAKVLEVILREGSIEKAAGIVKKVVEDLANYRVPVEKLIIHEQITRELKRYKATGPHVAIAKRLQARGIKVKPGTIISYVVLKGSKKISDRVILFDEYDSSRHKYDPDYYIHNQVLPAVLRILEAFGYKEKDLEYQRMKQTGLGAWLKMGKK

SEQ ID NO: 1055 - protein, 773 aa, unidentified
  REGION 1..773: note = Description of Unknown: Synthetic polypeptide
MILDTDYITENGKPVIRIFKKEKGEFKIEYDRNFEPYIYALLEDDESIEDIKKITGERHGKKVRIIRVEKVKKKFLGEPIEVWKLVFEHPQDYPAIRDAIRSHPAVREIFEYDIPFAKRYLIDKGLVPMEGGEELKLLAFAIETFYHEGDEFAEGEILMISYADESGAKVITWKKIDLPYVEVVSTEREAIKRFLQVLREKDPDVLLTYNGDNFDFAYIKKRCEKLGLKFTIGRDGSEPKIQRMGDRFAVEVKGRIHLDLAPVVRHTIRLPTYTLEAVYEAVFGKKKEKVYAEEIAEAWKSEEGLKRVAQYSMEDARATYELGREFFPMEVELAKLIGQSVWDVSRSSTGNLVEWYLLRVAYERNELAPNKPGGEEYQRRMRSSYIGGYVKEPEKGLWESIAYLDFRSSAGSIIVTHNVSPDTLEKECKNYDVAPIVGYRFCKDFKGFIPSILEDLIETRQKVKRKMKATIDPIEKKMLDYRQRALKILANSYYGYQGYPKARWYSKECAESVTAWGRHYIETTIKEAEKFGFKVLYADTDGFFATIPNEKPETIKSKAKKFLKHINEKLPGMLELEYEGFYLRGFFVTKKKYALIDEDGHITTRGLEVVRRDWSEIAKETQAKVLEVILREGSIEKAAGIVKKVVEDLANYRVPVEKLIIHEQITRELKRYKATGPHVAIAKRLQARGIKVKPGTIISYVVLKGSKKISDRVILFDEYDSSRHKYDPDYYIHNQVLPAVLRILEAFGYKEKDLEYQRDKQTGLGAWLKMGKK

SEQ ID NO: 1056 - protein, 773 aa, unidentified
  REGION 1..773: note = Description of Unknown: Synthetic polypeptide
MILDTDYITENGKPVIRIFKKEKGEFKIEYDRNFEPYIYALLEDDESIEDIKKITGERHGKKVRIIRVEKVKKNFLGEPIEVWKLVFEHPQDYPAIRDAIRSHPAVREIFEYDIPFAKRYLIDKGLVPMEGGEELKLLAFAIATFYHEGDEFAEGEILMISYADESGAKVITWKKIDLPYVEVVSTEREAIKRFLQVLREKDPDVLLTYNGDNFDFAYIKKRCEKLGLKFTIGRDGSEPKIQRMGDRFAVEVKGRIHLDLAPVVRHTIRLPTYTLEAVYEAVFGKKKEKVYAEEIAEAWKSEEGLARVAQYSVEDARATYELGREFFPMEVELAKLIGQSVWDVSRSSTGNLVEWYLLRVAYERNELAPNQPGGEEYQRRMRSSYIGGYVKEPEKGLWESIAYLDFRSSAGSIIVTHNVSPDTLEKECKNYDVAPIVGYRFCKDFKGFIPSILEDLIETRQKVKRKMKATIDPIEKKMLDYRQRALKILANSYYGYQGYPKARWYSKECAESVTAWGRHYIETTIKEAEKFGFKVLYADTDGFFATIPNEKPETIKSKAKKFLKHINEKLPGMLELEYEGFYLRGFFVTKKKYALIDEDGHITTRGLEVVRRDWSEIAKETQAKVLEVILREGSIEKAAGIVKKVVEDLANYRVPVEKLIIHEQITRELKRYKATGPHVAIAKRLQARGIKVKPGTIISYVVLKGSKKISDRVILFDEYDSSRHKYDPDYYIHNQVLPAVLRILEAFGYKEKDLEYQRDKQTGLGAWLKMGKK

SEQ ID NO: 1057 - protein, 773 aa, unidentified
  REGION 1..773: note = Description of Unknown: Synthetic polypeptide
MILDTDYITENGKPVIRIFKKEKGEFKIEYDRNFEPYIYALLEDDESIEDIKKITGERHGKKVRIIRVEKVKKKFLGEPIEVWKLVFEHPQDYPAIRDAIRSHPAVREIFEYDIPFAKRYLIDKGLVPMEGGEELKLLAFAIATFYHEGDEFAEGEILMISYADESGAKVITWKKIDLPYVEVVSTEREAIKRFLQVLREKDPDVLLTYNGDNFDFAYIKKRCEKLGLKFTIGRDGSEPKIQRMGDRFAVEVKGRIHLDLAPVVRHTIRLPTYTLEAVYEAVFGKKKEKVYAEEIAEAWKSEEGLKRVAQYSMEDARATYELGREFFPLEVELAKLIGQSVWDVSRSSTGNLVEWYLLRVAYERNELAPNKPGGEEYQRRMRSSYIGGYVKEPEKGLWESIAYLDFRSSAGSIIVTHNVSPDTLEKECKNYDVAPIVGYRFCKDFKGFIPSILEDLIETRQKVKRKMKATIDPIEKKMLDYRQRALKILANSYYGYQGYPKARWYSKECAESVTAWGRHYIETTIKEAEKFGFKVLYADTDGFFATIPNEKPETIKSKAKKFLKHINEKLPGMLELEYEGFYLRGFFVTKKKYALIDEDGHITTRGLEVVRRDWSEIAKETQAKVLEVILREGSIEKAAGIVKKVVEDLANYRVPVEKLIIHEQITRELKRYKATGPHVAIAKRLQARGIKVKPGTIISYVVLKGSKKISDRVILFDEYDSSRHKYDPDYYIHNQVLPAVLRILEAFGYKEKDLEYQRDKQTGLGAWLKMGKK

SEQ ID NO: 1058 - protein, 773 aa, unidentified
  REGION 1..773: note = Description of Unknown: Synthetic polypeptide
MILDTDYITENGKPVIRIFKKEKGEFKIEYDRNFEPYIYALLEDDESIEDIKKITGERHGKKVRIIRVEKVKKKFLGEPIEVWKLVFEHPQDVPAIRDAIRSHPAVREIFEYDIPFAKRYLIDKGLVPMEGGEELKLLAFNIETFYHEGDEFAEGEILMISYADESGAKVITWKKIDLPYVEVVSTEREAIKRFLQVLREKDPDVLLTYNGDNFDFAYIKKRCEKLGLKFTIGRDGSEPKIQRMGDRFAVEVKGRIHLDLAPVVRHTIRLPTYTLEAVYEAVFGKKKEKVYAEEIAEAWKSEEGLKRVAQYSMEDARATYELGREFFPLEVELAKLIGQSVWDVSRSSTGNLVEWYLLRVAYERNELAPNKPGGEEYQRRMRSSYIGGYVKEPEKGLWESIAYLDFRSSAGSIIVTHNVSPDTLEKECKNYDVAPIVGYRFCKDFKGFIPSILEDLIETRQKVKRKMKATIDPIEKKMLDYRQRALKILANSYYGYQGYPKARWYSKECAESVTAWGRHYIETTIKEAEKFGFKVLYADTDGFFATIPNEKPETIKSKAKKFLKHINEKLPGMLELEYEGFYLRGFFVTKKKYALIDEDGHITTRGLEVVRRDWSEIAKETQAKVLEVILREGSIEKAAGIVKKVVEDLANYRVPVEKLIIHEQITRELKRYKATGPHVAIAKRLQARGIKVKPGTIISYVVLKGSKKISDRVILFDEYDSSRHKYDPDYYIHNQVLPAVLRILEAFGYKEKDLEYQRDKQTGLGAWLKMGKK

SEQ ID NO: 1059 - protein, 773 aa, unidentified
  REGION 1..773: note = Description of Unknown: Synthetic polypeptide
MILDTDYITENGKPVIRIFKKEKGEFKIEYDRNFEPYIYALLEDDESIEDIKKITGERHGKKVRIIRVEKVKKKFLGEPIEVWKLVFEHPQDYPAIRDAIRSHPAVREIFEYDIPFAKRYLIDKGLVPMEGGEELKLLAFAIATFYHEGDEFAEGEILMISYADESGAKVITWKKIDLPYVEVVSTEREAIKRFLQVLREKDPDVLLTYNGDNFDFAYIKKRCEKLGLKFTIGRDGSEPKIQRMGDRFAVEVKGRIHLDLAPVVRHTIRLPTYTLEAVYEAVFGKKKEKVYAEEIAEAWKSEEGLARVAQYSMEDARATYELGREFFPMEVELAKLIGQSVWDVSRSSTGNLVEWYLLRVAYERNELAPNKPGGEEYQRRMRSSYIGGYVKEPEKGLWESIAYLDFRSSAPSIIVTHNVSPDTLEKECKNYDVAPIVGYRFCKDFKGFIPSILEDLIETRQKVKRKMKATIDPIEKKMLDYRQRALKILANSYYGYQGYPKARWYSKECAESVTAWGRHYIETTIKEAEKFGFKVLYADTDGFFATIPNEKPETIKSKAKKFLKHINEKLPGMLELEYEGFYLRGFFVTKKKYALIDEDGHITTRGLEVVRRDWSEIAKETQAKVLEVILREGSIEKAAGIVKKVVEDLANYRVPVEKLIIHEQITRELKRYKATGPHVAIAKRLQARGIKVKPGTIISYVVLKGSKKISDRVILFDEYDSSRHKYDPDYYIHNQVLPAVLRILEAFGYKEKDLEYQRDKQTGLGAWLKMGKK

SEQ ID NO: 1060 - protein, 766 aa, unidentified
  REGION 1..766: note = Description of Unknown: Synthetic polypeptide
MILDTDYITENGKPVIRIFKKEKGEFKIEYDRNFEPYIYALLEDDESIEDIKKITGERHGKKVRIIRVEKVKKKFLGEPIEVWKLVFEHPQDVPAIRDAIRSHPAVREIFEYDIPFAKRYLIDKGLVPMEGGEELKLLAFNIETFYHEGDEFAEGEILMISYADESGAKVITWKKIDLPYVEVVSTEREAIKRFLQVLREKDPDVLLTYNGDNFDFAYIKKRCEKLGLKFTIGRDGSEPKIQRMGDRFAVEVKGRIHLDLAPVVRHTIRLPTYTLEAVYEAVFGKKKEKVYAEEIAEAWKSEEGLKRVAQYSMEDARATYELGREFFPLEVELAKLIGQSVWDVSRSSTGNLVEWYLLRVAYERNELAPNKPGGEEYQRRMRSSYIGGYVKEPEKGLWESIAYLDFRSSAGSIIVTHNVSPDTLEKECKNYDVAPIVGYRFCKDFKGFIPSILEDLIETRQKVKRKMKATIDPIEKKMLDYRQRALKILANSYYGYQGYPKARWYSKECAESVTAWGRHYIETTIKEAEKFGFKVLYADTDGFFATIPNEKPETIKSKAKKFLKHINEKLPGMLELEYEGFYLRGFFVTKKKYALIDEDGHITTRGLEVVRRDWSEIAKETQAKVLEVILREGSIEKAAGIVKKVVEDLANYRVPVEKLIIHEQITRELKRYKATGPHVAIAKRLQARGIKVKPGTIISYVVLKGSKKISDRVILFDEYDSSRHKYDPDYYIHNQVLPAVLRILEAFGYKEKDLEYQRDKQTGLGA

SEQ ID NO: 1061 - protein, 773 aa, unidentified; identical to SEQ ID NO: 1029
  REGION 1..773: note = Description of Unknown: Synthetic polypeptide

SEQ ID NO: 1062 - protein, 773 aa, unidentified
  REGION 1..773: note = Description of Unknown: Synthetic polypeptide
MILDTDYITENGKPVIRIFKKEKGEFKIEYDRNFEPYIYALLEDDESIEDIKKITGERHGKKVRIIRVEKVKKKFLGEPIEVWKLVFEHPQDYPAIRDAIRSHPAVREIFEYDIPFAKRYLIDKGLVPMEGGEELKLLAFAIATFYHEGDEFAEGEILMISYADESGAKVITWKKIDLPYVEVVSTEREAIKRFLQVLREKDPDVLLTYNGDNFDFAYIKKRCEKLGLKFTIGRDGSEPKIQRMGDRFAVEVKGRIHLDLAPVVRHTIRLPTYTLEAVYEAVFGKKKEKVYAEEIAEAWKSEEGLKRVAQYSVEDARATYELGREFFPLEVELAKLIGQSVWDVSRSSTGNLVEWYLLRVAYERNELAPNKPGGEEYQRRMRSSYIGGYVKEPEKGLWESIAYLDFRSSAGSIIVTHNVSPDTLEKECKNYDVAPIVGYRFCKDFKGFIPSILEDLIETRQKVKRKMKATIDPIEKKMLDYRQRALKILANSYYGYQGYPKARWYSKECAESVTAWGRHYIETTIKEAEKFGFKVLYADTDGFFATIPNEKPETIKSKAKKFLKHINEKLPGMLELEYEGFYLRGFFVTKKKYALIDEDGHITTRGLEVVRRDWSEIAKETQAKVLEVILREGSIEKAAGIVKKVVEDLANYRVPVEKLIIHEQITRELKRYKATGPHVAIAKRLQARGIKVKPGTIISYVVLKGSKKISDRVILFDEYDSSRHKYDPDYYIHNQVLPAVLRILEAFGYKEKDLEYQRDKQTGLGAWLKMGKK

SEQ ID NO: 1063 - protein, 773 aa, unidentified
  REGION 1..773: note = Description of Unknown: Synthetic polypeptide
MILDTDYITENGKPVIRVFKKEKGEFKIEYDRNFEPYIYALLEDDESIEDIKKITGERHGKKVRIIRVEKVKKNFLGEPIEVWKLVFEHPQDYPAIRDAIRSHPAVREIFEYDIPFAKRYLIDKGLVPMEGGEELKLLAFAIATFYHEGDEFAEGEILMISYADESGAKVITWKKIDLPYVEVVSTEREAIKRFLQVLREKDPDVLLTYNGDNFDFAYIKKRCEKLGLKFTIGRDGSEPKIQRMGDRFAVEVKGRIHLDLAPVVRHTIRLPTYTLEAVYEAVFGKKKEKVYAEEIAEAWKSEEGLKRVAQYSMEDARATYELGREFFPMEVELAKLIGQSVWDVSRSSTGNLVEWYLLRVAYERNELAPNKPGGEEYQRRMRSSYIGGYVKEPEKGLWESIAYLDFRSSAGSIIVTHNVSPDTLEKECKNYDVAPIVGYRFCKDFKGFIPSILEDLIETRQKVKRKMKATIDPIEKKMLDYRQRALKILANSYYGYQGYPKARWYSKECAESVTAWGRHYIETTIKEAEKFGFKVLYADTDGFFATIPNEKPETIKSKAKKFLKHINEKLPGMLELEYEGFYLRGFFVTKKKYALIDEDGHITTRGLEVVRRDWSEIAKETQAKVLEVILREGSIEKAAGIVKKVVEDLANYRVPVEKLIIHEQITRELKRYKATGPHVAIAKRLQARGIKVKPGTIISYVVLKGSKKISDRVILFDEYDSSRHKYDPDYYIHNQVLPAVLRILEAFGYKEKDLEYQRMKQTGLGAWLKMGKK

SEQ ID NO: 1064 - protein, 773 aa, unidentified
  REGION 1..773: note = Description of Unknown: Synthetic polypeptide
MILDTDYITENGKPVIRIFKKEKGEFKIEYDRNFEPYIYALLEDDESIEDIKKITGERHGKKVRIIRVEKVKKKFLGEPIEVWKLVFEHPQDYPAIRDAIRSHPAVREIFEYDIPFAKRYLIDKGLVPMEGGEELKLLAFAIATFYHEGDEFAEGEILMISYADESGAKVITWKKIDLPYVEVVSTEREAIKRFLQVLREKDPDVLLTYNGDNFDFAYIKKRCEKLGLKFTIGRDGSEPKIQRMGDRFAVEVKGRIHLDLAPVVRHTIRLPTYTLEAVYEAVFGKKKEKVYAEEIAEAWKSEEGLKRVAQYSMEDARATYELGREFFPMEVELAKLIGQSVWDVSRSSTGNLVEWYLLRVAYERNELAPNKPGGEEYQRRMRSSYIGGYVKEPEKGLWESIAYLDFRSSAGSIIVTHNVSPDTLEKECKNYDVAPIVGYRFCKDFKGFIPSILEDLIETRQKVKRKMKATIDPIEKKMLDYRQRALKILANSYYGYQGYPAARWYSKECAESVTAWGRHYIETTIKEAEKFGFKVLYADTDGFFATIPNEKPETIKSKAKKFLKHINEKLPGMLELEYEGFYLRGFFVTKKKYALIDEDGHITTRGLEVVRRDWSEIAKETQAKVLEVILREGSIEKAAGIVKKVVEDLANYRVPVEKLIIHEQITRELKRYKATGPHVAIAKRLQARGIKVKPGTIISYVVLKGSKKISDRVILFDEYDSSRHKYDPDYYIHNQVLPAVLRILEAFGYKEKDLEYQRMKQTGLGAWLKMGKK

SEQ ID NO: 1065 - protein, 773 aa, unidentified
  REGION 1..773: note = Description of Unknown: Synthetic polypeptide
MILDTDYITENGKPVIRIFKKEKGEFKIEYDRNFEPYFYALLEDDESIEDIKKITGERHGKKVRIIRVEKVKKNFLGEPIEVWKLVFEHPQDYPAIRDAIRSHPAVREIFEYDIPFAKRYLIDKGLVPMEGGEELKLLAFAIATFYHEGDEFAEGEILMISYADESGAKVITWKKIDLPYVEVVSTEREAIKRFLQVLREKDPDVLLTYNGDNFDFAYIKKRCEKLGLKFTIGRDGSEPKIQRMGDRFAVEVKGRIHLDLAPVVRHTIRLPTYTLEAVYEAVFGKKKEKVYAEEIAEAWKSEEGLKRVAQYSMEDARATYELGREFFPMEVELAKLIGQSVWDVSRSSTGNLVEWYLLRVAYERNELAPNKPGGEEYQRRMRSSYIGGYVKEPEKGLWESIAYLDFRSSAGSIIVTHNVSPDTLEKECKNYDVAPIVGYRFCKDFKGFIPSILEDLIETRQKVKRKMKATIDPIEKKMLDYRQRALKILANSYYGYQGYPKARWYSKECAESVTAWGRHYIETTIKEAEKFGFKVLYADTDGFFATIPNEKPETIKSKAKKFLKHINEKLPGMLELEYEGFYLRGFFVTKKKYALIDEDGHITTRGLEVVRRDWSEIAKETQAKVLEVILREGSIEKAAGIVKKVVEDLANYRVPVEKLIIHEQITRELKRYKATGPHVAIAKRLQARGIKVKPGTIISYVVLKGSKKISDRVILFDEYDSSRHKYDPDYYIHNQVLPAVLRILEAFGYKEKDLEYQRMKQTGLGAWLKMGKK

SEQ ID NO: 1066 - protein, 773 aa, unidentified
  REGION 1..773: note = Description of Unknown: Synthetic polypeptide
MIIDTDYITENGKPVIRIFKKEKGEFKIEYDRNFEPYIYALLEDDESIEDIKKITGERHGKKVRIIRVEKVKKNFLGEPIEVWKLVFEHPQDYPAIRDAIRSHPAVREIFEYDIPFAKRYLIDKGLVPMEGGEELKLLAFAIATFYHEGDEFAEGEILMISYADESGAKVITWKKIDLPYVEVVSTEREAIKRFLQVLREKDPDVLLTYNGDNFDFAYIKKRCEKLGLKFTIGRDGSEPKIQRMGDRFAVEVKGRIHLDLAPVVRHTIRLPTYTLEAVYEAVFGKKKEKVYAEEIAEAWKSEEGLKRVAQYSMEDARATYELGREFFPMEVELAKLIGQSVWDVSRSSTGNLVEWYLLRVAYERNELAPNKPGGEEYQRRMRSSYIGGYVKEPEKGLWESIAYLDFRSSAGSIIVTHNVSPDTLEKECKNYDVAPIVGYRFCKDFKGFIPSILEDLIETRQKVKRKMKATIDPIEKKMLDYRQRALKILANSYYGYQGYPKARWYSKECAESVTAWGRHYIETTIKEAEKFGFKVLYADTDGFFATIPNEKPETIKSKAKKFLKHINEKLPGMLELEYEGFYLRGFFVTKKKYALIDEDGHITTRGLEVVRRDWSEIAKETQAKVLEVILREGSIEKAAGIVKKVVEDLANYRVPVEKLIIHEQITRELKRYKATGPHVAIAKRLQARGIKVKPGTIISYVVLKGSKKISDRVILFDEYDSSRHKYDPDYYIHNQVLPAVLRILEAFGYKEKDLEYQRMKQTGLGAWLKMGKK

SEQ ID NO: 1067 - protein, 766 aa, unidentified
  REGION 1..766: note = Description of Unknown: Synthetic polypeptide
MILDTDYITENGKPVIRIFKKEKGEFKIEYDRNFEPYIYALLEDDESIEDIKKITGERHGKKVRIIRVEKVKKKFLGEPIEVWKLVFEHPQDIPAIRDAIRSHPAVREIFEYDIPFAKRYLIDKGLVPMEGGEELKLLAFNIATFYHEGDEFAEGEILMISYADESGAKVITWKKIDLPYVEVVSTEREAIKRFLQVLREKDPDVLLTYNGDNFDFAYIKKRCEKLGLKFTIGRDGSEPKIQRMGDRFAVEVKGRIHLDLAPVVRHTIRLPTYTLEAVYEAVFGKKKEKVYAEEIAEAWKSEEGLKRVAQYSMEDARATYELGREFFPLEVELAKLIGQSVWDVSRSSTGNLVEWYLLRVAYERNELAPNQPGGEEYQRRMRSSYIGGYVKEPEKGLWESIAYLDFRSSAGSIIVTHNVSPDTLEKECKNYDVAPIVGYRFCKDFKGFIPSILEDLIETRQKVKRKMKATIDPIEKKMLDYRQRALKILANSYYGYQGYPKARWYSKECAESVTAWGRHYIETTIKEAEKFGFKVLYADTDGFFATIPNEKPETIKSKAKKFLKHINEKLPGMLELEYEGFYLRGFFVTKKKYALIDEDGHITTRGLEVVRRDWSEIAKETQAKVLEVILREGSIEKAAGIVKKVVEDLANYRVPVEKLIIHEQITRELKRYKATGPHVAIAKRLQARGIKVKPGTIISYVVLKGSKKISDRVILFDEYDSSRHKYDPDYYIHNQVLPAVLRILEAFGYKEKDLEYQRDKQTGLGA

SEQ ID NO: 1068 - protein, 773 aa, unidentified
  REGION 1..773: note = Description of Unknown: Synthetic polypeptide
MILDTDYITENGKPVIRIFKKEKGEFKIEYDRNFEPYIYALLEDDESIEDIKKITGERHGKKVRIIRVEKVKKKFLGEPIEVWKLVFEHPQDVPAIRDAIRSHPAVREIFEYDIPFAKRYLIDKGLVPMEGGEELKLLAFNIATFYHEGDEFAEGEILMISYADESGAKVITWKKIDLPYVEVVSTEREAIKRFLQVLREKDPDVLLTYNGDNFDFAYIKKRCEKLGLKFTIGRDGSEPKIQRMGDRFAVEVKGRIHLDLAPVVRHTIRLPTYTLEAVYEAVFGKKKEKVYAEEIAEAWKSEEGLKRVAQYSMEDARATYELGREFFPLEVELAKLIGQSVWDVSRSSTGNLVEWYLLRVAYERNELAPNKPGGEEYQRRMRSSYIGGYVKEPEKGLWESIAYLDFRSSAGSIIVTHNVSPDTLEKECKNYDVAPIVGYRFCKDFKGFIPSILEDLIETRQKVKRKMKATIDPIEKKMLDYRQRALKILANSYYGYQGYPKARWYSKECAESVTAWGRHYIETTIKEAEKFGFKVLYADTDGFFATIPNEKPETIKSKAKKFLKHINEKLPGMLELEYEGFYLRGFFVTKKKYALIDEDGHITTRGLEVVRRDWSEIAKETQAKVLEVILREGSIEKAAGIVKKVVEDLANYRVPVEKLIIHEQITRRLKRYKATGPHVAIAKRLQARGIKVKPGTIISYVVLKGSKKISDRVILFDEYDSSRHKYDPDYYIHNQVLPAVLRILEAFGYKEKDLEYQRDKQTGLGAWLKMGKK

SEQ ID NO: 1069 - protein, 773 aa, unidentified
  REGION 1..773: note = Description of Unknown: Synthetic polypeptide
MILDTDYITENGKPVIRIFKKEKGEFKIEYDRNFEPYIYALLEDDESIEDIKKITGERHGKKVRIIRVEKVKKKFLGEPIEVWKLVFEHPQDFPAIRDAIRSHPAVREIFEYDIPFAKRYLIDKGLVPMEGGEELKLLAFNIATFYHEGDEFAEGEILMISYADESGAKVITWKKIDLPYVEVVSTEREAIKRFLQVLREKDPDVLLTYNGDNFDFAYIKKRCEKLGLKFTIGRDGSEPKIQRMGDRFAVEVKGRIHLDLAPVVRHTIRLPTYTLEAVYEAVFGKKKEKVYAEEIAEAWKSEEGLKRVAQYSMEDARATYELGREFFPLEVELAKLIGQSVWDVSRSSTGNLVEWYLLRVAYERNELAPNKPGGEEYQRRMRSSYIGGYVKEPEKGLWESIAYLDFRSSAPSIIVTHNVSPDTLEKECKNYDVAPIVGYRFCKDFKGFIPSILEDLIETRQKVKRKMKATIDPIEKKMLDYRQRALKILANSYYGYQGYPKARWYSKECAESVTAWGRHYIETTIKEAEKFGFKVLYADTDGFFATIPNEKPETIKSKAKKFLKHINEKLPGMLELEYEGFYLRGFFVTKKKYALIDEDGHITTRGLEVVRRDWSEIAKETQAKVLEVILREGSIEKAAGIVKKVVEDLANYRVPVEKLIIHEQITRELKRYKATGPHVAIAKRLQARGIKVKPGTIISYVVLKGSKKISDRVILFDEYDSSRHKYDPDYYIHNQVLPAVLRILEAFGYKEKDLEYQRMKQTGLGAWLKMGKK

SEQ ID NO: 1070 - protein, 773 aa, unidentified
  REGION 1..773: note = Description of Unknown: Synthetic polypeptide
MILDTDYITENGKPVIRIFKKEKGEFKIEYDRNFEPYIYALLEDDESIEDIKKITGERHGKKVRIIRVEKVKKKFLGEPIEVWKLVFEHPQDYPAIRDAIRSHPAVREIFEYDIPFAKRYLIDKGLVPMEGGEELKLLAFAIATFYHEGDEFAEGEILMISYADESGAKVITWKKIDLPYVEVVSTEREAIKRFLQVLREKDPDVLLTYNGDNFDFAYIKKRCEKLGLKFTIGRDGSEPKIQRMGDRFAVEVKGRIHLDLAPVVRHTIRLPTYTLEAVYEAVFGKKKEKVYAEEIAEAWKSEEGLKRVAQYSMEDARATYELGREFFPMEVELAKLIGQSVWDVSRSSTGNLVEWYLLRVAYERNELAPNKPGGEEYQRRMRSSYIGGYVKEPEKGLWESIAYLDFRSSAGSIIVTHNVSPDTLEKECKNYDVAPIVGYRFCKDFKGFIPSILEDLIETRQKVKRKMKATIDPIEKKMLDYRQRALAILANSYYGYQGYPKARWYSKECAESVTAWGRHYIETTIKEAEKFGFKVLYADTDGFFATIPNEKPETIKSKAKKFLKHINEKLPGMLELEYEGFYLRGFFVTKKKYALIDEDGHITTRGLEVVRRDWSEIAKETQAKVLEVILREGSIEKAAGIVKKVVEDLANYRVPVEKLIIHEQITRELKRYKATGPHVAIAKRLQARGIKVKPGTIISYVVLKGSKKISDRVILFDEYDSSRHKYDPDYYIHNQVLPAVLRILEAFGYKEKDLEYQRMKQTGLGAWLKMGKK

SEQ ID NO: 1071 - protein, 773 aa, unidentified
  REGION 1..773: note = Description of Unknown: Synthetic polypeptide
MILDTDYITENGKPVIRIFKKEKGEFKIEYDRNFEPYIYALLEDDESIEDIKKITGERHGKKVRIIRVEKVKKKFLGEPIEVWKLVFEHPQDYPAIRDAIRSHPAVREIFEYDIPFAKRYLIDKGLVPMEGGEELKLLAFAIATFYHEGDEFAEGEILMISYADESGAKVITWKKIDLPYVEVVSTEREAIKRFLQVLREKDPDVLLTYNGDNFDFAYIKKRCEKLGLKFTIGRDGSEPKIQRMGDRFAVEVKGRIHLDLAPVVRHTIRLPTYTLEAVYEAVFGKKKEKVYAEEIAEAWKSEEGLKRVAQYSMEDARATYELGREFFPVEVELAKLIGQSVWDVSRSSTGNLVEWYLLRVAYERNELAPNKPGGEEYQRRMRSSYIGGYVKEPEKGLWESIAYLDFRSSAGSIIVTHNVSPDTLEKECKNYDVAPIVGYRFCKDFKGFIPSILEDLIETRQKVKRKMKATIDPIEKKMLDYRQRALKILANSYYGYQGYPKARWYSKECAESVTAWGRHYIETTIKEAEKFGFKVLYADTDGFFATIPNEKPETIKSKAKKFLKHINEKLPGMLELEYEGFYLRGFFVTKKKYALIDEDGHITTRGLEVVRRDWSEIAKETQAKVLEVILREGSIEKAAGIVKKVVEDLANYRVPVEKLIIHEQITRELKRYKATGPHVAIAKRLQARGIKVKPGTIISYVVLKGSKKISDRVILFDEYDSSRHKYDPDYYIHNQVLPAVLRILEAFGYKEKDLEYQRMKQTGLGAWLKMGKK

SEQ ID NO: 1072 - protein, 773 aa, unidentified
  REGION 1..773: note = Description of Unknown: Synthetic polypeptide
MILDTDYITENGKPVIRIFKKEKGEFKIEYDRNFEPYIYALLEDDESIEDIKKITGERHGKKVRIIRVEKVKKKFLGEPIEVWKLVFEHPQDYPAIRDAIRSHPAVREIFEYDIPFAKRYLIDKGLVPMEGGEELKLLAFDIATFYHEGDEFAEGEILMISYADESGAKVITWKKIDLPYVEVVSTEREAIKRFLQVLREKDPDVLLTYNGDNFDFAYIKKRCEKLGLKFTIGRDGSEPKIQRMGDRFAVEVKGRIHLDLAPVVRHTIRLPTYTLEAVYEAVFGKKKEKVYAEEIAEAWKSEEGLKRVAQYSMEDARATYELGREFFPMEVELAKLIGQSVWDVSRSSTGNLVEWYLLRVAYERNELAPNKPGGEEYQRRMRSSYIGGYVKEPEKGLWESIAYLDFRSSAGSIIVTHNVSPDTLEKECKNYDVAPIVGYRFCKDFKGFIPSILEDLIETRQKVKRKMKATIDPIEKKMLDYRQRALKILANSYYGYQGYPKARWYSKECAESVTAWGRHYIETTIKEAEKFGFKVLYADTDGFFATIPNEKPETIKSKAKKFLKHINEKLPGMLELEYEGFYLRGFFVTKKKYALIDEDGHITTRGLEVVRRDWSEIAKETQAKVLEVILREGSIEKAAGIVKKVVEDLANYRVPVEKLIIHEQITRELKRYKATGPHVAIAKRLQARGIKVKPGTIISYVVLKGSKKISDRVILFDEYDSSRHKYDPDYYIHNQVLPAVLRILEAFGYKEKDLEYQRDKQTGLGAWLKMGKK

SEQ ID NO: 1073 - protein, 773 aa, unidentified
  REGION 1..773: note = Description of Unknown: Synthetic polypeptide
MILDTDYITENGKPVIRIFKKEKGEFKIEYDRNFEPYIYALLEDDESIEDIKKITGERHGKKVRIIRVEKVKKKFLGEPIEVWKLVFEHPQDYPAIRDAIRSHPAVREIFEYDIPFAKRYLIDKGLVPMEGGEELKLLAFAIATFYHEGDEFAEGEILMISYADESGAKVITWKKIDLPYVEVVSTEREAIKRFLQVLREKDPDVLLTYNGDNFDFAYIKKRCEKLGLKFTIGRDGSEPKIQRMGDRFAVEVKGRIHLDLAPVVRHTIRLPTYTLEAVYEAVFGKKKEKVYAEEIAEAWKSEEGLKRVAQYSMEDARATYELGREFFPMEVELAKLIGQSVWDVSRSSTGNLVEWYLLRVAYERNELAPNKPGGEEYQRRMRSSYIGGYVKEPEKGLWESIAYLDFRSSAGSIIVTHNVSPDTLEKECKNYDVAPIVGYRFCKDFKGFIPSILEDLIETRQKVKRKMKATIDPIEKKMLDYRQRALKILANSYYGYQGYPKARWYSKECAESVTAWGRHYIETTIKEAEKFGFKVLYADTDGFFATIPNEKPETIKSKAKKFLKHINEKLPGMLELEYEGFYLRGFFVTKKKYALIDEDGHITTRGLEVVRRDWSEIAKETQAKVLEVILREGSIEKAAGIVKKVVEDLANYRVPVEKLIIHEFITRELKRYKATGPHVAIAKRLQARGIKVKPGTIISYVVLKGSKKISDRVILFDEYDSSRHKYDPDYYIHNQVLPAVLRILEAFGYKEKDLEYQRMKQTGLGAWLKMGKK

SEQ ID NO: 1074 - protein, 773 aa, unidentified
  REGION 1..773: note = Description of Unknown: Synthetic polypeptide
MILDTDYITENGKPVIRIFKKEKGEFKIEYDRNFEPYIYALLEDDESIEDIKKITGERHGKKVRIIRVEKVKKKFLGEPIEVWKLVFEHPQDVPAIRDAIRSHPAVREIFEYDIPFAKRYLIDKGLVPMEGGEELKLLAFRIATFYHEGDEFAEGEILMISYADESGAKVITWKKIDLPYVEVVSTEREAIKRFLQVLREKDPDVLLTYNGDNFDFAYIKKRCEKLGLKFTIGRDGSEPKIQRMGDRFAVEVKGRIHLDLAPVVRHTIRLPTYTLEAVYEAVFGKKKEKVYAEEIAEAWKSEEGLARVAQYSMEDARATYELGREFFPLEVELAKLIGQSVWDVSRSSTGNLVEWYLLRVAYERNELAPNKPGGEEYQRRMRSSYIGGYVKEPEKGLWESIAYLDFRSSAGSIIVTHNVSPDTLEKECKNYDVAPIVGYRFCKDFKGFIPSILEDLIETRQKVKRKMKATIDPIEKKMLDYRQRALKILANSYYGYQGYPKARWYSKECAESVTAWGRHYIETTIKEAEKFGFKVLYADTDGFFATIPNEKPETIKSKAKKFLKHINEKLPGMLELEYEGFYLRGFFVTKKKYALIDEDGHITTRGLEVVRRDWSEIAKETQAKVLEVILREGSIEKAAGIVKKVVEDLANYRVPVEKLIIHEQITRELKRYKATGPHVAIAKRLQARGIKVKPGTIISYVVLKGSKKISDRVILFDEYDSSRHKYDPDYYIHNQVLPAVLRILEAFGYKEKDLEYQRDKQTGLGAWLKMGKK

SEQ ID NO: 1075 - protein, 773 aa, unidentified
  REGION 1..773: note = Description of Unknown: Synthetic polypeptide
MILDTDYITENGKPVIRIFKKEKGEFKIEYDRNFEPYIYALLEDDESIEDIKKITGERHGKKVRIIRVEKVKKKFLGEPIEVWKLVFEHPQDYPAIRDAIRSHPAVREIFEYDIPFAKRYLIDKGLVPMEGGEELKLLAFAIATFYHEGDEFAEGEILMISYADESGAKVITWKKIDLPYVEVVSTEREAIKRFLQVLREKDPDVLLTYNGDNFDFAYIKKRCEKLGLKFTIGRDGSEPKIQRMGDRFAVEVKGRIHLDLAPVVRHTIRLPTYTLEAVYEAVFGKKKEKVYAEEIAEAWKSEEGLKRVAQYSMEDARATYELGREFFPMEVELAKLIGQSVWDVSRSSTGNLVEWYLLRVAYERNELAPNKPGGEEYQRRMRSSYIGGYVKEPEKGLWESIAYLDFRSMFASIIVTHNVSPDTLEKECKNYDVAPIVGYRFCKDFKGFIPSILEDLIETRQKVKRKMKATIDPIEKKMLDYRQRALKILANSYYGYQGYPKARWYSKECAESVTAWGRHYIETTIKEAEKFGFKVLYADTDGFFATIPNEKPETIKSKAKKFLKHINEKLPGMLELEYEGFYLRGFFVTKKKYALIDEDGHITTRGLEVVRRDWSEIAKETQAKVLEVILREGSIEKAAGIVKKVVEDLANYRVPVEKLIIHEQITRELKRYKATGPHVAIAKRLQARGIKVKPGTIISYVVLKGSKKISDRVILFDEYDSSRHKYDPDYYIHNQVLPAVLRILEAFGYKEKDLEYQRMKQTGLGAWLKMGKK

SEQ ID NO: 1076 - protein, 774 aa, unidentified
  REGION 1..774: note = Description of Unknown: Synthetic polypeptide
MILDTDYITENGKPVIRIFKKEKGEFKIEYDRNFEPYIYALLEDDESIEDIKKITGERHGKKVRIIRVEKVKKKFLGEPIEVWKLVFEHPQDYPAIRDAIRSHPAVREIFEYDIPFAKRYLIDKGLVPMEGGEELKLLAFAIATFYHEGDEFAEGEILMISYADESGAKVITWKKIDLPYVEVVSTEREAIKRFLQVLREKDPDVLLTYNGDNFDFAYIKKRCEKLGLKFTIGRDGSEPKIQRMGDRFAVEVKGRIHLDLAPVVRHTIRLPTYTLEAVYEAVFGKKKEKVYAEEIAEAWKSEEGLKRVAQYSMEDARATYELGREFFPLEVELAKLIGQSVWDVSRSSTGNLVEWYLLRVAYERNELAPNKPGGEEYQRRMRSSYIGGYVKEPEKGLWESIAYLDFRSSAGPSIIVTHNVSPDTLEKECKNYDVAPIVGYRFCKDFKGFIPSILEDLIETRQKVKRKMKATIDPIEKKMLDYRQRALKILANSYYGYQGYPKARWYSKECAESVTAWGRHYIETTIKEAEKFGFKVLYADTDGFFATIPNEKPETIKSKAKKFLKHINEKLPGMLELEYEGFYLRGFFVTKKKYALIDEDGHITTRGLEVVRRDWSEIAKETQAKVLEVILREGSIEKAAGIVKKVVEDLANYRVPVEKLIIHEQITRELKRYKATGPHVAIAKRLQARGIKVKPGTIISYVVLKGSKKISDRVILFDEYDSSRHKYDPDYYIHNQVLPAVLRILEAFGYKEKDLEYQRMKQTGLGAWLKMGKK

SEQ ID NO: 1077 - protein, 773 aa, unidentified
  REGION 1..773: note = Description of Unknown: Synthetic polypeptide
MILDTDYITENGKPVIRIFKKEKGEFKIEYDRNFEPYIYALLEDDESIEDIKKITGERHGKKVRIIRVEKVKKKFLGEPIEVWKLVFEHPQDYPAIRDAIRSHPAVREIFEYDIPFAKRYLIDKGLVPMEGGEELKLLAFAIATFYHEGDEFAEGEILMISYADESGAKVITWKKIDLPYVEVVSTEREAIKRFLQVLREKDPDVLLTYNGDNFDFAYIKKRCEKLGLKFTIGRDGSEPAIQRMGDRFAVEVKGRIHLDLAPVVRHTIRLPTYTLEAVYEAVFGKKKEQVYAEEIAEAWKSEEGLARVAQYSMEDARATYELGREFFPMEVELAKLIGQSVWDVSRSSTGNLVEWYLLRVAYERNELAPNKPGGEEYQRRMRSSYIGGYVKEPEKGLWESIAYLDFRSSAGSIIVTHNVSPDTLEKECKNYDVAPIVGYRFCKDFKGFIPSILEDLIETRQKVKRKMKATIDPIEKKMLDYRQRALKILANSYYGYQGYPKARWYSKECAESVTAWGRHYIETTIKEAEKFGFKVLYADTDGFFATIPNEKPETIKSKAKKFLKHINEKLPGMLELEYEGFYLRGFFVTKKKYALIDEDGHITTRGLEVVRRDWSEIAKETQAKVLEVILREGSIEKAAGIVKKVVEDLANYRVPVEKLIIHEQITRELKRYKATGPHVAIAKRLQARGIKVKPGTIISYVVLKGSKKISDRVILFDEYDSSRHKYDPDYYIHNQVLPAVLRILEAFGYKEKDLEYQRDKQTGLGAWLKMGKK

SEQ ID NO: 1078 - protein, 773 aa, unidentified
  REGION 1..773: note = Description of Unknown: Synthetic polypeptide
MILDTDYITENGKPVIRIFKKEKGEFKIEYDRNFEPYIYALLEDDESIEDIKKITGERHGKKVRIIRVEKVKKNFLGEPIEVWKLVFEHPQDYPAIRDAIRSHPAVREIFEYDIPFAKRYLIDKGLVPMEGGEELKLLAFAIATFYHEGDEFAEGEILMISYADESGAKVITWKKIDLPYVEVVSTEREAIKRFLQVLREKDPDVLLTYNGDNFDFAYIKKRCEKLGLKFTIGRDGSEPKIQRMGDRFAVEVKGRIHLDLAPVVRHTIRLPTYTLEAVYEAVFGKKKEKVYAEEIAEAWKSEEGLKRVAQYSMEDARATYELGREFFPMEVELAKLIGQSVWDVSRSSTGNLVEWYLLRVAYERNELAPNKPGGEEYQRRMRSSYIGGYVKEPEKGLWESIAYLDFRSSAGSIIVTHNVSPDTLEKECKNYDVAPEVGYRFCKDFKGFIPSILEDLIETRQKVKRKMKATIDPIEKKMLDYRQRALKILANSYYGYQGYPKARWYSKECAESVTAWGRHYIETTIKEAEKFGFKVLYADTDGFFATIPNEKPETIKSKAKKFLKHINEKLPGMLELEYEGFYLRGFFVTKKKYALIDEDGHITTRGLEVVRRDWSEIAKETQAKVLEVILREGSIEKAAGIVKKVVEDLANYRVPVEKLIIHEQITRELKRYKATGPHVAIAKRLQARGIKVKPGTIISYVVLKGSKKISDRVILFDEYDSSRHKYDPDYYIHNQVLPAVLRILEAFGYKEKDLEYQRMKQTGLGAWLKMGKK

SEQ ID NO: 1079 - protein, 773 aa, unidentified
  REGION 1..773: note = Description of Unknown: Synthetic polypeptide
MILDTDYITENGKPVIRIFKKEKGEFKIEYDRNFEPYIYALLEDDESIEDIKKITGERHGKKVRIIRVEKVKKKFLGEPIEVWKLVFEHPQDYPAIRDAIRSHPAVREIFEYDIPFAKRYLIDKGLVPMEGGEELKLLAFAIATFYHEGDEFAEGEILMISYADESGAKVITWKKIDLPYVEVVSTEREAIKRFLQVLREKDPDVLLTYNGDNFDFAYIKKRCEKLGLKFTIGRDGSEPKIQRMGDRFAVEVKGRIHLDLAPVVRHTIRLPTYTLEAVYEAVFGKKKEKVYAEEIAEAWKSEEGLKRVAQYSMEDARATYELGREFFPMEVELAKLIGQSVWDVSRSSTGNLVEWYLLRVAYERNELAPNKPGGEEYQRRMRSSYIGGYVKEPEKGLWESIAYLDFRSSAGSIIVTYNVSPDTLEKECKNYDVAPIVGYRFCKDFKGFIPSILEDLIETRQKVKRKMKATIDPIEKKMLDYRQRALKILANSYYGYQGYPKARWYSKECAESVTAWGRHYIETTIKEAEKFGFKVLYADTDGFFATIPNEKPETIKSKAKKFLKHINEKLPGMLELEYEGFYLRGFFVTKKKYALIDEDGHITTRGLEVVRRDWSEIAKETQAKVLEVILREGSIEKAAGIVKKVVEDLANYRVPVEKLIIHEQITRELKRYKATGPHVAIAKRLQARGIKVKPGTIISYVVLKGSKKISDRVILFDEYDSSRHKYDPDYYIHNQVLPAVLRILEAFGYKEKDLEYQRMKQTGLGAWLKMGKK

SEQ ID NO: 1080 - protein, 773 aa, unidentified
  REGION 1..773: note = Description of Unknown: Synthetic polypeptide
MILDTDYITENGKPVIRIFKKEKGEFKIEYDRNFEPYIYALLEDDESIEDIKKITGERHGKKVRIIRVEKVKKNFLGEPIEVWKLVFEHPQDYPAIRDAIRSHPAVREIFEYDIPFAKRYLIDKGLVPMEGGEELKLLAFNIATFYHEGDEFAEGEILMISYADESGAKVITWKKIDLPYVEVVSTEREAIKRFLQVLREKDPDVLLTYNGDNFDFAYIKKRCEKLGLKFTIGRDGSEPKIQRMGDRFAVEVKGRIHLDLAPVVRHTIRLPTYTLEAVYEAVFGKKKEKVYAEEIAEAWKSEEGLARVAQYSMEDARATYELGREFFPMEVELAKLIGQSVWDVSRSSTGNLVEWYLLRVAYERNELAPNKPGGEEYQRRMRSSYIGGYVKEPEKGLWESIAYLDFRSSAGSIIVTHNVSPDTLEKECKNYDVAPIVGYRFCKDFKGFIPSILEDLIETRQKVKRKMKATIDPIEKKMLDYRQRALKILANSYYGYQGYPKARWYSKECAESVTAWGRHYIETTIKEAEKFGFKVLYADTDGFFATIPNEKPETIKSKAKKFLKHINEKLPGMLELEYEGFYLRGFFVTKKKYALIDEDGHITTRGLEVVRRDWSEIAKETQAKVLEVILREGSIEKAAGIVKKVVEDLANYRVPVEKLIIHEQITRELKRYKATGPHVAIAKRLQARGIKVKPGTIISYVVLKGSKKISDRVILFDEYDSSRHKYDPDYYIHNQVLPAVLRILEAFGYKEKDLEYQRDKQTGLGAWLKMGKK

SEQ ID NO: 1081 - protein, 766 aa, unidentified
  REGION 1..766: note = Description of Unknown: Synthetic polypeptide
MILDTDYITENGKPVIRIFKKEKGEFKIEYDRNFEPYIYALLEDDESIEDIKKITGERHGKKVRIIRVEKVKKKFLGEPIEVWKLVFEHPQDVPAIRDAIRSHPAVREIFEYDIPFAKRYLIDKGLVPMEGGEELKLLAFRIATFYHEGDEFAEGEILMISYADESGAKVITWKKIDLPYVEVVSTEREAIKRFLQVLREKDPDVLLTYNGDNFDFAYIKKRCEKLGLKFTIGRDGSEPKIQRMGDRFAVEVKGRIHLDLAPVVRHTIRLPTYTLEAVYEAVFGKKKEKVYAEEIAEAWKSEEGLKRVAQYSMEDARATYELGREFFPLEVELAKLIGQSVWDVSRSSTGNLVEWYLLRVAYERNELAPNKPGGEEYQRRMRSSYIGGYVKEPEKGLWESIAYLDFRSSAGSIIVTHNVSPDTLEKECKNYDVAPIVGYRFCKDFKGFIPSILEDLIETRQKVKRKMKATIDPIEKKMLDYRQRALKILANSYYGYQGYPKARWYSKECAESVTAWGRHYIETTIKEAEKFGFKVLYADTDGFFATIPNEKPETIKSKAKKFLKHINEKLPGMLELEYEGFYLRGFFVTKKKYALIDEDGHITTRGLEVVRRDWSEIAKETQAKVLEVILREGSIEKAAGIVKKVVEDLANYRVPVEKLIIHEQITRELKRYKATGPHVAIAKRLQARGIKVKPGTIISYVVLKGSKKISDRVILFDEYDSSRHKYDPDYYIHNQVLPAVLRILEAFGYKEKDLEYQRDKQTGLGA

SEQ ID NO: 1082 - protein, 773 aa, unidentified
  REGION 1..773: note = Description of Unknown: Synthetic polypeptide
MILDTDYITENGKPVIRIFKKEKGEFKIEYDRNFEPYIYALLEDDESIEDIKKITGERHGKKVRIIRVEKVKKKFLGEPIEVWKLVFEHPQDFPAIRDAIRSHPAVREIFEYDIPFAKRYLIDKGLVPMEGGEELKLLAFNIATFYHEGDEFAEGEILMISYADESGAKVITWKKIDLPYVEVVSTEREAIKRFLQVLREKDPDVLLTYNGDNFDFAYIKKRCEKLGLKFTIGRDGSEPKIQRMGDRFAVEVKGRIHLDLAPVVRHTIRLPTYTLEAVYEAVFGKKKEKVYAEEIAEAWKSEEGLKRVAQYSVEDARATYELGREFFPLEVELAKLIGQSVWDVSRSSTGNLVEWYLLRVAYERNELAPNKPGGEEYQRRMRSSYIGGYVKEPEKGLWESIAYLDFRSSAGSIIVTHNVSPDTLEKECKNYDVAPIVGYRFCKDFKGFIPSILEDLIETRQKVKRKMKATIDPIEKKMLDYRQRALKILANSYYGYQGYPKARWYSKECAESVTAWGRHYIETTIKEAEKFGFKVLYADTDGFFATIPNEKPETIKSKAKKFLKHINEKLPGMLELEYEGFYLRGFFVTKKKYALIDEDGHITTRGLEVVRRDWSEIAKETQAKVLEVILREGSIEKAAGIVKKVVEDLANYRVPVEKLIIHEQITRELKRYKATGPHVAIAKRLQARGIKVKPGTIISYVVLKGSKKISDRVILFDEYDSSRHKYDPDYYIHNQVLPAVLRILEAFGYKEKDLEYQRMKQTGLGAWLKMGKK

SEQ ID NO: 1083 - protein, 773 aa, unidentified
  REGION 1..773: note = Description of Unknown: Synthetic polypeptide
MILDTDYITENGKPVIRIFKKEKGEFKIEYDRNFEPYIYALLEDDESIEDIKKITGERHGKKVRIIRVEKVKKKFLGEPIEVWKLVFEHPQDVPAIRDAIRSHPAVREIFEYDIPFAKRYLIDKGLVPMEGGEELKLLAFNIATFYHEGDEFAEGEILMISYADESGAKVITWKKIDLPYVEVVSTEREAIKRFLQVLREKDPDVLLTYNGDNFDFAYIKKRCEKLGLKFTIGRDGSEPKIQRMGDRFAVEVKGRIHLDLAPVVRHTIRLPTYTLEAVYEAVFGKKKEKVYAEEIAEAWKSEEGLKRVAQYSMEDARATYELGREFFPAEVELAKLIGQSVWDVSRSSTGNLVEWYLLRVAYERNELAPNKPGGEEYQRRMRSSYIGGYVKEPEKGLWESIAYLDFRSSAGSIIVTHNVSPDTLEKECKNYDVAPIVGYRFCKDFKGFIPSILEDLIETRQKVKRKMKATIDPIEKKMLDYRQRALKILANSYYGYQGYPKARWYSKECAESVTAWGRHYIETTIKEAEKFGFKVLYADTDGFFATIPNEKPETIKSKAKKFLKHINEKLPGMLELEYEGFYLRGFFVTKKKYALIDEDGHITTRGLEVVRRDWSEIAKETQAKVLEVILREGSIEKAAGIVKKVVEDLANYRVPVEKLIIHELITRELKRYKATGPHVAIAKRLQARGIKVKPGTIISYVVLKGSKKISDRVILFDEYDSSRHKYDPDYYIHNQVLPAVLRILEAFGYKEKDLEYQRDKQTGLGAWLKMGKK

SEQ ID NO: 1084 - protein, 766 aa, unidentified
  REGION 1..766: note = Description of Unknown: Synthetic polypeptide
MILDTDYITENGKPVIRIFKKEKGEFKIEYDRNFEPYIYALLEDDESIEDIKKITGERHGKKVRIIRVEKVKKKFLGEPIEVWKLVFEHPQDVPAIRDAIRSHPAVREIFEYDIPFAKRYLIDKGLVPMEGGEELKLLAFNIATFYHEGDEFAEGEILMISYADESGAKVITWKKIDLPYVEVVSTEREAIKRFLQVLREKDPDVLLTYNGDNFDFAYIKKRCEKLGLKFTIGRDGSEPKIQRMGDRFAVEVKGRIHLDLAPVVRHTIRLPTYTLEAVYEAVFGKKKEKVYAEEIAEAWKSEEGLARVAQYSMEDARATYELGREFFPLEVELAKLIGQSVWDVSRSSTGNLVEWYLLRVAYERNELAPNKPGGEEYQRRMRSSYIGGYVKEPEKGLWESIAYLDFRSSAGSIIVTHNVSPDTLEKECKNYDVAPIVGYRFCKDFKGFIPSILEDLIETRQKVKRKMKATIDPIEKKMLDYRQRALKILANSYYGYQGYPKARWYSKECAESVTAWGRHYIETTIKEAEKFGFKVLYADTDGFFATIPNEKPETIKSKAKKFLKHINEKLPGMLELEYEGFYLRGFFVTKKKYALIDEDGHITTRGLEVVRRDWSEIAKETQAKVLEVILREGSIEKAAGIVKKVVEDLANYRVPVEKLIIHELITRELKRYKATGPHVAIAKRLQARGIKVKPGTIISYVVLKGSKKISDRVILFDEYDSSRHKYDPDYYIHNQVLPAVLRILEAFGYKEKDLEYQRDKQTGLGA

SEQ ID NO: 1085 - protein, 773 aa, unidentified
  REGION 1..773: note = Description of Unknown: Synthetic polypeptide
MILDTDYITENGKPVIRIFKKEKGEFKIEYDRNFEPYIYALLEDDESIEDIKKITGERHGKKVRIIRVEKVKKKFLGEPIEVWKLVFEHPQDVPAIRDAIRSHPAVREIFEYDIPFAKRYLIDKGLVPMEGGEELKLLAFNIATFYHEGDEFAEGEILMISYADESGAKVITWKKIDLPYVEVVSTEREAIKRFLQVLREKDPDVLLTYNGDNFDFAYIKKRCEKLGLKFTIGRDGSEPKIQRMGDRFAVEVKGRIHLDLAPVVRHTIRLPTYTLEAVYEAVFGKKKEKVYAEEIAEAWKSEEGLKRVAQYSAEDARATYELGREFFPLEVELAKLIGQSVWDVSRSSTGNLVEWYLLRVAYERNELAPNKPGGEEYQRRMRSSYIGGYVKEPEKGLWESIAYLDFRSSAGSIIVTHNVSPDTLEKECKNYDVAPIVGYRFCKDFKGFIPSILEDLIETRQKVKRKMKATIDPIEKKMLDYRQRALKILANSYYGYQGYPKARWYSKECAESVTAWGRHYIETTIKEAEKFGFKVLYADTDGFFATIPNEKPETIKSKAKKFLKHINEKLPGMLELEYEGFYLRGFFVTKKKYALIDEDGHITTRGLEVVRRDWSEIAKETQAKVLEVILREGSIEKAAGIVKKVVEDLANYRVPVEKLIIHEQITRRLKRYKATGPHVAIAKRLQARGIKVKPGTIISYVVLKGSKKISDRVILFDEYDSSRHKYDPDYYIHNQVLPAVLRILEAFGYKEKDLEYQRDKQTGLGAWLKMGKK

SEQ ID NO: 1086 - protein, 773 aa, unidentified
  REGION 1..773: note = Description of Unknown: Synthetic polypeptide
MILDTDYITENGKPVIRIFKKEKGEFKIEYDRNFEPYIYALLEDDESIEDIKKITGERHGKKVRIIRVEKVKKNFLGEPIEVWKLVFEHPQDYPAIRDAIRSHPAVREIFEYDIPFAKRYLIDKGLVPMEGGEELKLLAFAIATFYHEGDEFAEGEILMISYADESGAKVITWKKIDLPYVEVVSTEREAIKRFLQVLREKDPDVLLTYNGDNFDFAYIKKRCEKLGLKFTIGRDGSEPKIQRMGDRFAVEVKGRIHLDLAPVVRHTIRLPTYTLEAVYEAVFGKKKEKVYAEEIAEAWKSEEGLKRVAQYSMEDARATYELGREFFPMEVELAKLIGQSVWDVSRSSTGNLVEWYLLRVAYERNELAPNKPGGEEYQRRMRSSYIGGYVKEPEKGLWESIAYLDFRSSAGSIIVTHNVSPDTLEKECKNYDVAPIVGYRFCKDFKGFIPSILEDLIETRQKVKRKMKATIDPIEKKMLDYRQRALKILANSYYGYQGYPKARWYSKECAESVTAWGRHYIETTIKEAEKFGFKVLYADTDGFFATIPNEKPETIKSKAKKFLKHINEKLPGMLELEYEGFYLRGFFVTKKKYALIDEDGHITTRGLEVVRRDWSEIAKETQAKVLEAILREGSIEKAAGIVKKVVEDLANYRVPVEKLIIHEQITRELKRYKATGPHVAIAKRLQARGIKVKPGTIISYVVLKGSKKISDRVILFDEYDSSRHKYDPDYYIHNQVLPAVLRILEAFGYKEKDLEYQRMKQTGLGAWLKMGKK

SEQ ID NO: 1087 - protein, 773 aa, unidentified
  REGION 1..773: note = Description of Unknown: Synthetic polypeptide
MILDTDYITENGKPVIRIFKKEKGEFKIEYDRNFEPYIYALLEDDESIEDIKKITGERHGKKVRIIRVEKVKKKFLGEPIEVWKLVFEHPQDYPAIRDAIRSHPAVREIFEYDIPFAKRYLIDKGLVPMEGGEELKLLAFNIATFYHEGDEFAEGEILMISYADESGAKVITWKKIDLPYVEVVSTEREAIKRFLQVLREKDPDVLLTYNGDNFDFAYIKKRCEKLGLKFTIGRDGSEPKIQRMGDRFAVEVKGRIHLDLAPVVRHTIRLPTYTLEAVYEAVFGKKKEKVYAEEIAEAWKSEEGLARVAQYSMEDARATYELGREFFPMEVELAKLIGQSVWDVSRSSTGNLVEWYLLRVAYERNELAPNKPGGEEYQRRMRSSYIGGYVKEPEKGLWESIAYLDFRSSAGSIIVTHNVSPDTLEKECKNYDVAPIVGYRFCKDFKGFIPSILEDLIETRQKVKRKMKATIDPIEKKMLDYRQRALKILANSYYGYQGYPKARWYSKECAESVTAWGRHYIETTIKEAEKFGFKVLYADTDGFFATIPNEKPETIKSKAKKFLKHINEKLPGMLELEYEGFYLRGFFVTKKKYALIDEDGHITTRGLEVVRRDWSEIAKETQAKVLEVILREGSIEKAAGIVKKVVEDLANYRVPVEKLIIHEQITRELKRYKATGPHVAIAKRLQARGIKVKPGTIISYVVLKGSKKISDRVILFDEYDSSRHKYDPDYYIHNQVLPAVLRILEAFGYKEKDLEYQRMKQTGLGAWLKMGKK

SEQ ID NO: 1088 - protein, 773 aa, unidentified; identical to SEQ ID NO: 782
  REGION 1..773: note = Description of Unknown: Synthetic polypeptide

SEQ ID NO: 1089 - protein, 773 aa, unidentified
  REGION 1..773: note = Description of Unknown: Synthetic polypeptide
MILDTDYITENGKPVIRIFKKEKGEFKIEYDRNFEPYIYALLEDDESIEDIKKITGERHGKKVRIIRVEKVKKKFLGEPIEVWKLVFELPQDVPAINDAIRSHPAVREIFEYDIPFAKRYLIDKGLVPMEGGEELKLLAFNIATFYHEGDEFAEGEILMISYADESGAKVITWKKIDLPYVEVVSTEREAIKRFLQVLREKDPDVLLTYNGDNFDFAYIKKRCEKLGLKFTIGRDGSEPKIQRMGDRFAVEVKGRIHLDLAPVVRHTIRLPTYTLEAVYEAVFGKKKEKVYAEEIAEAWKSEEGLKRVAQYSMEDARATYELGREFFPLEVELAKLIGQSVWDVSRSSTGNLVEWYLLRVAYERNELAPNKPGGEEYQRRMRSSYIGGYVKEPEKGLWESIAYLDFRSSAGSIIVTHNVSPDTLEKECKNYDVAPIVGYRFCKDFKGFIPSILEDLIETRQKVKRKMKATIDPIEKKMLDYRQRALKILANSYYGYQGYPKARWYSKECAESVTAWGRHYIETTIKEAEKFGFKVLYADTDGFFATIPNEKPETIKSKAKKFLKHINEKLPGMLELEYEGFYLRGFFVTKKKYALIDEDGHITTRGLEVVRRDWSEIAKETQAKVLEVILREGSIEKAAGIVKKVVEDLANYRVPVEKLIIHEQITRELKRYKATGPHVAIAKRLQARGIKVKPGTIISYVVLKGSKKISDRVILFDEYDSSRHKYDPDYYIHNQVLPAVLRILEAFGYKEKDLEYQRMKQTGLGAWLKMGKK

SEQ ID NO: 1090 - protein, 773 aa, unidentified
  REGION 1..773: note = Description of Unknown: Synthetic polypeptide
MILDTDYITENGKPVIRIFKKEKGEFKIEYDRNFEPYIYALLEDDESIEDIKKITGERHGKKVRIIRVEKVKKKFLGEPIEVWKLVFEHPQDYPAIRDAIRSHPAVREIFEYDIPFAKRYLIDKGLVPMEGGEELKLLAFNIATFYHEGDEFAEGEILMISYADESGAKVITWKKIDLPYVEVVSTEREAIKRFLQVLREKDPDVLLTYNGDNFDFAYIKKRCEKLGLKFTIGRDGSEPKIQRMGDRFAVEVKGRIHLDLAPVVRHTIRLPTYTLEAVYEAVFGKKKEKVYAEEIAEAWKSEEGLARVAQYSMEDARATYELGREFFPLEVELAKLIGQSVWDVSRSSTGNLVEWYLLRVAYERNELAPNKPGGEEYQRRMRSSYIGGYVKEPEKGLWESIAYLDFRSSAGSIIVTHNVSPDTLEKECKNYDVAPIVGYRFCKDFKGFIPSILEDLIETRQKVKRKMKATIDPIEKKMLDYRQRALKILANSYYGYQGYPKARWYSKECAESVTAWGRHYIETTIKEAEKFGFKVLYADTDGFFATIPNEKPETIKSKAKKFLKHINEKLPGMLELEYEGFYLRGFFVTKKKYALIDEDGHITTRGLEVVRRDWSEIAKETQAKVLEVILREGSIEKAAGIVKKVVEDLANYRVPVEKLIIHEQITRELKRYKATGPHVAIAKRLQARGIKVKPGTIISYVVLKGSKKISDRVILFDEYDSSRHKYDPDYYIHNQVLPAVLRILEAFGYKEKDLEYQRDKQTGLGAWLKMGKK

SEQ ID NO: 1091 - protein, 773 aa, unidentified
  REGION 1..773: note = Description of Unknown: Synthetic polypeptide
MILDTDYITENGKPVIRIFKKEKGEFKIEYDRNFEPYIYALLEDDESIEDIKKITGERHGKKVRIIRVEKVKKKFLGEPIEVWKLVFEHPQDYPAIRDAIRSHPAVREIFEYDIPFAKRYLIDKGLVPMEGGEELKLLAFAIATFYHEGDEFAEGEILMISYADESGAKVITWKKIDLPYVEVVSTEREAIKRFLQVLREKDPDVLLTYNGDNFDFAYIKKRCEKLGLKFTIGRDGSEPKIQRMGDRFAVEVKGRIHLDLAPVVRHTIRLPTYTLEAVYEAVFGKKKEKVYAEEIAEAWKSEEGLARVAQYSMEDARATYELGREFFPLEVELAKLIGQSVWDVSRSSTGNLVEWYLLRVAYERNELAPNKPGGEEYQRRMRSSYIGGYVKEPEKGLWESIAYLDFRSSAGSIIVTHNVSPDTLEKECKNYDVAPIVGYRFCKDFKGFIPSILEDLIETRQKVKRKMKATIDPIEKKMLDYRQRALKILANSYYGYQGYPKARWYSKECAESVTAWGRHYIETTIKEAEKFGFKVLYADTDGFFATIPNEKPETIKSKAKKFLKHINEKLPGMLELEYEGFYLRGFFVTKKKYALIDEDGHITTRGLEVVRRDWSEIAKETQAKVLEVILREGSIEKAAGIVKKVVEDLANYRVPVEKLIIHEQITRELKRYKATGPHVAIAKRLQARGIKVKPGTIISYVVLKGSKKISDRVILFDEYDSSRHKYDPDYYIHNQVLPAVLRILEAFGYKEKDLEYQRMKQTGLGAWLKMGKK

SEQ ID NO: 1092 - protein, 773 aa, unidentified; identical to SEQ ID NO: 777
  REGION 1..773: note = Description of Unknown: Synthetic polypeptide

SEQ ID NO: 1093 - protein, 773 aa, unidentified
  REGION 1..773: note = Description of Unknown: Synthetic polypeptide
MILDTDYITENGKPVIRIFKKEKGEFKIEYDRNFEPYIYALLEDDESIEDIKKITGERHGKKVRIIRVEKVKKKFLGEPIEVWKLVFEHPQDYPAIRDAIRSHPAVREIFEYDIPFAKRYLIDKGLVPMEGGEELKLLAFAIATFYHEGDEFAEGEILMISYADESGAKVITWKKIDLPYVEVVSTEREAIKRFLQVLREKDPDVLLTYNGDNFDFAYIKKRCEKLGLKFTIGRDGSEPKIQRMGDRFAVEVKGRIHLDLAPVVRHTIRLPTYTLEAVYEAVFGKKKEKVYAEEIAEAWKSEEGLKRVAQYSMEDARATYELGREFFPMEVELAKLIGQSVWDVSRSSTGNLVEWYLLRVAYERNQLAPNKPGGEEYQRRMRSSYIGGYVKEPEKGLWESIAYLDFRSSAGSIIVTHNVSPDTLEKECKNYDVAPIVGYRFCKDFKGFIPSILEDLIETRQKVKRKMKATIDPIEKKMLDYRQRALKILANSYYGYQGYPKARWYSKECAESVTAWGRHYIETTIKEAEKFGFKVLYADTDGFFATIPNEKPETIKSKAKKFLKHINEKLPGMLELEYEGFYLRGFFVTKKKYALIDEDGHITTRGLEVVRRDWSEIAKETQAKVLEVILREGSIEKAAGIVKKVVEDLANYRVPVEKLIIHEQITRELKRYKATGPHVAIAKRLQARGIKVKPGTIISYVVLKGSKKISDRVILFDEYDSSRHKYDPDYYIHNQVLPAVLRILEAFGYKEKDLEYQRMKQTGLGAWLKMGKK

SEQ ID NO: 1094 - protein, 774 aa, unidentified
  REGION 1..774: note = Description of Unknown: Synthetic polypeptide
MILDTDYITENGKPVIRIFKKEKGEFKIEYDRNFEPYIYALLEDDESIEDIKKITGERHGKKVRIIRVEKVKKKFLGEPIEVWKLVFEHPQDYPAIRDAIRSHPAVREIFEYDIPFAKRYLIDKGLVPMEGGEELKLLAFAIATFYHEGDEFAEGEILMISYADESGAKVITWKKIDLPYVEVVSTEREAIKRFLQVLREKDPDVLLTYNGDNFDFAYIKKRCEKLGLKFTIGRDGSEPKIQRMGDRFAVEVKGRIHLDLAPVVRHTIRLPTYTLEAVYEAVFGKKKEKVYAEEIAEAWKSEEGLKRVAQYSMEDARATYELGREFFPMEVELAKLIGQSVWDVSRSSTGNLVEWYLLRVAYERNELAPNKPGGEEYQRRMRSSYIGGYVKEPEKGLWESIAYLDFRSSAGPSIIVTHNVSPDTLEKECKNYDVAPIVGYRFCKDFKGFIPSILEDLIETRQKVKRKMKATIDPIEKKMLDYRQRALKILANSYYGYQGYPKARWYSKECAESVTAWGRHYIETTIKEAEKFGFKVLYADTDGFFATIPNEKPETIKSKAKKFLKHINEKLPGMLELEYEGFYLRGFFVTKKKYALIDEDGHITTRGLEVVRRDWSEIAKETQAKVLEVILREGSIEKAAGIVKKVVEDLANYRVPVEKLIIHEQITRELKRYKATGPHVAIAKRLQARGIKVKPGTIISYVVLKGSKKISDRVILFDEYDSSRHKYDPDYYIHNQVLPAVLRILEAFGYKEKDLEYQRMKQTGLGAWLKMGKK

SEQ ID NO: 1095 - protein, 773 aa, unidentified
  REGION 1..773: note = Description of Unknown: Synthetic polypeptide
MILDTDYITENGKPVIRIFKKEKGEFKIEYDRNFEPYIYALLEDDESIEDIKKITGERHGKKVRIIRVEKVKKKFLGEPIEVWKLVFEHPQDYPAIRDAIRSHPAVREIFEYDIPFAKRYLIDKGLVPMEGGEELKLLAFNIATFYHEGDEFAEGEILMISYADESGAKVITWKKIDLPYVEVVSTEREAIKRFLQVLREKDPDVLLTYNGDNFDFAYIKKRCEKLGLKFTIGRDGSEPKIQRMGDRFAVEVKGRIHLDLAPVVRHTIRLPTYTLEAVYEAVFGKKKEKVYAEEIAEAWKSEEGLKRVAQYSMEDARATYELGREFFPLEVELAKLIGQSVWDVSRSSTGNLVEWYLLRVAYERNELAPNKPGGEEYQRRMRSSYIGGYVKEPEKGLWESIAYLDFRSSSSSIIVTHNVSPDTLEKECKNYDVAPIVGYRFCKDFKGFIPSILEDLIETRQKVKRKMKATIDPIEKKMLDYRQRALKILANSYYGYQGYPKARWYSKECAESVTAWGRHYIETTIKEAEKFGFKVLYADTDGFFATIPNEKPETIKSKAKKFLKHINEKLPGMLELEYEGFYLRGFFVTKKKYALIDEDGHITTRGLEVVRRDWSEIAKETQAKVLEVILREGSIEKAAGIVKKVVEDLANYRVPVEKLIIHEQITRELKRYKATGPHVAIAKRLQARGIKVKPGTIISYVVLKGSKKISDRVILFDEYDSSRHKYDPDYYIHNQVLPAVLRILEAFGYKEKDLEYQRMKQTGLGAWLKMGKK

SEQ ID NO: 1096 - protein, 773 aa, unidentified
  REGION 1..773: note = Description of Unknown: Synthetic polypeptide
MILDTDYITENGKPVIRIFKKEKGEFKIEYDRNFEPYIYALLEDDESIEDIKKITGERHGKKVRIIRVEKVKKKFLGEPIEVWKLVFEHPQDIPAIRDAIRSHPAVREIFEYDIPFAKRYLIDKGLVPMEGGEELKLLAFNIATFYHEGDEFAEGEILMISYADESGAKVITWKKIDLPYVEVVSTEREAIKRFLQVLREKDPDVLLTYNGDNFDFAYIKKRCEKLGLKFTIGRDGSEPKIQRMGDRFAVEVKGRIHLDLAPVVRHTIRLPTYTLEAVYEAVFGKKKEKVYAEEIAEAWKSEEGLKRVAQYSMEDARATYELGREFFPLEVELAKLIGQSVWDVSRSSTGNLVEWYLLRVAYERNELAPNKPGGEEYQRRMRSSYIGGYVKEPEKGLWESIAYLDFRSSAGSIIVTHNVSPDTLEKECKNYDVAPIVGYRFCKDFKGFIPSILEDLIETRQKVKRKMKATIDPIEKKMLDYRQRALKILANSYYGYQGYPKARWYSKECAESVTAWGRHYIETTIKEAEKFGFKVLYADTDGFFATIPNEKPETIKSKAKKFLKHINEKLPGMLELEYEGFYLRGFFVTKKKYALIDEDGHITTRGLEVVRRDWSEIAKETQAKVLEVILREGSIEKAAGIVKKVVEDLANYRVPVEKLIIHEQITRELKRYKATGPHVAIAKRLQARGIKVKPGTIISYVVLKGSKKISDRVILFDEYDSSRHKYDPDYYIHNQVLPAVLRILEAFGYKEKDLEYQRDKQTGLGAWLKMGKK

SEQ ID NO: 1097 - protein, 773 aa, unidentified
  REGION 1..773: note = Description of Unknown: Synthetic polypeptide
MILDTDYITENGKPVIRIFKKEKGEFKIEYDRNFEPYIYALLEDDESIEDIKKITGERHGKKVRIIRVEKVKKKFLGEPIEVWKLVFEHPQDFPAIRDAIRSHPAVREIFEYDIPFAKRYLIDKGLVPMEGGEELKLLAFAIATFYHEGDEFAEGEILMISYADESGAKVITWKKIDLPYVEVVSTEREAIKRFLQVLREKDPDVLLTYNGDNFDFAYIKKRCEKLGLKFTIGRDGSEPKIQRMGDRFAVEVKGRIHLDLAPVVRHTIRLPTYTLEAVYEAVFGKKKEKVYAEEIAEAWKSEEGLKRVAQYSMEDARATYELGREFFPLEVELAKLIGQSVWDVSRSSTGNLVEWYLLRVAYERNELAPNKPGGEEYQRRMRSSYIGGYVKEPEKGLWESIAYLDFRSSAGSIIVTHNVSPDTLEKECKNYDVAPIVGYRFCKDFKGFIPSILEDLIETRQKVKRKMKATIDPIEKKMLDYRQRALKILANSYYGYQGYPKARWYSKECAESVTAWGRHYIETTIKEAEKFGFKVLYADTDGFFATIPNEKPETIKSKAKKFLKHINEKLPGMLELEYEGFYLRGFFVTKKKYALIDEDGHITTRGLEVVRRDWSEIAKETQAKVLEVILREGSIEKAAGIVKKVVEDLANYRVPVEKLIIHEQITRELKRYKATGPHVAIAKRLQARGIKVKPGTIISYVVLKGSKKISDRVILFDEYDSSRHKYDPDYYIHNQVLPAVLRILEAFGYKEKDLEYQRMKQTGLGAWLKMGKK

SEQ ID NO: 1098 - protein, 773 aa, unidentified
  REGION 1..773: note = Description of Unknown: Synthetic polypeptide
MILDTDYITENGKPVIRIFKKEKGEFKIEYDRNFEPYIYALLEDDESIEDIKKITGERHGKKVRIIRVEKVKKKFLGEPIEVWKLVFEHPQDYPAIRDAIRSHPAVREIFEYDIPFAKRYLIDKGLVPMEGGEELKLLAFAIATFYHEGDEFAEGEILMISYADESGAKVITWKKIDLPYVEVVSTEREAIKRFLQVLREKDPDVLLTYNGDNFDFAYIKKRCEKLGLKFTIGRDGSEPKIQRMGDRFAVEVKGRIHLDLAPVVRHTIRLPTYTLEAVYEAVFGKKKEKVYAEEIAEAWKSEEGLKRVAQYSMEDARATYELGREFFPMEVELAKLIGQSVWDVSRSSTGNLVEWYLLRVAYERNELAPNKPGGEEYQRRMRSSYIGGYVKEPEKGLWESIAYLDFRSLYPSIIVTHNVSPDTLEKECKNYDVAPIVGYRFCKDFKGFIPSILEDLIETRQKVKRKMKATIDPIEKKMLDYRQRALKILANSYYGYQGYPKARWYSKECAESVTAWGRHYIETTIKEAEKFGFKVLYADTDGFFATIPNEKPETIKSKAKKFLKHINEKLPGMLELEYEGFYLRGFFVTKKKYALIDEDGHITTRGLEVVRRDWSEIAKETQAKVLEVILREGSIEKAAGIVKKVVEDLANYRVPVEKLIIHEQITRELKRYKATGPHVAIAKRLQARGIKVKPGTIISYVVLKGSKKISDRVILFDEYDSSRHKYDPDYYIHNQVLPAVLRILEAFGYKEKDLEYQRMKQTGLGAWLKMGKK

SEQ ID NO: 1099 - protein, 773 aa, unidentified
  REGION 1..773: note = Description of Unknown: Synthetic polypeptide
MILDTDYITENGKPVIRIFKKEKGEFKIEYDRNFEPYIYALLEDDESIEDVKKITGERHGKKVRIIRVEKVKKNFLGEPIEVWKLVFEHPQDYPAIRDAIRSHPAVREIFEYDIPFAKRYLIDKGLVPMEGGEELKLLAFAIATFYHEGDEFAEGEILMISYADESGAKVITWKKIDLPYVEVVSTEREAIKRFLQVLREKDPDVLLTYNGDNFDFAYIKKRCEKLGLKFTIGRDGSEPKIQRMGDRFAVEVKGRIHLDLAPVVRHTIRLPTYTLEAVYEAVFGKKKEKVYAEEIAEAWKSEEGLKRVAQYSMEDARATYELGREFFPMEVELAKLIGQSVWDVSRSSTGNLVEWYLLRVAYERNELAPNKPGGEEYQRRMRSSYIGGYVKEPEKGLWESIAYLDFRSSAGSIIVTHNVSPDTLEKECKNYDVAPIVGYRFCKDFKGFIPSILEDLIETRQKVKRKMKATIDPIEKKMLDYRQRALKILANSYYGYQGYPKARWYSKECAESVTAWGRHYIETTIKEAEKFGFKVLYADTDGFFATIPNEKPETIKSKAKKFLKHINEKLPGMLELEYEGFYLRGFFVTKKKYALIDEDGHITTRGLEVVRRDWSEIAKETQAKVLEVILREGSIEKAAGIVKKVVEDLANYRVPVEKLIIHEQITRELKRYKATGPHVAIAKRLQARGIKVKPGTIISYVVLKGSKKISDRVILFDEYDSSRHKYDPDYYIHNQVLPAVLRILEAFGYKEKDLEYQRMKQTGLGAWLKMGKK

SEQ ID NO: 1100 - protein, 773 aa, unidentified
  REGION 1..773: note = Description of Unknown: Synthetic polypeptide
MILDTDYITENGKPVIRIFKKEKGEFKIEYDRNFEPYIYALLEDDESIEDIKKITGERHGKKVRIIRVEKVKKKFLGEPIEVWKLVFEHPQDFPAIRDAIRSHPAVREIFEYDIPFAKRYLIDKGLVPMEGGEELKLLAFNIATFYHEGDEFAEGEILMISYADESGAKVITWKKIDLPYVEVVSTEREAIKRFLQVLREKDPDVLLTYNGDNFDFAYIKKRCEKLGLKFTIGRDGSEPKIQRMGDRFAVEVKGRIHLDLAPVVRHTIRLPTYTLEAVYEAVFGKKKEKVYAEEIAEAWKSEEGLKRVAQYSMEDARATYELGREFFPLEVELAKLIGQSVWDVSRSSTGNLVEWYLLRVAYERNELAPNKPGGEEYQRRMRSSYIGGYVKEPEKGLWESIAYLDFRSSAGSIIVTHNVSPDTLEKECKNYDVAPIVGYRFCKDFKGFIPSILEDLIETRQKVKRKMKATIDPIEKKMLDYRQRALKILANSYYGYQGYPKARWYSKECAESVTAWGRHYIETTIKEAEKFGFKVLYADTDGFFATIPNEKPETIKSKAKKFLKHINEKLPGMLELEYEGFYLRGFFVTKKKYALIDEDGHITTRGLEVVRRDWSEIAKETQAKVLEVILREGSIEKAAGIVKKVVEDLANYRVPVEKLIIHEQITRELKRYKATGPHVAIAKRLQARGIKVKPGTIISYVVLKGSKKISDRVILFDEYDSSRHKYDPDYYIHNQVLPAVLRILEAFGYKEKDLEYQRDKQTGLGAWLKMGKK

SEQ ID NO: 1101 - protein, 773 aa, unidentified
  REGION 1..773: note = Description of Unknown: Synthetic polypeptide
MILDTDYITENGKPVIRIFKKEKGEFKIEYDRNFEPYIYALLEDDESIEDIKKITGERHGKKVRIIRVEKVKKKFLGEPIEVWKLVFEHPQDYPAIRDAIRSHPAVREIFEYDIPFAKRYLIDKGLVPMEGGEELKLLAFAIATFYHEGDEFAEGEILMISYADESGAKVITWKKIDLPYVEVVSTEREAIKRFLQVLREKDPDVLLTYNGDNFDFAYIKKRCEKLGLKFTIGRDGSEPKIQRMGDRFAVEVKGRIHLDLAPVVRHTIRLPTYTLEAVYEAVFGKKKEKVYAEEIAEAWKSEEGLARVAQYSVEDARATYELGREFFPMEVELAKLIGQSVWDVSRSSTGNLVEWYLLRVAYERNELAPNKPGGEEYQRRMRSSYIGGYVKEPEKGLWESIAYLDFRSSAGSIIVTHNVSPDTLEKECKNYDVAPIVGYRFCKDFKGFIPSILEDLIETRQKVKRKMKATIDPIEKKMLDYRQRALKILANSYYGYQGYPKARWYSKECAESVTAWGRHYIETTIKEAEKFGFKVLYADTDGFFATIPNEKPETIKSKAKKFLKHINEKLPGMLELEYEGFYLRGFFVTKKKYALIDEDGHITTRGLEVVRRDWSEIAKETQAKVLEVILREGSIEKAAGIVKKVVEDLANYRVPVEKLIIHEQITRELKRYKATGPHVAIAKRLQARGIKVKPGTIISYVVLKGSKKISDRVILFDEYDSSRHKYDPDYYIHNQVLPAVLRILEAFGYKEKDLEYQRDKQTGLGAWLKMGKK

SEQ ID NO: 1102 - protein, 766 aa, unidentified
  REGION 1..766: note = Description of Unknown: Synthetic polypeptide
MILDTDYITENGKPVIRIFKKEKGEFKIEYDRNFEPYIYALLEDDESIEDIKKITGERHGKKVRIIRVEKVKKKFLGEPIEVWKLVFEHPQDVPAIRDAIRSHPAVREIFEYDIPFAKRYLIDKGLVPMEGGEELKLLAFNIATFYHEGDEFAEGEILMISYADESGAKVITWKKIDLPYVEVVSTEREAIKRFLQVLREKDPDVLLTYNGDNFDFAYIKKRCEKLGLKFTIGRDGSEPKIQRMGDRFAVEVKGRIHLDLAPVVRHTIRLPTYTLEAVYEAVFGKKKEKVYAEEIAEAWKSEEGLKRVAQYSAEDARATYELGREFFPLEVELAKLIGQSVWDVSRSSTGNLVEWYLLRVAYERNELAPNQPGGEEYQRRMRSSYIGGYVKEPEKGLWESIAYLDFRSSAGSIIVTHNVSPDTLEKECKNYDVAPIVGYRFCKDFKGFIPSILEDLIETRQKVKRKMKATIDPIEKKMLDYRQRALKILANSYYGYQGYPKARWYSKECAESVTAWGRHYIETTIKEAEKFGFKVLYADTDGFFATIPNEKPETIKSKAKKFLKHINEKLPGMLELEYEGFYLRGFFVTKKKYALIDEDGHITTRGLEVVRRDWSEIAKETQAKVLEVILREGSIEKAAGIVKKVVEDLANYRVPVEKLIIHEQITRELKRYKATGPHVAIAKRLQARGIKVKPGTIISYVVLKGSKKISDRVILFDEYDSSRHKYDPDYYIHNQVLPAVLRILEAFGYKEKDLEYQRDKQTGLGA

SEQ ID NO: 1103 - protein, 773 aa, unidentified
  REGION 1..773: note = Description of Unknown: Synthetic polypeptide
MILDTDYITENGKPVIRIFKKEKGEFKIEYDRNFEPYIYALLEDDESIEDIKKITGERHGKKVRIIRVEKVKKKFLGEPIEVWKLVFEHPQDVPAIRDAIRSHPAVREIFEYDIPFAKRYLIDKGLVPMEGGEELKLLAFNIATFYHEGDEFAEGEILMISYADESGAKVITWKKIDLPYVEVVSTEREAIKRFLQVLREKDPDVLLTYNGDNFDFAYIKKRCEKLGLKFTIGRDGSEPKIQRMGDRFAVEVKGRIHLDLAPVVRHTIRLPTYTLEAVYEAVFGKKKEKVYAEEIAEAWKSEEGLKRVAQYSMEDARATYELGREFFPMEVELAKLIGQSVWDVSRSSTGNLVEWYLLRVAYERNELAPNKPGGEEYQRRMRSSYIGGYVKEPEKGLWESIAYLDFRSSAGSIIVTHNVSPDTLEKECKNYDVAPIVGYRFCKDFKGFIPSILEDLIETRQKVKRKMKATIDPIEKKMLDYRQRALKILANSYYGYQGYPKARWYSKECAESVTAWGRHYIETTIKEAEKFGFKVLYADTDGFFATIPNEKPETIKSKAKKFLKHINEKLPGMLELEYEGFYLRGFFVTKKKYALIDEDGHITTRGLEVVRRDWSEIAKETQAKVLEVILREGSIEKAAGIVKKVVEDLANYRVPVEKLIIHELITRELKRYKATGPHVAIAKRLQARGIKVKPGTIISYVVLKGSKKISDRVILFDEYDSSRHKYDPDYYIHNQVLPAVLRILEAFGYKEKDLEYQRMKQTGLGAWLKMGKK

SEQ ID NO: 1104 - protein, 773 aa, unidentified
  REGION 1..773: note = Description of Unknown: Synthetic polypeptide
MILDTDYITENGKPVIRIFKKEKGEFKIEYDRNFEPYIYALLEDDESIEDIKKITGERHGKKVRIIRVEKVKKNFLGEPIEVWKLVFEHPQDYPAIRDAIRSHPAVREIFEYDIPFAKRYLIDKGLVPMEGGEELKLLAFAIATFYHEGDEFAEGEILMISYADESGAKVITWKKIDLPYVEVVSTEREAIKRFLQVLREKDPDVLLTYNGDNFDFAYIKKRCEKLGLKFTIGRDGSEPKIQRMGDRFAVEVKGRIHLDLAPVVRHTIRLPTYTLEAVYEAVFGKKKEKVYAEEIAEAWKSEEGLKRVAQYSMEDARATYELGREFFPMEVELAKLIGQSVWDVSRSSTGNLVEWYLLRVAYERNELAPNKPGGEEYQRRMRSSYIGGYVKEPEKGLWESIAYLDFRSSAGSIIVTHNVSPDTLEKECKNYDVAPIVGYRFCKDFKGFIPSILEDLIETRQKVKRKMKATIDPIEKKMLDYRQRALKILANSYYGYQGYPKARWYSKECAESVTAWGRHYIETTIKEAEKFGFKVLYADTDGFFATIPNEKPETIKSKAKKFLKHINEKLPGMLELEYEGFYLRGFFVTKKKYALIDEDGHITTRGLEVVRRDWSEIAKETQAKVLEVILREGSIEKAAGIVKKVVEDLANYRVPVEKLIIHEQITRELKRYKATGPHVAIAKRLQARGIKIKPGTIISYVVLKGSKKISDRVILFDEYDSSRHKYDPDYYIHNQVLPAVLRILEAFGYKEKDLEYQRMKQTGLGAWLKMGKK

SEQ ID NO: 1105 - protein, 773 aa, unidentified
  REGION 1..773: note = Description of Unknown: Synthetic polypeptide
MILDTDYITENGKPVIRIFKKEKGEFKIEYDRNFEPYIYALLEDDESIEDIKKITGERHGKKVRIIRVEKVKKKFLGEPIEVWKLVFEHPQDLPAIRDAIRSHPAVREIFEYDIPFAKRYLIDKGLVPMEGGEELKLLAFNIATFYHEGDEFAEGEILMISYADESGAKVITWKKIDLPYVEVVSTEREAIKRFLQVLREKDPDVLLTYNGDNFDFAYIKKRCEKLGLKFTIGRDGSEPKIQRMGDRFAVEVKGRIHLDLAPVVRHTIRLPTYTLEAVYEAVFGKKKEKVYAEEIAEAWKSEEGLARVAQYSMEDARATYELGREFFPLEVELAKLIGQSVWDVSRSSTGNLVEWYLLRVAYERNELAPNKPGGEEYQRRMRSSYIGGYVKEPEKGLWESIAYLDFRSSAGSIIVTHNVSPDTLEKECKNYDVAPIVGYRFCKDFKGFIPSILEDLIETRQKVKRKMKATIDPIEKKMLDYRQRALKILANSYYGYQGYPKARWYSKECAESVTAWGRHYIETTIKEAEKFGFKVLYADTDGFFATIPNEKPETIKSKAKKFLKHINEKLPGMLELEYEGFYLRGFFVTKKKYALIDEDGHITTRGLEVVRRDWSEIAKETQAKVLEVILREGSIEKAAGIVKKVVEDLANYRVPVEKLIIHEQITRELKRYKATGPHVAIAKRLQARGIKVKPGTIISYVVLKGSKKISDRVILFDEYDSSRHKYDPDYYIHNQVLPAVLRILEAFGYKEKDLEYQRDKQTGLGAWLKMGKK

SEQ ID NO: 1106 - protein, 773 aa, unidentified
  REGION 1..773: note = Description of Unknown: Synthetic polypeptide
MILDTDYITENGKPVIRIFKKEKGEFKIEYDRNFEPYIYALLEDDESIEDIKKITGERHGKKVRIIRVEKVKKNFLGEPIEVWKLVFEHPQDYPAIRDAIRSHPAVREIFEYDIPFAKRYLIDKGLVPMEGGEELKLLAFAIATFYHEGDEFAEGEILMISYADESGAKVITWKKIDLPYVEVVSTEREAIKRFLQVLREKDPDVLLTYNGDNFDFAYIKKRCEKLGLKFTIGRDGSEPKIQRMGDRFAVEVKGRIHLDLAPVVRHTIRLPTYTLEAVYEAVFGKKKEKVYAEEIAEAWKSEEGLKRVAQYSMEDARATYELGREFFPMEVELAKLIGQSVWDVSRSSTGNLVEWYLLRVAYERNELAPNKPGGEEYQRRMRSSYIGGYVKEPEKGLWESIAYLDFRSSAGSIIVTHNVSPDTLEKECKNYDVAPIVGYRFCKDFKGFIPSILEDLIETRQKVKRKMKATIDPIEKKMLDYRQRALKILANSYYGYQGYPKARWYSKECAESVTAWGRHYIETTIKEAEKFGFKVLYADTDGFFATIPNEKPETIKSKAKKFLKHINEKLPGMLELEYEGFYLRGFFVTKKKYALIDEDGHITTRGLEVVRRDWSEIAKETQAKVLEVILREGSIEKAAGIVKKVVEDLANYRVPVEKLIIHEQITRELKRYKATGPHVAIAKRLQARGIKVKPGTIISYVVLKGSKKISDRAILFDEYDSSRHKYDPDYYIHNQVLPAVLRILEAFGYKEKDLEYQRMKQTGLGAWLKMGKK

SEQ ID NO: 1107 - protein, 766 aa, unidentified
  REGION 1..766: note = Description of Unknown: Synthetic polypeptide
MILDTDYITENGKPVIRIFKKEKGEFKIEYDRNFEPYIYALLEDDESIEDIKKITGERHGKKVRIIRVEKVKKKFLGEPIEVWKLVFEHPQDLPAIRDAIRSHPAVREIFEYDIPFAKRYLIDKGLVPMEGGEELKLLAFNIATFYHEGDEFAEGEILMISYADESGAKVITWKKIDLPYVEVVSTEREAIKRFLQVLREKDPDVLLTYNGDNFDFAYIKKRCEKLGLKFTIGRDGSEPKIQRMGDRFAVEVKGRIHLDLAPVVRHTIRLPTYTLEAVYEAVFGKKKEKVYAEEIAEAWKSEEGLKRVAQYSMEDARATYELGREFFPLEVELAKLIGQSVWDVSRSSTGNLVEWYLLRVAYERNELAPNQPGGEEYQRRMRSSYIGGYVKEPEKGLWESIAYLDFRSSAGSIIVTHNVSPDTLEKECKNYDVAPIVGYRFCKDFKGFIPSILEDLIETRQKVKRKMKATIDPIEKKMLDYRQRALKILANSYYGYQGYPKARWYSKECAESVTAWGRHYIETTIKEAEKFGFKVLYADTDGFFATIPNEKPETIKSKAKKFLKHINEKLPGMLELEYEGFYLRGFFVTKKKYALIDEDGHITTRGLEVVRRDWSEIAKETQAKVLEVILREGSIEKAAGIVKKVVEDLANYRVPVEKLIIHEQITRELKRYKATGPHVAIAKRLQARGIKVKPGTIISYVVLKGSKKISDRVILFDEYDSSRHKYDPDYYIHNQVLPAVLRILEAFGYKEKDLEYQRDKQTGLGA

SEQ ID NO: 1108 - protein, 766 aa, unidentified
  REGION 1..766: note = Description of Unknown: Synthetic polypeptide
MILDTDYITENGKPVIRIFKKEKGEFKIEYDRNFEPYIYALLEDDESIEDIKKITGERHGKKVRIIRVEKVKKKFLGEPIEVWKLVFEHPQDVPAIRDAIRSHPAVREIFEYDIPFAKRYLIDKGLVPMEGGEELKLLAFNIATFYHEGDEFAEGEILMISYADESGAKVITWKKIDLPYVEVVSTEREAIKRFLQVLREKDPDVLLTYNGDNFDFAYIKKRCEKLGLKFTIGRDGSEPKIQRMGDRFAVEVKGRIHLDLAPVVRHTIRLPTYTLEAVYEAVFGKKKEKVYAEEIAEAWKSEEGLKRVAQYSAEDARATYELGREFFPLEVELAKLIGQSVWDVSRSSTGNLVEWYLLRVAYERNELAPNKPGGEEYQRRMRSSYIGGYVKEPEKGLWESIAYLDFRSSAGSIIVTHNVSPDTLEKECKNYDVAPIVGYRFCKDFKGFIPSILEDLIETRQKVKRKMKATIDPIEKKMLDYRQRALKILANSYYGYQGYPKARWYSKECAESVTAWGRHYIETTIKEAEKFGFKVLYADTDGFFATIPNEKPETIKSKAKKFLKHINEKLPGMLELEYEGFYLRGFFVTKKKYALIDEDGHITTRGLEVVRRDWSEIAKETQAKVLEVILREGSIEKAAGIVKKVVEDLANYRVPVEKLIIHEQITRKLKRYKATGPHVAIAKRLQARGIKVKPGTIISYVVLKGSKKISDRVILFDEYDSSRHKYDPDYYIHNQVLPAVLRILEAFGYKEKDLEYQRDKQTGLGA

SEQ ID NO: 1109 - protein, 773 aa, unidentified
  REGION 1..773: note = Description of Unknown: Synthetic polypeptide
MILDTDYITENGKPVIRIFKKEKGEFKIEYDRNFEPYIYALLEDDESIEDIKKITGERHGKKVRIIRVEKVKKNFLGEPIEVWKLVFEHPQDYPAIRDAIRSHPAVREIFEYDIPFAKRYLIDKGLVPMEGGEELKLLAFAIATFYHEGDEFAEGEILMISYADESGAKVITWKKVDLPYVEVVSTEREAIKRFLQVLREKDPDVLLTYNGDNFDFAYIKKRCEKLGLKFTIGRDGSEPKIQRMGDRFAVEVKGRIHLDLAPVVRHTIRLPTYTLEAVYEAVFGKKKEKVYAEEIAEAWKSEEGLKRVAQYSMEDARATYELGREFFPMEVELAKLIGQSVWDVSRSSTGNLVEWYLLRVAYERNELAPNKPGGEEYQRRMRSSYIGGYVKEPEKGLWESIAYLDFRSSAGSIIVTHNVSPDTLEKECKNYDVAPIVGYRFCKDFKGFIPSILEDLIETRQKVKRKMKATIDPIEKKMLDYRQRALKILANSYYGYQGYPKARWYSKECAESVTAWGRHYIETTIKEAEKFGFKVLYADTDGFFATIPNEKPETIKSKAKKFLKHINEKLPGMLELEYEGFYLRGFFVTKKKYALIDEDGHITTRGLEVVRRDWSEIAKETQAKVLEVILREGSIEKAAGIVKKVVEDLANYRVPVEKLIIHEQITRELKRYKATGPHVAIAKRLQARGIKVKPGTIISYVVLKGSKKISDRVILFDEYDSSRHKYDPDYYIHNQVLPAVLRILEAFGYKEKDLEYQRMKQTGLGAWLKMGKK

SEQ ID NO: 1110 - protein, 766 aa, unidentified
  REGION 1..766: note = Description of Unknown: Synthetic polypeptide
MILDTDYITENGKPVIRIFKKEKGEFKIEYDRNFEPYIYALLEDDESIEDIKKITGERHGKKVRIIRVEKVKKKFLGEPIEVWKLVFEHPQDVPAIRDAIRSHPAVREIFEYDIPFAKRYLIDKGLVPMEGGEELKLLAFNIATFYHEGDEFAEGEILMISYADESGAKVITWKKIDLPYVEVVSTEREAIKRFLQVLREKDPDVLLTYNGDNFDFAYIKKRCEKLGLKFTIGRDGSEPKIQRMGDRFAVEVKGRIHLDLAPVVRHTIRLPTYTLEAVYEAVFGKKKEKVYAEEIAEAWKSEEGLKRVAQYSMEDARATYELGREFFPLEVELAKLIGQSVWDVSRSSTGNLVEWYLLRVAYERNELAPNKPGGEEYQRRMRSSYIGGYVKEPEKGLWESIAYLDFRSSAGSIIVTHNVSPDTLEKECKNYDVAPIVGYRFCKDFKGFIPSILEDLIETRQKVKRKMKATIDPIEKKMLDYRQRALKILANSYYGYQGYPKARWYSKECAESVTAWGRHYIETTIKEAEKFGFKVLYADTDGFFATIPNEKPETIKSKAKKFLKHINEKLPGMLELEYEGFYLRGFFVTKKKYALIDEDGHITTRGLEVVRRDWSEIAKETQAKVLEVILREGSIEKAAGIVKKVVEDLANYRVPVEKLIIHEQITRRLKRYKATGPHVAIAKRLQARGIKVKPGTIISYVVLKGSKKISDRVILFDEYDSSRHKYDPDYYIHNQVLPAVLRILEAFGYKEKDLEYQRDKQTGLGA

SEQ ID NO: 1111 - protein, 773 aa, unidentified
  REGION 1..773: note = Description of Unknown: Synthetic polypeptide
MILDTDYITENGKPVIRIFKKEKGEFKIEYDRNFEPYIYALLEDDESIEDIKKITGERHGKKVRIIRVEKVKKKFLGEPIEVWKLVFEHPQDVPAIRDAIRSHPAVREIFEYDIPFAKRYLIDKGLVPMEGGEELKLLAFNIATFEHEGDEFAEGEILMISYADESGAKVITWKKIDLPYVEVVSTEREAIKRFLQVLREKDPDVLLTYNGDNFDFAYIKKRCEKLGLKFTIGRDGSEPKIQRMGDRFAVEVKGRIHLDLAPVVRHTIRLPTYTLEAVYEAVFGKKKEKVYAEEIAEAWKSEEGLKRVAQYSMEDARATYELGREFFPLEVELAKLIGQSVWDVSRSSTGNLVEWYLLRVAYERNELAPNKPGGEEYQRRMRSSYIGGYVKEPEKGLWESIAYLDFRSSAGSIIVTHNVSPDTLEKECKNYDVAPIVGYRFCKDFKGFIPSILEDLIETRQKVKRKMKATIDPIEKKMLDYRQRALKILANSYYGYQGYPKARWYSKECAESVTAWGRHYIETTIKEAEKFGFKVLYADTDGFFATIPNEKPETIKSKAKKFLKHINEKLPGMLELEYEGFYLRGFFVTKKKYALIDEDGHITTRGLEVVRRDWSEIAKETQAKVLEVILREGSIEKAAGIVKKVVEDLANYRVPVEKLIIHELITRELKRYKATGPHVAIAKRLQARGIKVKPGTIISYVVLKGSKKISDRVILFDEYDSSRHKYDPDYYIHNQVLPAVLRILEAFGYKEKDLEYQRMKQTGLGAWLKMGKK

SEQ ID NO: 1112 - protein, 773 aa, unidentified
  REGION 1..773: note = Description of Unknown: Synthetic polypeptide
MILDTDYITENGKPVIRIFKKEKGEFKIEYDRNFEPYIYALLEDDESIEDIKKITGERHGKKVRIIRVEKVKKKFLGEPIEVWKLVFEHPQDYPAIRDAIRSHPAVREIFEYDIPFAKRYLIDKGLVPMEGGEELKLLAFAIATFYHEGDEFAEGEILMISYADESGAKVITWKKIDLPYVEVVSTEREAIKRFLQVLREKDPDVLLTYNGDNFDFAYIKKRCEKLGLKFTIGRDGSEPKIQRMGDRFAVEVKGRIHLDLAPVVRHTIRLPTYTLEAVYEAVFGKKKEKVYAEEIAEAWKSEEGLKRVAQYSMEDARATYELGREFFPMEVELAKLIGQSVWDVSRSSTGNLVEWYLLRVAYERNELAPNKPGGEEYQRRMRSSYIGGYVKEPEKGLWESIAYLDFRSMYASIIVTHNVSPDTLEKECKNYDVAPIVGYRFCKDFKGFIPSILEDLIETRQKVKRKMKATIDPIEKKMLDYRQRALKILANSYYGYQGYPKARWYSKECAESVTAWGRHYIETTIKEAEKFGFKVLYADTDGFFATIPNEKPETIKSKAKKFLKHINEKLPGMLELEYEGFYLRGFFVTKKKYALIDEDGHITTRGLEVVRRDWSEIAKETQAKVLEVILREGSIEKAAGIVKKVVEDLANYRVPVEKLIIHEQITRELKRYKATGPHVAIAKRLQARGIKVKPGTIISYVVLKGSKKISDRVILFDEYDSSRHKYDPDYYIHNQVLPAVLRILEAFGYKEKDLEYQRMKQTGLGAWLKMGKK

SEQ ID NO: 1113 - protein, 766 aa, unidentified
  REGION 1..766: note = Description of Unknown: Synthetic polypeptide
MILDTDYITENGKPVIRIFKKEKGEFKIEYDRNFEPYIYALLEDDESIEDIKKITGERHGKKVRIIRVEKVKKKFLGEPIEVWKLVFEHPQDYPAIRDAIRSHPAVREIFEYDIPFAKRYLIDKGLVPMEGGEELKLLAFAIATFYHEGDEFAEGEILMISYADESGAKVITWKKIDLPYVEVVSTEREAIKRFLQVLREKDPDVLLTYNGDNFDFAYIKKRCEKLGLKFTIGRDGSEPKIQRMGDRFAVEVKGRIHLDLAPVVRHTIRLPTYTLEAVYEAVFGKKKEKVYAEEIAEAWKSEEGLKRVAQYSMEDARATYELGREFFPMEVELAKLIGQSVWDVSRSSTGNLVEWYLLRVAYERNELAPNKPGGEEYQRRMRSSYIGGYVKEPEKGLWESIAYLDFRSSAGSIIVTHNVSPDTLEKECKNYDVAPIVGYRFCKDFKGFIPSILEDLIETRQKVKRKMKATIDPIEKKMLDYRQRALKILANSYYGYQGYPKARWYSKECAESVTAWGRHYIETTIKEAEKFGFKVLYADTDGFFATIPNEKPETIKSKAKKFLKHINEKLPGMLELEYEGFYLRGFFVTKKKYALIDEDGHITTRGLEVVRRDWSEIAKETQAKVLEVILREGSIEKAAGIVKKVVEDLANYRVPVEKLIIHEQITRELKRYKATGPHVAIAKRLQARGIKVKPGTIISYVVLKGSKKISDRVILFDEYDSSRHKYDPDYYIHNQVLPAVLRILEAFGYKEKDLEYQRDKQTGLGA

SEQ ID NO: 1114 - protein, 773 aa, unidentified
  REGION 1..773: note = Description of Unknown: Synthetic polypeptide
MILDTDYITENGKPVIRIFKKEKGEFKIEYDRNFEPYIYALLEDDESIEDIKKITGERHGKKVRIIRVEKVKKNFLGEPIEVWKLVFEHPQDYPAIRDAIRSHPAVREIFEYDIPFAKRYLIDKGLVPMEGGEELKLLAFAIATFYHEGDEFAEGEILMISYADESGAKVITWKKIDLPYVEVVSTEREAIKRFLQVLREKDPDVLLTYNGDNFDFAYLKKRCEKLGLKFTIGRDGSEPKIQRMGDRFAVEVKGRIHLDLAPVVRHTIRLPTYTLEAVYEAVFGKKKEKVYAEEIAEAWKSEEGLKRVAQYSMEDARATYELGREFFPMEVELAKLIGQSVWDVSRSSTGNLVEWYLLRVAYERNELAPNKPGGEEYQRRMRSSYIGGYVKEPEKGLWESIAYLDFRSSAGSIIVTHNVSPDTLEKECKNYDVAPIVGYRFCKDFKGFIPSILEDLIETRQKVKRKMKATIDPIEKKMLDYRQRALKILANSYYGYQGYPKARWYSKECAESVTAWGRHYIETTIKEAEKFGFKVLYADTDGFFATIPNEKPETIKSKAKKFLKHINEKLPGMLELEYEGFYLRGFFVTKKKYALIDEDGHITTRGLEVVRRDWSEIAKETQAKVLEVILREGSIEKAAGIVKKVVEDLANYRVPVEKLIIHEQITRELKRYKATGPHVAIAKRLQARGIKVKPGTIISYVVLKGSKKISDRVILFDEYDSSRHKYDPDYYIHNQVLPAVLRILEAFGYKEKDLEYQRMKQTGLGAWLKMGKK

SEQ ID NO: 1115 - protein, 773 aa, unidentified; identical to SEQ ID NO: 237
  REGION 1..773: note = Description of Unknown: Synthetic polypeptide

SEQ ID NO: 1116 - protein, 773 aa, unidentified
  REGION 1..773: note = Description of Unknown: Synthetic polypeptide
MILDTDYITENGKPVIRIFKKEKGEFKIEYDRNFEPYIYALLEDDESIEDIKKITGERHGKKVRIIRVEKVKKKFLGEPIEVWKLVFEHPQDYPAIRDAIRSHPAVREIFEYDIPFAKRYLIDKGLVPMEGGEELKLLAFNIATFYHEGDEFAEGEILMISYADESGAKVITWKKIDLPYVEVVSTEREAIKRFLQVLREKDPDVLLTYNGDNFDFAYIKKRCEKLGLKFTIGRDGSEPKIQRMGDRFAVEVKGRIHLDLAPVVRHTIRLPTYTLEAVYEAVFGKKKEKVYAEEIAEAWKSEEGLKRVAQYSMEDARATYELGREFFPMEVELAKLIGQSVWDVSRSSTGNLVEWYLLRVAYERNELAPNKPGGEEYQRRMRSSYIGGYVKEPEKGLWESIAYLDFRSSAGSIIVTHNVSPDTLEKECKNYDVAPEVGYRFCKDFKGFIPSILEDLIETRQKVKRKMKATIDPIEKKMLDYRQRALKILANSYYGYQGYPKARWYSKECAESVTAWGRHYIETTIKEAEKFGFKVLYADTDGFFATIPNEKPETIKSKAKKFLKHINEKLPGMLELEYEGFYLRGFFVTKKKYALIDEDGHITTRGLEVVRRDWSEIAKETQAKVLEVILREGSIEKAAGIVKKVVEDLANYRVPVEKLIIHEQITRELKRYKATGPHVAIAKRLQARGIKVKPGTIISYVVLKGSKKISDRVILFDEYDSSRHKYDPDYYIHNQVLPAVLRILEAFGYKEKDLEYQRMKQTGLGAWLKMGKK

SEQ ID NO: 1117 - protein, 773 aa, unidentified
  REGION 1..773: note = Description of Unknown: Synthetic polypeptide
MILDTDYITENGKPVIRIFKKEKGEFKIEYDRNFEPYIYALLEDDESIEDIKKITGERHGKKVRIIRVEKVKKKFLGEPIEVWKLVFEHPQDYPAIRDAIRSHPAVREIFEYDIPFAKRYLIDKGLVPMEGGEELKLLAFAIATFYHEGDEFAEGEILMISYADESGAKVITWKKIDLPYVEVVSTEREAIKRFLQVLREKDPDVLLTYNGDNFDFAYIKKRCEKLGLKFTIGRDGSEPKIQRMGDRFAVEVKGRIHLDLAPVVRHTIRLPTYTLEAVYEAVFGKKKEKVYAEEIAEAWKSEEGLKRVAQYSMEDARATYELGREFFPMEVELAKLIGQSVWDVSRSSTGNLVEWYLLRVAYERNDLAPNKPGGEEYQRRMRSSYIGGYVKEPEKGLWESIAYLDFRSSAGSIIVTHNVSPDTLEKECKNYDVAPIVGYRFCKDFKGFIPSILEDLIETRQKVKRKMKATIDPIEKKMLDYRQRALKILANSYYGYQGYPKARWYSKECAESVTAWGRHYIETTIKEAEKFGFKVLYADTDGFFATIPNEKPETIKSKAKKFLKHINEKLPGMLELEYEGFYLRGFFVTKKKYALIDEDGHITTRGLEVVRRDWSEIAKETQAKVLEVILREGSIEKAAGIVKKVVEDLANYRVPVEKLIIHEQITRELKRYKATGPHVAIAKRLQARGIKVKPGTIISYVVLKGSKKISDRVILFDEYDSSRHKYDPDYYIHNQVLPAVLRILEAFGYKEKDLEYQRMKQTGLGAWLKMGKK

SEQ ID NO: 1118 - protein, 773 aa, unidentified
  REGION 1..773: note = Description of Unknown: Synthetic polypeptide
MILDTDYITENGKPVIRIFKKEKGEFKIEYDRNFEPYIYALLEDDESIEDIKKITGERHGKKVRIIRVEKVKKKFLGEPIEVWKLVFEHPQDYPAIRDAIRSHPAVREIFEYDIPFAKRYLIDKGLVPMEGGEELKLLAFAIATFYHEGDEFAEGEILMISYADESGAKVITWKKIDLPYVEVVSTEREAIKRFLQVLREKDPDVLLTYNGDNFDFAYIKKRCEKLGLKFTIGRDGSEPKIQRMGDRFAVEVKGRIHLDLAPVVRHTIRLPTYTLEAVYEAVFGKKKEKVYAEEIAEAWKSEEGLKRVAQYSMEDARATYELGREFFPMEVELAKLIGQSVWDVSRSSTGNLVEWYLLRVAYERNALAPNKPGGEEYQRRMRSSYIGGYVKEPEKGLWESIAYLDFRSSAGSIIVTHNVSPDTLEKECKNYDVAPIVGYRFCKDFKGFIPSILEDLIETRQKVKRKMKATIDPIEKKMLDYRQRALKILANSYYGYQGYPKARWYSKECAESVTAWGRHYIETTIKEAEKFGFKVLYADTDGFFATIPNEKPETIKSKAKKFLKHINEKLPGMLELEYEGFYLRGFFVTKKKYALIDEDGHITTRGLEVVRRDWSEIAKETQAKVLEVILREGSIEKAAGIVKKVVEDLANYRVPVEKLIIHEQITRELKRYKATGPHVAIAKRLQARGIKVKPGTIISYVVLKGSKKISDRVILFDEYDSSRHKYDPDYYIHNQVLPAVLRILEAFGYKEKDLEYQRMKQTGLGAWLKMGKK

SEQ ID NO: 1119 - protein, 773 aa, unidentified
  REGION 1..773: note = Description of Unknown: Synthetic polypeptide
MILDTDYITENGKPVIRIFKKEKGEFKIEYDRNFEPYIYALLEDDESIEDIKKITGERHGKKVRIIRVEKVKKKFLGEPIEVWKLVFEHPQDYPAIRDAIRSHPAVREIFEYDIPFAKRYLIDKGLVPMEGGEELKLLAFNIATFYHEGDEFAEGEILMISYADESGAKVITWKKIDLPYVEVVSTEREAIKRFLQVLREKDPDVLLTYNGDNFDFAYIKKRCEKLGLKFTIGRDGSEPKIQRMGDRFAVEVKGRIHLDLAPVVRHTIRLPTYTLEAVYEAVFGKKKEKVYAEEIAEAWKSEEGLKRVAQYSMEDARATYELGREFFPLEVELAKLIGQSVWDVSRSSTGNLVEWYLLRVAYERNELAPNKPGGEEYQRRMRSSYIGGYVKEPEKGLWESIAYLDFRSSAASIIVTHNVSPDTLEKECKNYDVAPIVGYRFCKDFKGFIPSILEDLIETRQKVKRKMKATIDPIEKKMLDYRQRALKILANSYYGYQGYPKARWYSKECAESVTAWGRHYIETTIKEAEKFGFKVLYADTDGFFATIPNEKPETIKSKAKKFLKHINEKLPGMLELEYEGFYLRGFFVTKKKYALIDEDGHITTRGLEVVRRDWSEIAKETQAKVLEVILREGSIEKAAGIVKKVVEDLANYRVPVEKLIIHEQITRELKRYKATGPHVAIAKRLQARGIKVKPGTIISYVVLKGSKKISDRVILFDEYDSSRHKYDPDYYIHNQVLPAVLRILEAFGYKEKDLEYQRMKQTGLGAWLKMGKK

SEQ ID NO: 1120 - protein, 766 aa, unidentified
  REGION 1..766: note = Description of Unknown: Synthetic polypeptide
MILDTDYITENGKPVIRIFKKEKGEFKIEYDRNFEPYIYALLEDDESIEDIKKITGERHGKKVRIIRVEKVKKKFLGEPIEVWKLVFEHPQDVPAIRDAIRSHPAVREIFEYDIPFAKRYLIDKGLVPMEGGEELKLLAFNIATFYHEGDEFAEGEILMISYADESGAKVITWKKIDLPYVEVVSTEREAIKRFLQVLREKDPDVLLTYNGDNFDFAYIKKRCEKLGLKFTIGRDGSEPKIQRMGDRFAVEVKGRIHLDLAPVVRHTIRLPTYTLEAVYEAVFGKKKEKVYAEEIAEAWKSEEGLARVAQYSMEDARATYELGREFFPIEVELAKLIGQSVWDVSRSSTGNLVEWYLLRVAYERNELAPNKPGGEEYQRRMRSSYIGGYVKEPEKGLWESIAYLDFRSSAGSIIVTHNVSPDTLEKECKNYDVAPIVGYRFCKDFKGFIPSILEDLIETRQKVKRKMKATIDPIEKKMLDYRQRALKILANSYYGYQGYPKARWYSKECAESVTAWGRHYIETTIKEAEKFGFKVLYADTDGFFATIPNEKPETIKSKAKKFLKHINEKLPGMLELEYEGFYLRGFFVTKKKYALIDEDGHITTRGLEVVRRDWSEIAKETQAKVLEVILREGSIEKAAGIVKKVVEDLANYRVPVEKLIIHEQITRELKRYKATGPHVAIAKRLQARGIKVKPGTIISYVVLKGSKKISDRVILFDEYDSSRHKYDPDYYIHNQVLPAVLRILEAFGYKEKDLEYQRDKQTGLGA

SEQ ID NO: 1121 - protein, 773 aa, unidentified
  REGION 1..773: note = Description of Unknown: Synthetic polypeptide
MILDTDYITENGKPVIRIFKKEKGEFKIEYDRNFEPYIYALLEDDESIEDIKKITGERHGKKVRIIRVEKVKKNFLGEPIEVWKLVFEHPQDYPAIRDAIRSHPAVREIFEYDIPFAKRYLIDKGLVPMEGGEELKLLAFAIATFYHEGDEFAEGEILMISYADESGAKVITWKKIDLPYVEVVSTEREAIKRFLQVLREKDPDVLLTYNGDNFDFQYIKKRCEKLGLKFTIGRDGSEPKIQRMGDRFAVEVKGRIHLDLAPVVRHTIRLPTYTLEAVYEAVFGKKKEKVYAEEIAEAWKSEEGLARVAQYSMEDARATYELGREFFPMEVELAKLIGQSVWDVSRSSTGNLVEWYLLRVAYERNELAPNKPGGEEYQRRMRSSYIGGYVKEPEKGLWESIAYLDFRSSAGSIIVTHNVSPDTLEKECKNYDVAPIVGYRFCKDFKGFIPSILEDLIETRQKVKRKMKATIDPIEKKMLDYRQRALKILANSYYGYQGYPKARWYSKECAESVTAWGRHYIETTIKEAEKFGFKVLYADTDGFFATIPNEKPETIKSKAKKFLKHINEKLPGMLELEYEGFYLRGFFVTKKKYALIDEDGHITTRGLEVVRRDWSEIAKETQAKVLEVILREGSIEKAAGIVKKVVEDLANYRVPVEKLIIHEQITRELKRYKATGPHVAIAKRLQARGIKVKPGTIISYVVLKGSKKISDRVILFDEYDSSRHKYDPDYYIHNQVLPAVLRILEAFGYKEKDLEYQRDKQTGLGAWLKMGKK

SEQ ID NO: 1122 - protein, 766 aa, unidentified
  REGION 1..766: note = Description of Unknown: Synthetic polypeptide
MILDTDYITENGKPVIRIFKKEKGEFKIEYDRNFEPYIYALLEDDESIEDIKKITGERHGKKVRIIRVEKVKKKFLGEPIEVWKLVFEHPQDVPAIRDAIRSHPAVREIFEYDIPFAKRYLIDKGLVPMEGGEELKLLAFNIATFYHEGDEFAEGEILMISYADESGAKVITWKKIDLPYVEVVSTEREAIKRFLQVLREKDPDVLLTYNGDNFDFAYIKKRCEKLGLKFTIGRDGSEPKIQRMGDRFAVEVKGRIHLDLAPVVRHTIRLPTYTLEAVYEAVFGKKKEKVYAEEIAEAWKSEEGLKRVAQYSMEDARATYELGREFFPMEVELAKLIGQSVWDVSRSSTGNLVEWYLLRVAYERNELAPNKPGGEEYQRRMRSSYIGGYVKEPEKGLWESIAYLDFRSSAGSIIVTHNVSPDTLEKECKNYDVAPIVGYRFCKDFKGFIPSILEDLIETRQKVKRKMKATIDPIEKKMLDYRQRALKILANSYYGYQGYPKARWYSKECAESVTAWGRHYIETTIKEAEKFGFKVLYADTDGFFATIPNEKPETIKSKAKKFLKHINEKLPGMLELEYEGFYLRGFFVTKKKYALIDEDGHITTRGLEVVRRDWSEIAKETQAKVLEVILREGSIEKAAGIVKKVVEDLANYRVPVEKLIIHEQITRELKRYKATGPHVAIAKRLQARGIKVKPGTIISYVVLKGSKKISDRVILFDEYDSSRHKYDPDYYIHNQVLPAVLRILEAFGYKEKDLEYQRDKQTGLGA

SEQ ID NO: 1123 - protein, 773 aa, unidentified
  REGION 1..773: note = Description of Unknown: Synthetic polypeptide
MILDTDYITENGKPVIRIFKKEKGEFKIEYDRNFEPYIYALLEDDESIEDIKKITGERHGKKVRIIRVEKVKKKFLGEPIEVWKLVFEHPQDYPAIRDAIRSHPAVREIFEYDIPFAKRYLIDKGLVPMEGGEELKLLAFAIETFYHEGDEFAEGEILMISYADESGAKVITWKKIDLPYVEVVSTEREAIKRFLQVLREKDPDVLLTYNGDNFDFAYIKKRCEKLGLKFTIGRDGSEPKIQRMGDRFAVEVKGRIHLDLAPVVRHTIRLPTYTLEAVYEAVFGKKKEKVYAEEIAEAWKSEEGLKRVAQYSMEDARATYELGREFFPMEVELAKLIGQSVWDVSRSSTGNLVEWYLLRVAYERNELAPNKPGGEEYQRRMRSSYIGGYVKEPEKGLWESIAYLDFRSSAGSIIVTHNVSPDTLEKECKNYDVAPIVGYRFCKDFKGFIPSILEDLIETRQKVKRKMKATIDPIEKKMLDYRQRALKILANSYYGYQGYPKARWYSKECAESVTAWGRHYIETTIKEAEKFGFKVLYADTDGFFATIPNEKPETIKSKAKKFLKHINEKLPGMLELEYEGFYLRGFFVTKKKYALIDEDGHITTRGLEVVRRDWSEIAKETQAKVLEVILREGSIEKAAGIVKKVVEDLANYRVPVEKLIIHEQITRELKRYKATGPHVAIAKRLQARGIKVKPGTIISYVVLKGSKKISDRVILFDEYDSSRHKYDPDYYIHNQVLPAVLRILEAFGYKEKDLEYQRMKQTGLGAWLKMGKK

SEQ ID NO: 1124 - protein, 773 aa, unidentified
  REGION 1..773: note = Description of Unknown: Synthetic polypeptide
MILDTDYITENGKPVIRIFKKEKGEFKIEYDRNFEPYIYALLEDDESIEDIKKITGERHGKKVRIIRVEKVKKKFLGEPIEVWKLVFEHPQDYPAIRDAIRSHPAVREIFEYDIPFAKRYLIDKGLVPMEGGEELKLLAFAIATFYHEGDEFAEGEILMISYADESGAKVITRKKIDLPYVEVVSTEREAIKRFLQVLREKDPDVLLTYNGDNFDFAYIKKRCEKLGLKFTIGRDGSEPKIQRMGDRFAVEVKGRIHLDLAPVVRHTIRLPTYTLEAVYEAVFGKKKEKVYAEEIAEAWKSEEGLKRVAQYSMEDARATYELGREFFPMEVELAKLIGQSVWDVSRSSTGNLVEWYLLRVAYERNELAPNKPGGEEYQRRMRSSYIGGYVKEPEKGLWESIAYLDFRSSAGSIIVTHNVSPDTLEKECKNYDVAPIVGYRFCKDFKGFIPSILEDLIETRQKVKRKMKATIDPIEKKMLDYRQRALKILANSYYGYQGYPKARWYSKECAESVTAWGRHYIETTIKEAEKFGFKVLYADTDGFFATIPNEKPETIKSKAKKFLKHINEKLPGMLELEYEGFYLRGFFVTKKKYALIDEDGHITTRGLEVVRRDWSEIAKETQAKVLEVILREGSIEKAAGIVKKVVEDLANYRVPVEKLIIHEQITRELKRYKATGPHVAIAKRLQARGIKVKPGTIISYVVLKGSKKISDRVILFDEYDSSRHKYDPDYYIHNQVLPAVLRILEAFGYKEKDLEYQRMKQTGLGAWLKMGKK

SEQ ID NO: 1125 - protein, 773 aa, unidentified
  REGION 1..773: note = Description of Unknown: Synthetic polypeptide
MILDTDYITENGKPVIRLFKKEKGEFKIEYDRNFEPYIYALLEDDESIEDIKKITGERHGKKVRIIRVEKVKKNFLGEPIEVWKLVFEHPQDYPAIRDAIRSHPAVREIFEYDIPFAKRYLIDKGLVPMEGGEELKLLAFAIATFYHEGDEFAEGEILMISYADESGAKVITWKKIDLPYVEVVSTEREAIKRFLQVLREKDPDVLLTYNGDNFDFAYIKKRCEKLGLKFTIGRDGSEPKIQRMGDRFAVEVKGRIHLDLAPVVRHTIRLPTYTLEAVYEAVFGKKKEKVYAEEIAEAWKSEEGLKRVAQYSMEDARATYELGREFFPMEVELAKLIGQSVWDVSRSSTGNLVEWYLLRVAYERNELAPNKPGGEEYQRRMRSSYIGGYVKEPEKGLWESIAYLDFRSSAGSIIVTHNVSPDTLEKECKNYDVAPIVGYRFCKDFKGFIPSILEDLIETRQKVKRKMKATIDPIEKKMLDYRQRALKILANSYYGYQGYPKARWYSKECAESVTAWGRHYIETTIKEAEKFGFKVLYADTDGFFATIPNEKPETIKSKAKKFLKHINEKLPGMLELEYEGFYLRGFFVTKKKYALIDEDGHITTRGLEVVRRDWSEIAKETQAKVLEVILREGSIEKAAGIVKKVVEDLANYRVPVEKLIIHEQITRELKRYKATGPHVAIAKRLQARGIKVKPGTIISYVVLKGSKKISDRVILFDEYDSSRHKYDPDYYIHNQVLPAVLRILEAFGYKEKDLEYQRMKQTGLGAWLKMGKK

SEQ ID NO: 1126 - protein, 773 aa, unidentified
  REGION 1..773: note = Description of Unknown: Synthetic polypeptide
MILDTDYITENGKPVIRIFKKEKGEFKIEYDRNFEPYIYALLEDDESIEDIKKITGERHGKKVRIIRVEKVKKKFLGEPIEVWKLVFEHPQDYPAIRDAIRSHPAVREIFEYDIPFAKRYLIDKGLVPMEGGEELKLLAFAIATFYHEGDEFAEGEILMISYADESGAKVITWKKIDLPYVEVVSTEREAIKRFLQVLREKDPDVLLTYNGDNFDFAYIKKRCEKLGLKFTIGRDGSEPKIQRMGDRFAVEVKGRIHLDLAPVVRHTIRLPTYTLEAVYEAVFGKKKEKVYAEEIAEAWKSEEGLKRVAQYSMEDARATYELGREFFPMEVELAKLIGQSVWDVSRSSTGNLVEWYLLRVAYERNELAPNKPGGEEYQRRMRSSYIGGYVKEPEKGLWESIAYLDFRSSYPSIIVTHNVSPDTLEKECKNYDVAPIVGYRFCKDFKGFIPSILEDLIETRQKVKRKMKATIDPIEKKMLDYRQRALKILANSYYGYQGYPKARWYSKECAESVTAWGRHYIETTIKEAEKFGFKVLYADTDGFFATIPNEKPETIKSKAKKFLKHINEKLPGMLELEYEGFYLRGFFVTKKKYALIDEDGHITTRGLEVVRRDWSEIAKETQAKVLEVILREGSIEKAAGIVKKVVEDLANYRVPVEKLIIHEQITRELKRYKATGPHVAIAKRLQARGIKVKPGTIISYVVLKGSKKISDRVILFDEYDSSRHKYDPDYYIHNQVLPAVLRILEAFGYKEKDLEYQRMKQTGLGAWLKMGKK

SEQ ID NO: 1127 - protein, 773 aa, unidentified
  REGION 1..773: note = Description of Unknown: Synthetic polypeptide
MILDTDYITENGKPVIRIFKKEKGEFKIEYDRNFEPYIYALLEDDESIEDIKKITGERHGKKVRIIRVEKVKKKFLGEPIEVWKLVFEHPQDYPAIRDAIRSHPAVREIFEYDIPFAKRYLIDKGLVPMEGGEELKLLAFNIATFYHEGDEFAEGEILMISYADESGAKVITWKKIDLPYVEVVSTEREAIKRFLQVLREKDPDVLLTYNGDNFDFAYIKKRCEKLGLKFTIGRDGSEPKIQRMGDRFAVEVKGRIHLDLAPVVRHTIRLPTYTLEAVYEAVFGKKKEKVYAEEIAEAWKSEEGLKRVAQYSMEDARATYELGREFFPMEVELAKLIGQSVWDVSRSSTGNLVEWYLLRVAYERNELAPNKPGGEEYQRRMRSSYIGGYVKEPEKGLWESIAYLDFRSSAGSIIVTHNVSPDTLEKECKNYDVAPIVGYRFCKDFKGFIPSILEDLIETRQKVKRKMKATIDPIEKKMLDYRQRALKILANSYYGYQGYPKARWYSKECAESVTAWGRHYIETTIKEAEKFGFKVLYADTDGFFATIPNEKPETIKSKAKKFLKHINEKLPGMLELEYEGFYLRGFFVTKKKYALIDEDGHITTRGLEVVRRDWSEIAKETQAKVLEVILREGSIEKAAGIVKKVVEDLANYRVPVEKLIIHEQITRELKRYKATGPHVAIAKRLQARGIKVKPGTIISYVVLKGSKKISDRVILFDEYDSSRHKYDPDYYIHNQVLPAVLRILEAFGYKEKDLEYQRDKQTGLGAWLKMGKK

SEQ ID NO: 1128 - protein, 773 aa, unidentified; identical to SEQ ID NO: 49
  REGION 1..773: note = Description of Unknown: Synthetic polypeptide

SEQ ID NO: 1129 - protein, 773 aa, unidentified
  REGION 1..773: note = Description of Unknown: Synthetic polypeptide
MILDTDYITENGKPVIRIFKKEKGEFKIEYDRNFEPYIYALLEDDESIEDIKKITGERHGKKVRIIRVEKVKKKFLGEPIEVWKLVFEHPQDIPAIRDAIRSHPAVREIFEYDIPFAKRYLIDKGLVPMEGGEELKLLAFNIATFYHEGDEFAEGEILMISYADESGAKVITWKKIDLPYVEVVSTEREAIKRFLQVLREKDPDVLLTYNGDNFDFAYIKKRCEKLGLKFTIGRDGSEPKIQRMGDRFAVEVKGRIHLDLAPVVRHTIRLPTYTLEAVYEAVFGKKKEKVYAEEIAEAWKSEEGLKRVAQYSMEDARATYELGREFFPMEVELAKLIGQSVWDVSRSSTGNLVEWYLLRVAYERNELAPNKPGGEEYQRRMRSSYIGGYVKEPEKGLWESIAYLDFRSSAGSIIVTHNVSPDTLEKECKNYDVAPIVGYRFCKDFKGFIPSILEDLIETRQKVKRKMKATIDPIEKKMLDYRQRALKILANSYYGYQGYPKARWYSKECAESVTAWGRHYIETTIKEAEKFGFKVLYADTDGFFATIPNEKPETIKSKAKKFLKHINEKLPGMLELEYEGFYLRGFFVTKKKYALIDEDGHITTRGLEVVRRDWSEIAKETQAKVLEVILREGSIEKAAGIVKKVVEDLANYRVPVEKLIIHEQITRELKRYKATGPHVAIAKRLQARGIKVKPGTIISYVVLKGSKKISDRVILFDEYDSSRHKYDPDYYIHNQVLPAVLRILEAFGYKEKDLEYQRMKQTGLGAWLKMGKK

SEQ ID NO: 1130 - protein, 773 aa, unidentified
  REGION 1..773: note = Description of Unknown: Synthetic polypeptide
MILDTDYITENGKPVIRIFKKEKGEFKIEYDRNFEPYIYALLEDDESIEDIKKITGERHGKKVRIIRVEKVKKNFLGEPIEVWKLVFEHPQDYPAIRDAIRSHPAVREIFEYDIPFAKRYLIDKGLVPMEGGEELKLLAFAIATFYHEGDEFAEGEILMISYADESGAKVITWKKIDLPYVEVVSTEREAIKRFLQVLREKDPDVLLTYNGDNFDFAYIKKRCEKLGLKFTIGRDGSEPKIQRMGDRFAVEVKGRIHLDLAPVVRHTIRLPTYTLEAVYEAVFGKKKEKVYAEEIAEAWKSEEGLKRVAQYSMEDARATYELGREFFPMEVELAKLIGQSVWDVSRSSTGNLVEWYLLRVAYERNELAPNKPGGEEYQRRMRSSYIGGYVKEPEKGLWESIAYLDFRSSAGSIIVTHNVSPDTLEKECKNYDVAPIVGYRFCKDFKGFIPSILEDLIETRQKVKRKMKATIDPIEKKMLDYRQRALKILANSYYGYQGYPKARWYSKECAESVTAWGRHYIETTIKEAEKFGFKVLYADTDGFFATIPNEKPETIKSKAKKFLKHINEKLPGMLELEYEGFYLRGFFVTKKKYALIDEDGHITTRGLEVVRRDWSEIAKETQAKVLEVILREGSIEKAAGIVKKVVEDLANYRVPVEKLVIHEQITRELKRYKATGPHVAIAKRLQARGIKVKPGTIISYVVLKGSKKISDRVILFDEYDSSRHKYDPDYYIHNQVLPAVLRILEAFGYKEKDLEYQRMKQTGLGAWLKMGKK

SEQ ID NO: 1131 - protein, 766 aa, unidentified
  REGION 1..766: note = Description of Unknown: Synthetic polypeptide
MILDTDYITENGKPVIRIFKKEKGEFKIEYDRNFEPYIYALLEDDESIEDIKKITGERHGKKVRIIRVEKVKKKFLGEPIEVWKLVFEHPQDFPAIRDAIRSHPAVREIFEYDIPFAKRYLIDKGLVPMEGGEELKLLAFNIATFYHEGDEFAEGEILMISYADESGAKVITWKKIDLPYVEVVSTEREAIKRFLQVLREKDPDVLLTYNGDNFDFAYIKKRCEKLGLKFTIGRDGSEPKIQRMGDRFAVEVKGRIHLDLAPVVRHTIRLPTYTLEAVYEAVFGKKKEKVYAEEIAEAWKSEEGLKRVAQYSAEDARATYELGREFFPLEVELAKLIGQSVWDVSRSSTGNLVEWYLLRVAYERNELAPNKPGGEEYQRRMRSSYIGGYVKEPEKGLWESIAYLDFRSSAGSIIVTHNVSPDTLEKECKNYDVAPIVGYRFCKDFKGFIPSILEDLIETRQKVKRKMKATIDPIEKKMLDYRQRALKILANSYYGYQGYPKARWYSKECAESVTAWGRHYIETTIKEAEKFGFKVLYADTDGFFATIPNEKPETIKSKAKKFLKHINEKLPGMLELEYEGFYLRGFFVTKKKYALIDEDGHITTRGLEVVRRDWSEIAKETQAKVLEVILREGSIEKAAGIVKKVVEDLANYRVPVEKLIIHEQITRELKRYKATGPHVAIAKRLQARGIKVKPGTIISYVVLKGSKKISDRVILFDEYDSSRHKYDPDYYIHNQVLPAVLRILEAFGYKEKDLEYQRDKQTGLGA

SEQ ID NO: 1132 - protein, 773 aa, unidentified
  REGION 1..773: note = Description of Unknown: Synthetic polypeptide
MILDTDYITENGKPVIRIFKKEKGEFKIEYDRNFEPYIYALLEDDESIEDIKKITGERHGKKVRIIRVEKVKKKFLGEPIEVWKLVFEHPQDYPAIRDAIRSHPAVREIFEYDIPFAQRYLIDKGLVPMEGGEELKLLAFAIATFYHEGDEFAEGEILMISYADESGAKVITWKKIDLPYVEVVSTEREAIKRFLQVLREKDPDVLLTYNGDNFDFAYIKKRCEKLGLKFTIGRDGSEPKIQRMGDRFAVEVKGRIHLDLAPVVRHTIRLPTYTLEAVYEAVFGKKKEKVYAEEIAEAWKSEEGLKRVAQYSMEDARATYELGREFFPMEVELAKLIGQSVWDVSRSSTGNLVEWYLLRVAYERNELAPNKPGGEEYQRRMRSSYIGGYVKEPEKGLWESIAYLDFRSSAGSIIVTHNVSPDTLEKECKNYDVAPIVGYRFCKDFKGFIPSILEDLIETRQKVKRKMKATIDPIEKKMLDYRQRALKILANSYYGYQGYPKARWYSKECAESVTAWGRHYIETTIKEAEKFGFKVLYADTDGFFATIPNEKPETIKSKAKKFLKHINEKLPGMLELEYEGFYLRGFFVTKKKYALIDEDGHITTRGLEVVRRDWSEIAKETQAKVLEVILREGSIEKAAGIVKKVVEDLANYRVPVEKLIIHEQITRELKRYKATGPHVAIAKRLQARGIKVKPGTIISYVVLKGSKKISDRVILFDEYDSSRHKYDPDYYIHNQVLPAVLRILEAFGYKEKDLEYQRMKQTGLGAWLKMGKK

SEQ ID NO: 1133 - protein, 773 aa, unidentified
  REGION 1..773: note = Description of Unknown: Synthetic polypeptide
MILDTDYITENGKPVIRIFKKEKGEFKIEYDRNFEPYIYALLEDDESIEDIKKITGERHGKKVRIIRVEKVKKKFLGEPIEVWKLVFEHPQDQPAIRDAIRSHPAVREIFEYDIPFAKRYLIDKGLVPMEGGEELKLLAFNIATFYHEGDEFAEGEILMISYADESGAKVITWKKIDLPYVEVVSTEREAIKRFLQVLREKDPDVLLTYNGDNFDFAYIKKRCEKLGLKFTIGRDGSEPKIQRMGDRFAVEVKGRIHLDLAPVVRHTIRLPTYTLEAVYEAVFGKKKEKVYAEEIAEAWKSEEGLKRVAQYSMEDARATYELGREFFPLEVELAKLIGQSVWDVSRSSTGNLVEWYLLRVAYERNELAPNKPGGEEYQRRMRSSYIGGYVKEPEKGLWESIAYLDFRSSAGSIIVTHNVSPDTLEKECKNYDVAPIVGYRFCKDFKGFIPSILEDLIETRQKVKRKMKATIDPIEKKMLDYRQRALKILANSYYGYQGYPKARWYSKECAESVTAWGRHYIETTIKEAEKFGFKVLYADTDGFFATIPNEKPETIKSKAKKFLKHINEKLPGMLELEYEGFYLRGFFVTKKKYALIDEDGHITTRGLEVVRRDWSEIAKETQAKVLEVILREGSIEKAAGIVKKVVEDLANYRVPVEKLIIHELITRELKRYKATGPHVAIAKRLQARGIKVKPGTIISYVVLKGSKKISDRVILFDEYDSSRHKYDPDYYIHNQVLPAVLRILEAFGYKEKDLEYQRMKQTGLGAWLKMGKK

SEQ ID NO: 1134 - protein, 773 aa, unidentified
  REGION 1..773: note = Description of Unknown: Synthetic polypeptide
MILDTDYITENGKPVIRIFKKEKGEFKIEYDRNFEPYIYALLEDDESIEDIKKITGERHGKKVRIIRVEKVKKKFLGEPIEVWKLVFEHPQDYPAIRDAIRSHPAVREIFEYDIPFAKRYLIDKGLVPMEGGEELKLLAFAIATFYHEGDEFAEGEILMISYADESGAKVITWKKIDLPYVEVVSTEREAIKRFLQVLREKDPDVLLTYNGDNFDFAYIKKRCEKLGLKFTIGRDGSEPKIQRMGDRFAVEVKGRIHLDLAPVVRHTIRLPTYTLEAVYEAVFGKKKEKVYAEEIAEAWKSEEGLKRVAQYSMEDARATYELGREFFPMEVELAKLIGQSVWDVSRSSTGNLVEWYLLRVAYERNELAPNKPGGEEYQRRMRSSYIGGYVKEPEKGLWESIAYLDFRSSAGSIIVTHNVSPDTLEKECKNYDVAPIVGYRFCKDFKGFIPSILEDLIETRQKVKRKMKATIDPIEKKMLDYRQRALKILANSYYGYQGYPYARWYSKECAESVTAWGRHYIETTIKEAEKFGFKVLYADTDGFFATIPNEKPETIKSKAKKFLKHINEKLPGMLELEYEGFYLRGFFVTKKKYALIDEDGHITTRGLEVVRRDWSEIAKETQAKVLEVILREGSIEKAAGIVKKVVEDLANYRVPVEKLIIHEQITRELKRYKATGPHVAIAKRLQARGIKVKPGTIISYVVLKGSKKISDRVILFDEYDSSRHKYDPDYYIHNQVLPAVLRILEAFGYKEKDLEYQRMKQTGLGAWLKMGKK

SEQ ID NO: 1135 - protein, 773 aa, unidentified
  REGION 1..773: note = Description of Unknown: Synthetic polypeptide
MILDTDYITENGKPVIRIFKKEKGEFKIEYDRNFEPYIYALLEDDESIEDIKKITGERHGKKVRIIRVEKVKKKFLGEPIEVWKLVFEHPQDYPAIRDAIRSHPAVREIFEYDIPFAKRYLIDKGLVPMEGGEELKLLAFNIATFYHEGDEFAEGEILMISYADESGAKVITWKKIDLPYVEVVSTEREAIKRFLQVLREKDPDVLLTYNGDNFDFAYIKKRCEKLGLKFTIGRDGSEPKIQRMGDRFAVEVKGRIHLDLAPVVRHTIRLPTYTLEAVYEAVFGKKKEKVYAEEIAEAWKSEEGLKRVAQYSMEDARATYELGREFFPLEVELAKLIGQSVWDVSRSSTGNLVEWYLLRVAYERNELAPNKPGGEEYQRRMRSSYIGGYVKEPEKGLWESIAYLDFRSCAGSIIVTHNVSPDTLEKECKNYDVAPIVGYRFCKDFKGFIPSILEDLIETRQKVKRKMKATIDPIEKKMLDYRQRALKILANSYYGYQGYPKARWYSKECAESVTAWGRHYIETTIKEAEKFGFKVLYADTDGFFATIPNEKPETIKSKAKKFLKHINEKLPGMLELEYEGFYLRGFFVTKKKYALIDEDGHITTRGLEVVRRDWSEIAKETQAKVLEVILREGSIEKAAGIVKKVVEDLANYRVPVEKLIIHEQITRELKRYKATGPHVAIAKRLQARGIKVKPGTIISYVVLKGSKKISDRVILFDEYDSSRHKYDPDYYIHNQVLPAVLRILEAFGYKEKDLEYQRMKQTGLGAWLKMGKK

SEQ ID NO: 1136 - protein, 773 aa, unidentified
  REGION 1..773: note = Description of Unknown: Synthetic polypeptide
MILDTDYITENGKPVIRIFKKEKGEFKIEYDRNFEPYIYALLEDDESIEDIKKITGERHGKKVRIIRVEKVKKKFLGEPIEVWKLVFEHPQDYPAIRDAIRSHPAVREIFEYDIPFAKRYLIDKGLVPMEGGEELKLLAFAIATFYHEGDEFAEGEILMISYADESGAKVITWKKIDLPYVEVVSTEREAIKRFLQVLREKDPDVLLTYNGDNFDFAYIKKRCEKLGLKFTIGRDGSEPKIQRMGDRFAVEVKGRIHLDLAPVVRHTIRLPTYTLEAVYEAVFGKKKEKVYAEEIAEAWKSEEGLKRVAQYSMEDARATYELGREFFPMEVELAKLIGQSVWDVSRSSTGKLVEWYLLRVAYERNELAPNKPGGEEYQRRMRSSYIGGYVKEPEKGLWESIAYLDFRSSAGSIIVTHNVSPDTLEKECKNYDVAPIVGYRFCKDFKGFIPSILEDLIETRQKVKRKMKATIDPIEKKMLDYRQRALKILANSYYGYQGYPKARWYSKECAESVTAWGRHYIETTIKEAEKFGFKVLYADTDGFFATIPNEKPETIKSKAKKFLKHINEKLPGMLELEYEGFYLRGFFVTKKKYALIDEDGHITTRGLEVVRRDWSEIAKETQAKVLEVILREGSIEKAAGIVKKVVEDLANYRVPVEKLIIHEQITRELKRYKATGPHVAIAKRLQARGIKVKPGTIISYVVLKGSKKISDRVILFDEYDSSRHKYDPDYYIHNQVLPAVLRILEAFGYKEKDLEYQRMKQTGLGAWLKMGKK

SEQ ID NO: 1137 - protein, 773 aa, unidentified
  REGION 1..773: note = Description of Unknown: Synthetic polypeptide
MILDTDYITENGKPVIRIFKKEKGEFKIEYDRNFEPYIYALLEDDESIEDIKKITGERHGKKVRIIRVEKVKKKFLGEPIEVWKLVFEHPQDYPAIRDAIRSHPAVREIFEYDIPFAKRYLIDKGLVPMEGGEELKLLAFAIATFEHEGDEFAEGEILMISYADESGAKVITWKKIDLPYVEVVSTEREAIKRFLQVLREKDPDVLLTYNGDNFDFAYIKKRCEKLGLKFTIGRDGSEPKIQRMGDRFAVEVKGRIHLDLAPVVRHTIRLPTYTLEAVYEAVFGKKKEKVYAEEIAEAWKSEEGLKRVAQYSMEDARATYELGREFFPMEVELAKLIGQSVWDVSRSSTGNLVEWYLLRVAYERNELAPNKPGGEEYQRRMRSSYIGGYVKEPEKGLWESIAYLDFRSSAGSIIVTHNVSPDTLEKECKNYDVAPEVGYRFCKDFKGFIPSILEDLIETRQKVKRKMKATIDPIEKKMLDYRQRALKILANSYYGYQGYPKARWYSKECAESVTAWGRHYIETTIKEAEKFGFKVLYADTDGFFATIPNEKPETIKSKAKKFLKHINEKLPGMLELEYEGFYLRGFFVTKKKYALIDEDGHITTRGLEVVRRDWSEIAKETQAKVLEVILREGSIEKAAGIVKKVVEDLANYRVPVEKLIIHEQITRELKRYKATGPHVAIAKRLQARGIKVKPGTIISYVVLKGSKKISDRVILFDEYDSSRHKYDPDYYIHNQVLPAVLRILEAFGYKEKDLEYQRMKQTGLGAWLKMGKK

SEQ ID NO: 1138 - protein, 773 aa, unidentified
  REGION 1..773: note = Description of Unknown: Synthetic polypeptide
MILDTDYITENGKPVIRIFKKEKGEFKIEYDRNFEPYIYALLEDDESIEDIKKITGERHGKKVRIIRVEKVKKNFLGEPIEVWKLVFEHPQDYPAIRDAIRSHPAVREIFEYDIPFAKRYLIDKGLVPMEGGEELKLLAFAIATFYHEGDEFAEGEILMISYADESGAKVITWKKIDLPYVEVVSTEREAIKRFLQVLREKDPDVLLTYNGDNFDFAYIKKRCEKLGLKFTIGRDGSEPKIQRMGDRFAVEVKGRIHLDLAPVVRHTIRLPTYTLEAVYEAVFGKKKEKVYAEEIAEAWKSEEGLKRVAQYSMEDARATYELGREFFPMEVELAKLIGQSVWDVSRSSTGNLVEWYLLRVAYERNELAPNKPGGEEYQRRMRSSYIGGYVKEPEKGLWESIAYLDFRSSAGSIIVTHNVSPDTLEKECKNYDVAPIVGYRFCKDFKGFIPSLLEDLIETRQKVKRKMKATIDPIEKKMLDYRQRALKILANSYYGYQGYPKARWYSKECAESVTAWGRHYIETTIKEAEKFGFKVLYADTDGFFATIPNEKPETIKSKAKKFLKHINEKLPGMLELEYEGFYLRGFFVTKKKYALIDEDGHITTRGLEVVRRDWSEIAKETQAKVLEVILREGSIEKAAGIVKKVVEDLANYRVPVEKLIIHEQITRELKRYKATGPHVAIAKRLQARGIKVKPGTIISYVVLKGSKKISDRVILFDEYDSSRHKYDPDYYIHNQVLPAVLRILEAFGYKEKDLEYQRMKQTGLGAWLKMGKK

SEQ ID NO: 1139 - protein, 773 aa, unidentified
  REGION 1..773: note = Description of Unknown: Synthetic polypeptide
MILDTDYITENGKPVIRIFKKEKGEFKIEYDRNFEPYIYALLEDDESIEDIKKITGERHGKKVRIIRVEKVKKKFLGEPIEVWKLVFEHPQDVPAIRDAIRSHPAVREIFEYDIPFAKRYLIDKGLVPMEGGEELKLLAFNIATFYHEGDEFAEGEILMISYADESGAKVITWKKIDLPYVEVVSTEREAIKRFLQVLREKDPDVLLTYNGDNFDFAYIKKRCEKLGLKFTIGRDGSEPKIQRMGDRFAVEVKGRIHLDLAPVVRHTIRLPTYTLEAVYEAVFGKKKEKVYAEEIAEAWKSEEGLKRVAQYSMEDARATYELGREFFPMEVELAKLIGQSVWDVSRSSTGNLVEWYLLRVAYERNELAPNKPGGEEYQRRMRSSYIGGYVKEPEKGLWESIAYLDFRSSAGSIIVTHNVSPDTLEKECKNYDVAPIVGYRFCKDFKGFIPSILEDLIETRQKVKRKMKATIDPIEKKMLDYRQRALKILANSYYGYQGYPKARWYSKECAESVTAWGRHYIETTIKEAEKFGFKVLYADTDGFFATIPNEKPETIKSKAKKFLKHINEKLPGMLELEYEGFYLRGFFVTKKKYALIDEDGHITTRGLEVVRRDWSEIAKETQAKVLEVILREGSIEKAAGIVKKVVEDLANYRVPVEKLIIHEQITRELKRYKATGPHVAIAKRLQARGIKVKPGTIISYVVLKGSKKISDRVILFDEYDSSRHKYDPDYYIHNQVLPAVLRILEAFGYKEKDLEYQRDKQTGLGAWLKMGKK

SEQ ID NO: 1140 - protein, 773 aa, unidentified
  REGION 1..773: note = Description of Unknown: Synthetic polypeptide
MILDTDYITENGKPVIRIFKKEKGEFKIEYDRNFEPYIYALLEDDESIEDIKKITGERHGKKVRIIRVEKVKKKFLGEPIEVWKLVFEHPQDFPAIRDAIRSHPAVREIFEYDIPFAKRYLIDKGLVPMEGGEELKLLAFNIETFYHEGDEFAEGEILMISYADESGAKVITWKKIDLPYVEVVSTEREAIKRFLQVLREKDPDVLLTYNGDNFDFAYIKKRCEKLGLKFTIGRDGSEPKIQRMGDRFAVEVKGRIHLDLAPVVRHTIRLPTYTLEAVYEAVFGKKKEKVYAEEIAEAWKSEEGLKRVAQYSMEDARATYELGREFFPLEVELAKLIGQSVWDVSRSSTGNLVEWYLLRVAYERNELAPNKPGGEEYQRRMRSSYIGGYVKEPEKGLWESIAYLDFRSSAGSIIVTHNVSPDTLEKECKNYDVAPIVGYRFCKDFKGFIPSILEDLIETRQKVKRKMKATIDPIEKKMLDYRQRALKILANSYYGYQGYPKARWYSKECAESVTAWGRHYIETTIKEAEKFGFKVLYADTDGFFATIPNEKPETIKSKAKKFLKHINEKLPGMLELEYEGFYLRGFFVTKKKYALIDEDGHITTRGLEVVRRDWSEIAKETQAKVLEVILREGSIEKAAGIVKKVVEDLANYRVPVEKLIIHEQITRELKRYKATGPHVAIAKRLQARGIKVKPGTIISYVVLKGSKKISDRVILFDEYDSSRHKYDPDYYIHNQVLPAVLRILEAFGYKEKDLEYQRMKQTGLGAWLKMGKK

SEQ ID NO: 1141 - protein, 773 aa, unidentified
  REGION 1..773: note = Description of Unknown: Synthetic polypeptide
MILDTDYITENGKPVIRIFKKEKGEFKIEYDRNFEPYIYALLEDDESIEDIKKITGERHGKKVRIIRVEKVKKKFLGEPIEVWKLVFEHPQDYPAIRDAIRSHPAVREIFEYDIPFAKRYLIDKGLVPMEGGEELKLLAFAIATFYHEGDEFAEGEILMISYADESGAKVITWKKIDLPYVEVVSTEREAIKRFLQVLREKDPDVLLTYNGDNFDFAYIKKRCEKLGLKFTIGRDGSEPKIQRMGDRFAVEVKGRIHLDLAPVVRHTIRLPTYTLEAVYEAVFGKKKEKVYAEEIAEAWKSEEGLKRVAQYSMEDARATYELGREFFPMEVELAKLIGQSVWDVSRSSTGNLVEWYLLRVAYERNELAPNKPGGEEYQRRMRSSYIGGYVKEPEKGLWESIAYLDFRSTAGSIIVTHNVSPDTLEKECKNYDVAPIVGYRFCKDFKGFIPSILEDLIETRQKVKRKMKATIDPIEKKMLDYRQRALKILANSYYGYQGYPKARWYSKECAESVTAWGRHYIETTIKEAEKFGFKVLYADTDGFFATIPNEKPETIKSKAKKFLKHINEKLPGMLELEYEGFYLRGFFVTKKKYALIDEDGHITTRGLEVVRRDWSEIAKETQAKVLEVILREGSIEKAAGIVKKVVEDLANYRVPVEKLIIHEQITRELKRYKATGPHVAIAKRLQARGIKVKPGTIISYVVLKGSKKISDRVILFDEYDSSRHKYDPDYYIHNQVLPAVLRILEAFGYKEKDLEYQRMKQTGLGAWLKMGKK

SEQ ID NO: 1142 - protein, 766 aa, unidentified; identical to SEQ ID NO: 738
  REGION 1..766: note = Description of Unknown: Synthetic polypeptide

SEQ ID NO: 1143 - protein, 773 aa, unidentified
  REGION 1..773: note = Description of Unknown: Synthetic polypeptide
MILDTDYITENGKPVIRIFKKEKGEFKIEYDRNFEPYIYALLEDDESIEDIKKITGERHGKKVRIIRVEKVKKKFLGEPIEVWKLVFEHPQDYPAIRDAIRSHPAVREIFEYDIPFAKRYLIDKGLVPMEGGEELKLLAFAIATFYHEGDEFAEGEILMISYADESGAKVITWKKIDLPYVEVVSTEREAIKRFLQVLREKDPDVLLTYNGDNFDFAYIKKRCEKLGLKFTIGRDGSEPKIQRMGDRFAVEVKGRIHLDLAPVVRHTIRLPTYTLEAVYEAVFGKKKEKVYAEEIAEAWKSEEGLARVAQYSVEDARATYELGREFFPMEVELAKLIGQSVWDVSRSSTGNLVEWYLLRVAYERNELAPNQPGGEEYQRRMRSSYIGGYVKEPEKGLWESIAYLDFRSSAGSIIVTHNVSPDTLEKECKNYDVAPIVGYRFCKDFKGFIPSILEDLIETRQKVKRKMKATIDPIEKKMLDYRQRALKILANSYYGYQGYPKARWYSKECAESVTAWGRHYIETTIKEAEKFGFKVLYADTDGFFATIPNEKPETIKSKAKKFLKHINEKLPGMLELEYEGFYLRGFFVTKKKYALIDEDGHITTRGLEVVRRDWSEIAKETQAKVLEVILREGSIEKAAGIVKKVVEDLANYRVPVEKLIIHEQITRELKRYKATGPHVAIAKRLQARGIKVKPGTIISYVVLKGSKKISDRVILFDEYDSSRHKYDPDYYIHNQVLPAVLRILEAFGYKEKDLEYQRDKQTGLGAWLKMGKK

SEQ ID NO: 1144 - protein, 773 aa, unidentified
  REGION 1..773: note = Description of Unknown: Synthetic polypeptide
MILDTDYITENGKPVIRIFKKEKGEFKIEYDRNFEPYIYALLEDDESIEDIKKITGERHGKKVRIIRVEKVKKKFLGEPIEVWKLVFEHPQDYPAIRDAIRSHPAVREIFEYDIPFAKRYLIDKGLVPMEGGEELKLLAFAIATFYHEGDEFAEGEILMISYADESGAKVITWKKIDLPYVEVVSTEREAIKRFLQVLREKDPDVLLTYNGDNFDFAYIKKRCEKLGLKFTIGRDGSEPKIQRMGDRFAVEVKGRIHLDLAPVVRHTIRLPTYTLEAVYEAVFGKKKEKVYAEEIAEAWKSEEGLKRVAQYSMEDARATYELGREFFPMEVELAKLIGQSVWDVSRSSTGNLVEWYLLRVAYERNRLAPNKPGGEEYQRRMRSSYIGGYVKEPEKGLWESIAYLDFRSSAGSIIVTHNVSPDTLEKECKNYDVAPIVGYRFCKDFKGFIPSILEDLIETRQKVKRKMKATIDPIEKKMLDYRQRALKILANSYYGYQGYPKARWYSKECAESVTAWGRHYIETTIKEAEKFGFKVLYADTDGFFATIPNEKPETIKSKAKKFLKHINEKLPGMLELEYEGFYLRGFFVTKKKYALIDEDGHITTRGLEVVRRDWSEIAKETQAKVLEVILREGSIEKAAGIVKKVVEDLANYRVPVEKLIIHEQITRELKRYKATGPHVAIAKRLQARGIKVKPGTIISYVVLKGSKKISDRVILFDEYDSSRHKYDPDYYIHNQVLPAVLRILEAFGYKEKDLEYQRMKQTGLGAWLKMGKK

SEQ ID NO: 1145 - protein, 766 aa, unidentified
  REGION 1..766: note = Description of Unknown: Synthetic polypeptide
MILDTDYITENGKPVIRIFKKEKGEFKIEYDRNFEPYIYALLEDDESIEDIKKITGERHGKKVRIIRVEKVKKKFLGEPIEVWKLVFEHPQDYPAIRDAIRSHPAVREIFEYDIPFAKRYLIDKGLVPMEGGEELKLLAFNIATFYHEGDEFAEGEILMISYADESGAKVITWKKIDLPYVEVVSTEREAIKRFLQVLREKDPDVLLTYNGDNFDFAYIKKRCEKLGLKFTIGRDGSEPKIQRMGDRFAVEVKGRIHLDLAPVVRHTIRLPTYTLEAVYEAVFGKKKEKVYAEEIAEAWKSEEGLKRVAQYSMEDARATYELGREFFPLEVELAKLIGQSVWDVSRSSTGNLVEWYLLRVAYERNELAPNQPGGEEYQRRMRSSYIGGYVKEPEKGLWESIAYLDFRSSAGSIIVTHNVSPDTLEKECKNYDVAPIVGYRFCKDFKGFIPSILEDLIETRQKVKRKMKATIDPIEKKMLDYRQRALKILANSYYGYQGYPKARWYSKECAESVTAWGRHYIETTIKEAEKFGFKVLYADTDGFFATIPNEKPETIKSKAKKFLKHINEKLPGMLELEYEGFYLRGFFVTKKKYALIDEDGHITTRGLEVVRRDWSEIAKETQAKVLEVILREGSIEKAAGIVKKVVEDLANYRVPVEKLIIHEQITRELKRYKATGPHVAIAKRLQARGIKVKPGTIISYVVLKGSKKISDRVILFDEYDSSRHKYDPDYYIHNQVLPAVLRILEAFGYKEKDLEYQRDKQTGLGA

SEQ ID NO: 1146 - protein, 773 aa, unidentified
  REGION 1..773: note = Description of Unknown: Synthetic polypeptide
MILDTDYITENGKPVIRIFKKEKGEFKIEYDRNFEPYIYALLEDDESIEDIKKITGERHGKKVRIIRVEKVKKKFLGEPIEVWKLVFEHPQDYPAIRDAIRSHPAVREIFEYDIPFAKRYLIDKGLVPMEGGEELKLLAFAIATFEHEGDEFAEGEILMISYADESGAKVITWKKIDLPYVEVVSTEREAIKRFLQVLREKDPDVLLTYNGDNFDFAYIKKRCEKLGLKFTIGRDGSEPKIQRMGDRFAVEVKGRIHLDLAPVVRHTIRLPTYTLEAVYEAVFGKKKEKVYAEEIAEAWKSEEGLKRVAQYSMEDARATYELGREFFPMEVELAKLIGQSVWDVSRSSTGNLVEWYLLRVAYERNELAPNKPGGEEYQRRMRSSYIGGYVKEPEKGLWESIAYLDFRSSAGSIIVTHNVSPDTLEKECKNYDVAPIVGYRFCKDFKGFIPSILEDLIETRQKVKRKMKATIDPIEKKMLDYRQRALKILANSYYGYQGYPKARWYSKECAESVTAWGRHYIETTIKEAEKFGFKVLYADTDGFFATIPNEKPETIKSKAKKFLKHINEKLPGMLELEYEGFYLRGFFVTKKKYALIDEDGHITTRGLEVVRRDWSEIAKETQAKVLEVILREGSIEKAAGIVKKVVEDLANYRVPVEKLIIHEQITRELKRYKATGPHVAIAKRLQARGIKVKPGTIISYVVLKGSKKISDRVILFDEYDSSRHKYDPDYYIHNQVLPAVLRILEAFGYKEKDLEYQRMKQTGLGAWLKMGKK

SEQ ID NO: 1147 - protein, 773 aa, unidentified
  REGION 1..773: note = Description of Unknown: Synthetic polypeptide
MILDTDYITENGKPVIRIFKKEKGEFKIEYDRNFEPYIYALLEDDESIEDIKKITGERHGKKVRIIRVEKVKKNFLGEPIEVWKLVFEHPQDYPAIRDAIRSHPAVREIFEYDIPFAKRYLIDKGLVPMEGGEELKLLAFAIATFYHEGDEFAEGEILMISYADESGAKVITWKKIDLPYVEVVSTEREAIKRFLQVLREKDPDVLLTYNGDNFDFAYIKKRCEKLGLKFTIGRDGSEPKIQRMGDRFAVEVKGRIHFDLAPVVRHTIRLPTYTLEAVYEAVFGKKKEKVYAEEIAEAWKSEEGLKRVAQYSMEDARATYELGREFFPMEVELAKLIGQSVWDVSRSSTGNLVEWYLLRVAYERNELAPNKPGGEEYQRRMRSSYIGGYVKEPEKGLWESIAYLDFRSSAGSIIVTHNVSPDTLEKECKNYDVAPIVGYRFCKDFKGFIPSILEDLIETRQKVKRKMKATIDPIEKKMLDYRQRALKILANSYYGYQGYPKARWYSKECAESVTAWGRHYIETTIKEAEKFGFKVLYADTDGFFATIPNEKPETIKSKAKKFLKHINEKLPGMLELEYEGFYLRGFFVTKKKYALIDEDGHITTRGLEVVRRDWSEIAKETQAKVLEVILREGSIEKAAGIVKKVVEDLANYRVPVEKLIIHEQITRELKRYKATGPHVAIAKRLQARGIKVKPGTIISYVVLKGSKKISDRVILFDEYDSSRHKYDPDYYIHNQVLPAVLRILEAFGYKEKDLEYQRMKQTGLGAWLKMGKK

SEQ ID NO: 1148 - protein, 773 aa, unidentified
  REGION 1..773: note = Description of Unknown: Synthetic polypeptide
MILDTDYITENGKPVIRIFKKEKGEFKIEYDRNFEPYIYALLEDDESIEDIKKITAERHGKKVRIIRVEKVKKNFLGEPIEVWKLVFEHPQDYPAIRDAIRSHPAVREIFEYDIPFAKRYLIDKGLVPMEGGEELKLLAFAIATFYHEGDEFAEGEILMISYADESGAKVITWKKIDLPYVEVVSTEREAIKRFLQVLREKDPDVLLTYNGDNFDFAYIKKRCEKLGLKFTIGRDGSEPKIQRMGDRFAVEVKGRIHLDLAPVVRHTIRLPTYTLEAVYEAVFGKKKEKVYAEEIAEAWKSEEGLKRVAQYSMEDARATYELGREFFPMEVELAKLIGQSVWDVSRSSTGNLVEWYLLRVAYERNELAPNKPGGEEYQRRMRSSYIGGYVKEPEKGLWESIAYLDFRSSAGSIIVTHNVSPDTLEKECKNYDVAPIVGYRFCKDFKGFIPSILEDLIETRQKVKRKMKATIDPIEKKMLDYRQRALKILANSYYGYQGYPKARWYSKECAESVTAWGRHYIETTIKEAEKFGFKVLYADTDGFFATIPNEKPETIKSKAKKFLKHINEKLPGMLELEYEGFYLRGFFVTKKKYALIDEDGHITTRGLEVVRRDWSEIAKETQAKVLEVILREGSIEKAAGIVKKVVEDLANYRVPVEKLIIHEQITRELKRYKATGPHVAIAKRLQARGIKVKPGTIISYVVLKGSKKISDRVILFDEYDSSRHKYDPDYYIHNQVLPAVLRILEAFGYKEKDLEYQRMKQTGLGAWLKMGKK

SEQ ID NO: 1149 - protein, 773 aa, unidentified; identical to SEQ ID NO: 875
  REGION 1..773: note = Description of Unknown: Synthetic polypeptide

SEQ ID NO: 1150 - protein, 773 aa, unidentified
  REGION 1..773: note = Description of Unknown: Synthetic polypeptide
MILDTDYITENGKPVIRIFKKEKGEFKIEYDRNFEPYIYALLEDDESIEDIKKITGERHGKKVRIIRVEKVKKNFLGEPIEVWKLVFEHPQDYPAIRDAIRSHPAVREIFEYDIPFAKRYLIDKGLVPMEGGEELKLLAFAIATFYHEGDEFAEGEILMISYADESGAKVITWKKIDLPYVEVVSTEREAIKRFLQVLREKDPDVLLTYNGDNFDFAYIKKRCEKLGLKFTIGRDGSEPKIQRMGDRFAVEVKGRIHLDLAPVVRHTIRLPTYTLEAVYEAVFGKKKEKVYAEEIAEAWKSEEGLKRVAQYSMEDARATYELGREFFPMEVELAKLIGQSVWDVSRSSTGNLVEWYLLRVAYERNELAPNKPGGEEYQRRMRSSYIGGYVKEPEKGLWESIAYLDFRSSAGSIIITHNVSPDTLEKECKNYDVAPIVGYRFCKDFKGFIPSILEDLIETRQKVKRKMKATIDPIEKKMLDYRQRALKILANSYYGYQGYPKARWYSKECAESVTAWGRHYIETTIKEAEKFGFKVLYADTDGFFATIPNEKPETIKSKAKKFLKHINEKLPGMLELEYEGFYLRGFFVTKKKYALIDEDGHITTRGLEVVRRDWSEIAKETQAKVLEVILREGSIEKAAGIVKKVVEDLANYRVPVEKLIIHEQITRELKRYKATGPHVAIAKRLQARGIKVKPGTIISYVVLKGSKKISDRVILFDEYDSSRHKYDPDYYIHNQVLPAVLRILEAFGYKEKDLEYQRMKQTGLGAWLKMGKK

SEQ ID NO: 1151 - protein, 773 aa, unidentified
  REGION 1..773: note = Description of Unknown: Synthetic polypeptide
MILDTDYITENGKPVIRIFKKEKGEFKIEYDRNFEPYIYALLEDDESIEDIKKITGERHGKKVRIIRVEKVKKKFLGEPIEVWKLVFEHPQDYPAIRDAIRSHPAVREIFEYDIPFAKRYLIDKGLVPMEGGEELKLLAFNIATFYHEGDEFAEGEILMISYADESGAKVITWKKIDLPYVEVVSTEREAIKRFLQVLREKDPDVLLTYNGDNFDFAYIKKRCEKLGLKFTIGRDGSEPKIQRMGDRFAVEVKGRIHLDLAPVVRHTIRLPTYTLEAVYEAVFGKKKEKVYAEEIAEAWKSEEGLKRVAQYSMEDARATYELGREFFPAEVELAKLIGQSVWDVSRSSTGNLVEWYLLRVAYERNELAPNKPGGEEYQRRMRSSYIGGYVKEPEKGLWESIAYLDFRSSAGSIIVTHNVSPDTLEKECKNYDVAPIVGYRFCKDFKGFIPSILEDLIETRQKVKRKMKATIDPIEKKMLDYRQRALKILANSYYGYQGYPKARWYSKECAESVTAWGRHYIETTIKEAEKFGFKVLYADTDGFFATIPNEKPETIKSKAKKFLKHINEKLPGMLELEYEGFYLRGFFVTKKKYALIDEDGHITTRGLEVVRRDWSEIAKETQAKVLEVILREGSIEKAAGIVKKVVEDLANYRVPVEKLIIHELITRELKRYKATGPHVAIAKRLQARGIKVKPGTIISYVVLKGSKKISDRVILFDEYDSSRHKYDPDYYIHNQVLPAVLRILEAFGYKEKDLEYQRMKQTGLGAWLKMGKK

SEQ ID NO: 1152 - protein, 773 aa, unidentified
  REGION 1..773: note = Description of Unknown: Synthetic polypeptide
MILDTDYITENGKPVIRIFKKEKGEFKIEYDRNFEPYIYALLEDDESIEDIKKITGERHGKKVRIIRVEKVKKNFLGEPIEVWKLVFEHPQDYPAIRDAIRSHPAVREIFEYDIPFAKRYLIDKGLVPMEGGEELKLLAFNIATFYHEGDEFAEGEILMISYADESGAKVITWKKIDLPYVEVVSTEREAIKRFLQVLREKDPDVLLTYNGDNFDFAYIKKRCEKLGLKFTIGRDGSEPKIQRMGDRFAVEVKGRIHLDLAPVVRHTIRLPTYTLEAVYEAVFGKKKEKVYAEEIAEAWKSEEGLKRVAQYSMEDARATYELGREFFPMEVELAKLIGQSVWDVSRSSTGNLVEWYLLRVAYERNELAPNKPGGEEYQRRMRSSYIGGYVKEPEKGLWESIAYLDFRSSAGSIIVTHNVSPDTLEKECKNYDVAPIVGYRFCKDFKGFIPSILEDLIETRQKVKRKMKATIDPIEKKMLDYRQRALKILANSYYGYQGYPKARWYSKECAESVTAWGRHYIETTIKEAEKFGFKVLYADTDGFFATIPNEKPETIKSKAKKFLKHINEKLPGMLELEYEGFYLRGFFVTKKKYALIDEDGHITTRGLEVVRRDWSEIAKETQAKVLEVILREGSIEKAAGIVKKVVEDLANYRVPVEKLIIHEQITRELKRYKATGPHVAIAKRLQARGIKVKPGTIISYVVLKGSKKISDRVILFDEYDSSRHKYDPDYYIHNQVLPAVLRILEAFGYKEKDLEYQRMKQTGLGAWLKMGKK

SEQ ID NO: 1153 - protein, 773 aa, unidentified
  REGION 1..773: note = Description of Unknown: Synthetic polypeptide
MILDTDYITENGKPVIRIFKKEKGEFKIEYDRNFEPYIYALLEDDESIEDIKKITGERHGKKVRIIRVEKVKKNFLGEPIEVWKLVFEHPQDYPAIRDAIRSHPAVREIFEYDIPFAKRYLIDKGLVPMEGGEELKLLAFAIATFYHEGDEFAEGEILMISYADESGAKVITWKKIDLPYVEVVSTEREAIKRFLQVLREKDPDVLLTYNGDNFDFAYIKKRCEKLGLKFTIGRDGSEPKIQRMGDRFAVEVKGRIHLDLAPVVRHTIRLPTYTLEAVYEAVFGKKKEKVYAEEIAEAWKSEEGLKRVAQYSMEDARATYELGREFFPMEVELAKLIGQSVWDVSRSSTGNLVEWYLLRVAYERNELAPNKPGGEEYQRRMRSSYIGGYVKEPEKGLWESIAYLDFRSSAGSIIVTHNVSPDTLEKECKNYDVAPIVGYRFCKDFKGFIPSILEDLIETRQKIKRKMKATIDPIEKKMLDYRQRALKILANSYYGYQGYPKARWYSKECAESVTAWGRHYIETTIKEAEKFGFKVLYADTDGFFATIPNEKPETIKSKAKKFLKHINEKLPGMLELEYEGFYLRGFFVTKKKYALIDEDGHITTRGLEVVRRDWSEIAKETQAKVLEVILREGSIEKAAGIVKKVVEDLANYRVPVEKLIIHEQITRELKRYKATGPHVAIAKRLQARGIKVKPGTIISYVVLKGSKKISDRVILFDEYDSSRHKYDPDYYIHNQVLPAVLRILEAFGYKEKDLEYQRMKQTGLGAWLKMGKK

SEQ ID NO: 1154 - protein, 773 aa, unidentified
  REGION 1..773: note = Description of Unknown: Synthetic polypeptide
MILDTDYITENGKPVIRIFKKEKGEFKIEYDRNFEPYIYALLEDDESIEDIKKITGERHGKKVRIIRVEKVKKKFLGEPIEVWKLVFEHPQDLPAIRDAIRSHPAVREIFEYDIPFAKRYLIDKGLVPMEGGEELKLLAFNIATFYHEGDEFAEGEILMISYADESGAKVITWKKIDLPYVEVVSTEREAIKRFLQVLREKDPDVLLTYNGDNFDFAYIKKRCEKLGLKFTIGRDGSEPKIQRMGDRFAVEVKGRIHLDLAPVVRHTIRLPTYTLEAVYEAVFGKKKEKVYAEEIAEAWKSEEGLKRVAQYSAEDARATYELGREFFPLEVELAKLIGQSVWDVSRSSTGNLVEWYLLRVAYERNELAPNKPGGEEYQRRMRSSYIGGYVKEPEKGLWESIAYLDFRSSAGSIIVTHNVSPDTLEKECKNYDVAPIVGYRFCKDFKGFIPSILEDLIETRQKVKRKMKATIDPIEKKMLDYRQRALKILANSYYGYQGYPKARWYSKECAESVTAWGRHYIETTIKEAEKFGFKVLYADTDGFFATIPNEKPETIKSKAKKFLKHINEKLPGMLELEYEGFYLRGFFVTKKKYALIDEDGHITTRGLEVVRRDWSEIAKETQAKVLEVILREGSIEKAAGIVKKVVEDLANYRVPVEKLIIHEQITRELKRYKATGPHVAIAKRLQARGIKVKPGTIISYVVLKGSKKISDRVILFDEYDSSRHKYDPDYYIHNQVLPAVLRILEAFGYKEKDLEYQRDKQTGLGAWLKMGKK

SEQ ID NO: 1155 - protein, 773 aa, unidentified
  REGION 1..773: note = Description of Unknown: Synthetic polypeptide
MILDTDYITENGKPVIRIFKKEKGEFKIEYDRNFEPYIYALLEDDESIEDIKKITGERHGKKVRIIRVEKVKKKFLGEPIEVWKLVFEHPQDVPAIRDAIRSHPAVREIFEYDIPFAKRYLIDKGLVPMEGGEELKLLAFNIETFYHEGDEFAEGEILMISYADESGAKVITWKKIDLPYVEVVSTEREAIKRFLQVLREKDPDVLLTYNGDNFDFAYIKKRCEKLGLKFTIGRDGSEPKIQRMGDRFAVEVKGRIHLDLAPVVRHTIRLPTYTLEAVYEAVFGKKKEKVYAEEIAEAWKSEEGLKRVAQYSMEDARATYELGREFFPLEVELAKLIGQSVWDVSRSSTGNLVEWYLLRVAYERNELAPNKPGGEEYQRRMRSSYIGGYVKEPEKGLWESIAYLDFRSSAGSIIVTHNVSPDTLEKECKNYDVAPIVGYRFCKDFKGFIPSILEDLIETRQKVKRKMKATIDPIEKKMLDYRQRALKILANSYYGYQGYPKARWYSKECAESVTAWGRHYIETTIKEAEKFGFKVLYADTDGFFATIPNEKPETIKSKAKKFLKHINEKLPGMLELEYEGFYLRGFFVTKKKYALIDEDGHITTRGLEVVRRDWSEIAKETQAKVLEVILREGSIEKAAGIVKKVVEDLANYRVPVEKLIIHELITRELKRYKATGPHVAIAKRLQARGIKVKPGTIISYVVLKGSKKISDRVILFDEYDSSRHKYDPDYYIHNQVLPAVLRILEAFGYKEKDLEYQRMKQTGLGAWLKMGKK

SEQ ID NO: 1156 - protein, 773 aa, unidentified
  REGION 1..773: note = Description of Unknown: Synthetic polypeptide
MILDTDYITENGKPVIRIFKKEKGEFKIEYDRNFEPYIYALLEDDESIEDIKKITGERHGKKVRIIRVEKVKKKFLGEPIEVWKLVFEHPQDYPAIRDAIRSHPAVREIFEYDIPFANRYLIDKGLVPMEGGEELKLLAFAIATFYHEGDEFAEGEILMISYADESGAKVITWKKIDLPYVEVVSTEREAIKRFLQVLREKDPDVLLTYNGDNFDFAYIKKRCEKLGLKFTIGRDGSEPKIQRMGDRFAVEVKGRIHLDLAPVVRHTIRLPTYTLEAVYEAVFGKKKEKVYAEEIAEAWKSEEGLKRVAQYSMEDARATYELGREFFPMEVELAKLIGQSVWDVSRSSTGNLVEWYLLRVAYERNELAPNKPGGEEYQRRMRSSYIGGYVKEPEKGLWESIAYLDFRSSAGSIIVTHNVSPDTLEKECKNYDVAPIVGYRFCKDFKGFIPSILEDLIETRQKVKRKMKATIDPIEKKMLDYRQRALKILANSYYGYQGYPKARWYSKECAESVTAWGRHYIETTIKEAEKFGFKVLYADTDGFFATIPNEKPETIKSKAKKFLKHINEKLPGMLELEYEGFYLRGFFVTKKKYALIDEDGHITTRGLEVVRRDWSEIAKETQAKVLEVILREGSIEKAAGIVKKVVEDLANYRVPVEKLIIHEQITRELKRYKATGPHVAIAKRLQARGIKVKPGTIISYVVLKGSKKISDRVILFDEYDSSRHKYDPDYYIHNQVLPAVLRILEAFGYKEKDLEYQRMKQTGLGAWLKMGKK

SEQ ID NO: 1157 - protein, 773 aa, unidentified
  REGION 1..773: note = Description of Unknown: Synthetic polypeptide
MILDTDYITENGKPVIRIFKKEKGEFKIEYDRNFEPYIYALLEDDESIEDIKKITGERHGKKVRIIRVEKVKKKFLGEPIEVWKLVFEHPQDVPAIRDAIRSHPAVREIFEYDIPFAKRYLIDKGLVPMEGGEELKLLAFNIATFYHEGDEFAEGEILMISYADESGAKVITWKKIDLPYVEVVSTEREAIKRFLQVLREKDPDVLLTYNGDNFDFAYIKKRCEKLGLKFTIGRDGSEPKIQRMGDRFAVEVKGRIHLDLAPVVRHTIRLPTYTLEAVYEAVFGKKKEKVYAEEIAEAWKSEEGLKRVAQYSAEDARATYELGREFFPLEVELAKLIGQSVWDVSRSSTGNLVEWYLLRVAYERNELAPNKPGGEEYQRRMRSSYIGGYVKEPEKGLWESIAYLDFRSSAGSIIVTHNVSPDTLEKECKNYDVAPIVGYRFCKDFKGFIPSILEDLIETRQKVKRKMKATIDPIEKKMLDYRQRALKILANSYYGYQGYPKARWYSKECAESVTAWGRHYIETTIKEAEKFGFKVLYADTDGFFATIPNEKPETIKSKAKKFLKHINEKLPGMLELEYEGFYLRGFFVTKKKYALIDEDGHITTRGLEVVRRDWSEIAKETQAKVLEVILREGSIEKAAGIVKKVVEDLANYRVPVEKLIIHEFITRELKRYKATGPHVAIAKRLQARGIKVKPGTIISYVVLKGSKKISDRVILFDEYDSSRHKYDPDYYIHNQVLPAVLRILEAFGYKEKDLEYQRDKQTGLGAWLKMGKK

SEQ ID NO: 1158 - protein, 773 aa, unidentified
  REGION 1..773: note = Description of Unknown: Synthetic polypeptide
MILDTDYITENGKPVIRIFKKEKGEFKIEYDRNFEPYIYALLEDDESIEDIKKITGERHGKKVRIIRVEKVKKKFLGEPIEVWKLVFEHPQDVPAIRDAIRSHPAVREIFEYDIPFAKRYLIDKGLVPMEGGEELKLLAFNIATFYHEGDEFAEGEILMISYADESGAKVITWKKIDLPYVEVVSTEREAIKRFLQVLREKDPDVLLTYNGDNFDFAYIKKRCEKLGLKFTIGRDGSEPKIQRMGDRFAVEVKGRIHLDLAPVVRHTIRLPTYTLEAVYEAVFGKKKEKVYAEEIAEAWKSEEGLARVAQYSMEDARATYELGREFFPIEVELAKLIGQSVWDVSRSSTGNLVEWYLLRVAYERNELAPNKPGGEEYQRRMRSSYIGGYVKEPEKGLWESIAYLDFRSSAGSIIVTHNVSPDTLEKECKNYDVAPIVGYRFCKDFKGFIPSILEDLIETRQKVKRKMKATIDPIEKKMLDYRQRALKILANSYYGYQGYPKARWYSKECAESVTAWGRHYIETTIKEAEKFGFKVLYADTDGFFATIPNEKPETIKSKAKKFLKHINEKLPGMLELEYEGFYLRGFFVTKKKYALIDEDGHITTRGLEVVRRDWSEIAKETQAKVLEVILREGSIEKAAGIVKKVVEDLANYRVPVEKLIIHEQITRELKRYKATGPHVAIAKRLQARGIKVKPGTIISYVVLKGSKKISDRVILFDEYDSSRHKYDPDYYIHNQVLPAVLRILEAFGYKEKDLEYQRDKQTGLGAWLKMGKK

SEQ ID NO: 1159 - protein, 773 aa, unidentified
  REGION 1..773: note = Description of Unknown: Synthetic polypeptide
MILDTDYITENGKPVIRIFKKEKGEFKIEYDRNFEPYIYALLEDDESIEDIKKITGERHGKKVRIIRVEKVKKKFLGEPIEVWKLVFEHPQDFPAIRDAIRSHPAVREIFEYDIPFAKRYLIDKGLVPMEGGEELKLLAFNIATFYHEGDEFAEGEILMISYADESGAKVITWKKIDLPYVEVVSTEREAIKRFLQVLREKDPDVLLTYNGDNFDFAYIKKRCEKLGLKFTIGRDGSEPKIQRMGDRFAVEVKGRIHLDLAPVVRHTIRLPTYTLEAVYEAVFGKKKEKVYAEEIAEAWKSEEGLKRVAQYSMEDARATYELGREFFPMEVELAKLIGQSVWDVSRSSTGNLVEWYLLRVAYERNELAPNKPGGEEYQRRMRSSYIGGYVKEPEKGLWESIAYLDFRSSAGSIIVTHNVSPDTLEKECKNYDVAPIVGYRFCKDFKGFIPSILEDLIETRQKVKRKMKATIDPIEKKMLDYRQRALKILANSYYGYQGYPKARWYSKECAESVTAWGRHYIETTIKEAEKFGFKVLYADTDGFFATIPNEKPETIKSKAKKFLKHINEKLPGMLELEYEGFYLRGFFVTKKKYALIDEDGHITTRGLEVVRRDWSEIAKETQAKVLEVILREGSIEKAAGIVKKVVEDLANYRVPVEKLIIHEQITRELKRYKATGPHVAIAKRLQARGIKVKPGTIISYVVLKGSKKISDRVILFDEYDSSRHKYDPDYYIHNQVLPAVLRILEAFGYKEKDLEYQRMKQTGLGAWLKMGKK

SEQ ID NO: 1160 - protein, 773 aa, unidentified
  REGION 1..773: note = Description of Unknown: Synthetic polypeptide
MILDTDYITENGKPVIRIFKKEKGEFKIEYDRNFEPYIYALLEDDESIEDIKKITGERHGKKVRIIRVEKVKKNFLGEPIEVWKLVFEHPQDYPAIRDAIRSHPAVREIFEYDIPFAKRYLIDKGLVPMEGGEELKLLAFNIATFYHEGDEFAEGEILMISYADESGAKVITWKKIDLPYVEVVSTEREAIKRFLQVLREKDPDVLLTYNGDNFDFAYIKKRCEKLGLKFTIGRDGSEPKIQRMGDRFAVEVKGRIHLDLAPVVRHTIRLPTYTLEAVYEAVFGKKKEKVYAEEIAEAWKSEEGLARVAQYSVEDARATYELGREFFPMEVELAKLIGQSVWDVSRSSTGNLVEWYLLRVAYERNELAPNQPGGEEYQRRMRSSYIGGYVKEPEKGLWESIAYLDFRSSAGSIIVTHNVSPDTLEKECKNYDVAPEVGYRFCKDFKGFIPSILEDLIETRQKVKRKMKATIDPIEKKMLDYRQRALKILANSYYGYQGYPKARWYSKECAESVTAWGRHYIETTIKEAEKFGFKVLYADTDGFFATIPNEKPETIKSKAKKFLKHINEKLPGMLELEYEGFYLRGFFVTKKKYALIDEDGHITTRGLEVVRRDWSEIAKETQAKVLEVILREGSIEKAAGIVKKVVEDLANYRVPVEKLIIHEQITRELKRYKATGPHVAIAKRLQARGIKVKPGTIISYVVLKGSKKISDRVILFDEYDSSRHKYDPDYYIHNQVLPAVLRILEAFGYKEKDLEYQRDKQTGLGAWLKMGKK

SEQ ID NO: 1161 - protein, 773 aa, unidentified; identical to SEQ ID NO: 740
  REGION 1..773: note = Description of Unknown: Synthetic polypeptide

SEQ ID NO: 1162 - protein, 773 aa, unidentified
  REGION 1..773: note = Description of Unknown: Synthetic polypeptide
MILDTDYITENGKPVIRIFKKEKGEFKIEYDRNFEPYIYALLEDDESIEDIKKITGERHGKKVRIIRVEKVKKKFLGEPIEVWKLVFEHPQDYPAIRDAIRSHPAVREIFEYDIPFAKRYLIDKGLVPMEGGEELKLLAFAIATFYHEGDEFAEGEILMISYADESGAKVITWKKIDLPYVEVVSTEREAIKRFLQVLREKDPDVLLTYNGDNFDFQYIKKRCEKLGLKFTIGRDGSEPKIQRMGDRFAVEVKGRIHLDLAPVVRHTIRLPTYTLEAVYEAVFGKKKEKVYAEEIAEAWKSEEGLARVAQYSVEDARATYELGREFFPMEVELAKLIGQSVWDVSRSSTGNLVEWYLLRVAYERNELAPNQPGGEEYQRRMRSSYIGGYVKEPEKGLWESIAYLDFRSSAGSIIVTHNVSPDTLEKECKNYDVAPIVGYRFCKDFKGFIPSILEDLIETRQKVKRKMKATIDPIEKKMLDYRQRALKILANSYYGYQGYPKARWYSKECAESVTAWGRHYIETTIKEAEKFGFKVLYADTDGFFATIPNEKPETIKSKAKKFLKHINEKLPGMLELEYEGFYLRGFFVTKKKYALIDEDGHITTRGLEVVRRDWSEIAKETQAKVLEVILREGSIEKAAGIVKKVVEDLANYRVPVEKLIIHEQITRELKRYKATGPHVAIAKRLQARGIKVKPGTIISYVVLKGSKKISDRVILFDEYDSSRHKYDPDYYIHNQVLPAVLRILEAFGYKEKDLEYQRDKQTGLGAWLKMGKK

SEQ ID NO: 1163 - protein, 773 aa, unidentified
  REGION 1..773: note = Description of Unknown: Synthetic polypeptide
MILDTDYITENGKPVIRIFKKEKGEFKIEYDRNFEPYIYALLEDDESIEDIKKITGERHGKKVRIIRVEKVKKKFLGEPIEVWKLVFEHPQDVPAIRDAIRSHPAVREIFEYDIPFAKRYLIDKGLVPMEGGEELKLLAFNIATFEHEGDEFAEGEILMISYADESGAKVITWKKIDLPYVEVVSTEREAIKRFLQVLREKDPDVLLTYNGDNFDFAYIKKRCEKLGLKFTIGRDGSEPKIQRMGDRFAVEVKGRIHLDLAPVVRHTIRLPTYTLEAVYEAVFGKKKEKVYAEEIAEAWKSEEGLKRVAQYSMEDARATYELGREFFPLEVELAKLIGQSVWDVSRSSTGNLVEWYLLRVAYERNELAPNKPGGEEYQRRMRSSYIGGYVKEPEKGLWESIAYLDFRSSAGSIIVTHNVSPDTLEKECKNYDVAPIVGYRFCKDFKGFIPSILEDLIETRQKVKRKMKATIDPIEKKMLDYRQRALKILANSYYGYQGYPKARWYSKECAESVTAWGRHYIETTIKEAEKFGFKVLYADTDGFFATIPNEKPETIKSKAKKFLKHINEKLPGMLELEYEGFYLRGFFVTKKKYALIDEDGHITTRGLEVVRRDWSEIAKETQAKVLEVILREGSIEKAAGIVKKVVEDLANYRVPVEKLIIHELITRELKRYKATGPHVAIAKRLQARGIKVKPGTIISYVVLKGSKKISDRVILFDEYDSSRHKYDPDYYIHNQVLPAVLRILEAFGYKEKDLEYQRDKQTGLGAWLKMGKK

SEQ ID NO: 1164 - protein, 766 aa, unidentified
  REGION 1..766: note = Description of Unknown: Synthetic polypeptide
MILDTDYITENGKPVIRIFKKEKGEFKIEYDRNFEPYIYALLEDDESIEDIKKITGERHGKKVRIIRVEKVKKKFLGEPIEVWKLVFEHPQDVPAIRDAIRSHPAVREIFEYDIPFAKRYLIDKGLVPMEGGEELKLLAFNIATFYHEGDEFAEGEILMISYADESGAKVITWKKIDLPYVEVVSTEREAIKRFLQVLREKDPDVLLTYNGDNFDFAYIKKRCEKLGLKFTIGRDGSEPKIQRMGDRFAVEVKGRIHLDLAPVVRHTIRLPTYTLEAVYEAVFGKKKEKVYAEEIAEAWKSEEGLKRVAQYSMEDARATYELGREFFPLEVELAKLIGQSVWDVSRSSTGNLVEWYLLRVAYERNELAPNKPGGEEYQRRMRSSYIGGYVKEPEKGLWESIAYLDFRSSAGSIIVTHNVSPDTLEKECKNYDVAPIVGYRFCKDFKGFIPSILEDLIETRQKVKRKMKATIDPIEKKMLDYRQRALKILANSYYGYQGYPKARWYSKECAESVTAWGRHYIETTIKEAEKFGFKVLYADTDGFFATIPNEKPETIKSKAKKFLKHINEKLPGMLELEYEGFYLRGFFVTKKKYALIDEDGHITTRGLEVVRRDWSEIAKETQAKVLEVILREGSIEKAAGIVKKVVEDLANYRVPVEKLIIHEFITRELKRYKATGPHVAIAKRLQARGIKVKPGTIISYVVLKGSKKISDRVILFDEYDSSRHKYDPDYYIHNQVLPAVLRILEAFGYKEKDLEYQRDKQTGLGA

SEQ ID NO: 1165 - protein, 773 aa, unidentified
  REGION 1..773: note = Description of Unknown: Synthetic polypeptide
MILDTDYITENGKPVIRIFKKEKGEFKIEYDRNFEPYIYALLEDDESIEDIKKITGERHGKKVRIIRVEKVKKKFLGEPIEVWKLVFEHPQDVPAIRDAIRSHPAVREIFEYDIPFAKRYLIDKGLVPMEGGEELKLLAFNIATFYHEGDEFAEGEILMISYADESGAKVITWKKIDLPYVEVVSTEREAIKRFLQVLREKDPDVLLTYNGDNFDFAYIKKRCEKLGLKFTIGRDGSEPKIQRMGDRFAVEVKGRIHLDLAPVVRHTIRLPTYTLEAVYEAVFGKKKEKVYAEEIAEAWKSEEGLARVAQYSMEDARATYELGREFFPLEVELAKLIGQSVWDVSRSSTGNLVEWYLLRVAYERNELAPNKPGGEEYQRRMRSSYIGGYVKEPEKGLWESIAYLDFRSSAGSIIVTHNVSPDTLEKECKNYDVAPIVGYRFCKDFKGFIPSILEDLIETRQKVKRKMKATIDPIEKKMLDYRQRALKILANSYYGYQGYPKARWYSKECAESVTAWGRHYIETTIKEAEKFGFKVLYADTDGFFATIPNEKPETIKSKAKKFLKHINEKLPGMLELEYEGFYLRGFFVTKKKYALIDEDGHITTRGLEVVRRDWSEIAKETQAKVLEVILREGSIEKAAGIVKKVVEDLANYRVPVEKLIIHEQITRRLKRYKATGPHVAIAKRLQARGIKVKPGTIISYVVLKGSKKISDRVILFDEYDSSRHKYDPDYYIHNQVLPAVLRILEAFGYKEKDLEYQRDKQTGLGAWLKMGKK

SEQ ID NO: 1166 - protein, 773 aa, unidentified
  REGION 1..773: note = Description of Unknown: Synthetic polypeptide
MILDTDYITENGKPVIRIFKKEKGEFKIEYDRNFEPYIYALLEDDESIEDIKKITGERHGKKVRIIRVEKVKKKFLGEPIEVWKLVFEHPQDYPAIRDAIRSHPAVREIFEYDIPFAKRYLIDKGLVPMEGGEELKLLAFNIATFYHEGDEFAEGEILMISYADESGAKVITWKKIDLPYVEVVSTEREAIKRFLQVLREKDPDVLLTYNGDNFDFAYIKKRCEKLGLKFTIGRDGSEPKIQRMGDRFAVEVKGRIHLDLAPVVRHTIRLPTYTLEAVYEAVFGKKKEKVYAEEIAEAWKSEEGLKRVAQYSMEDARATYELGREFFPLEVELAKLIGQSVWDVSRSSTGNLVEWYLLRVAYERNELAPNKPGGEEYQRRMRSSYIGGYVKEPEKGLWESIAYLDFRSLAGSIIVTHNVSPDTLEKECKNYDVAPIVGYRFCKDFKGFIPSILEDLIETRQKVKRKMKATIDPIEKKMLDYRQRALKILANSYYGYQGYPKARWYSKECAESVTAWGRHYIETTIKEAEKFGFKVLYADTDGFFATIPNEKPETIKSKAKKFLKHINEKLPGMLELEYEGFYLRGFFVTKKKYALIDEDGHITTRGLEVVRRDWSEIAKETQAKVLEVILREGSIEKAAGIVKKVVEDLANYRVPVEKLIIHEQITRELKRYKATGPHVAIAKRLQARGIKVKPGTIISYVVLKGSKKISDRVILFDEYDSSRHKYDPDYYIHNQVLPAVLRILEAFGYKEKDLEYQRMKQTGLGAWLKMGKK

SEQ ID NO: 1167 - protein, 773 aa, unidentified
  REGION 1..773: note = Description of Unknown: Synthetic polypeptide
MILDTDYITENGKPVIRIFKKEKGEFKIEYDRNFEPYIYALLEDDESIEDIKKITGERHGKKVRIIRVEKVKKKFLGEPIEVWKLVFEHPQDYPAIRDAIRSHPAVREIFEYDIPFAKRYLIDKGLVPMEGGEELKLLAFAIATFYHEGDEFAEGEILMISYADESGAKVITWKKIDLPYVEVVSTEREAIKRFLQVLREKDPDVLLTYNGDNFDFAYIKKRCEKLGLKFTIGRDGSEPKIVRMGDRFAVEVKGRIHLDLAPVVRHTIRLPTYTLEAVYEAVFGKKKEKVYAEEIAEAWKSEEGLKRVAQYSMEDARATYELGREFFPMEVELAKLIGQSVWDVSRSSTGNLVEWYLLRVAYERNELAPNKPGGEEYQRRMRSSYIGGYVKEPEKGLWESIAYLDFRSSAGSIIVTHNVSPDTLEKECKNYDVAPIVGYRFCKDFKGFIPSILEDLIETRQKVKRKMKATIDPIEKKMLDYRQRALKILANSYYGYQGYPKARWYSKECAESVTAWGRHYIETTIKEAEKFGFKVLYADTDGFFATIPNEKPETIKSKAKKFLKHINEKLPGMLELEYEGFYLRGFFVTKKKYALIDEDGHITTRGLEVVRRDWSEIAKETQAKVLEVILREGSIEKAAGIVKKVVEDLANYRVPVEKLIIHEQITRELKRYKATGPHVAIAKRLQARGIKVKPGTIISYVVLKGSKKISDRVILFDEYDSSRHKYDPDYYIHNQVLPAVLRILEAFGYKEKDLEYQRMKQTGLGAWLKMGKK

SEQ ID NO: 1168 - protein, 773 aa, unidentified
  REGION 1..773: note = Description of Unknown: Synthetic polypeptide
MILDTDYITENGKPVIRIFKKEKGEFKIEYDRNFEPYIYALLEDDESIEDIKKITGERHGKKVRIIRVEKVKKKFLGEPIEVWKLVFEHPQDFPAIRDAIRSHPAVREIFEYDIPFAKRYLIDKGLVPMEGGEELKLLAFNIATFYHEGDEFAEGEILMISYADESGAKVITWKKIDLPYVEVVSTEREAIKRFLQVLREKDPDVLLTYNGDNFDFAYIKKRCEKLGLKFTIGRDGSEPKIQRMGDRFAVEVKGRIHLDLAPVVRHTIRLPTYTLEAVYEAVFGKKKEKVYAEEIAEAWKSEEGLKRVAQYSAEDARATYELGREFFPLEVELAKLIGQSVWDVSRSSTGNLVEWYLLRVAYERNELAPNKPGGEEYQRRMRSSYIGGYVKEPEKGLWESIAYLDFRSSAGSIIVTHNVSPDTLEKECKNYDVAPIVGYRFCKDFKGFIPSILEDLIETRQKVKRKMKATIDPIEKKMLDYRQRALKILANSYYGYQGYPKARWYSKECAESVTAWGRHYIETTIKEAEKFGFKVLYADTDGFFATIPNEKPETIKSKAKKFLKHINEKLPGMLELEYEGFYLRGFFVTKKKYALIDEDGHITTRGLEVVRRDWSEIAKETQAKVLEVILREGSIEKAAGIVKKVVEDLANYRVPVEKLIIHEQITRELKRYKATGPHVAIAKRLQARGIKVKPGTIISYVVLKGSKKISDRVILFDEYDSSRHKYDPDYYIHNQVLPAVLRILEAFGYKEKDLEYQRDKQTGLGAWLKMGKK

SEQ ID NO: 1169 - protein, 773 aa, unidentified
  REGION 1..773: note = Description of Unknown: Synthetic polypeptide
MILDTDYITENGKPVIRIFKKEKGEFKIEYDRNFEPYIYALLEDDESIEDIKKITGERHGKKVRIIRVEKVKKKFLGEPIEVWKLVFEHPQDYPAIRDAIRSHPAVREIFEYDIPFAKRYLIDKGLVPMEGGEELKLLAFAIATFYHEGDEFAEGEILMISYADESGAKVITWKKIDLPYVEVVSTEREAIKRFLQVLREKDPDVLLTYNGDNFDFAYIKKRCEKLGLKFTIGRDGSEPKIQRMGDRFAVEVKGRIHLDLAPVVRHTIRLPTYTLEAVYEAVFGKKKEKVYAEEIAEAWKSEEGLARVAQYSMEDARATYELGREFFPMEVELAKLIGQSVWDVSRSSTGNLVEFYLLRVAYERNELAPNKPGGEEYQRRMRSSYIGGYVKEPEKGLWESIAYLDFRSSAGSIIVTHNVSPDTLEKECKNYDVAPIVGYRFCKDFKGFIPSILEDLIETRQKVKRKMKATIDPIEKKMLDYRQRALKILANSYYGYQGYPKARWYSKECAESVTAWGRHYIETTIKEAEKFGFKVLYADTDGFFATIPNEKPETIKSKAKKFLKHINEKLPGMLELEYEGFYLRGFFVTKKKYALIDEDGHITTRGLEVVRRDWSEIAKETQAKVLEVILREGSIEKAAGIVKKVVEDLANYRVPVEKLIIHEQITRELKRYKATGPHVAIAKRLQARGIKVKPGTIISYVVLKGSKKISDRVILFDEYDSSRHKYDPDYYIHNQVLPAVLRILEAFGYKEKDLEYQRDKQTGLGAWLKMGKK

SEQ ID NO: 1170 - protein, 773 aa, unidentified
  REGION 1..773: note = Description of Unknown: Synthetic polypeptide
MILDTDYITENGKPVIRIFKKEKGEFKIEYDRNFEPYIYALLEDDESIEDIKKITGERHGKKVRIIRVEKVKKNFLGEPIEVWKLVFEHPQDYPAIRDAIRSHPAVREIFEYDIPFAKRYLIDKGLVPMEGGEELKLLAFAIATFYHEGDEFAEGEILMISYADESGAKVITWKKIDLPYVEVVSTEREAIKRFLQVLREKDPDVLLTYNGDNFDFQYIKKRCEKLGLKFTIGRDGSEPKIQRMGDRFAVEVKGRIHLDLAPVVRHTIRLPTYTLEAVYEAVFGKKKEKVYAEEIAEAWKSEEGLKRVAQYSMEDARATYELGREFFPMEVELAKLIGQSVWDVSRSSTGNLVEWYLLRVAYERNELAPNKPGGEEYQRRMRSSYIGGYVKEPEKGLWESIAYLDFRSSAGSIIVTHNVSPDTLEKECKNYDVAPIVGYRFCKDFKGFIPSILEDLIETRQKVKRKMKATIDPIEKKMLDYRQRALKILANSYYGYQGYPKARWYSKECAESVTAWGRHYIETTIKEAEKFGFKVLYADTDGFFATIPNEKPETIKSKAKKFLKHINEKLPGMLELEYEGFYLRGFFVTKKKYALIDEDGHITTRGLEVVRRDWSEIAKETQAKVLEVILREGSIEKAAGIVKKVVEDLANYRVPVEKLIIHEQITRELKRYKATGPHVAIAKRLQARGIKVKPGTIISYVVLKGSKKISDRVILFDEYDSSRHKYDPDYYIHNQVLPAVLRILEAFGYKEKDLEYQRMKQTGLGAWLKMGKK

SEQ ID NO: 1171 - protein, 773 aa, unidentified
  REGION 1..773: note = Description of Unknown: Synthetic polypeptide
MILDTDYITENGKPVIRIFKKEKGEFKIEYDRNFEPYIYALLEDDESIEDIKKITGERHGKKVRIIRVEKVKKKFLGEPIEVWKLVFEHPQDYPAIRDAIRSHPAVREIFEYDIPFAKRYLIDKGLVPMEGGEELKLLAFNIETFYHEGDEFAEGEILMISYADESGAKVITWKKIDLPYVEVVSTEREAIKRFLQVLREKDPDVLLTYNGDNFDFAYIKKRCEKLGLKFTIGRDGSEPKIQRMGDRFAVEVKGRIHLDLAPVVRHTIRLPTYTLEAVYEAVFGKKKEKVYAEEIAEAWKSEEGLKRVAQYSMEDARATYELGREFFPLEVELAKLIGQSVWDVSRSSTGNLVEWYLLRVAYERNELAPNKPGGEEYQRRMRSSYIGGYVKEPEKGLWESIAYLDFRSSAGSIIVTHNVSPDTLEKECKNYDVAPIVGYRFCKDFKGFIPSILEDLIETRQKVKRKMKATIDPIEKKMLDYRQRALKILANSYYGYQGYPKARWYSKECAESVTAWGRHYIETTIKEAEKFGFKVLYADTDGFFATIPNEKPETIKSKAKKFLKHINEKLPGMLELEYEGFYLRGFFVTKKKYALIDEDGHITTRGLEVVRRDWSEIAKETQAKVLEVILREGSIEKAAGIVKKVVEDLANYRVPVEKLIIHELITRELKRYKATGPHVAIAKRLQARGIKVKPGTIISYVVLKGSKKISDRVILFDEYDSSRHKYDPDYYIHNQVLPAVLRILEAFGYKEKDLEYQRMKQTGLGAWLKMGKK

SEQ ID NO: 1172 - protein, 773 aa, unidentified
  REGION 1..773: note = Description of Unknown: Synthetic polypeptide
MILDTDYITENGKPVIRIFKKEKGEFKIEYDRNFEPYIYALLEDDESIEDIKKITGERHGKKVRIIRVEKVKKKFLGEPIEVWKLVFEHPQDYPAIRDAIRSHPAVREIFEYDIPFAKRYLIDKGLVPMEGGEELKLLAFAIATFYHEGDEFAEGEILMISYADESGAKVITWKKIDLPYVEVVSTEREAIKRFLQVLREKDPDVLLTYNGDNFDFAYIKKRCEKLGLKFTIGRDGSEPKIQRMGDRFAVEVKGRIHLDLAPVVRHTIRLPTYTLEAVYEAVFGKKKEKVYAEEIAEAWKSEEGLKRVAQYSMEDARATYELGREFFPMEVELAKLIGQSVWDVSRSSTGNLVEWYLLRVAYERNELAPNKPGGEEYQRRMRSSYIGGYVKEPEKGLWESIAYLDFRSSAGSIIVTHNVSPDTLEKRCKNYDVAPIVGYRFCKDFKGFIPSILEDLIETRQKVKRKMKATIDPIEKKMLDYRQRALKILANSYYGYQGYPKARWYSKECAESVTAWGRHYIETTIKEAEKFGFKVLYADTDGFFATIPNEKPETIKSKAKKFLKHINEKLPGMLELEYEGFYLRGFFVTKKKYALIDEDGHITTRGLEVVRRDWSEIAKETQAKVLEVILREGSIEKAAGIVKKVVEDLANYRVPVEKLIIHEQITRELKRYKATGPHVAIAKRLQARGIKVKPGTIISYVVLKGSKKISDRVILFDEYDSSRHKYDPDYYIHNQVLPAVLRILEAFGYKEKDLEYQRMKQTGLGAWLKMGKK

SEQ ID NO: 1173 - protein, 773 aa, unidentified; identical to SEQ ID NO: 782
  REGION 1..773: note = Description of Unknown: Synthetic polypeptide

SEQ ID NO: 1174 - protein, 773 aa, unidentified
  REGION 1..773: note = Description of Unknown: Synthetic polypeptide
MILDTDYITENGKPVIRIFKKEKGEFKIEYDRNFEPYIYALLEDDESIEDIKKITGERHGKKVRIIRVEKVKKKFLGEPIEVWKLVFEHPQDYPAIRDAIRSHPAVREIFEYDIPFAKRYLIDKGLVPMEGGEELKLLAFAIATFYHEGDEFAEGEILMISYADESGAKVITWKKIDLPYVEVVSTEREAIKRFLQVLREKDPDVLLTYNGDNFDFAYIKKRCEKLGLKFTIGRDGSEPKIQRMGDRFAVEVKGRIHLDLAPVVRHTIRLPTYTLEAVYEAVFGKKKEKVYAEEIAEAWKSEEGLARVAQYSVEDARATYELGREFFPMEVELAKLIGQSVWDVSRSSTGNLVEWYLLRVAYERNELAPNQPGGEEYQRRMRSSYIGGYVKEPEKGLWESIAYLDFRSSAGSIIVTHNVSPDTLEKECKNYDVAPEVGYRFCKDFKGFIPSILEDLIETRQKVKRKMKATIDPIEKKMLDYRQRALKILANSYYGYQGYPKARWYSKECAESVTAWGRHYIETTIKEAEKFGFKVLYADTDGFFATIPNEKPETIKSKAKKFLKHINEKLPGMLELEYEGFYLRGFFVTKKKYALIDEDGHITTRGLEVVRRDWSEIAKETQAKVLEVILREGSIEKAAGIVKKVVEDLANYRVPVEKLIIHEQITRELKRYKATGPHVAIAKRLQARGIKVKPGTIISYVVLKGSKKISDRVILFDEYDSSRHKYDPDYYIHNQVLPAVLRILEAFGYKEKDLEYQRDKQTGLGAWLKMGKK

SEQ ID NO: 1175 - protein, 766 aa, unidentified
  REGION 1..766: note = Description of Unknown: Synthetic polypeptide
MILDTDYITENGKPVIRIFKKEKGEFKIEYDRNFEPYIYALLEDDESIEDIKKITGERHGKKVRIIRVEKVKKKFLGEPIEVWKLVFEHPQDVPAIRDAIRSHPAVREIFEYDIPFAKRYLIDKGLVPMEGGEELKLLAFNIATFYHEGDEFAEGEILMISYADESGAKVITWKKIDLPYVEVVSTEREAIKRFLQVLREKDPDVLLTYNGDNFDFAYIKKRCEKLGLKFTIGRDGSEPKIQRMGDRFAVEVKGRIHLDLAPVVRHTIRLPTYTLEAVYEAVFGKKKEKVYAEEIAEAWKSEEGLKRVAQYSMEDARATYELGREFFPAEVELAKLIGQSVWDVSRSSTGNLVEWYLLRVAYERNELAPNKPGGEEYQRRMRSSYIGGYVKEPEKGLWESIAYLDFRSSAGSIIVTHNVSPDTLEKECKNYDVAPIVGYRFCKDFKGFIPSILEDLIETRQKVKRKMKATIDPIEKKMLDYRQRALKILANSYYGYQGYPKARWYSKECAESVTAWGRHYIETTIKEAEKFGFKVLYADTDGFFATIPNEKPETIKSKAKKFLKHINEKLPGMLELEYEGFYLRGFFVTKKKYALIDEDGHITTRGLEVVRRDWSEIAKETQAKVLEVILREGSIEKAAGIVKKVVEDLANYRVPVEKLIIHEQITRELKRYKATGPHVAIAKRLQARGIKVKPGTIISYVVLKGSKKISDRVILFDEYDSSRHKYDPDYYIHNQVLPAVLRILEAFGYKEKDLEYQRDKQTGLGA

SEQ ID NO: 1176 - protein, 773 aa, unidentified
  REGION 1..773: note = Description of Unknown: Synthetic polypeptide
MILDTDYITENGKPVIRIFKKEKGEFKIEYDRNFEPYIYALLEDDESIEDIKKITGERHGKKVRIIRVEKVKKKFLGEPIEVWKLVFEHPQDYPAIRDAIRSHPAVREIFEYDIPFAKRYLIDKGLVPMEGGEELKLLAFAIATFYHEGDEFAEGEILMISYADESGAKVITWKKIDLPYVEVVSTEREAIKRFLQVLREKDPDVLLTYNGDNFDFAYIKKRCEKLGLKFTIGRDGSEPKIQRMGDRFAVEVKGRIHLDLAPVVRHTIRLPTYTLEAVYEAVFGKKKEKVYAEEIAEAWKSEEGLKRVAQYSMEDARATYELGREFFPMEVELAKLIGQSVWDVSRSSTGNLVEWYLLRVAYERNELAPNKPGGEEYQRRMRSSYIGGYVKEPEKGLWESIAYLDFRSSAGSIIVTFNVSPDTLEKECKNYDVAPIVGYRFCKDFKGFIPSILEDLIETRQKVKRKMKATIDPIEKKMLDYRQRALKILANSYYGYQGYPKARWYSKECAESVTAWGRHYIETTIKEAEKFGFKVLYADTDGFFATIPNEKPETIKSKAKKFLKHINEKLPGMLELEYEGFYLRGFFVTKKKYALIDEDGHITTRGLEVVRRDWSEIAKETQAKVLEVILREGSIEKAAGIVKKVVEDLANYRVPVEKLIIHEQITRELKRYKATGPHVAIAKRLQARGIKVKPGTIISYVVLKGSKKISDRVILFDEYDSSRHKYDPDYYIHNQVLPAVLRILEAFGYKEKDLEYQRMKQTGLGAWLKMGKK

SEQ ID NO: 1177 - protein, 773 aa, unidentified
  REGION 1..773: note = Description of Unknown: Synthetic polypeptide
MILDTDYITENGKPVIRIFKKEKGEFKIEYDRNFEPYIYALLEDDESIEDIKKITGERHGKKVRIIRVEKVKKKFLGEPIEVWKLVFEHPQDYPAIRDAIRSHPAVREIFEYDIPFAKRYLIDKGLVPMEGGEELKLLAFAIATFYHEGDEFAEGEILMISYADESGAKVITWKKIDLPYVEVVSTEREAIKRFLQVLREKDPDVLLTYNGDNFDFAYIKKRCEKLGLKFTIGRDGSEPKIQRMGDRFAVEVKGRIHLDLAPVVRHTIRLPTYTLEAVYEAVFGKKKEKVYAEEIAEAWKSEEGLKRVAQYSMEDARATYELGREFFPMEVELAKLIGQSVWDVSRSSTGNLVEWYLLRVAYERNELAPNKPGGEEYQRRMRSSYIGGYVKEPEKGLWESIAYLDFRSMFGSIIVTHNVSPDTLEKECKNYDVAPIVGYRFCKDFKGFIPSILEDLIETRQKVKRKMKATIDPIEKKMLDYRQRALKILANSYYGYQGYPKARWYSKECAESVTAWGRHYIETTIKEAEKFGFKVLYADTDGFFATIPNEKPETIKSKAKKFLKHINEKLPGMLELEYEGFYLRGFFVTKKKYALIDEDGHITTRGLEVVRRDWSEIAKETQAKVLEVILREGSIEKAAGIVKKVVEDLANYRVPVEKLIIHEQITRELKRYKATGPHVAIAKRLQARGIKVKPGTIISYVVLKGSKKISDRVILFDEYDSSRHKYDPDYYIHNQVLPAVLRILEAFGYKEKDLEYQRMKQTGLGAWLKMGKK

SEQ ID NO: 1178 - protein, 773 aa, unidentified
  REGION 1..773: note = Description of Unknown: Synthetic polypeptide
MILDTDYITENGKPVIRIFKKEKGEFKIEYDRNFEPYIYALLEDDESIEDIKKITGERHGKKVRIIRVEKVKKKFLGEPIEVWKLVFEHPQDYPAIRDAIRSHPAVREIFEYDIPFAKRYLIDKGLVPMEGGEELKLLAFAIATFYHEGDEFAEGEILMISYADESGAKVITWKKIDLPYVEVVSTEREAIKRFLQVLREKDPDVLLTYNGDNFDFAYIKKRCEKLGLKFTIGRDGSEPKIQRMGDRFAVEVKGRIHLDLAPVVRHTIRLPTYTLEAVYEAVFGKKKEKVYAEEIAEAWKSEEGLKRVAQYSMEDARATYELGREFFPMEVELAKLIGQSVWDVSRSSTGNLVEWYLLRVAYERNELAPNKPGGEEYQRRMRSSYIGGYVKEPEKGLWESIAYLDFRSSAGSIIVTHNVSPDTLEKECKNYDVAPIVGYRFCKDFKGFIPSILEDLIETRQKVKRKMKATIDPIEKKMLDYRQRALKILANSYYGYQGYPKARWYSKECAESVTAWGRQYIETTIKEAEKFGFKVLYADTDGFFATIPNEKPETIKSKAKKFLKHINEKLPGMLELEYEGFYLRGFFVTKKKYALIDEDGHITTRGLEVVRRDWSEIAKETQAKVLEVILREGSIEKAAGIVKKVVEDLANYRVPVEKLIIHEQITRELKRYKATGPHVAIAKRLQARGIKVKPGTIISYVVLKGSKKISDRVILFDEYDSSRHKYDPDYYIHNQVLPAVLRILEAFGYKEKDLEYQRMKQTGLGAWLKMGKK

SEQ ID NO: 1179 - protein, 773 aa, unidentified
  REGION 1..773: note = Description of Unknown: Synthetic polypeptide
MILDTDYITENGKPVIRIFKKEKGEFKIEYDRNFEPYIYALLEDDESIEDIKKITGERHGKKVRIIRVEKVKKKFLGEPIEVWKLVFEHPQDYPAIRDAIRSHPAVREIFEYDIPFAKRYLIDKGLVPMEGGEELKLLAFAIATFYHEGDEFAEGEILMISYADESGAKVITWKKIDLPYVEVVSTEREAIKRFLQVLREKDPDVLLTYNGDNFDFAYIKKRCEKLGLKFTIGRDGSEPKIQRMGDRFAVEVKGRIHLDLAPVVRHTIRLPTYTLEAVYEAVFGKKKEKVYAEEIAEAWKSEEGLKRVAQYSMEDARATYELGREFFPMEVELAKLIGQSVWDVSRSSTGNLVEWYLLRVAYERNELAPNKPGGEEYQRRMRSSYIGGYVKEPEKGLWESIAYLDFRSLFPSIIVTHNVSPDTLEKECKNYDVAPIVGYRFCKDFKGFIPSILEDLIETRQKVKRKMKATIDPIEKKMLDYRQRALKILANSYYGYQGYPKARWYSKECAESVTAWGRHYIETTIKEAEKFGFKVLYADTDGFFATIPNEKPETIKSKAKKFLKHINEKLPGMLELEYEGFYLRGFFVTKKKYALIDEDGHITTRGLEVVRRDWSEIAKETQAKVLEVILREGSIEKAAGIVKKVVEDLANYRVPVEKLIIHEQITRELKRYKATGPHVAIAKRLQARGIKVKPGTIISYVVLKGSKKISDRVILFDEYDSSRHKYDPDYYIHNQVLPAVLRILEAFGYKEKDLEYQRMKQTGLGAWLKMGKK

SEQ ID NO: 1180 - protein, 766 aa, unidentified
  REGION 1..766: note = Description of Unknown: Synthetic polypeptide
MILDTDYITENGKPVIRIFKKEKGEFKIEYDRNFEPYIYALLEDDESIEDIKKITGERHGKKVRIIRVEKVKKKFLGEPIEVWKLVFEHPQDVPAIRDAIRSHPAVREIFEYDIPFAKRYLIDKGLVPMEGGEELKLLAFNIATFYHEGDEFAEGEILMISYADESGAKVITWKKIDLPYVEVVSTEREAIKRFLQVLREKDPDVLLTYNGDNFDFAYIKKRCEKLGLKFTIGRDGSEPKIQRMGDRFAVEVKGRIHLDLAPVVRHTIRLPTYTLEAVYEAVFGKKKEKVYAEEIAEAWKSEEGLKRVAQYSMEDARATYELGREFFPIEVELAKLIGQSVWDVSRSSTGNLVEWYLLRVAYERNELAPNQPGGEEYQRRMRSSYIGGYVKEPEKGLWESIAYLDFRSSAGSIIVTHNVSPDTLEKECKNYDVAPIVGYRFCKDFKGFIPSILEDLIETRQKVKRKMKATIDPIEKKMLDYRQRALKILANSYYGYQGYPKARWYSKECAESVTAWGRHYIETTIKEAEKFGFKVLYADTDGFFATIPNEKPETIKSKAKKFLKHINEKLPGMLELEYEGFYLRGFFVTKKKYALIDEDGHITTRGLEVVRRDWSEIAKETQAKVLEVILREGSIEKAAGIVKKVVEDLANYRVPVEKLIIHEQITRELKRYKATGPHVAIAKRLQARGIKVKPGTIISYVVLKGSKKISDRVILFDEYDSSRHKYDPDYYIHNQVLPAVLRILEAFGYKEKDLEYQRDKQTGLGA

SEQ ID NO: 1181 - protein, 766 aa, unidentified
  REGION 1..766: note = Description of Unknown: Synthetic polypeptide
MILDTDYITENGKPVIRIFKKEKGEFKIEYDRNFEPYIYALLEDDESIEDIKKITGERHGKKVRIIRVEKVKKKFLGEPIEVWKLVFEHPQDIPAIRDAIRSHPAVREIFEYDIPFAKRYLIDKGLVPMEGGEELKLLAFNIATFYHEGDEFAEGEILMISYADESGAKVITWKKIDLPYVEVVSTEREAIKRFLQVLREKDPDVLLTYNGDNFDFAYIKKRCEKLGLKFTIGRDGSEPKIQRMGDRFAVEVKGRIHLDLAPVVRHTIRLPTYTLEAVYEAVFGKKKEKVYAEEIAEAWKSEEGLKRVAQYSAEDARATYELGREFFPLEVELAKLIGQSVWDVSRSSTGNLVEWYLLRVAYERNELAPNKPGGEEYQRRMRSSYIGGYVKEPEKGLWESIAYLDFRSSAGSIIVTHNVSPDTLEKECKNYDVAPIVGYRFCKDFKGFIPSILEDLIETRQKVKRKMKATIDPIEKKMLDYRQRALKILANSYYGYQGYPKARWYSKECAESVTAWGRHYIETTIKEAEKFGFKVLYADTDGFFATIPNEKPETIKSKAKKFLKHINEKLPGMLELEYEGFYLRGFFVTKKKYALIDEDGHITTRGLEVVRRDWSEIAKETQAKVLEVILREGSIEKAAGIVKKVVEDLANYRVPVEKLIIHEQITRELKRYKATGPHVAIAKRLQARGIKVKPGTIISYVVLKGSKKISDRVILFDEYDSSRHKYDPDYYIHNQVLPAVLRILEAFGYKEKDLEYQRDKQTGLGA

SEQ ID NO: 1182 - protein, 773 aa, unidentified; identical to SEQ ID NO: 620
  REGION 1..773: note = Description of Unknown: Synthetic polypeptide

SEQ ID NO: 1183 - protein, 773 aa, unidentified
  REGION 1..773: note = Description of Unknown: Synthetic polypeptide
MILDTDYITENGKPVIRIFKKEKGEFKIEYDRNFEPYIYALLEDDESIEDIKKITGERHGKKVRIIRVEKVKKKFLGEPIEVWKLVFEHPQDYPAIRDAIRSHPAVREIFEYDIPFAKRYLIDKGLVPMEGGEELKLLAFAIATFYHEGDEFAEGEILMISYADESGAKVITWKKIDLPYVEVVSTEREAIKRFLQVLREKDPDVLLTYNGDNFDFAYIKKRCEKLGLKFTIGRDGSEPAIQRMGDRFAVEVKGRIHLDLAPVVRHTIRLPTYTLEAVYEAVFGKKKEKVYAEEIAEAWKSEEGLARVAQYSVEDARATYELGREFFPMEVELAKLIGQSVWDVSRSSTGNLVEWYLLRVAYERNELAPNQPGGEEYQRRMRSSYIGGYVKEPEKGLWESIAYLDFRSSAGSIIVTHNVSPDTLEKECKNYDVAPIVGYRFCKDFKGFIPSILEDLIETRQKVKRKMKATIDPIEKKMLDYRQRALKILANSYYGYQGYPKARWYSKECAESVTAWGRHYIETTIKEAEKFGFKVLYADTDGFFATIPNEKPETIKSKAKKFLKHINEKLPGMLELEYEGFYLRGFFVTKKKYALIDEDGHITTRGLEVVRRDWSEIAKETQAKVLEVILREGSIEKAAGIVKKVVEDLANYRVPVEKLIIHEQITRELKRYKATGPHVAIAKRLQARGIKVKPGTIISYVVLKGSKKISDRVILFDEYDSSRHKYDPDYYIHNQVLPAVLRILEAFGYKEKDLEYQRMKQTGLGAWLKMGKK

SEQ ID NO: 1184 - protein, 773 aa, unidentified
  REGION 1..773: note = Description of Unknown: Synthetic polypeptide
MILDTDYITENGKPVIRIFKKEKGEFKIEYDRNFEPYIYALLEDDESIEDIKKITGERHGKKVRIIRVEKVKKKFLGEPIEVWKLVFEHPQDVPAIRDAIRSHPAVREIFEYDIPFAKRYLIDKGLVPMEGGEELKLLAFNIATFYHEGDEFAEGEILMISYADESGAKVITWKKIDLPYVEVVSTEREAIKRFLQVLREKDPDVLLTYNGDNFDFAYIKKRCEKLGLKFTIGRDGSEPKIQRMGDRFAVEVKGRIHLDLAPVVRHTIRLPTYTLEAVYEAVFGKKKEKVYAEEIAEAWKSEEGLKRVAQYSAEDARATYELGREFFPIEVELAKLIGQSVWDVSRSSTGNLVEWYLLRVAYERNELAPNKPGGEEYQRRMRSSYIGGYVKEPEKGLWESIAYLDFRSSAGSIIVTHNVSPDTLEKECKNYDVAPIVGYRFCKDFKGFIPSILEDLIETRQKVKRKMKATIDPIEKKMLDYRQRALKILANSYYGYQGYPKARWYSKECAESVTAWGRHYIETTIKEAEKFGFKVLYADTDGFFATIPNEKPETIKSKAKKFLKHINEKLPGMLELEYEGFYLRGFFVTKKKYALIDEDGHITTRGLEVVRRDWSEIAKETQAKVLEVILREGSIEKAAGIVKKVVEDLANYRVPVEKLIIHEQITRELKRYKATGPHVAIAKRLQARGIKVKPGTIISYVVLKGSKKISDRVILFDEYDSSRHKYDPDYYIHNQVLPAVLRILEAFGYKEKDLEYQRDKQTGLGAWLKMGKK

SEQ ID NO: 1185 - protein, 773 aa, unidentified
  REGION 1..773: note = Description of Unknown: Synthetic polypeptide
MILDTDYITENGKPVIRIFKKEKGEFKIEYDRNFEPYIYALLEDDESIEDIKKITGERHGKKVRIIRVEKVKKKFLGEPIEVWKLVFEHPQDYPAIRDAIRSHPAVREIFEYDIPFAKRYLIDKGLVPMEGGEELKLLAFAIATFYHEGDEFAEGEILMISYADESGAKVITWKKIDLPYVEVVSTEREAIKRFLQVLREKDPDVLLTYNGDNFDFAYIKKRCEKLGLKFTIGRDGSEPAIQRMGDRFAVEVKGRIHLDLAPVVRHTIRLPTYTLEAVYEAVFGKKKEKVYAEEIAEAWKSEEGLARVAQYSMEDARATYELGREFFPMEVELAKLIGQSVWDVSRSSTGNLVEWYLLRVAYERNELAPNKPGGEEYQRRMRSSYIGGYVKEPEKGLWESIAYLDFRSSAGSIIVTHNVSPDTLEKECKNYDVAPIVGYRFCKDFKGFIPSILEDLIETRQKVKRKMKATIDPIEKKMLDYRQRALKILANSYYGYQGYPKARWYSKECAESVTAWGRHYIETTIKEAEKFGFKVLYADTDGFFATIPNEKPETIKSKAKKFLKHINEKLPGMLELEYEGFYLRGFFVTKKKYALIDEDGHITTRGLEVVRRDWSEIAKETQAKVLEVILREGSIEKAAGIVKKVVEDLANYRVPVEKLIIHEQITRKLKRYKATGPHVAIAKRLQARGIKVKPGTIISYVVLKGSKKISDRVILFDEYDSSRHKYDPDYYIHNQVLPAVLRILEAFGYKEKDLEYQRDKQTGLGAWLKMGKK

SEQ ID NO: 1186 - protein, 773 aa, unidentified
  REGION 1..773: note = Description of Unknown: Synthetic polypeptide
MILDTDYITENGKPVIRIFKKEKGEFKIEYDRNFEPYIYALLEDDESIEDIKKITGERHGKKVRIIRVEKVKKKFLGEPIEVWKLVFEHPQDYPAIRDAIRSHPAVREIFEYDIPFAKRYLIDKGLVPMEGGEELKLLAFAIATFYHEGDEFAEGEILMISYADESGAKVITWKKIDLPYVEVVSTEREAIKRFLQVLREKDPDVLLTYNGDNFDFAYIKKRCEKLGLKFTIGRDGSEPKIQRMGDRFAVEVKGRIHLDLAPVVRHTIRLPTYTLEAVYEAVFGKKKEKVYAEEIAEAWKSEEGLKRVAQYSMEDARATYELGREFFPMEVELAKLIGQSVWDVSRSSTGNLVEWYLLRVAYERNELAPNKPGGEEYQRRMRSSYIGGYVKEPEKGLWESIAYLDFRSVLPSIIVTHNVSPDTLEKECKNYDVAPIVGYRFCKDFKGFIPSILEDLIETRQKVKRKMKATIDPIEKKMLDYRQRALKILANSYYGYQGYPKARWYSKECAESVTAWGRHYIETTIKEAEKFGFKVLYADTDGFFATIPNEKPETIKSKAKKFLKHINEKLPGMLELEYEGFYLRGFFVTKKKYALIDEDGHITTRGLEVVRRDWSEIAKETQAKVLEVILREGSIEKAAGIVKKVVEDLANYRVPVEKLIIHEQITRELKRYKATGPHVAIAKRLQARGIKVKPGTIISYVVLKGSKKISDRVILFDEYDSSRHKYDPDYYIHNQVLPAVLRILEAFGYKEKDLEYQRMKQTGLGAWLKMGKK

SEQ ID NO: 1187 - protein, 773 aa, unidentified
  REGION 1..773: note = Description of Unknown: Synthetic polypeptide
MILDTDYITENGKPVIRIFKKEKGEFKIEYDRNFEPYIYALLEDDESIEDIKKITGERHGKKVRIIRVEKVKKNFLGEPIEVWKLVFEHPQDYPAIRDAIRSHPAVREIFEYDIPFAKRYLIDKGLVPMEGGEELKLLAFAIATFYHEGDEFAEGEILMISYADESGAKVITWKKIDLPYVEVVSTEREAIKRFLQVLREKDPDVLLTYNGDNFDFAYIKKRCEKLGLKFTIGRDGSEPKIQRMGDRFAVEVKGRIHLDLAPVVRHTIRLPTYTLEAVYEAVFGKKKEKVYAEEIAEAWKSEEGLKRVAQYSMEDARATYELGREFFPMEVELAKLIGQSVWDVSRSSTGNLVEWYLLRVAYERNELAPNKPGGEEYQRRMRSSYIGGYVKEPEKGLWESIAYLDFRSSAGSIIVTHNVSPDTLEKECKNYDVAPIVGYRFCKDFKGFIPSILEDLIETRQKVKRKMKATIDPIEKKMLDYRQRALKILANSYYGYQGYPKARWYSKECAESVTAWGRHYIETTIKEAEKFGFKVLYADTDGFFATIPNEKPETIKSKAKKFLKHINEKLPGMLELEYEGFYLRGFFVTKKKYALIDEDGHITTRGLEVVRRDWSEIAKETQAKVLEVILREGSIEKAAGIVKKVVEDLANYRVPVEKLIIHEQITRELKRYKATGPHVAIAKRLQARGVKVKPGTIISYVVLKGSKKISDRVILFDEYDSSRHKYDPDYYIHNQVLPAVLRILEAFGYKEKDLEYQRMKQTGLGAWLKMGKK

SEQ ID NO: 1188 - protein, 773 aa, unidentified
  REGION 1..773: note = Description of Unknown: Synthetic polypeptide
MILDTDYITENGKPVIRIFKKEKGEFKIEYDRNFEPYIYALLEDDESIEDIKKITGERHGKKVRIIRVEKVKKKFLGEPIEVWKLVFEHPQDYPAIRDAIRSHPAVREIFEYDIPFAKRYLIDKGLVPMEGGEELKLLAFAIATFYHEGDEFAEGEILMISYADESGAKVITWKKIDLPYVEVVSTEREAIKRFLQVLREKDPDVLLTYNGDNFDFAYIKKRCEKLGLKFTIGRDGSEPKIQRMGDRFAVEVKGRIHLDLAPVVRHTIRLPTYTLEAVYEAVFGKKKEKVYAEEIAEAWKSEEGLKRVAQYSMEDARATYELGREFFPMEVELAKLIGQSVWDVSRSSTGELVEWYLLRVAYERNELAPNKPGGEEYQRRMRSSYIGGYVKEPEKGLWESIAYLDFRSSAGSIIVTHNVSPDTLEKECKNYDVAPIVGYRFCKDFKGFIPSILEDLIETRQKVKRKMKATIDPIEKKMLDYRQRALKILANSYYGYQGYPKARWYSKECAESVTAWGRHYIETTIKEAEKFGFKVLYADTDGFFATIPNEKPETIKSKAKKFLKHINEKLPGMLELEYEGFYLRGFFVTKKKYALIDEDGHITTRGLEVVRRDWSEIAKETQAKVLEVILREGSIEKAAGIVKKVVEDLANYRVPVEKLIIHEQITRELKRYKATGPHVAIAKRLQARGIKVKPGTIISYVVLKGSKKISDRVILFDEYDSSRHKYDPDYYIHNQVLPAVLRILEAFGYKEKDLEYQRMKQTGLGAWLKMGKK

SEQ ID NO: 1189 - protein, 766 aa, unidentified
  REGION 1..766: note = Description of Unknown: Synthetic polypeptide
MILDTDYITENGKPVIRIFKKEKGEFKIEYDRNFEPYIYALLEDDESIEDIKKITGERHGKKVRIIRVEKVKKKFLGEPIEVWKLVFEHPQDVPAIRDAIRSHPAVREIFEYDIPFAKRYLIDKGLVPMEGGEELKLLAFNIATFYHEGDEFAEGEILMISYADESGAKVITWKKIDLPYVEVVSTEREAIKRFLQVLREKDPDVLLTYNGDNFDFAYIKKRCEKLGLKFTIGRDGSEPKIQRMGDRFAVEVKGRIHLDLAPVVRHTIRLPTYTLEAVYEAVFGKKKEKVYAEEIAEAWKSEEGLKRVAQYSAEDARATYELGREFFPLEVELAKLIGQSVWDVSRSSTGNLVEWYLLRVAYERNELAPNKPGGEEYQRRMRSSYIGGYVKEPEKGLWESIAYLDFRSSAGSIIVTHNVSPDTLEKECKNYDVAPIVGYRFCKDFKGFIPSILEDLIETRQKVKRKMKATIDPIEKKMLDYRQRALKILANSYYGYQGYPKARWYSKECAESVTAWGRHYIETTIKEAEKFGFKVLYADTDGFFATIPNEKPETIKSKAKKFLKHINEKLPGMLELEYEGFYLRGFFVTKKKYALIDEDGHITTRGLEVVRRDWSEIAKETQAKVLEVILREGSIEKAAGIVKKVVEDLANYRVPVEKLIIHEFITRELKRYKATGPHVAIAKRLQARGIKVKPGTIISYVVLKGSKKISDRVILFDEYDSSRHKYDPDYYIHNQVLPAVLRILEAFGYKEKDLEYQRDKQTGLGA

SEQ ID NO: 1190 - protein, 773 aa, unidentified
  REGION 1..773: note = Description of Unknown: Synthetic polypeptide
MILDTDYITENGKPVIRIFKKEKGEFKIEYDRNFEPYIYALLEDDESIEDIKKITGERHGKKVRIIRVEKVKKKFLGEPIEVWKLVFEHPQDYPAIRDAIRSHPAVREIFEYDIPFAKRYLIDKGLVPMEGGEELKLLAFAIATFYHEGDEFAEGEILMISYADESGAKVITWKKIDLPYVEVVSTEREAIKRFLQVLREKDPDVLLTYNGDNFDFAYIKKRCEKLGLKFTIGRDGSEPKIQRMGDRFAVEVKGRIHLDLAPVVRHTIRLPTYTLEAVYEAVFGKKKEKVYAEEIAEAWKSEEGLKRVAQYSMEDARATYELGREFFPMEVELAKLIGQSVWDVSRSSTGNLVEWYLLRIAYERNELAPNKPGGEEYQRRMRSSYIGGYVKEPEKGLWESIAYLDFRSSAGSIIVTHNVSPDTLEKECKNYDVAPIVGYRFCKDFKGFIPSILEDLIETRQKVKRKMKATIDPIEKKMLDYRQRALKILANSYYGYQGYPKARWYSKECAESVTAWGRHYIETTIKEAEKFGFKVLYADTDGFFATIPNEKPETIKSKAKKFLKHINEKLPGMLELEYEGFYLRGFFVTKKKYALIDEDGHITTRGLEVVRRDWSEIAKETQAKVLEVILREGSIEKAAGIVKKVVEDLANYRVPVEKLIIHEQITRELKRYKATGPHVAIAKRLQARGIKVKPGTIISYVVLKGSKKISDRVILFDEYDSSRHKYDPDYYIHNQVLPAVLRILEAFGYKEKDLEYQRMKQTGLGAWLKMGKK

SEQ ID NO: 1191 - protein, 773 aa, unidentified
  REGION 1..773: note = Description of Unknown: Synthetic polypeptide
MILDTDYITENGKPVIRIFKKEKGEFKIEYDRNFEPYIYALLEDDESIEDIKKITGERHGKKVRIIRVEKVKKNFLGEPIEVWKLVFEHPQDYPAIRDAIRSHPAVREIFEYDIPFAKRYLIDKGLVPMEGGEELKLLAFAIATFYHEGDEFAEGEILMISYADESGAKVITWKKIDLPYVEVVSTEREAIKRFLQVLREKDPDVLLTYNGDNFDFAYIKKRCEKLGLKFTIGRDGSEPKIQRMGDRFAVEVKGRIHLDLAPVVRHTIRLPTYTLEAVYEAVFGKKKEKVYAEEIAEAWKSEEGLARVAQYSMEDARATYELGREFFPMEVELAKLIGQSVWDVSRSSTGNLVEWYLLRVAYERNELAPNKPGGEEYQRRMRSSYIGGYVKEPEKGLWESIAYLDFRSSAGSIIVTHNVSPDTLEKECKNYDVAPIVGYRFCKDFKGFIPSILEDLIETRQKVKRKMKATIDPIEKKMLDYRQRALKILANSYYGYQGYPKARWYSKECAESVTAWGRHYIETTIKEAEKFGFKVLYADTDGFFATIPNEKPETIKSKAKKFLKHINEKLPGMLELEYEGFYLRGFFVTKKKYALIDEDGHITTRGLEVVRRDWSEIAKETQAKVLEVILREGSIEKAAGIVKKVVEDLANYRVPVEKLIIHEQITRELKRYKATGPHVAIAKRLQARGIKVKPGTIISYVVLKGSKKISDRVILFDEYDSSRHKYDPDYYIHNQVLPAVLRILEAFGYKEKDLEYQRDKQTGLGAWLKMGKK

SEQ ID NO: 1192 - protein, 773 aa, unidentified
  REGION 1..773: note = Description of Unknown: Synthetic polypeptide
MILDTDYITENGKPVIRIFKKEKGEFKIEYDRNFEPYIYALLEDDESIEDIKKVTGERHGKKVRIIRVEKVKKNFLGEPIEVWKLVFEHPQDYPAIRDAIRSHPAVREIFEYDIPFAKRYLIDKGLVPMEGGEELKLLAFAIATFYHEGDEFAEGEILMISYADESGAKVITWKKIDLPYVEVVSTEREAIKRFLQVLREKDPDVLLTYNGDNFDFAYIKKRCEKLGLKFTIGRDGSEPKIQRMGDRFAVEVKGRIHLDLAPVVRHTIRLPTYTLEAVYEAVFGKKKEKVYAEEIAEAWKSEEGLKRVAQYSMEDARATYELGREFFPMEVELAKLIGQSVWDVSRSSTGNLVEWYLLRVAYERNELAPNKPGGEEYQRRMRSSYIGGYVKEPEKGLWESIAYLDFRSSAGSIIVTHNVSPDTLEKECKNYDVAPIVGYRFCKDFKGFIPSILEDLIETRQKVKRKMKATIDPIEKKMLDYRQRALKILANSYYGYQGYPKARWYSKECAESVTAWGRHYIETTIKEAEKFGFKVLYADTDGFFATIPNEKPETIKSKAKKFLKHINEKLPGMLELEYEGFYLRGFFVTKKKYALIDEDGHITTRGLEVVRRDWSEIAKETQAKVLEVILREGSIEKAAGIVKKVVEDLANYRVPVEKLIIHEQITRELKRYKATGPHVAIAKRLQARGIKVKPGTIISYVVLKGSKKISDRVILFDEYDSSRHKYDPDYYIHNQVLPAVLRILEAFGYKEKDLEYQRMKQTGLGAWLKMGKK

SEQ ID NO: 1193 - protein, 773 aa, unidentified
  REGION 1..773: note = Description of Unknown: Synthetic polypeptide
MILDTDYITENGKPVIRIFKKEKGEFKIEYDRNFEPYIYALLEDDESIEDIKKITGERHGKKVRIIRVEKVKKKFLGEPIEVWKLVFEHPQDYPAIRDAIRSHPAVREIFEYDIPFAKRYLIDKGLVPMEGGEELKLLAFNIATFYHEGDEFAEGEILMISYADESGAKVITWKKIDLPYVEVVSTEREAIKRFLQVLREKDPDVLLTYNGDNFDFAYIKKRCEKLGLKFTIGRDGSEPKIQRMGDRFAVEVKGRIHLDLAPVVRHTIRLPTYTLEAVYEAVFGKKKEKVYAEEIAEAWKSEEGLKRVAQYSMEDARATYELGREFFPLEVELAKLIGQSVWDVSRSSTGNLVEWYLLRVAYERNELAPNKPGGEEYQRRMRSSYIGGYVKEPEKGLWESIAYLDFRSSAGSIIVTHNVSPDTLEKECKNYDVAPIVGYRFCKDFKGFIPSILEDLIETRQKVKRKMKATIDPIEKKMLDYRQRALKILANSYYGYQGYPKARWYSKECAESVTAWGRHYIETTIKEAEKFGFKVLYADTDGFFATIPNEKPETIKSKAKKFLKHINEKLPGMLELEYEGFYLRGFFVTKKKYALIDEDGHITTRGLEVVRRDWSEIAKETQAKVLEVILREGSIEKAAGIVKKVVEDLANYRVPVEKLIIHEQITRELKRYKATGPHVAIAKRLQARGIKVKPGTIISYVVLKGSKKISDRVILFDEYDSSRHKYDPDYYIHNQVLPAVLRILEAFGYKEKDLEYQRDKQTGLGAWLKMGKK

SEQ ID NO: 1194 - protein, 773 aa, unidentified
  REGION 1..773: note = Description of Unknown: Synthetic polypeptide
MILDTDYITENGKPVIRIFKKEKGEFKIEYDRNFEPYIYALLEDDESIEDIKKITGERHGKKVRIIRVEKVKKKFLGEPIEVWKLVFEHPQDYPAIRDAIRSHPAVREIFEYDIPFAKRYLIDKGLVPMEGGEELKLLAFAIATFYHEGDEFAEGEILMISYADESGAKVITWKKIDLPYVEVVSTEREAIKRFLQVLREKDPDVLLTYNGDNFDFAYIKKRCEKLGLKFTIGRDGSEPKIQRMGDRFAVEVKGRIHLDLAPVVRHTIRLPTYTLEAVYEAVFGKKKEKVYAEEIAEAWKSEEGLKRVAQYSMEDARATYELGREFFPMEVELAKLIGQSVWDVSRSSTGNLVEWYLLRVAYERNELAPNKPGGEEYQRRMRSSYIGGYVKEPEKGLWESIAYLDFRSSSSSIIVTHNVSPDTLEKECKNYDVAPIVGYRFCKDFKGFIPSILEDLIETRQKVKRKMKATIDPIEKKMLDYRQRALKILANSYYGYQGYPKARWYSKECAESVTAWGRHYIETTIKEAEKFGFKVLYADTDGFFATIPNEKPETIKSKAKKFLKHINEKLPGMLELEYEGFYLRGFFVTKKKYALIDEDGHITTRGLEVVRRDWSEIAKETQAKVLEVILREGSIEKAAGIVKKVVEDLANYRVPVEKLIIHEQITRELKRYKATGPHVAIAKRLQARGIKVKPGTIISYVVLKGSKKISDRVILFDEYDSSRHKYDPDYYIHNQVLPAVLRILEAFGYKEKDLEYQRMKQTGLGAWLKMGKK

SEQ ID NO: 1195 - protein, 766 aa, unidentified
  REGION 1..766: note = Description of Unknown: Synthetic polypeptide
MILDTDYITENGKPVIRIFKKEKGEFKIEYDRNFEPYIYALLEDDESIEDIKKITGERHGKKVRIIRVEKVKKKFLGEPIEVWKLVFEHPQDVPAIRDAIRSHPAVREIFEYDIPFAKRYLIDKGLVPMEGGEELKLLAFNIATFYHEGDEFAEGEILMISYADESGAKVITWKKIDLPYVEVVSTEREAIKRFLQVLREKDPDVLLTYNGDNFDFAYIKKRCEKLGLKFTIGRDGSEPKIQRMGDRFAVEVKGRIHLDLAPVVRHTIRLPTYTLEAVYEAVFGKKKEKVYAEEIAEAWKSEEGLKRVAQYSMEDARATYELGREFFPIEVELAKLIGQSVWDVSRSSTGNLVEWYLLRVAYERNELAPNKPGGEEYQRRMRSSYIGGYVKEPEKGLWESIAYLDFRSSAGSIIVTHNVSPDTLEKECKNYDVAPIVGYRFCKDFKGFIPSILEDLIETRQKVKRKMKATIDPIEKKMLDYRQRALKILANSYYGYQGYPKARWYSKECAESVTAWGRHYIETTIKEAEKFGFKVLYADTDGFFATIPNEKPETIKSKAKKFLKHINEKLPGMLELEYEGFYLRGFFVTKKKYALIDEDGHITTRGLEVVRRDWSEIAKETQAKVLEVILREGSIEKAAGIVKKVVEDLANYRVPVEKLIIHEQITRELKRYKATGPHVAIAKRLQARGIKVKPGTIISYVVLKGSKKISDRVILFDEYDSSRHKYDPDYYIHNQVLPAVLRILEAFGYKEKDLEYQRDKQTGLGA

SEQ ID NO: 1196 - protein, 773 aa, unidentified
  REGION 1..773: note = Description of Unknown: Synthetic polypeptide
MILDTDYITENGKPVIRIFKKEKGEFKIEYDRNFEPYIYALLEDDESIEDIKKITGERHGKKVRIIRVEKVKKNFLGEPIEVWKLVFEHPQDYPAIRDAIRSHPAVREIFEYDIPFAKRYLIDKGLVPMEGGEELKLLAFAIATFYHEGDEFAEGEILMISYADESGAKVITWKKIDLPYVEVVSTEREAIKRFLQVLREKDPDVLLTYNGDNFDFAYIKKRCEKLGLKFTIGRDGSEPKIQRMGDRFAVEVKGRIHLDLAPVVRHTIRLPTYTLEAVYEAVFGKKKEKVYAEEIAEAWKSEEGLKRVAQYSMEDARATYELGREFFPMEVELAKLIGQSVWDVSRSSTGNLVEWYLLRVAYERNELAPNKPGGEEYQRRMRSSYIGGYVKEPEKGLWESIVYLDFRSSAGSIIVTHNVSPDTLEKECKNYDVAPIVGYRFCKDFKGFIPSILEDLIETRQKVKRKMKATIDPIEKKMLDYRQRALKILANSYYGYQGYPKARWYSKECAESVTAWGRHYIETTIKEAEKFGFKVLYADTDGFFATIPNEKPETIKSKAKKFLKHINEKLPGMLELEYEGFYLRGFFVTKKKYALIDEDGHITTRGLEVVRRDWSEIAKETQAKVLEVILREGSIEKAAGIVKKVVEDLANYRVPVEKLIIHEQITRELKRYKATGPHVAIAKRLQARGIKVKPGTIISYVVLKGSKKISDRVILFDEYDSSRHKYDPDYYIHNQVLPAVLRILEAFGYKEKDLEYQRMKQTGLGAWLKMGKK

SEQ ID NO: 1197 - protein, 774 aa, unidentified
  REGION 1..774: note = Description of Unknown: Synthetic polypeptide
MILDTDYITENGKPVIRIFKKEKGEFKIEYDRNFEPYIYALLEDDESIEDIKKITGERHGKKVRIIRVEKVKKKFLGEPIEVWKLVFEHPQDYPAIRDAIRSHPAVREIFEYDIPFAKRYLIDKGLVPMEGGEELKLLAFAIATFYHEGDEFAEGEILMISYADESGAKVITWKKIDLPYVEVVSTEREAIKRFLQVLREKDPDVLLTYNGDNFDFAYIKKRCEKLGLKFTIGRDGSEPKIQRMGDRFAVEVKGRIHLDLAPVVRHTIRLPTYTLEAVYEAVFGKKKEKVYAEEIAEAWKSEEGLKRVAQYSMEDARATYELGREFFPMEVELAKLIGQSVWDVSRSSTGNLVEWYLLRVAYERNELAPNKPGGEEYQRRMRSSYIGGYVKEPEKGLWESIAYLDFRSSAGGSIIVTHNVSPDTLEKECKNYDVAPIVGYRFCKDFKGFIPSILEDLIETRQKVKRKMKATIDPIEKKMLDYRQRALKILANSYYGYQGYPKARWYSKECAESVTAWGRHYIETTIKEAEKFGFKVLYADTDGFFATIPNEKPETIKSKAKKFLKHINEKLPGMLELEYEGFYLRGFFVTKKKYALIDEDGHITTRGLEVVRRDWSEIAKETQAKVLEVILREGSIEKAAGIVKKVVEDLANYRVPVEKLIIHEQITRELKRYKATGPHVAIAKRLQARGIKVKPGTIISYVVLKGSKKISDRVILFDEYDSSRHKYDPDYYIHNQVLPAVLRILEAFGYKEKDLEYQRMKQTGLGAWLKMGKK

SEQ ID NO: 1198 - protein, 773 aa, unidentified
  REGION 1..773: note = Description of Unknown: Synthetic polypeptide
MILDTDYITENGKPVIRIFKKEKGEFKIEYDRNFEPYIYALLEDDESIEDIKKITGERHGKKVRIIRVEKVKKKFLGEPIEVWKLVFEHPQDYPAIRDAIRSHPAVREIFEYDIPFAKRYLIDKGLVPMEGGEELKLLAFAIATFYHEGDEFAEGEILMISYADESGAKVITQKKIDLPYVEVVSTEREAIKRFLQVLREKDPDVLLTYNGDNFDFAYIKKRCEKLGLKFTIGRDGSEPKIQRMGDRFAVEVKGRIHLDLAPVVRHTIRLPTYTLEAVYEAVFGKKKEKVYAEEIAEAWKSEEGLKRVAQYSMEDARATYELGREFFPMEVELAKLIGQSVWDVSRSSTGNLVEWYLLRVAYERNELAPNKPGGEEYQRRMRSSYIGGYVKEPEKGLWESIAYLDFRSSAGSIIVTHNVSPDTLEKECKNYDVAPIVGYRFCKDFKGFIPSILEDLIETRQKVKRKMKATIDPIEKKMLDYRQRALKILANSYYGYQGYPKARWYSKECAESVTAWGRHYIETTIKEAEKFGFKVLYADTDGFFATIPNEKPETIKSKAKKFLKHINEKLPGMLELEYEGFYLRGFFVTKKKYALIDEDGHITTRGLEVVRRDWSEIAKETQAKVLEVILREGSIEKAAGIVKKVVEDLANYRVPVEKLIIHEQITRELKRYKATGPHVAIAKRLQARGIKVKPGTIISYVVLKGSKKISDRVILFDEYDSSRHKYDPDYYIHNQVLPAVLRILEAFGYKEKDLEYQRMKQTGLGAWLKMGKK

SEQ ID NO: 1199 - protein, 773 aa, unidentified
  REGION 1..773: note = Description of Unknown: Synthetic polypeptide
MILDTDYITENGKPVIRIFKKERGEFKIEYDRNFEPYIYALLEDDESIEDIKKITGERHGKKVRIIRVEKVKKKFLGEPIEVWKLVFEHPQDYPAIRDAIRSHPAVREIFEYDIPFAKRYLIDKGLVPMEGGEELKLLAFAIATFYHEGDEFAEGEILMISYADESGAKVITWKKIDLPYVEVVSTEREAIKRFLQVLREKDPDVLLTYNGDNFDFAYIKKRCEKLGLKFTIGRDGSEPKIQRMGDRFAVEVKGRIHLDLAPVVRHTIRLPTYTLEAVYEAVFGKKKEKVYAEEIAEAWKSEEGLKRVAQYSMEDARATYELGREFFPMEVELAKLIGQSVWDVSRSSTGNLVEWYLLRVAYERNELAPNKPGGEEYQRRMRSSYIGGYVKEPEKGLWESIAYLDFRSSAGSIIVTHNVSPDTLEKECKNYDVAPIVGYRFCKDFKGFIPSILEDLIETRQKVKRKMKATIDPIEKKMLDYRQRALKILANSYYGYQGYPKARWYSKECAESVTAWGRHYIETTIKEAEKFGFKVLYADTDGFFATIPNEKPETIKSKAKKFLKHINEKLPGMLELEYEGFYLRGFFVTKKKYALIDEDGHITTRGLEVVRRDWSEIAKETQAKVLEVILREGSIEKAAGIVKKVVEDLANYRVPVEKLIIHEQITRELKRYKATGPHVAIAKRLQARGIKVKPGTIISYVVLKGSKKISDRVILFDEYDSSRHKYDPDYYIHNQVLPAVLRILEAFGYKEKDLEYQRMKQTGLGAWLKMGKK

SEQ ID NO: 1200 - protein, 773 aa, unidentified
  REGION 1..773: note = Description of Unknown: Synthetic polypeptide
MILDTDYITENGKPVIRIFKKEKGEFKIEYDRNFEPYIYALLEDDESIEDIKKITGERHGKKVRIIRVEKVKKNFLGEPIEVWKLVFEHPQDYPAIRDAIRSHPAVREIFEYDIPFAKRYLIDKGLVPMEGGEELKLLAFAIATFYHEGDEFAEGEILMISYADESGAKVITWKKIDLPYVEVVSTEREAIKRFLQVLREKDPDVLLTYNGDNFDFAYIKKRCEKLGLKFTIGRDGSEPKIQRMGDRFAVEVKGRIHLDLAPVVRHTIRLPTYTLEAVYEAVFGKKKEKVYAEEIAEAWKSEEGLKRVAQYSMEDARATYELGREFFPMEVELAKLIGQSVWDVSRSSTGNLVEWYLLRVAYERNELAPNKPGGEEYQRRMRSSYIGGYVKEPEKGLWESIAYLDFRSSAGSIIVTHNVSPDTLEKECKNYDVAPIVGYRFCKDFKGFIPSILEDLLETRQKVKRKMKATIDPIEKKMLDYRQRALKILANSYYGYQGYPKARWYSKECAESVTAWGRHYIETTIKEAEKFGFKVLYADTDGFFATIPNEKPETIKSKAKKFLKHINEKLPGMLELEYEGFYLRGFFVTKKKYALIDEDGHITTRGLEVVRRDWSEIAKETQAKVLEVILREGSIEKAAGIVKKVVEDLANYRVPVEKLIIHEQITRELKRYKATGPHVAIAKRLQARGIKVKPGTIISYVVLKGSKKISDRVILFDEYDSSRHKYDPDYYIHNQVLPAVLRILEAFGYKEKDLEYQRMKQTGLGAWLKMGKK

SEQ ID NO: 1201 - protein, 773 aa, unidentified
  REGION 1..773: note = Description of Unknown: Synthetic polypeptide
MILDTDYITENGKPVIRIFKKEKGEFKIEYDRNFEPYIYALLEDDESIEDIKKITGERHGKKVRIIRVEKVKKKFLGEPIEVWKLVFEHPQDYPAIRDAIRSHPAVREIFEYDIPFAKRYLIDKGLVPMEGGEELKLLAFAIATFYHEGDEFAEGEILMISYADESGAKVITWKKIDLPYVEVVSTEREAIKRFLQVLREKDPDVLLTYNGDNFDFAYIKKRCEKLGLKFTIGRDGSEPKIQRMGDRFAVEVKGRIHLDLAPVVRHTIRLPTYTLEAVYEAVFGKKKEQVYAEEIAEAWKSEEGLARVAQYSVEDARATYELGREFFPMEVELAKLIGQSVWDVSRSSTGNLVEWYLLRVAYERNELAPNQPGGEEYQRRMRSSYIGGYVKEPEKGLWESIAYLDFRSSAGSIIVTHNVSPDTLEKECKNYDVAPIVGYRFCKDFKGFIPSILEDLIETRQKVKRKMKATIDPIEKKMLDYRQRALKILANSYYGYQGYPKARWYSKECAESVTAWGRHYIETTIKEAEKFGFKVLYADTDGFFATIPNEKPETIKSKAKKFLKHINEKLPGMLELEYEGFYLRGFFVTKKKYALIDEDGHITTRGLEVVRRDWSEIAKETQAKVLEVILREGSIEKAAGIVKKVVEDLANYRVPVEKLIIHEQITRELKRYKATGPHVAIAKRLQARGIKVKPGTIISYVVLKGSKKISDRVILFDEYDSSRHKYDPDYYIHNQVLPAVLRILEAFGYKEKDLEYQRDKQTGLGAWLKMGKK

SEQ ID NO: 1202 - protein, 773 aa, unidentified
  REGION 1..773: note = Description of Unknown: Synthetic polypeptide
MILDTDYITENGKPVIRIFKKEKGEFKIEYDRNFEPYIYALLEDDESIEDIKKITGERHGKKVRIIRVEKVKKKFLGEPIEVWKLVFEHPQDVPAIRDAIRSHPAVREIFEYDIPFAKRYLIDKGLVPMEGGEELKLLAFNIATFYHEGDEFAEGEILMISYADESGAKVITWKKIDLPYVEVVSTEREAIKRFLQVLREKDPDVLLTYNGDNFDFAYIKKRCEKLGLKFTIGRDGSEPKIQRMGDRFAVEVKGRIHLDLAPVVRHTIRLPTYELEAVYEAVFGKKKEKVYAEEIAEAWKSEEGLKRVAQYSMEDARATYELGREFFPLEVELAKLIGQSVWDVSRSSTGNLVEWYLLRVAYERNELAPNKPGGEEYQRRMRSSYIGGYVKEPEKGLWESIAYLDFRSSAGSIIVTHNVSPDTLEKECKNYDVAPIVGYRFCKDFKGFIPSILEDLIETRQKVKRKMKATIDPIEKKMLDYRQRALKILANSYYGYQGYPKARWYSKECAESVTAWGRHYIETTIKEAEKFGFKVLYADTDGFFATIPNEKPETIKSKAKKFLKHINEKLPGMLELEYEGFYLRGFFVTKKKYALIDEDGHITTRGLEVVRRDWSEIAKETQAKVLEVILREGSIEKAAGIVKKVVEDLANYRVPVEKLIIHEQITRELKRYKATGPHVAIAKRLQARGIKVKPGTIISYVVLKGSKKISDRVILFDEYDSSRHKYDPDYYIHNQVLPAVLRILEAFGYKEKDLEYQRDKQTGLGAWLKMGKK

SEQ ID NO: 1203 - protein, 773 aa, unidentified
  REGION 1..773: note = Description of Unknown: Synthetic polypeptide
MILDTDYITENGKPVIRIFKKEKGEFKIEYDRNFEPYIYALLEDDESIEDIKKITGERHGKKVRIIRVEKVKKNFLGEPIEVWKLVFEHPQDYPAIRDAIRSHPAVREIFEYDIPFAKRYLIDKGLVPMEGGEELKLLAFNIATFYHEGDEFAEGEILMISYADESGAKVITWKKIDLPYVEVVSTEREAIKRFLQVLREKDPDVLLTYNGDNFDFAYIKKRCEKLGLKFTIGRDGSEPKIQRMGDRFAVEVKGRIHLDLAPVVRHTIRLPTYTLEAVYEAVFGKKKEKVYAEEIAEAWKSEEGLARVAQYSMEDARATYELGREFFPMEVELAKLIGQSVWDVSRSSTGNLVEWYLLRVAYERNELAPNKPGGEEYQRRMRSSYIGGYVKEPEKGLWESIAYLDFRSSAGSIIVTHNVSPDTLEKECKNYDVAPEVGYRFCKDFKGFIPSILEDLIETRQKVKRKMKATIDPIEKKMLDYRQRALKILANSYYGYQGYPKARWYSKECAESVTAWGRHYIETTIKEAEKFGFKVLYADTDGFFATIPNEKPETIKSKAKKFLKHINEKLPGMLELEYEGFYLRGFFVTKKKYALIDEDGHITTRGLEVVRRDWSEIAKETQAKVLEVILREGSIEKAAGIVKKVVEDLANYRVPVEKLIIHEQITRELKRYKATGPHVAIAKRLQARGIKVKPGTIISYVVLKGSKKISDRVILFDEYDSSRHKYDPDYYIHNQVLPAVLRILEAFGYKEKDLEYQRDKQTGLGAWLKMGKK

SEQ ID NO: 1204 - protein, 773 aa, unidentified
  REGION 1..773: note = Description of Unknown: Synthetic polypeptide
MILDTDYITENGKPVIRIFKKEKGEFKIEYDRNFEPYIYALLEDDESIEDIKKITGERHGKKVRIIRVEKVKKKFLGEPIEVWKLVFEHPQDYPAIRDAIRSHPAVREIFEYDIPFAKRYLIDKGLVPMEGGEELKLLAFAIATFYHEGDEFAEGEILMISYADESGAKVITWKKIDLPYVEVVSTEREAIKRFLQVLREKDPDVLLTYNGDNFDFAYIKKRCEKLGLKFTIGRDGSEPKISRMGDRFAVEVKGRIHLDLAPVVRHTIRLPTYTLEAVYEAVFGKKKEKVYAEEIAEAWKSEEGLKRVAQYSMEDARATYELGREFFPMEVELAKLIGQSVWDVSRSSTGNLVEWYLLRVAYERNELAPNKPGGEEYQRRMRSSYIGGYVKEPEKGLWESIAYLDFRSSAGSIIVTHNVSPDTLEKECKNYDVAPIVGYRFCKDFKGFIPSILEDLIETRQKVKRKMKATIDPIEKKMLDYRQRALKILANSYYGYQGYPKARWYSKECAESVTAWGRHYIETTIKEAEKFGFKVLYADTDGFFATIPNEKPETIKSKAKKFLKHINEKLPGMLELEYEGFYLRGFFVTKKKYALIDEDGHITTRGLEVVRRDWSEIAKETQAKVLEVILREGSIEKAAGIVKKVVEDLANYRVPVEKLIIHEQITRELKRYKATGPHVAIAKRLQARGIKVKPGTIISYVVLKGSKKISDRVILFDEYDSSRHKYDPDYYIHNQVLPAVLRILEAFGYKEKDLEYQRMKQTGLGAWLKMGKK

SEQ ID NO: 1205 - protein, 773 aa, unidentified
  REGION 1..773: note = Description of Unknown: Synthetic polypeptide
MILDTDYITENGKPVIRIFKKEKGEFKIEYDRNFEPYIYALLEDDESIEDIKKITGERHGKKVRIIRVEKVKKNFLGEPIEVWKLVFEHPQDYPAIRDAIRSHPAVREIFEYDIPFAKRYLIDKGLVPMEGGEELKLLAFAIATFYHEGDEFAEGEILMISYADESGAKVITWKKIDLPYVEVVSTEREAIKRFLQVLREKDPDVLLTYNGDNFDFQYIKKRCEKLGLKFTIGRDGSEPKIQRMGDRFAVEVKGRIHLDLAPVVRHTIRLPTYTLEAVYEAVFGKKKEKVYAEEIAEAWKSEEGLARVAQYSVEDARATYELGREFFPMEVELAKLIGQSVWDVSRSSTGNLVEWYLLRVAYERNELAPNQPGGEEYQRRMRSSYIGGYVKEPEKGLWESIAYLDFRSSAGSIIVTHNVSPDTLEKECKNYDVAPEVGYRFCKDFKGFIPSILEDLIETRQKVKRKMKATIDPIEKKMLDYRQRALKILANSYYGYQGYPKARWYSKECAESVTAWGRHYIETTIKEAEKFGFKVLYADTDGFFATIPNEKPETIKSKAKKFLKHINEKLPGMLELEYEGFYLRGFFVTKKKYALIDEDGHITTRGLEVVRRDWSEIAKETQAKVLEVILREGSIEKAAGIVKKVVEDLANYRVPVEKLIIHEQITRELKRYKATGPHVAIAKRLQARGIKVKPGTIISYVVLKGSKKISDRVILFDEYDSSRHKYDPDYYIHNQVLPAVLRILEAFGYKEKDLEYQRDKQTGLGAWLKMGKK

SEQ ID NO: 1206 - protein, 773 aa, unidentified
  REGION 1..773: note = Description of Unknown: Synthetic polypeptide
MILDTDYITENGKPVIRIFKKEKGEFKIEYDRNFEPYIYALLEDDESIEDIKKITGERHGKKVRIIRVEKVKKKFLGEPIEVWKLVFEHPQDYPAIRDAIRSHPAVREIFEYDIPFAKRYLIDKGLVPMEGGEELKLLAFNIATFYHEGDEFAEGEILMISYADESGAKVITWKKIDLPYVEVVSTEREAIKRFLQVLREKDPDVLLTYNGDNFDFAYIKKRCEKLGLKFTIGRDGSEPKIQRMGDRFAVEVKGRIHLDLAPVVRHTIRLPTYTLEAVYEAVFGKKKEKVYAEEIAEAWKSEEGLKRVAQYSMEDARATYELGREFFPLEVELAKLIGQSVWDVSRSSTGNLVEWYLLRVAYERNELAPNKPGGEEYQRRMRSSYIGGYVKEPEKGLWESIAYLDFRSSAGSIIVTHNVSPDTLEKECKNYDVAPIVGYRFCKDFKGFIPSILEDLIETRQKVKRKMKATIDPIEKKMLDYRQRALKILANSYYGYQGYPKARWYSKECAESVTAWGRHYIETTIKEAEKFGFKVLYADTDGFFATIPNEKPETIKSKAKKFLKHINEKLPGMLELEYEGFYLRGFFVTKKKYALIDEDGHITTRGLEVVRRDWSEIAKETQAKVLEVILREGSIEKAAGIVKKVVEDLANYRVPVEKLIIHELITRELKRYKATGPHVAIAKRLQARGIKVKPGTIISYVVLKGSKKISDRVILFDEYDSSRHKYDPDYYIHNQVLPAVLRILEAFGYKEKDLEYQRMKQTGLGAWLKMGKK

SEQ ID NO: 1207 - protein, 773 aa, unidentified; identical to SEQ ID NO: 620
  REGION 1..773: note = Description of Unknown: Synthetic polypeptide

SEQ ID NO: 1208 - protein, 773 aa, unidentified
  REGION 1..773: note = Description of Unknown: Synthetic polypeptide
MILDTDYITENGKPVIRIFKKEKGEFKIEYDRNFEPYIYALLEDDESIEDIKKITGERHGKKVRIIRVEKVKKKFLGEPIEVWKLVFEHPQDVPAIRDAIRSHPAVREIFEYDIPFAKRYLIDKGLVPMEGGEELKLLAFNIATFYHEGDEFAEGEILMISYADESGAKVITWKKIDLPYVEVVSTEREAIKRFLQVLREKDPDVLLTYNGDNFDFAYIKKRCEKLGLKFTIGRDGSEPKIQRMGDRFAVEVKGRIHLDLAPVVRHTIRLPTYELEAVYEAVFGKKKEKVYAEEIAEAWKSEEGLKRVAQYSMEDARATYELGREFFPLEVELAKLIGQSVWDVSRSSTGNLVEWYLLRVAYERNELAPNKPGGEEYQRRMRSSYIGGYVKEPEKGLWESIAYLDFRSSAGSIIVTHNVSPDTLEKECKNYDVAPIVGYRFCKDFKGFIPSILEDLIETRQKVKRKMKATIDPIEKKMLDYRQRALKILANSYYGYQGYPKARWYSKECAESVTAWGRHYIETTIKEAEKFGFKVLYADTDGFFATIPNEKPETIKSKAKKFLKHINEKLPGMLELEYEGFYLRGFFVTKKKYALIDEDGHITTRGLEVVRRDWSEIAKETQAKVLEVILREGSIEKAAGIVKKVVEDLANYRVPVEKLIIHELITRELKRYKATGPHVAIAKRLQARGIKVKPGTIISYVVLKGSKKISDRVILFDEYDSSRHKYDPDYYIHNQVLPAVLRILEAFGYKEKDLEYQRDKQTGLGAWLKMGKK

SEQ ID NO: 1209 - protein, 773 aa, unidentified; identical to SEQ ID NO: 427
  REGION 1..773: note = Description of Unknown: Synthetic polypeptide

SEQ ID NO: 1210 - protein, 773 aa, unidentified
  REGION 1..773: note = Description of Unknown: Synthetic polypeptide
MILDTDYITENGKPVIRIFKKERGEFKIEYDRNFEPYIYALLEDDESIEDIKKITGERHGKKVRIIRVEKVKKKFLGEPIEVWKLVFEHPQDYPAIRDAIRSHPAVREIFEYDIPFAKRYLIDKGLVPMEGGEELKLLAFAIATFYHEGDEFAEGEILMISYADESGAKVITWKKIDLPYVEVVSTEREAIKRFLQVLREKDPDVLLTYNGDNFDFAYIKKRCEKLGLKFTIGRDGSEPKIQRMGDRFAVEVKGRIHLDLAPVVRHTIRLPTYTLEAVYEAVFGKKKEKVYAEEIAEAWKSEEGLARVAQYSVEDARATYELGREFFPMEVELAKLIGQSVWDVSRSSTGNLVEWYLLRVAYERNELAPNKPGGEEYQRRMRSSYIGGYVKEPEKGLWESIAYLDFRSSAGSIIVTHNVSPDTLEKECKNYDVAPIVGYRFCKDFKGFIPSILEDLIETRQKVKRKMKATIDPIEKKMLDYRQRALKILANSYYGYQGYPKARWYSKECAESVTAWGRHYIETTIKEAEKFGFKVLYADTDGFFATIPNEKPETIKSKAKKFLKHINEKLPGMLELEYEGFYLRGFFVTKKKYALIDEDGHITTRGLEVVRRDWSEIAKETQAKVLEVILREGSIEKAAGIVKKVVEDLANYRVPVEKLIIHEQITRELKRYKATGPHVAIAKRLQARGIKVKPGTIISYVVLKGSKKISDRVILFDEYDSSRHKYDPDYYIHNQVLPAVLRILEAFGYKEKDLEYQRDKQTGLGAWLKMGKK

SEQ ID NO: 1211 - protein, 773 aa, unidentified
  REGION 1..773: note = Description of Unknown: Synthetic polypeptide
MILDTDYITENGKPVIRIFKKEKGEFKIEYDRNFEPYIYALLEDDESIEDIKKITGERHGKKVRIIRVEKVKKKFLGEPIEVWKLVFEHPQDVPAIRDAIRSHPAVREIFEYDIPFAKRYLIDKGLVPMEGGEELKLLAFNIATFYHEGDEFAEGEILMISYADESGAKVITWKKIDLPYVEVVSTEREAIKRFLQVLREKDPDVLLTYNGDNFDFAYIKKRCEKLGLKFTIGRDGSEPKIQRMGDRFAVEVKGRIHLDLAPVVRHTIRLPTYTLEAVYEAVFGKKKEKVYAEEIAEAWKSEEGLKRVAQYSMEDARATYELGREFFPLEVELAKLIGQSVWDVSRSSTGNLVEWYLLRVAYERNELAPNKPGGEEYQRRMRSSYIGGYVKEPEKGLWESIAYLDFRSSAGSIIVTHNVSPDTLEKECKNYDVAPIVGYRFCKDFKGFIPSILEDLIETRQKVKRKMKATIDPIEKKMLDYRQRALKILANSYYGYQGYPKARWYSKECAESVTAWGRHYIETTIKEAEKFGFKVLYADTDGFFATIPNEKPETIKSKAKKFLKHINEKLPGMLELEYEGFYLRGFFVTKKKYALIDEDGHITTRGLEVVRRDWSEIAKETQAKVLEVILREGSIEKAAGIVKKVVEDLANYRVPVEKLIIHELITRELKRYKATGPHVAIAKRLQARGIKVKPGTIISYVVLKGSKKISDRVILFDEYDSSRHKYDPDYYIHNQVLPAVLRILEAFGYKEKDLEYQRDKQTGLGAWLKMGKK

SEQ ID NO: 1212 - protein, 773 aa, unidentified
  REGION 1..773: note = Description of Unknown: Synthetic polypeptide
MILDTDYITENGKPVIRIFKKEKGEFKIEYDRNFEPYIYALLEDDESIEDIKKITGERHGKKVRIIRVEKVKKKFLGEPIEVWKLVFEHPQDYPAIRDAIRSHPAVREIFEYDIPFAKRYLIDKGLVPMEGGEELKLLAFAIATFYHEGDEFAEGEILMISYADESGAKVITWKKIDLPYVEVVSTEREAIKRFLQVLREKDPDVLLTYNGDNFDFAYIKKRCEKLGLKFTIGRDGSEPKIQRMGDRFAVEVKGRIHLDLAPVVRHTIRLPTYTLEAVYEAVFGKKKEKVYAEEIAEAWKSEEGLKRVAQYSMEDARATYELGREFFPLEVELAKLIGQSVWDVSRSSTGNLVEWYLLRVAYERNELAPNKPGGEEYQRRMRSSYIGGYVKEPEKGLWESIAYLDFRSSAGSIIVTHNVSPDTLEKECKNYDVAPIVGYRFCKDFKGFIPSILEDLIETRQKVKRKMKATIDPIEKKMLDYRQRALKILANSYYGYQGYPKARWYSKECAESVTAWGRHYIETTIKEAEKFGFKVLYADTDGFFATIPNEKPETIKSKAKKFLKHINEKLPGMLELEYEGFYLRGFFVTKKKYALIDEDGHITTRGLEVVRRDWSEIAKETQAKVLEVILREGSIEKAAGIVKKVVEDLANYRVPVEKLIIHEQITRELKRYKATGPHVAIAKRLQARGIKVKPGTIISYVVLKGSKKISDRVILFDEYDSSRHKYDPDYYIHNQVLPAVLRILEAFGYKEKDLEYQRMKQTGLGAWLKMGKK

SEQ ID NO: 1213 - protein, 773 aa, unidentified
  REGION 1..773: note = Description of Unknown: Synthetic polypeptide
MILDTDYITENGKPVIRIFKKEKGEFKIEYDRNFEPYIYALLEDDESIEDIKKITGERHGKKVRIIRVEKVKKKFLGEPIEVWKLVFEHPQDYPAIRDAIRSHPAVREIFEYDIPFAKRYLIDKGLVPMEGGEELKLLAFAIATFYHEGDEFAEGEILMISYADESGAKVITWKKIDLPYVEVVSTEREAIKRFLQVLREKDPDVLLTYNGDNFDFAYIKKRCEKLGLKFTIGRDGSEPKIQRMGDRFAVEVKGRIHLDLAPVVRHTIRLPTYTLEAVYEAVFGKKKEKVYAEEIAEAWKSEEGLARVAQYSVEDARATYELGREFFPMEVELAKLIGQSVWDVSRSSTGNLVEWYLLRVAYERNELAPNQPGGEEYQRRMRSSYIGGYVKEPEKGLWESIAYLDFRSSAGSIIVTHNVSPDTLEKECKNYDVAPIVGYRFCKDFKGFIPSILEDLIETRQKVKRKMKATIDPIEKKMLDYRQRALKILANSYYGYQGYPKARWYSKECAESVTAWGRHYIETTIKEAEKFGFKVLYADTDGFFATIPNEKPETIKSKAKKFLKHINEKLPGMLELEYEGFYLRGFFVTKKKYALIDEDGHITTRGLEVVRRDWSEIAKETQAKVLEVILREGSIEKAAGIVKKVVEDLANYRVPVEKLIIHELITRELKRYKATGPHVAIAKRLQARGIKVKPGTIISYVVLKGSKKISDRVILFDEYDSSRHKYDPDYYIHNQVLPAVLRILEAFGYKEKDLEYQRDKQTGLGAWLKMGKK

SEQ ID NO: 1214 - protein, 773 aa, unidentified; identical to SEQ ID NO: 686
  REGION 1..773: note = Description of Unknown: Synthetic polypeptide

SEQ ID NO: 1215 - protein, 773 aa, unidentified
  REGION 1..773: note = Description of Unknown: Synthetic polypeptide
MILDTDYITENGKPVIRIFKKEKGEFKIEYDRNFEPYIYALLEDDESIEDIKKITGERHGKKVRIIRVEKVKKKFLGEPIEVWKLVFEHPQDYPAIRDAIRSHPAVREIFEYDIPFAKRYLIDKGLVPMEGGEELKLLAFAIATFYHEGDEFAEGEILMISYADESGAKVITWKKIDLPYVEVVSTEREAIKRFLQVLREKDPDVLLTYNGDNFDFAYIKKRCEKLGLKFTIGRDGSEPKIQRMGDRFAVEVKGRIHLDLAPVVRHTIRLPTYTLEAVYEAVFGKKKEKVYAEEIAEAWKSEEGLARVAQYSMEDARATYELGREFFPMEVELAKLIGQSVWDVSRSSTGNLVEWYLLRVAYERNELAPNQPGGEEYQRRMRSSYIGGYVKEPEKGLWESIAYLDFRSSAGSIIVTHNVSPDTLEKECKNYDVAPIVGYRFCKDFKGFIPSILEDLIETRQKVKRKMKATIDPIEKKMLDYRQRALKILANSYYGYQGYPKARWYSKECAESVTAWGRHYIETTIKEAEKFGFKVLYADTDGFFATIPNEKPETIKSKAKKFLKHINEKLPGMLELEYEGFYLRGFFVTKKKYALIDEDGHITTRGLEVVRRDWSEIAKETQAKVLEVILREGSIEKAAGIVKKVVEDLANYRVPVEKLIIHEQITRELKRYKATGPHVAIAKRLQARGIKVKPGTIISYVVLKGSKKISDRVILFDEYDSSRHKYDPDYYIHNQVLPAVLRILEAFGYKEKDLEYQRDKQTGLGAWLKMGKK

SEQ ID NO: 1216 - protein, 773 aa, unidentified
  REGION 1..773: note = Description of Unknown: Synthetic polypeptide
MILDTDYITENGKPVIRIFKKEKGEFKIEYDRNFEPYIYALLEDDESIEDIKKITGERHGKKVRIIRVEKVKKKFLGEPIEVWKLVFEHPQDYPAIRDAIRSHPAVREIFEYDIPFAKRYLIDKGLVPMEGGEELKLLAFAIATFYHEGDEFAEGEILMISYADESGAKVITWKKIDLPYVEVVSTEREAIKRFLQVLREKDPDVLLTYNGDNFDFAYIKKRCEKLGLKFTIGRDGSEPKIQRMGDRFAVEVKGRIHLDLAPVVRHTIRLPTYTLEAVYEAVFGKKKEKVYAEEIAEAWKSEEGLKRVAQYSMEDARATYELGREFFPMEVELAKLIGQSVWDVSRSSTGNLVEWYLLRVAYERNELAPNKPGGEEYQRRMRSSYIGGYVKEPEKGLWESIAYLDFRSMAGSIIVTHNVSPDTLEKECKNYDVAPIVGYRFCKDFKGFIPSILEDLIETRQKVKRKMKATIDPIEKKMLDYRQRALKILANSYYGYQGYPKARWYSKECAESVTAWGRHYIETTIKEAEKFGFKVLYADTDGFFATIPNEKPETIKSKAKKFLKHINEKLPGMLELEYEGFYLRGFFVTKKKYALIDEDGHITTRGLEVVRRDWSEIAKETQAKVLEVILREGSIEKAAGIVKKVVEDLANYRVPVEKLIIHEQITRELKRYKATGPHVAIAKRLQARGIKVKPGTIISYVVLKGSKKISDRVILFDEYDSSRHKYDPDYYIHNQVLPAVLRILEAFGYKEKDLEYQRMKQTGLGAWLKMGKK

SEQ ID NO: 1217 - protein, 766 aa, unidentified
  REGION 1..766: note = Description of Unknown: Synthetic polypeptide
MILDTDYITENGKPVIRIFKKEKGEFKIEYDRNFEPYIYALLEDDESIEDIKKITGERHGKKVRIIRVEKVKKKFLGEPIEVWKLVFEHPQDVPAIRDAIRSHPAVREIFEYDIPFAKRYLIDKGLVPMEGGEELKLLAFNIATFYHEGDEFAEGEILMISYADESGAKVITWKKIDLPYVEVVSTEREAIKRFLQVLREKDPDVLLTYNGDNFDFAYIKKRCEKLGLKFTIGRDGSEPKIQRMGDRFAVEVKGRIHLDLAPVVRHTIRLPTYTLEAVYEAVFGKKKEKVYAEEIAEAWKSEEGLKRVAQYSMEDARATYELGREFFPLEVELAKLIGQSVWDVSRSSTGNLVEWYLLRVAYERNELAPNQPGGEEYQRRMRSSYIGGYVKEPEKGLWESIAYLDFRSSAGSIIVTHNVSPDTLEKECKNYDVAPIVGYRFCKDFKGFIPSILEDLIETRQKVKRKMKATIDPIEKKMLDYRQRALKILANSYYGYQGYPKARWYSKECAESVTAWGRHYIETTIKEAEKFGFKVLYADTDGFFATIPNEKPETIKSKAKKFLKHINEKLPGMLELEYEGFYLRGFFVTKKKYALIDEDGHITTRGLEVVRRDWSEIAKETQAKVLEVILREGSIEKAAGIVKKVVEDLANYRVPVEKLIIHELITRELKRYKATGPHVAIAKRLQARGIKVKPGTIISYVVLKGSKKISDRVILFDEYDSSRHKYDPDYYIHNQVLPAVLRILEAFGYKEKDLEYQRDKQTGLGA

SEQ ID NO: 1218 - protein, 773 aa, unidentified
  REGION 1..773: note = Description of Unknown: Synthetic polypeptide
MILDTDYITENGKPVIRIFKKEKGEFKIEYDRNFEPYIYALLEDDESIEDIKKITGERHGKKVRIIRVEKVKKKFLGEPIEVWKLVFEHPQDYPAIRDAIRSHPAVREIFEYDIPFAKRYLIDKGLVPMEGGEELKLLAFAIATFYHEGDEFAEGEILMISYADESGAKVITWKKIDLPYVEVVSTEREAIKRFLQVLREKDPDVLLTYNGDNFDFAYIKKRCEKLGLKFTIGRDGSEPKIQRMGDRFAVEVKGRIHLDLAPVVRHTIRLPTYTLEAVYEAVFGKKKEKVYAEEIAEAWKSEEGLARVAQYSMEDARATYELGREFFPMEVELAKLIGQSVWDVSRSSTGNLVEWYLLRVAYERNELAPNKPGGEEYQRRMRSSYIGGYVKEPEKGLWESIAYLDFRSSAGSIIVTHNVSPDTLEKECKNYDVAPIVGYRFCKDFKGFIPSILEDLIETRQKVKRKMKATIDPIEKKMLDYRQRALKILANSYYGYQGYPKARWYSKECARSVTAWGRHYIETTIKEAEKFGFKVLYADTDGFFATIPNEKPETIKSKAKKFLKHINEKLPGMLELEYEGFYLRGFFVTKKKYALIDEDGHITTRGLEVVRRDWSEIAKETQAKVLEVILREGSIEKAAGIVKKVVEDLANYRVPVEKLIIHEQITRELKRYKATGPHVAIAKRLQARGIKVKPGTIISYVVLKGSKKISDRVILFDEYDSSRHKYDPDYYIHNQVLPAVLRILEAFGYKEKDLEYQRDKQTGLGAWLKMGKK

SEQ ID NO: 1219 - protein, 773 aa, unidentified
  REGION 1..773: note = Description of Unknown: Synthetic polypeptide
MILDTDYITENGKPVIRIFKKEKGEFKIEYDRNFEPYIYALLEDDESIEDIKKITGERHGKKVRIIRVEKVKKKFLGEPIEVWKLVFEHPQDFPAIRDAIRSHPAVREIFEYDIPFAKRYLIDKGLVPMEGGEELKLLAFAIATFYHEGDEFAEGEILMISYADESGAKVITWKKIDLPYVEVVSTEREAIKRFLQVLREKDPDVLLTYNGDNFDFAYIKKRCEKLGLKFTIGRDGSEPKIQRMGDRFAVEVKGRIHLDLAPVVRHTIRLPTYTLEAVYEAVFGKKKEKVYAEEIAEAWKSEEGLKRVAQYSMEDARATYELGREFFPMEVELAKLIGQSVWDVSRSSTGNLVEWYLLRVAYERNELAPNKPGGEEYQRRMRSSYIGGYVKEPEKGLWESIAYLDFRSSAGSIIVTHNVSPDTLEKECKNYDVAPIVGYRFCKDFKGFIPSILEDLIETRQKVKRKMKATIDPIEKKMLDYRQRALKILANSYYGYQGYPKARWYSKECAESVTAWGRHYIETTIKEAEKFGFKVLYADTDGFFATIPNEKPETIKSKAKKFLKHINEKLPGMLELEYEGFYLRGFFVTKKKYALIDEDGHITTRGLEVVRRDWSEIAKETQAKVLEVILREGSIEKAAGIVKKVVEDLANYRVPVEKLIIHEQITRELKRYKATGPHVAIAKRLQARGIKVKPGTIISYVVLKGSKKISDRVILFDEYDSSRHKYDPDYYIHNQVLPAVLRILEAFGYKEKDLEYQRMKQTGLGAWLKMGKK

SEQ ID NO: 1220 - protein, 773 aa, unidentified; identical to SEQ ID NO: 620
  REGION 1..773: note = Description of Unknown: Synthetic polypeptide

SEQ ID NO: 1221 - protein, 773 aa, unidentified
  REGION 1..773: note = Description of Unknown: Synthetic polypeptide
MILDTDYITENGKPVIRIFKKEKGEFKIEYDRNFEPYIYALLEDDESIEDIKKITGERHGKKVRIIRVEKVKKKFLGEPIEVWKLVFEHPQDVPAIRDAIRSHPAVREIFEYDIPFAKRYLIDKGLVPMEGGEELKLLAFNIATFYHEGDEFAEGEILMISYADESGAKVITWKKIDLPYVEVVSTEREAIKRFLQVLREKDPDVLLTYNGDNFDFAYIKKRCEKLGLKFTIGRDGSEPKIQRMGDRFAVEVKGRIHLDLAPVVRHTIRLPTYTLEAVYEAVFGKKKEKVYAEEIAEAWKSEEGLKRVAQYSMEDARATYELGREFFPAEVELAKLIGQSVWDVSRSSTGNLVEWYLLRVAYERNELAPNKPGGEEYQRRMRSSYIGGYVKEPEKGLWESIAYLDFRSSAGSIIVTHNVSPDTLEKECKNYDVAPIVGYRFCKDFKGFIPSILEDLIETRQKVKRKMKATIDPIEKKMLDYRQRALKILANSYYGYQGYPKARWYSKECAESVTAWGRHYIETTIKEAEKFGFKVLYADTDGFFATIPNEKPETIKSKAKKFLKHINEKLPGMLELEYEGFYLRGFFVTKKKYALIDEDGHITTRGLEVVRRDWSEIAKETQAKVLEVILREGSIEKAAGIVKKVVEDLANYRVPVEKLIIHEQITRELKRYKATGPHVAIAKRLQARGIKVKPGTIISYVVLKGSKKISDRVILFDEYDSSRHKYDPDYYIHNQVLPAVLRILEAFGYKEKDLEYQRDKQTGLGAWLKMGKK

SEQ ID NO: 1222 - protein, 773 aa, unidentified
  REGION 1..773: note = Description of Unknown: Synthetic polypeptide
MILDTDYITENGKPVIRIFKKEKGEFKIEYDRNFEPYIYALLEDDESIEDIKKITGERHGKKVRIIRVEKVKKKFLGEPIEVWKLVFEHPQDYPAIRDAIRSHPAVREIFEYDIPFAKRYLIDKGLVPMEGGEELKLLAFAIATFYHEGDEFAEGEILMISYADESGAKVITWKKIDLPYVEVVSTEREAIKRFLQVLREKDPDVLLTYNGDNFDFAYIKKRCEKLGLKFTIGRDGSEPKIQRMGDRFAVEVKGRIHLDLAPVVRHTIRLPTYTLEAVYEAVFGKKKEKVYAEEIAEAWKSEEGLARVAQYSMEDARATYELGREFFPMEVELAKLIGQSVWDVSRSSTGNLVEWYLLRVAYERNELAPNKPGGEEYQRRMRSSYIGGYVKEPEKGLWESIAYLDFRSSAGSIIVTHNVSPDTLEKECKNYDVAPIVGYRFCKDFKGFIPSILEDLIETRQKVKRKMKATIDPIEKKMLDYRQRALKILANSYYGYQGYPKARWYSKECAESVTAWGRHYIETTIKEAEKFGFKVLYADTDGFFATIPNEKPETIKSKAKKFLKHINEKLPGMLELEYEGFYLRGFFVTKKKYALIDEDGHITTRGLEVVRRDWSEIAKETQAKVLEVILREGSIEKAAGIVKKVVEDLANYRVPVEKLIIHEQITRELKRYKATGPHVAIAKRLQARGIKVKPGTIISYVVLKGSKKISDRVILFDEYDSSRHKYDPDYYIHNQVLPAVLRILEAFGYKEKDLEYQRDKQTGLGAWLKMGKK

SEQ ID NO: 1223 - protein, 773 aa, unidentified; identical to SEQ ID NO: 607
  REGION 1..773: note = Description of Unknown: Synthetic polypeptide

SEQ ID NO: 1224 - protein, 773 aa, unidentified; identical to SEQ ID NO: 1202
  REGION 1..773: note = Description of Unknown: Synthetic polypeptide

SEQ ID NO: 1225 - protein, 773 aa, unidentified
  REGION 1..773: note = Description of Unknown: Synthetic polypeptide
MILDTDYITENGKPVIRIFKKEKGEFKIEYDRNFEPYIYALLEDDESIEDIKKITGERHGKKVRIIRVEKVKKKFLGEPIEVWKLVFEHPQDYPAIRDAIRSHPAVREIFEYDIPFAKRYLIDKGLVPMEGGEELKLLAFAIATFYHEGDEFAEGEILMISYADESGAKVITWKKIDLPYVEVVSTEREAIKRFLQVLREKDPDVLLTYNGDNFDFAYIKKRCEKLGLKFTIGRDGSEPKIQRMGDRFAVEVKGRIHLDLAPVVRHTIRLPTYTLEAVYEAVFGKKKEKVYAEEIAEAWKSEEGLARVAQYSMEDARATYELGREFFPMEVELAKLIGQSVWDVSRSSTGNLVEWYLLRVAYERNELAPNKPGGEEYQRRMRSSYEGGYVKEPEKGLWESIAYLDFRSSAGSIIVTHNVSPDTLEKECKNYDVAPIVGYRFCKDFKGFIPSILEDLIETRQKVKRKMKATIDPIEKKMLDYRQRALKILANSYYGYQGYPKARWYSKECAESVTAWGRHYIETTIKEAEKFGFKVLYADTDGFFATIPNEKPETIKSKAKKFLKHINEKLPGMLELEYEGFYLRGFFVTKKKYALIDEDGHITTRGLEVVRRDWSEIAKETQAKVLEVILREGSIEKAAGIVKKVVEDLANYRVPVEKLIIHEQITRELKRYKATGPHVAIAKRLQARGIKVKPGTIISYVVLKGSKKISDRVILFDEYDSSRHKYDPDYYIHNQVLPAVLRILEAFGYKEKDLEYQRDKQTGLGAWLKMGKK

SEQ ID NO: 1226 - protein, 773 aa, unidentified
  REGION 1..773: note = Description of Unknown: Synthetic polypeptide
MILDTDYITENGKPVIRIFKKEKGEFKIEYDRNFEPYIYALLEDDESIEDIKKITGERHGKKVRIIRVEKVKKKFLGEPIEVWKLVFEHPQDYPAIRDAIRSHPAVREIFEYDIPFAARYLIDKGLVPMEGGEELKLLAFAIATFYHEGDEFAEGEILMISYADESGAKVITWKKIDLPYVEVVSTEREAIKRFLQVLREKDPDVLLTYNGDNFDFAYIKKRCEKLGLKFTIGRDGSEPKIQRMGDRFAVEVKGRIHLDLAPVVRHTIRLPTYTLEAVYEAVFGKKKEKVYAEEIAEAWKSEEGLKRVAQYSMEDARATYELGREFFPMEVELAKLIGQSVWDVSRSSTGNLVEWYLLRVAYERNELAPNKPGGEEYQRRMRSSYIGGYVKEPEKGLWESIAYLDFRSSAGSIIVTHNVSPDTLEKECKNYDVAPIVGYRFCKDFKGFIPSILEDLIETRQKVKRKMKATIDPIEKKMLDYRQRALKILANSYYGYQGYPKARWYSKECAESVTAWGRHYIETTIKEAEKFGFKVLYADTDGFFATIPNEKPETIKSKAKKFLKHINEKLPGMLELEYEGFYLRGFFVTKKKYALIDEDGHITTRGLEVVRRDWSEIAKETQAKVLEVILREGSIEKAAGIVKKVVEDLANYRVPVEKLIIHEQITRELKRYKATGPHVAIAKRLQARGIKVKPGTIISYVVLKGSKKISDRVILFDEYDSSRHKYDPDYYIHNQVLPAVLRILEAFGYKEKDLEYQRMKQTGLGAWLKMGKK

SEQ ID NO: 1227 - protein, 773 aa, unidentified
  REGION 1..773: note = Description of Unknown: Synthetic polypeptide
MILDTDYITENGKPVIRIFKKEKGEFKIEYDRNFEPYIYALLEDDESIEDIKKITGERHGKKVRIIRVEKVKKKFLGEPIEVWKLVFEHPQDYPAIRDAIRSHPAVREIFEYDIPFAKRYLIDKGLVPMEGGEELKLLAFAIATFYHEGDEFAEGEILMISYADESGAKVITWKKIDLPYVEVVSTEREAIKRFLQVLREKDPDVLLTYNGDNFDFAYIKKRCEKLGLKFTIGRDGSEPKIQRMGDRFAVEVKGRIHLDLAPVVRHTIRLPTYTLEAVYEAVFGKKKEQVYAEEIAEAWKSEEGLARVAQYSMEDARATYELGREFFPMEVELAKLIGQSVWDVSRSSTGNLVEWYLLRVAYERNELAPNKPGGEEYQRRMRSSYIGGYVKEPEKGLWESIAYLDFRSSAGSIIVTHNVSPDTLEKECKNYDVAPIVGYRFCKDFKGFIPSILEDLIETRQKVKRKMKATIDPIEKKMLDYRQRALKILANSYYGYQGYPKARWYSKECAESVTAWGRHYIETTIKEAEKFGFKVLYADTDGFFATIPNEKPETIKSKAKKFLKHINEKLPGMLELEYEGFYLRGFFVTKKKYALIDEDGHITTRGLEVVRRDWSEIAKETQAKVLEVILREGSIEKAAGIVKKVVEDLANYRVPVEKLIIHEQITRELKRYKATGPHVAIAKRLQARGIKVKPGTIISYVVLKGSKKISDRVILFDEYDSSRHKYDPDYYIHNQVLPAVLRILEAFGYKEKDLEYQRDKQTGLGAWLKMGKK

SEQ ID NO: 1228 - protein, 773 aa, unidentified
  REGION 1..773: note = Description of Unknown: Synthetic polypeptide
MILDTDYITENGKPVIRIFKKEKGEFKIEYDRNFEPYIYALLEDDESIEDIKKITGERHGKKVRIIRVEKVKKNFLGEPIEVWKLVFEHPQDYPAIRDAIRSHPAVREIFEYDIPFAKRYLIDKGLVPMEGGEELKLLAFAIATFYHEGDEFAEGEILMISYADESGAKVITWKKIDLPYVEVVSTEREAIKRFLQVLREKDPDVLLTYNGDNFDFAYIKKRCEKLGLKFTIGRDGSEPKIQRMGDRFAVEVKGRIHLDLAPVVRHTIRLPTYTLEAVYEAIFGKKKEKVYAEEIAEAWKSEEGLKRVAQYSMEDARATYELGREFFPMEVELAKLIGQSVWDVSRSSTGNLVEWYLLRVAYERNELAPNKPGGEEYQRRMRSSYIGGYVKEPEKGLWESIAYLDFRSSAGSIIVTHNVSPDTLEKECKNYDVAPIVGYRFCKDFKGFIPSILEDLIETRQKVKRKMKATIDPIEKKMLDYRQRALKILANSYYGYQGYPKARWYSKECAESVTAWGRHYIETTIKEAEKFGFKVLYADTDGFFATIPNEKPETIKSKAKKFLKHINEKLPGMLELEYEGFYLRGFFVTKKKYALIDEDGHITTRGLEVVRRDWSEIAKETQAKVLEVILREGSIEKAAGIVKKVVEDLANYRVPVEKLIIHEQITRELKRYKATGPHVAIAKRLQARGIKVKPGTIISYVVLKGSKKISDRVILFDEYDSSRHKYDPDYYIHNQVLPAVLRILEAFGYKEKDLEYQRMKQTGLGAWLKMGKK

SEQ ID NO: 1229 - protein, 773 aa, unidentified
  REGION 1..773: note = Description of Unknown: Synthetic polypeptide
MILDTDYITENGKPVIRIFKKEKGEFKIEYDRNFEPYIYALLEDDESIEDIKKITGERHGKKVRIIRVEKVKKKFLGEPIEVWKLVFEHPQDVPAIRDAIRSHPAVREIFEYDIPFAKRYLIDKGLVPMEGGEELKLLAFNIETFYHEGDEFAEGEILMISYADESGAKVITWKKIDLPYVEVVSTEREAIKRFLQVLREKDPDVLLTYNGDNFDFAYIKKRCEKLGLKFTIGRDGSEPKIQRMGDRFAVEVKGRIHLDLAPVVRHTIRLPTYTLEAVYEAVFGKKKEKVYAEEIAEAWKSEEGLKRVAQYSMEDARATYELGREFFPLEVELAKLIGQSVWDVSRSSTGNLVEWYLLRVAYERNELAPNKPGGEEYQRRMRSSYIGGYVKEPEKGLWESIAYLDFRSSAGSIIVTHNVSPDTLEKECKNYDVAPIVGYRFCKDFKGFIPSILEDLIETRQKVKRKMKATIDPIEKKMLDYRQRALKILANSYYGYQGYPKARWYSKECAESVTAWGRHYIETTIKEAEKFGFKVLYADTDGFFATIPNEKPETIKSKAKKFLKHINEKLPGMLELEYEGFYLRGFFVTKKKYALIDEDGHITTRGLEVVRRDWSEIAKETQAKVLEVILREGSIEKAAGIVKKVVEDLANYRVPVEKLIIHELITRELKRYKATGPHVAIAKRLQARGIKVKPGTIISYVVLKGSKKISDRVILFDEYDSSRHKYDPDYYIHNQVLPAVLRILEAFGYKEKDLEYQRDKQTGLGAWLKMGKK

SEQ ID NO: 1230 - protein, 773 aa, unidentified; identical to SEQ ID NO: 76
  REGION 1..773: note = Description of Unknown: Synthetic polypeptide

SEQ ID NO: 1231 - protein, 766 aa, unidentified
  REGION 1..766: note = Description of Unknown: Synthetic polypeptide
MILDTDYITENGKPVIRIFKKEKGEFKIEYDRNFEPYIYALLEDDESIEDIKKITGERHGKKVRIIRVEKVKKKFLGEPIEVWKLVFEHPQDVPAIRDAIRSHPAVREIFEYDIPFAKRYLIDKGLVPMEGGEELKLLAFNIATFYHEGDEFAEGEILMISYADESGAKVITWKKIDLPYVEVVSTEREAIKRFLQVLREKDPDVLLTYNGDNFDFAYIKKRCEKLGLKFTIGRDGSEPKIQRMGDRFAVEVKGRIHLDLAPVVRHTIRLPTYELEAVYEAVFGKKKEKVYAEEIAEAWKSEEGLKRVAQYSMEDARATYELGREFFPLEVELAKLIGQSVWDVSRSSTGNLVEWYLLRVAYERNELAPNKPGGEEYQRRMRSSYIGGYVKEPEKGLWESIAYLDFRSSAGSIIVTHNVSPDTLEKECKNYDVAPIVGYRFCKDFKGFIPSILEDLIETRQKVKRKMKATIDPIEKKMLDYRQRALKILANSYYGYQGYPKARWYSKECAESVTAWGRHYIETTIKEAEKFGFKVLYADTDGFFATIPNEKPETIKSKAKKFLKHINEKLPGMLELEYEGFYLRGFFVTKKKYALIDEDGHITTRGLEVVRRDWSEIAKETQAKVLEVILREGSIEKAAGIVKKVVEDLANYRVPVEKLIIHEQITRELKRYKATGPHVAIAKRLQARGIKVKPGTIISYVVLKGSKKISDRVILFDEYDSSRHKYDPDYYIHNQVLPAVLRILEAFGYKEKDLEYQRDKQTGLGA

SEQ ID NO: 1232 - protein, 766 aa, unidentified
  REGION 1..766: note = Description of Unknown: Synthetic polypeptide
MILDTDYITENGKPVIRIFKKEKGEFKIEYDRNFEPYIYALLEDDESIEDIKKITGERHGKKVRIIRVEKVKKKFLGEPIEVWKLVFEHPQDVPAIRDAIRSHPAVREIFEYDIPFAKRYLIDKGLVPMEGGEELKLLAFNIATFYHEGDEFAEGEILMISYADESGAKVITWKKIDLPYVEVVSTEREAIKRFLQVLREKDPDVLLTYNGDNFDFAYIKKRCEKLGLKFTIGRDGSEPKIQRMGDRFAVEVKGRIHLDLAPVVRHTIRLPTYTLEAVYEAVFGKKKEKVYAEEIAEAWKSEEGLKRVAQYSMEDARATYELGREFFPLEVELAKLIGQSVWDVSRSSTGNLVEWYLLRVAYERNELAPNQPGGEEYQRRMRSSYIGGYVKEPEKGLWESIAYLDFRSSAGSIIVTHNVSPDTLEKECKNYDVAPIVGYRFCKDFKGFIPSILEDLIETRQKVKRKMKATIDPIEKKMLDYRQRALKILANSYYGYQGYPKARWYSKECAESVTAWGRHYIETTIKEAEKFGFKVLYADTDGFFATIPNEKPETIKSKAKKFLKHINEKLPGMLELEYEGFYLRGFFVTKKKYALIDEDGHITTRGLEVVRRDWSEIAKETQAKVLEVILREGSIEKAAGIVKKVVEDLANYRVPVEKLIIHEFITRELKRYKATGPHVAIAKRLQARGIKVKPGTIISYVVLKGSKKISDRVILFDEYDSSRHKYDPDYYIHNQVLPAVLRILEAFGYKEKDLEYQRDKQTGLGA

SEQ ID NO: 1233 - protein, 773 aa, unidentified
  REGION 1..773: note = Description of Unknown: Synthetic polypeptide
MILDTDYITENGKPVIRIFKKEKGEFKIEYDRNFEPYIYALLEDDESIEDIKKITGERHGKKVRIIRVEKVKKKFLGEPIEVWKLVFEHPQDYPAIRDAIRSHPAVREIFEYDIPFAKRYLIDKGLVPMEGGEELKLLAFAIATFYHEGDEFAEGEILMISYADESGAKVITWKKIDLPYVEVVSTEREAIKRFLQVLREKDPDVLLTYNGDNFDFAYIKKRCEKLGLKFTIGRDGSEPKIQRMGDRFAVEVKGRIHLDLAPVVRHTIRLPTYTLEAVYEAVFGKKKEKVYAEEIAEAWKSEEGLKRVAQYSMEDARATYELGREFFPMEVELAKLIGQSVWDVSRSSTGNLVEWYLLRVAYERNELAPNKPGGEEYQRRMRSSYIGGYVKEPEKGLWESIAYLDFRSSAGSIIVTHNVSPDTLEKECKNYDVAPEVGYRFCKDFKGFIPSILEDLIETRQKVKRKMKATIDPIEKKMLDYRQRALKILANSYYGYQGYPKARWYSKECAESVTAWGRQYIETTIKEAEKFGFKVLYADTDGFFATIPNEKPETIKSKAKKFLKHINEKLPGMLELEYEGFYLRGFFVTKKKYALIDEDGHITTRGLEVVRRDWSEIAKETQAKVLEVILREGSIEKAAGIVKKVVEDLANYRVPVEKLIIHEQITRELKRYKATGPHVAIAKRLQARGIKVKPGTIISYVVLKGSKKISDRVILFDEYDSSRHKYDPDYYIHNQVLPAVLRILEAFGYKEKDLEYQRMKQTGLGAWLKMGKK

SEQ ID NO: 1234 - protein, 773 aa, unidentified
  REGION 1..773: note = Description of Unknown: Synthetic polypeptide
MILDTDYITENGKPVIRIFKKEKGEFKIEYDRNFEPYIYALLEDDESIEDIKKITGERHGKKVRIIRVEKVKKKFLGEPIEVWKLVFEHPQDYPAIRDAIRSHPAVREIFEYDIPFAKRYLIDKGLVPMEGGEELKLLAFAIATFYHEGDEFAEGEILMISYADESGAKVITWKKIDLPYVEVVSTEREAIKRFLQVLREKDPDVLLTYNGDNFDFAYIKKRCEKLGLKFTIGRDGSEPKIQRMGDRFAVEVKGRIHLDLAPVVRHTIRLPTYTLEAVYEAVFGKKKEKVYAEEIAEAWKSEEGLKRVAQYSMEDARATYELGREFFPMEVELAKLIGQSVWDVSRSSTGNLVEWYLLRVAYERNELAPNKPGGEEYQRRMRSSYIGGYVKEPEKGLWESIAYLDFRSSSGSIIVTHNVSPDTLEKECKNYDVAPIVGYRFCKDFKGFIPSILEDLIETRQKVKRKMKATIDPIEKKMLDYRQRALKILANSYYGYQGYPKARWYSKECAESVTAWGRHYIETTIKEAEKFGFKVLYADTDGFFATIPNEKPETIKSKAKKFLKHINEKLPGMLELEYEGFYLRGFFVTKKKYALIDEDGHITTRGLEVVRRDWSEIAKETQAKVLEVILREGSIEKAAGIVKKVVEDLANYRVPVEKLIIHEQITRELKRYKATGPHVAIAKRLQARGIKVKPGTIISYVVLKGSKKISDRVILFDEYDSSRHKYDPDYYIHNQVLPAVLRILEAFGYKEKDLEYQRMKQTGLGAWLKMGKK

SEQ ID NO: 1235 - protein, 773 aa, unidentified
  REGION 1..773: note = Description of Unknown: Synthetic polypeptide
MILDTDYITENGKPVIRIFKKEKGEFKIEYDRNFEPYIYALLEDDESIEDIKKITGERHGKKVRIIRVEKVKKNFLGEPIEVWKLVFEHPQDYPAIRDAIRSHPAVREIFEYDIPFAKRYLIDKGLVPMEGGEELKLLAFAIATFYHEGDEFAEGEILMISYADESGAKVITWKKIDLPYVEVVSTEREAIKRFLQVLREKDPDVLLTYNGDNFDFAYIKKRCEKLGLKFTIGRDGSEPKIQRMGDRFAVEVKGRIHLDLAPVVRHTIRLPTYTLEAVYEAVFGKKKEKVYAEEIAEAWKSEEGLKRVAQYSMEDARATYELGREFFPMEVELAKLIGQSVWDVSRSSTGNLVEWYLLRVAYERNELAPNKPGGEEYQRRMRSSYIGGYVKEPEKGLWESIAYLDFRSSAGSIIVTHNVSPDTLEKECKNYDVAPIVGYRFCKDFKGFIPSILEDLIETRQKVKRKMKATIDPIEKKMLDYRQRALKILANSYYGYQGYPKARWYSKECAESVTAWGRHYIETTIKEAEKFGFKVLYADTDGFFATIPNEKPETIKSKAKKFLKHINEKLPGMLELEYEGFYLRGFFVTKKKYALIDEDGHITTRGLEVVRRDWSEIAKETQAKVLEVILREGSIEKAVGIVKKVVEDLANYRVPVEKLIIHEQITRELKRYKATGPHVAIAKRLQARGIKVKPGTIISYVVLKGSKKISDRVILFDEYDSSRHKYDPDYYIHNQVLPAVLRILEAFGYKEKDLEYQRMKQTGLGAWLKMGKK

SEQ ID NO: 1236 - protein, 766 aa, unidentified
  REGION 1..766: note = Description of Unknown: Synthetic polypeptide
MILDTDYITENGKPVIRIFKKEKGEFKIEYDRNFEPYIYALLEDDESIEDIKKITGERHGKKVRIIRVEKVKKKFLGEPIEVWKLVFEHPQDLPAIRDAIRSHPAVREIFEYDIPFAKRYLIDKGLVPMEGGEELKLLAFNIATFYHEGDEFAEGEILMISYADESGAKVITWKKIDLPYVEVVSTEREAIKRFLQVLREKDPDVLLTYNGDNFDFAYIKKRCEKLGLKFTIGRDGSEPKIQRMGDRFAVEVKGRIHLDLAPVVRHTIRLPTYTLEAVYEAVFGKKKEKVYAEEIAEAWKSEEGLKRVAQYSAEDARATYELGREFFPLEVELAKLIGQSVWDVSRSSTGNLVEWYLLRVAYERNELAPNKPGGEEYQRRMRSSYIGGYVKEPEKGLWESIAYLDFRSSAGSIIVTHNVSPDTLEKECKNYDVAPIVGYRFCKDFKGFIPSILEDLIETRQKVKRKMKATIDPIEKKMLDYRQRALKILANSYYGYQGYPKARWYSKECAESVTAWGRHYIETTIKEAEKFGFKVLYADTDGFFATIPNEKPETIKSKAKKFLKHINEKLPGMLELEYEGFYLRGFFVTKKKYALIDEDGHITTRGLEVVRRDWSEIAKETQAKVLEVILREGSIEKAAGIVKKVVEDLANYRVPVEKLIIHEQITRELKRYKATGPHVAIAKRLQARGIKVKPGTIISYVVLKGSKKISDRVILFDEYDSSRHKYDPDYYIHNQVLPAVLRILEAFGYKEKDLEYQRDKQTGLGA

SEQ ID NO: 1237 - protein, 773 aa, unidentified
  REGION 1..773: note = Description of Unknown: Synthetic polypeptide
MILDTDYITENGKPVIRIFKKEKGEFKIEYDRNFEPYIYALLEDDESIEDIKKITGERHGKKVRIIRVEKVKKKFLGEPIEVWKLVFEHPQDYPAIRDAIRSHPAVREIFEYDIPFAKRYLIDKGLVPMEGGEELKLLAFAIATFYHEGDEFAEGEILMISYADESGAKVITWKKIDLPYVEVVSTEREAIKRFLQVLREKDPDVLLTYNGDNFDFQYIKKRCEKLGLKFTIGRDGSEPKIQRMGDRFAVEVKGRIHLDLAPVVRHTIRLPTYTLEAVYEAVFGKKKEKVYAEEIAEAWKSEEGLKRVAQYSMEDARATYELGREFFPMEVELAKLIGQSVWDVSRSSTGNLVEWYLLRVAYERNELAPNKPGGEEYQRRMRSSYIGGYVKEPEKGLWESIAYLDFRSSAGSIIVTHNVSPDTLEKECKNYDVAPEVGYRFCKDFKGFIPSILEDLIETRQKVKRKMKATIDPIEKKMLDYRQRALKILANSYYGYQGYPKARWYSKECAESVTAWGRHYIETTIKEAEKFGFKVLYADTDGFFATIPNEKPETIKSKAKKFLKHINEKLPGMLELEYEGFYLRGFFVTKKKYALIDEDGHITTRGLEVVRRDWSEIAKETQAKVLEVILREGSIEKAAGIVKKVVEDLANYRVPVEKLIIHEQITRELKRYKATGPHVAIAKRLQARGIKVKPGTIISYVVLKGSKKISDRVILFDEYDSSRHKYDPDYYIHNQVLPAVLRILEAFGYKEKDLEYQRMKQTGLGAWLKMGKK

SEQ ID NO: 1238 - protein, 773 aa, unidentified
  REGION 1..773: note = Description of Unknown: Synthetic polypeptide
MILDTDYITENGKPVIRIFKKEKGEFKIEYDRNFEPYIYALLEDDESIEDIKKITGERHGKKVRIIRVEKVKKKFLGEPIEVWKLVFEHPQDVPAIRDAIRSHPAVREIFEYDIPFAKRYLIDKGLVPMEGGEELKLLAFNIATFYHEGDEFAEGEILMISYADESGAKVITWKKIDLPYVEVVSTEREAIKRFLQVLREKDPDVLLTYNGDNFDFAYIKKRCEKLGLKFTIGRDGSEPKIQRMGDRFAVEVKGRIHLDLAPVVRHTIRLPTYTLEAVYEAVFGKKKEKVYAEEIAEAWKSEEGLKRVAQYSMEDARATYELGREFFPLEVELAKLIGQSVWDVSRSSTGNLVEWYLLRVAYERNELAPNKPGGEEYQRRMRSSYIGGYVKEPEKGLWESIAYLDFRSSAGSIIVTHNVSPDTLEKECKNYDVAPIVGYRFCKDFKGFIPSILEDLIETRQKVKRKMKATIDPIEKKMLDYRQRALKILANSYYGYQGYPKARWYSKECAESVTAWGRHYIETTIKEAEKFGFKVLYADTDGFFATIPNEKPETIKSKAKKFLKHINEKLPGMLELEYEGFYLRGFFVTKKKYALIDEDGHITTRGLEVVRRDWSEIAKETQAKVLEVILREGSIEKAAGIVKKVVEDLANYRVPVEKLIIHEFITRELKRYKATGPHVAIAKRLQARGIKVKPGTIISYVVLKGSKKISDRVILFDEYDSSRHKYDPDYYIHNQVLPAVLRILEAFGYKEKDLEYQRDKQTGLGAWLKMGKK

SEQ ID NO: 1239 - protein, 773 aa, unidentified
  REGION 1..773: note = Description of Unknown: Synthetic polypeptide
MILDTDYITENGKPVIRIFKKEKGEFKIEYDRNFEPYIYALLEDDESIEDIKKITGERHGKKVRIIRVEKVKKNFLGEPIEVWKLVFEHPQDYPAIRDAIRSHPAVREIFEYDIPFAKRYLIDKGLIPMEGGEELKLLAFAIATFYHEGDEFAEGEILMISYADESGAKVITWKKIDLPYVEVVSTEREAIKRFLQVLREKDPDVLLTYNGDNFDFAYIKKRCEKLGLKFTIGRDGSEPKIQRMGDRFAVEVKGRIHLDLAPVVRHTIRLPTYTLEAVYEAVFGKKKEKVYAEEIAEAWKSEEGLKRVAQYSMEDARATYELGREFFPMEVELAKLIGQSVWDVSRSSTGNLVEWYLLRVAYERNELAPNKPGGEEYQRRMRSSYIGGYVKEPEKGLWESIAYLDFRSSAGSIIVTHNVSPDTLEKECKNYDVAPIVGYRFCKDFKGFIPSILEDLIETRQKVKRKMKATIDPIEKKMLDYRQRALKILANSYYGYQGYPKARWYSKECAESVTAWGRHYIETTIKEAEKFGFKVLYADTDGFFATIPNEKPETIKSKAKKFLKHINEKLPGMLELEYEGFYLRGFFVTKKKYALIDEDGHITTRGLEVVRRDWSEIAKETQAKVLEVILREGSIEKAAGIVKKVVEDLANYRVPVEKLIIHEQITRELKRYKATGPHVAIAKRLQARGIKVKPGTIISYVVLKGSKKISDRVILFDEYDSSRHKYDPDYYIHNQVLPAVLRILEAFGYKEKDLEYQRMKQTGLGAWLKMGKK

SEQ ID NO: 1240 - protein, 773 aa, unidentified
  REGION 1..773: note = Description of Unknown: Synthetic polypeptide
MILDTDYITENGKPVIRIFKKEKGEFKIEYDRNFEPYIYALLEDDESIEDIKKITGERHGKKVRIIRVEKVKKNFLGEPIEVWKLVFEHPQDYPAIRDAIRSHPAVREIFEYDIPFAKRYLIDKGLVPMEGGEELKLLAFAIATFYHEGDEFAEGEILMISYADESGAKVITWKKIDLPYVEVVSTEREAIKRFLQVLREKDPDVLLTYNGDNFDFAYIKKRCEKLGLKFTIGRDGSEPKIQRMGDRFAVEVKGRIHLDLAPVIRHTIRLPTYTLEAVYEAVFGKKKEKVYAEEIAEAWKSEEGLKRVAQYSMEDARATYELGREFFPMEVELAKLIGQSVWDVSRSSTGNLVEWYLLRVAYERNELAPNKPGGEEYQRRMRSSYIGGYVKEPEKGLWESIAYLDFRSSAGSIIVTHNVSPDTLEKECKNYDVAPIVGYRFCKDFKGFIPSILEDLIETRQKVKRKMKATIDPIEKKMLDYRQRALKILANSYYGYQGYPKARWYSKECAESVTAWGRHYIETTIKEAEKFGFKVLYADTDGFFATIPNEKPETIKSKAKKFLKHINEKLPGMLELEYEGFYLRGFFVTKKKYALIDEDGHITTRGLEVVRRDWSEIAKETQAKVLEVILREGSIEKAAGIVKKVVEDLANYRVPVEKLIIHEQITRELKRYKATGPHVAIAKRLQARGIKVKPGTIISYVVLKGSKKISDRVILFDEYDSSRHKYDPDYYIHNQVLPAVLRILEAFGYKEKDLEYQRMKQTGLGAWLKMGKK

SEQ ID NO: 1241 - protein, 773 aa, unidentified
  REGION 1..773: note = Description of Unknown: Synthetic polypeptide
MILDTDYITENGKPVIRIFKKEKGEFKIEYDRNFEPYIYALLEDDESIEDIKKITGERHGKKVRIIRVEKVKKKFLGEPIEVWKLVFEHPQDYPAIRDAIRSHPAVREIFEYDIPFAKRYLIDKGLVPMEGGEELKLLAFAIATFYHEGDEFAEGEILMISYADESGAKVITWKKIDLPYVEVVSTEREAIKRFLQVLREKDPDVLLTYNGDNFDFAYIKKRCEKLGLKFTIGRDGSEPKIQRMGDRFAVEVKGRIHLDLAPVVRHTIRLPTYTLEAVYEAVFGKKKEKVYAEEIAEAWKSEEGLKRVAQYSMEDARATYELGREFFPMEVELAKLIGQSVWDVSRSSTGNLVEWYLLRVAYERNELAPNKPGGEEYQRRMRSSYIGGYVKEPEKGLWESIAYLDFRSSAGSIIVTHNVSPDTLEKECKNYDVAPIVGYRFCKDFKGFIPSILEDLIETRQKVKRKMKATIDPIEKKMLDYRQRALRILANSYYGYQGYPKARWYSKECAESVTAWGRHYIETTIKEAEKFGFKVLYADTDGFFATIPNEKPETIKSKAKKFLKHINEKLPGMLELEYEGFYLRGFFVTKKKYALIDEDGHITTRGLEVVRRDWSEIAKETQAKVLEVILREGSIEKAAGIVKKVVEDLANYRVPVEKLIIHEQITRELKRYKATGPHVAIAKRLQARGIKVKPGTIISYVVLKGSKKISDRVILFDEYDSSRHKYDPDYYIHNQVLPAVLRILEAFGYKEKDLEYQRMKQTGLGAWLKMGKK

SEQ ID NO: 1242 - protein, 773 aa, unidentified; identical to SEQ ID NO: 110
  REGION 1..773: note = Description of Unknown: Synthetic polypeptide

SEQ ID NO: 1243 - protein, 773 aa, unidentified
  REGION 1..773: note = Description of Unknown: Synthetic polypeptide
MILDTDYITENGKPVIRIFKKEKGEFKIEYDRNFEPYIYALLEDDESIEDIKKITGERHGKKVRIIRVEKVKKNFLGEPIEVWKLVFEHPQDYPAIRDAIRSHPAVREIFEYDIPFAKRYLIDKGLVPMEGGEELKLLAFAIATFYHEGDEFAEGEILMISYADESGAKVITWKKIDLPYVEVVSTEREAIKRFLQVLREKDPDVLLTYNGDNFDFQYIKKRCEKLGLKFTIGRDGSEPKIQRMGDRFAVEVKGRIHLDLAPVVRHTIRLPTYTLEAVYEAVFGKKKEKVYAEEIAEAWKSEEGLARVAQYSVEDARATYELGREFFPMEVELAKLIGQSVWDVSRSSTGNLVEWYLLRVAYERNELAPNQPGGEEYQRRMRSSYIGGYVKEPEKGLWESIAYLDFRSSAGSIIVTHNVSPDTLEKECKNYDVAPIVGYRFCKDFKGFIPSILEDLIETRQKVKRKMKATIDPIEKKMLDYRQRALKILANSYYGYQGYPKARWYSKECAESVTAWGRHYIETTIKEAEKFGFKVLYADTDGFFATIPNEKPETIKSKAKKFLKHINEKLPGMLELEYEGFYLRGFFVTKKKYALIDEDGHITTRGLEVVRRDWSEIAKETQAKVLEVILREGSIEKAAGIVKKVVEDLANYRVPVEKLIIHEQITRELKRYKATGPHVAIAKRLQARGIKVKPGTIISYVVLKGSKKISDRVILFDEYDSSRHKYDPDYYIHNQVLPAVLRILEAFGYKEKDLEYQRDKQTGLGAWLKMGKK

SEQ ID NO: 1244 - protein, 773 aa, unidentified
  REGION 1..773: note = Description of Unknown: Synthetic polypeptide
MILDTDYITENGKPVIRIFKKEKGEFKIEYDRNFEPYIYALLEDDESIEDIKKITGERHGKKVRIIRVEKVKKKFLGEPIEVWKLVFEHPQDYPAIRDAIRSHPAVREIFEYDIPFAKRYLIDKGLVPMEGGEELKLLAFAIATFYHEGDEFAEGEILMISYADESGAKVITWKKIDLPYVEVVSTEREAIKRFLQVLREKDPDVLLTYNGDNFDFAYIKKRCEKLGLKFTIGRDGSEPKIQRMGDRFAVEVKGRIHLDLAPVVRHTIRLPTYTLEAVYEAVFGKKKEKVYAEEIAEAWKSEEGLKRVAQYSMEDARATYELGREFFPMEVELAKLIGQSVWDVSRSSTGNLVEWYLLRVAYERNELAPNKPGGEEYQRRMRSSYIGGYVKEPEKGLWESIAYLDFRSSAGSIIVTHNVSPDTLEKECKNYDVAPIVGYRFCKDFKGFIPSILEDLIETRQKVKRKMKATIDPIEKKMLDYRQRALKILANSYYGYQGYPKARWYSKECAESVTAWGREYIETTIKEAEKFGFKVLYADTDGFFATIPNEKPETIKSKAKKFLKHINEKLPGMLELEYEGFYLRGFFVTKKKYALIDEDGHITTRGLEVVRRDWSEIAKETQAKVLEVILREGSIEKAAGIVKKVVEDLANYRVPVEKLIIHEQITRELKRYKATGPHVAIAKRLQARGIKVKPGTIISYVVLKGSKKISDRVILFDEYDSSRHKYDPDYYIHNQVLPAVLRILEAFGYKEKDLEYQRMKQTGLGAWLKMGKK

SEQ ID NO: 1245 - protein, 773 aa, unidentified; identical to SEQ ID NO: 154
  REGION 1..773: note = Description of Unknown: Synthetic polypeptide

SEQ ID NO: 1246 - protein, 773 aa, unidentified
  REGION 1..773: note = Description of Unknown: Synthetic polypeptide
MILDTDYITENGKPVIRIFKKEKGEFKIEYDRNFEPYIYALLEDDESIEDIKKITGERHGKKVRIIRVEKVKKKFLGEPIEVWKLVFEHPQDYPAIRDAIRSHPAVREIFEYDIPFAKRYLIDKGLVPMEGGEELKLLAFAIATFYHEGDEFAEGEILMISYADESGAKVITWKKIDLPYVEVVSTEREAIKRFLQVLREKDPDVLLTYNGDNFDFAYIKKRCEKLGLKFTIGRDGSEPKIQRMGDRFAVEVKGRIHLDLAPVVRHTIRLPTYTLEAVYEAVFGKKKEKVYAEEIAEAWKSEEGLARVAQYSMEDARATYELGREFFPMEVELAKLIGQSVWDVSRSSTGNLVEWYLLRVAYERNELAPNKPGGEEYQRRMRSSYIGGYVKEPEKGLWESIAYLDFRSSAGSIIVTHNVSPDTLEKECKNYDVAPIVGYRFCKDFKGFIPSILEDLIETRQKVKRKMKATIDPIEKKMLDYRQRALKILANSYYGYQGYPKARWYSKECAESVTAWGRHYIETTIKEAEKFGFKVLYADTDGFFATIPNEKPETIKSKAKKFLKHINEKLPGMLELEYEGFYLRGFFVTKKKYALIDEDGHITTRGLEVVRRDWSEIAKETQAKVLEVILREGSIEKAAGIVKKVVEDLANYRVPVEKLIIHELITRELKRYKATGPHVAIAKRLQARGIKVKPGTIISYVVLKGSKKISDRVILFDEYDSSRHKYDPDYYIHNQVLPAVLRILEAFGYKEKDLEYQRDKQTGLGAWLKMGKK

SEQ ID NO: 1247 - protein, 766 aa, unidentified; identical to SEQ ID NO: 809
  REGION 1..766: note = Description of Unknown: Synthetic polypeptide

SEQ ID NO: 1248 - protein, 773 aa, unidentified
  REGION 1..773: note = Description of Unknown: Synthetic polypeptide
MILDTDYITENGKPVIRIFKKEKGEFKIEYDRNFEPYIYALLEDDESIEDIKKITGERHGKKVRIIRVEKVKKKFLGEPIEVWKLVFEHPQDYPAIRDAIRSHPAVREIYEYDIPFAKRYLIDKGLVPMEGGEELKLLAFAIATFYHEGDEFAEGEILMISYADESGAKVITWKKIDLPYVEVVSTEREAIKRFLQVLREKDPDVLLTYNGDNFDFAYIKKRCEKLGLKFTIGRDGSEPKIQRMGDRFAVEVKGRIHLDLAPVVRHTIRLPTYTLEAVYEAVFGKKKEKVYAEEIAEAWKSEEGLKRVAQYSMEDARATYELGREFFPMEVELAKLIGQSVWDVSRSSTGNLVEWYLLRVAYERNELAPNKPGGEEYQRRMRSSYIGGYVKEPEKGLWESIAYLDFRSSAGSIIVTHNVSPDTLEKECKNYDVAPIVGYRFCKDFKGFIPSILEDLIETRQKVKRKMKATIDPIEKKMLDYRQRALKILANSYYGYQGYPKARWYSKECAESVTAWGRHYIETTIKEAEKFGFKVLYADTDGFFATIPNEKPETIKSKAKKFLKHINEKLPGMLELEYEGFYLRGFFVTKKKYALIDEDGHITTRGLEVVRRDWSEIAKETQAKVLEVILREGSIEKAAGIVKKVVEDLANYRVPVEKLIIHEQITRELKRYKATGPHVAIAKRLQARGIKVKPGTIISYVVLKGSKKISDRVILFDEYDSSRHKYDPDYYIHNQVLPAVLRILEAFGYKEKDLEYQRMKQTGLGAWLKMGKK

SEQ ID NO: 1249 - protein, 773 aa, unidentified; identical to SEQ ID NO: 819
  REGION 1..773: note = Description of Unknown: Synthetic polypeptide

SEQ ID NO: 1250 - protein, 773 aa, unidentified
  REGION 1..773: note = Description of Unknown: Synthetic polypeptide
MILDTDYITENGKPVIRIFKKEKGEFKIEYDRNFEPYIYALLEDDESIEDIKKITGERHGKKVRIIRVEKVKKKFLGEPIEVWKLVFEHPQDYPAIRDAIRSHPAVREIFEYDIPFAKRYLIDKGLVPMEGGEELKLLAFAIATFYHEGDEFAEGEILMISYADESGAKVITWKKIDLPYVEVVSTEREAIKRFLQVLREKDPDVLLTYNGDNFDFAYIKKRCEKLGLKFTIGRDGSEPKIQRMGDRFAVEVKGRIHLDLAPVVRHTIRLPTYTLEAVYEAVFGKKKEKVYAEEIAEAWKSEEGLKRVAQYSMEDARATYELGREFFPMEVELAKLIGQSVWDVSRSSTGNLVEWYLLRVAYERNELAPNKPGGEEYQRRMRSSYIGGYVKEPEKGLWESIAYLDFRSSAGSIIVTHNVSPDTLEKECKNYDVAPIVGYRFCKDFKGFIPAILEDLIETRQKVKRKMKATIDPIEKKMLDYRQRALKILANSYYGYQGYPKARWYSKECAESVTAWGRHYIETTIKEAEKFGFKVLYADTDGFFATIPNEKPETIKSKAKKFLKHINEKLPGMLELEYEGFYLRGFFVTKKKYALIDEDGHITTRGLEVVRRDWSEIAKETQAKVLEVILREGSIEKAAGIVKKVVEDLANYRVPVEKLIIHEQITRELKRYKATGPHVAIAKRLQARGIKVKPGTIISYVVLKGSKKISDRVILFDEYDSSRHKYDPDYYIHNQVLPAVLRILEAFGYKEKDLEYQRMKQTGLGAWLKMGKK

SEQ ID NO: 1251 - protein, 773 aa, unidentified
  REGION 1..773: note = Description of Unknown: Synthetic polypeptide
MILDTDYITENGKPVIRIFKKEKGEFKIEYDRNFEPYIYALLEDDESIEDIKKITGERHGKKVRIIRVEKVKKKFLGEPIEVWKLVFEHPQDYPAIRDAIRSHPAVREIFEYDIPFAKRYLIDKGLVPMEGGEELKLLAFAIATFYHEGDEFAEGEILMISYADESGAKVITWKKIDLPYVEVVSTEREAIKRFLQVLREKDPDVLLTYNGDNFDFAYIKKRCEKLGLKFTIGRDGSEPKIQRMGDRFAVEVKGRIHLDLAPVVRHTIRLPTYTLEAVYEAVFGKKKEKVYAEEIAEAWKSEEGLKRVAQYSMEDARATYELGREFFPMEVELAKLIGQSVWDVSRSSTGNLVEWYLLRVAYERNNLAPNKPGGEEYQRRMRSSYIGGYVKEPEKGLWESIAYLDFRSSAGSIIVTHNVSPDTLEKECKNYDVAPIVGYRFCKDFKGFIPSILEDLIETRQKVKRKMKATIDPIEKKMLDYRQRALKILANSYYGYQGYPKARWYSKECAESVTAWGRHYIETTIKEAEKFGFKVLYADTDGFFATIPNEKPETIKSKAKKFLKHINEKLPGMLELEYEGFYLRGFFVTKKKYALIDEDGHITTRGLEVVRRDWSEIAKETQAKVLEVILREGSIEKAAGIVKKVVEDLANYRVPVEKLIIHEQITRELKRYKATGPHVAIAKRLQARGIKVKPGTIISYVVLKGSKKISDRVILFDEYDSSRHKYDPDYYIHNQVLPAVLRILEAFGYKEKDLEYQRMKQTGLGAWLKMGKK

SEQ ID NO: 1252 - protein, 773 aa, unidentified
  REGION 1..773: note = Description of Unknown: Synthetic polypeptide
MILDTDYITENGKPVIRIFKKEKGEFKIEYDRNFEPYIYAELEDDESIEDIKKITGERHGKKVRIIRVEKVKKKFLGEPIEVWKLVFEHPQDYPAIRDAIRSHPAVREIFEYDIPFAKRYLIDKGLVPMEGGEELKLLAFAIATFYHEGDEFAEGEILMISYADESGAKVITWKKIDLPYVEVVSTEREAIKRFLQVLREKDPDVLLTYNGDNFDFAYIKKRCEKLGLKFTIGRDGSEPKIQRMGDRFAVEVKGRIHLDLAPVVRHTIRLPTYTLEAVYEAVFGKKKEKVYAEEIAEAWKSEEGLKRVAQYSMEDARATYELGREFFPMEVELAKLIGQSVWDVSRSSTGNLVEWYLLRVAYERNELAPNKPGGEEYQRRMRSSYIGGYVKEPEKGLWESIAYLDFRSSAGSIIVTHNVSPDTLEKECKNYDVAPIVGYRFCKDFKGFIPSILEDLIETRQKVKRKMKATIDPIEKKMLDYRQRALKILANSYYGYQGYPKARWYSKECAESVTAWGRHYIETTIKEAEKFGFKVLYADTDGFFATIPNEKPETIKSKAKKFLKHINEKLPGMLELEYEGFYLRGFFVTKKKYALIDEDGHITTRGLEVVRRDWSEIAKETQAKVLEVILREGSIEKAAGIVKKVVEDLANYRVPVEKLIIHEQITRELKRYKATGPHVAIAKRLQARGIKVKPGTIISYVVLKGSKKISDRVILFDEYDSSRHKYDPDYYIHNQVLPAVLRILEAFGYKEKDLEYQRMKQTGLGAWLKMGKK

SEQ ID NO: 1253 - protein, 773 aa, unidentified
  REGION 1..773: note = Description of Unknown: Synthetic polypeptide
MILDTDYITENGKPVIRIFKKEKGEFKIEYDRNFEPYIYALLEDDESIEDIKKITGERHGKKVRIIRVEKVKKKFLGEPIEVWKLVFEHPQDVPAIRDAIRSHPAVREIFEYDIPFAKRYLIDKGLVPMEGGEELKLLAFNIATFEHEGDEFAEGEILMISYADESGAKVITWKKIDLPYVEVVSTEREAIKRFLQVLREKDPDVLLTYNGDNFDFAYIKKRCEKLGLKFTIGRDGSEPKIQRMGDRFAVEVKGRIHLDLAPVVRHTIRLPTYTLEAVYEAVFGKKKEKVYAEEIAEAWKSEEGLKRVAQYSMEDARATYELGREFFPLEVELAKLIGQSVWDVSRSSTGNLVEWYLLRVAYERNELAPNKPGGEEYQRRMRSSYIGGYVKEPEKGLWESIAYLDFRSSAGSIIVTHNVSPDTLEKECKNYDVAPIVGYRFCKDFKGFIPSILEDLIETRQKVKRKMKATIDPIEKKMLDYRQRALKILANSYYGYQGYPKARWYSKECAESVTAWGRHYIETTIKEAEKFGFKVLYADTDGFFATIPNEKPETIKSKAKKFLKHINEKLPGMLELEYEGFYLRGFFVTKKKYALIDEDGHITTRGLEVVRRDWSEIAKETQAKVLEVILREGSIEKAAGIVKKVVEDLANYRVPVEKLIIHEQITRELKRYKATGPHVAIAKRLQARGIKVKPGTIISYVVLKGSKKISDRVILFDEYDSSRHKYDPDYYIHNQVLPAVLRILEAFGYKEKDLEYQRDKQTGLGAWLKMGKK

SEQ ID NO: 1254 - protein, 773 aa, unidentified; identical to SEQ ID NO: 686
  REGION 1..773: note = Description of Unknown: Synthetic polypeptide

SEQ ID NO: 1255 - protein, 766 aa, unidentified
  REGION 1..766: note = Description of Unknown: Synthetic polypeptide
MILDTDYITENGKPVIRIFKKEKGEFKIEYDRNFEPYIYALLEDDESIEDIKKITGERHGKKVRIIRVEKVKKKFLGEPIEVWKLVFEHPQDIPAIRDAIRSHPAVREIFEYDIPFAKRYLIDKGLVPMEGGEELKLLAFNIATFYHEGDEFAEGEILMISYADESGAKVITWKKIDLPYVEVVSTEREAIKRFLQVLREKDPDVLLTYNGDNFDFAYIKKRCEKLGLKFTIGRDGSEPKIQRMGDRFAVEVKGRIHLDLAPVVRHTIRLPTYTLEAVYEAVFGKKKEKVYAEEIAEAWKSEEGLARVAQYSMEDARATYELGREFFPLEVELAKLIGQSVWDVSRSSTGNLVEWYLLRVAYERNELAPNKPGGEEYQRRMRSSYIGGYVKEPEKGLWESIAYLDFRSSAGSIIVTHNVSPDTLEKECKNYDVAPIVGYRFCKDFKGFIPSILEDLIETRQKVKRKMKATIDPIEKKMLDYRQRALKILANSYYGYQGYPKARWYSKECAESVTAWGRHYIETTIKEAEKFGFKVLYADTDGFFATIPNEKPETIKSKAKKFLKHINEKLPGMLELEYEGFYLRGFFVTKKKYALIDEDGHITTRGLEVVRRDWSEIAKETQAKVLEVILREGSIEKAAGIVKKVVEDLANYRVPVEKLIIHEQITRELKRYKATGPHVAIAKRLQARGIKVKPGTIISYVVLKGSKKISDRVILFDEYDSSRHKYDPDYYIHNQVLPAVLRILEAFGYKEKDLEYQRDKQTGLGA

SEQ ID NO: 1256 - protein, 773 aa, unidentified
  REGION 1..773: note = Description of Unknown: Synthetic polypeptide
MILDTDYITENGKPVIRIFKKEKGEFKIEYDRNFEPYIYALLEDDESIEDIKKITGERHGKKVRIIRVEKVKKKFLGEPIEVWKLVFEHPQDFPAIRDAIRSHPAVREIFEYDIPFAKRYLIDKGLVPMEGGEELKLLAFNIATFYHEGDEFAEGEILMISYADESGAKVITWKKIDLPYVEVVSTEREAIKRFLQVLREKDPDVLLTYNGDNFDFAYIKKRCEKLGLKFTIGRDGSEPKIQRMGDRFAVEVKGRIHLDLAPVVRHTIRLPTYTLEAVYEAVFGKKKEKVYAEEIAEAWKSEEGLARVAQYSMEDARATYELGREFFPLEVELAKLIGQSVWDVSRSSTGNLVEWYLLRVAYERNELAPNKPGGEEYQRRMRSSYIGGYVKEPEKGLWESIAYLDFRSSAGSIIVTHNVSPDTLEKECKNYDVAPIVGYRFCKDFKGFIPSILEDLIETRQKVKRKMKATIDPIEKKMLDYRQRALKILANSYYGYQGYPKARWYSKECAESVTAWGRHYIETTIKEAEKFGFKVLYADTDGFFATIPNEKPETIKSKAKKFLKHINEKLPGMLELEYEGFYLRGFFVTKKKYALIDEDGHITTRGLEVVRRDWSEIAKETQAKVLEVILREGSIEKAAGIVKKVVEDLANYRVPVEKLIIHEQITRELKRYKATGPHVAIAKRLQARGIKVKPGTIISYVVLKGSKKISDRVILFDEYDSSRHKYDPDYYIHNQVLPAVLRILEAFGYKEKDLEYQRMKQTGLGAWLKMGKK

SEQ ID NO: 1257 - protein, 766 aa, unidentified
  REGION 1..766: note = Description of Unknown: Synthetic polypeptide
MILDTDYITENGKPVIRIFKKEKGEFKIEYDRNFEPYIYALLEDDESIEDIKKITGERHGKKVRIIRVEKVKKKFLGEPIEVWKLVFEHPQDVPAIRDAIRSHPAVREIFEYDIPFAKRYLIDKGLVPMEGGEELKLLAFRIATFYHEGDEFAEGEILMISYADESGAKVITWKKIDLPYVEVVSTEREAIKRFLQVLREKDPDVLLTYNGDNFDFAYIKKRCEKLGLKFTIGRDGSEPKIQRMGDRFAVEVKGRIHLDLAPVVRHTIRLPTYTLEAVYEAVFGKKKEKVYAEEIAEAWKSEEGLKRVAQYSAEDARATYELGREFFPLEVELAKLIGQSVWDVSRSSTGNLVEWYLLRVAYERNELAPNKPGGEEYQRRMRSSYIGGYVKEPEKGLWESIAYLDFRSSAGSIIVTHNVSPDTLEKECKNYDVAPIVGYRFCKDFKGFIPSILEDLIETRQKVKRKMKATIDPIEKKMLDYRQRALKILANSYYGYQGYPKARWYSKECAESVTAWGRHYIETTIKEAEKFGFKVLYADTDGFFATIPNEKPETIKSKAKKFLKHINEKLPGMLELEYEGFYLRGFFVTKKKYALIDEDGHITTRGLEVVRRDWSEIAKETQAKVLEVILREGSIEKAAGIVKKVVEDLANYRVPVEKLIIHEQITRELKRYKATGPHVAIAKRLQARGIKVKPGTIISYVVLKGSKKISDRVILFDEYDSSRHKYDPDYYIHNQVLPAVLRILEAFGYKEKDLEYQRDKQTGLGA

SEQ ID NO: 1258 - protein, 773 aa, unidentified
  REGION 1..773: note = Description of Unknown: Synthetic polypeptide
MILDTDYITENGKPVIRIFKKEKGEFKIEYDRNFEPYIYALLEDDESIEDIKKITGERHGKKVRIIRVEKVKKKFLGEPIEVWKLVFEHPQDYPAIRDAIRSHPAVREIFEYDIPFAKRYLIDKGLVPMEGGEELKLLAFNIATFYHEGDEFAEGEILMISYADESGAKVITWKKIDLPYVEVVSTEREAIKRFLQVLREKDPDVLLTYNGDNFDFAYIKKRCEKLGLKFTIGRDGSEPKIQRMGDRFAVEVKGRIHLDLAPVVRHTIRLPTYTLEAVYEAVFGKKKEKVYAEEIAEAWKSEEGLKRVAQYSMEDARATYELGREFFPLEVELAKLIGQSVWDVSRSSTGNLVEWYLLRVAYERNELAPNKPGGEEYQRRMRSSYIGGYVKEPEKGLWESIAYLDFRSSGASIIVTHNVSPDTLEKECKNYDVAPIVGYRFCKDFKGFIPSILEDLIETRQKVKRKMKATIDPIEKKMLDYRQRALKILANSYYGYQGYPKARWYSKECAESVTAWGRHYIETTIKEAEKFGFKVLYADTDGFFATIPNEKPETIKSKAKKFLKHINEKLPGMLELEYEGFYLRGFFVTKKKYALIDEDGHITTRGLEVVRRDWSEIAKETQAKVLEVILREGSIEKAAGIVKKVVEDLANYRVPVEKLIIHEQITRELKRYKATGPHVAIAKRLQARGIKVKPGTIISYVVLKGSKKISDRVILFDEYDSSRHKYDPDYYIHNQVLPAVLRILEAFGYKEKDLEYQRMKQTGLGAWLKMGKK

SEQ ID NO: 1259 - protein, 766 aa, unidentified
  REGION 1..766: note = Description of Unknown: Synthetic polypeptide
MILDTDYITENGKPVIRIFKKEKGEFKIEYDRNFEPYIYALLEDDESIEDIKKITGERHGKKVRIIRVEKVKKKFLGEPIEVWKLVFEHPQDVPAIRDAIRSHPAVREIFEYDIPFAKRYLIDKGLVPMEGGEELKLLAFNIATFYHEGDEFAEGEILMISYADESGAKVITWKKIDLPYVEVVSTEREAIKRFLQVLREKDPDVLLTYNGDNFDFAYIKKRCEKLGLKFTIGRDGSEPKIQRMGDRFAVEVKGRIHLDLAPVVRHTIRLPTYTLEAVYEAVFGKKKEKVYAEEIAEAWKSEEGLKRVAQYSMEDARATYELGREFFPLEVELAKLIGQSVWDVSRSSTGNLVEWYLLRVAYERNELAPNKPGGEEYQRRMRSSYIGGYVKEPEKGLWESIAYLDFRSSAGSIIVTHNVSPDTLEKECKNYDVAPIVGYRFCKDFKGFIPSILEDLIETRQKVKRKMKATIDPIEKKMLDYRQRALKILANSYYGYQGYPKARWYSKECAESVTAWGRHYIETTIKEAEKFGFKVLYADTDGFFATIPNEKPETIKSKAKKFLKHINEKLPGMLELEYEGFYLRGFFVTKKKYALIDEDGHITTRGLEVVRRDWSEIAKETQAKVLEVILREGSIEKAAGIVKKVVEDLANYRVPVEKLIIHEQITRKLKRYKATGPHVAIAKRLQARGIKVKPGTIISYVVLKGSKKISDRVILFDEYDSSRHKYDPDYYIHNQVLPAVLRILEAFGYKEKDLEYQRDKQTGLGA

SEQ ID NO: 1260 - protein, 773 aa, unidentified
  REGION 1..773: note = Description of Unknown: Synthetic polypeptide
MILDTDYITENGKPVIRIFKKEKGEFKIEYDRNFEPYIYALLEDDESIEDIKKITGERHGKKVRIIRVEKVKKNFLGEPIEVWKLVFEHPQDYPAIRDAIRSHPAVREIFEYDIPFAKRYLIDKGLVPMEGGEELKLLAFAIETFEHEGDEFAEGEILMISYADESGAKVITWKKIDLPYVEVVSTEREAIKRFLQVLREKDPDVLLTYNGDNFDFAYIKKRCEKLGLKFTIGRDGSEPKIQRMGDRFAVEVKGRIHLDLAPVVRHTIRLPTYTLEAVYEAVFGKKKEKVYAEEIAEAWKSEEGLKRVAQYSMEDARATYELGREFFPMEVELAKLIGQSVWDVSRSSTGNLVEWYLLRVAYERNELAPNKPGGEEYQRRMRSSYIGGYVKEPEKGLWESIAYLDFRSSAGSIIVTHNVSPDTLEKECKNYDVAPIVGYRFCKDFKGFIPSILEDLIETRQKVKRKMKATIDPIEKKMLDYRQRALKILANSYYGYQGYPKARWYSKECAESVTAWGRHYIETTIKEAEKFGFKVLYADTDGFFATIPNEKPETIKSKAKKFLKHINEKLPGMLELEYEGFYLRGFFVTKKKYALIDEDGHITTRGLEVVRRDWSEIAKETQAKVLEVILREGSIEKAAGIVKKVVEDLANYRVPVEKLIIHEQITRELKRYKATGPHVAIAKRLQARGIKVKPGTIISYVVLKGSKKISDRVILFDEYDSSRHKYDPDYYIHNQVLPAVLRILEAFGYKEKDLEYQRMKQTGLGAWLKMGKK

SEQ ID NO: 1261 - protein, 773 aa, unidentified
  REGION 1..773: note = Description of Unknown: Synthetic polypeptide
MILDTDYITENGKPVIRIFKKEKGEFKIEYDRNFEPYIYALLEDDESIEDIKKITGERHGKKVRIIRVEKVKKKFLGEPIEVWKLVFEHPQDYPAIRDAIRSHPAVREIFEYDIPFAKRYLIDKGLVPMEGGEELKLLAFAIATFYHEGDEFAEGEILMISYADESGAKVITWKKIDLPYVEVVSTEREAIKRFLQVLREKDPDVLLTYNGDNFDFAYIKKRCEKLGLKFTIGRDGSEPKIQRMGDRFAVEVKGRIHLDLAPVVRHTIRLPTYTLEAVYEAVFGKKKEKVYAEEIAEAWKSEEGLKRVAQYSMEDARATYELGREFFPMEVELAKLIGQSVWDVSRSSTGNLVEWYLLRVAYERNELAPNKPGGEEYQRRMRSSYIGGYVKEPEKGLWESIAYLDFRSSAGSIIVTHNVSPDTLEKECKNYDVAPIVGYRFCKDFKGFIPSILEDLIETRQKVKRKMKATIDPIEKKMLDYRQRALNILANSYYGYQGYPKARWYSKECAESVTAWGRHYIETTIKEAEKFGFKVLYADTDGFFATIPNEKPETIKSKAKKFLKHINEKLPGMLELEYEGFYLRGFFVTKKKYALIDEDGHITTRGLEVVRRDWSEIAKETQAKVLEVILREGSIEKAAGIVKKVVEDLANYRVPVEKLIIHEQITRELKRYKATGPHVAIAKRLQARGIKVKPGTIISYVVLKGSKKISDRVILFDEYDSSRHKYDPDYYIHNQVLPAVLRILEAFGYKEKDLEYQRMKQTGLGAWLKMGKK

SEQ ID NO: 1262 - protein, 773 aa, unidentified
  REGION 1..773: note = Description of Unknown: Synthetic polypeptide
MILDTDYITENGKPVIRIFKKEKGEFKIEYDRNFEPYIYALLEDDESIEDIKKITGERHGKKVRIIRVEKVKKKFLGEPIEVWKLVFEHPQDYPAIRDAIRSHPAVREIFEYDIPFAKRYLIDKGLVPMEGGEELKLLAFAIATFYHEGDEFAEGEILMISYADESGAKVITWKKIDLPYVEVVSTEREAIKRFLQVLREKDPDVLLTYNGDNFDFAYIKKRCEKLGLKFTIGRDGSEPKIQRMGDRFAVEVKGRIHLDLAPVVRHTIRLPTYTLEAVYEAVFGKKKEKVYAEEIAEAWKSEEGLKRVAQYSMEDARATYELGREFFPMEVELAKLIGQSVWDVSRSSTGNLVEWYLLRVAYERNELAPNKPGGEEYQRRMRSSYIGGYVKEPEKGLWESIAYLDFRSSAGSIIVTHNVSPDTLEKECKNYDVAPIVGYRFCKDFKGFIPSILEDLIETRQKVKRKMKATIDPIEKKMLDYRQRALKILANSYYGYQGYPNARWYSKECAESVTAWGRHYIETTIKEAEKFGFKVLYADTDGFFATIPNEKPETIKSKAKKFLKHINEKLPGMLELEYEGFYLRGFFVTKKKYALIDEDGHITTRGLEVVRRDWSEIAKETQAKVLEVILREGSIEKAAGIVKKVVEDLANYRVPVEKLIIHEQITRELKRYKATGPHVAIAKRLQARGIKVKPGTIISYVVLKGSKKISDRVILFDEYDSSRHKYDPDYYIHNQVLPAVLRILEAFGYKEKDLEYQRMKQTGLGAWLKMGKK

SEQ ID NO: 1263 - protein, 773 aa, unidentified
  REGION 1..773: note = Description of Unknown: Synthetic polypeptide
MILDTDYITENGKPVIRIFKKEKGEFKIEYDRNFEPYIYALLEDDESIEDIKKITGERHGKKVRIIRVEKVKKNFLGEPIEVWKLVFEHPQDYPAIRDAIRSHPAVREIFEYDIPFAKRYLIDKGLVPMEGGEELKLLAFAIATFYHEGDEFAEGEILMISYADESGAKVITWKKIDLPYVEVVSTEREAIKRFLQVLREKDPDVLLTYNGDNFDFAYIKKRCEKLGLKFTIGRDGSEPKIQRMGDRFAVEVKGRIHLDLAPVVRHTIRLPTYTLEAVYEAVFGKKKEKVYAEEIAEAWKSEEGLKRVAQYSMEDARATYELGREFFPMEVELAKLIGQSVWDVSRSSTGNLVEWYLLRVAYERNELAPNKPGGEEYQRRMRSSYIGGYVKEPEKGLWESIAYLDFRSSAGSIIVTHNVSPDTLEKECKNYDVAPIVGYRFCKDFKGFIPSILEDLIETRQKVKRKMKATIDPIEKKMLDYRQRAIKILANSYYGYQGYPKARWYSKECAESVTAWGRHYIETTIKEAEKFGFKVLYADTDGFFATIPNEKPETIKSKAKKFLKHINEKLPGMLELEYEGFYLRGFFVTKKKYALIDEDGHITTRGLEVVRRDWSEIAKETQAKVLEVILREGSIEKAAGIVKKVVEDLANYRVPVEKLIIHEQITRELKRYKATGPHVAIAKRLQARGIKVKPGTIISYVVLKGSKKISDRVILFDEYDSSRHKYDPDYYIHNQVLPAVLRILEAFGYKEKDLEYQRMKQTGLGAWLKMGKK

SEQ ID NO: 1264 - protein, 773 aa, unidentified
  REGION 1..773: note = Description of Unknown: Synthetic polypeptide
MILDTDYITENGKPVIRIFKKEKGEFKIEYDRNFEPYIYALLEDDESIEDIKKITGERHGKKVRIIRVEKVKKNFLGEPIEVWKLVFEHPQDYPAIRDAIRSHPAVREIFEYDIPFAKRYLIDKGLVPMEGGEELKLLAFAIATFYHEGDEFAEGEILMISYADESGAKVITWKKIDLPYVEVVSTEREAIKRFLQVLREKDPDVLLTYNGDNFDFAYIKKRCEKLGLKFTIGRDGSEPKIQRMGDRFAVEVKGRIHLDLAPVVRHTIRLPTYTLEAVYEAVFGKKKEKVYAEEIAEAWKSEEGLKRVAQYSMEDARATYELGREFFPMEVELAKLIGQSVWDVSRSSTGNLVEWYLLRVAYERNELAPNKPGGEEYQRRMRSSYIGGYVKEPEKGLWESIAYLDFRSSAGSIIVTHNVSPDTLEKECKNYDVAPIVGYRFCKDFKGFIPSILEDLIETRQKVKRKMKATIDPIEKKMLDYRQRALKILANSYYGYQGYPKARWYSKECAESVTAWGRHYIETTIKEAEKFGFKVLYADTDGFFATIPNEKPETIKSKAKKFLKHINEKLPGMLELEYEGFYLRGFFVTKKKYALIDEDGHITTRGLEVVRRDWSEIAKETQAKVLEVILREGSIEKAAGIVKKVVEDLANYRVPPEKLIIHEQITRELKRYKATGPHVAIAKRLQARGIKVKPGTIISYVVLKGSKKISDRVILFDEYDSSRHKYDPDYYIHNQVLPAVLRILEAFGYKEKDLEYQRMKQTGLGAWLKMGKK

SEQ ID NO: 1265 - protein, 773 aa, unidentified; identical to SEQ ID NO: 560
  REGION 1..773: note = Description of Unknown: Synthetic polypeptide

SEQ ID NO: 1266 - protein, 773 aa, unidentified
  REGION 1..773: note = Description of Unknown: Synthetic polypeptide
MILDTDYITENGKPVIRIFKKEKGEFKIEYDRNFEPYIYALLEDDESIEDIKKITGERHGKKVRIIRVEKVKKKFLGEPIEVWKLVFEHPQDYPAIRDAIRSHPAVREIFEYDIPFAKRYLIDKGLVPMEGGEELKLLAFAIATFYHEGDEFAEGEILMISYADESGAKVITFKKIDLPYVEVVSTEREAIKRFLQVLREKDPDVLLTYNGDNFDFAYIKKRCEKLGLKFTIGRDGSEPKIQRMGDRFAVEVKGRIHLDLAPVVRHTIRLPTYTLEAVYEAVFGKKKEKVYAEEIAEAWKSEEGLKRVAQYSMEDARATYELGREFFPMEVELAKLIGQSVWDVSRSSTGNLVEWYLLRVAYERNELAPNKPGGEEYQRRMRSSYIGGYVKEPEKGLWESIAYLDFRSSAGSIIVTHNVSPDTLEKECKNYDVAPIVGYRFCKDFKGFIPSILEDLIETRQKVKRKMKATIDPIEKKMLDYRQRALKILANSYYGYQGYPKARWYSKECAESVTAWGRHYIETTIKEAEKFGFKVLYADTDGFFATIPNEKPETIKSKAKKFLKHINEKLPGMLELEYEGFYLRGFFVTKKKYALIDEDGHITTRGLEVVRRDWSEIAKETQAKVLEVILREGSIEKAAGIVKKVVEDLANYRVPVEKLIIHEQITRELKRYKATGPHVAIAKRLQARGIKVKPGTIISYVVLKGSKKISDRVILFDEYDSSRHKYDPDYYIHNQVLPAVLRILEAFGYKEKDLEYQRMKQTGLGAWLKMGKK

SEQ ID NO: 1267 - protein, 773 aa, unidentified
  REGION 1..773: note = Description of Unknown: Synthetic polypeptide
MILDTDYITENGKPVIRIFKKEKGEFKIEYDRNFEPYIYALLEDDESIEDIKKITGERHGKKVRIIRVEKVKKKFLGEPIEVWKLVFEHPQDVPAIRDAIRSHPAVREIFEYDIPFAKRYLIDKGLVPMEGGEELKLLAFNIATFYHEGDEFAEGEILMISYADESGAKVITWKKIDLPYVEVVSTEREAIKRFLQVLREKDPDVLLTYNGDNFDFAYIKKRCEKLGLKFTIGRDGSEPKIQRMGDRFAVEVKGRIHLDLAPVVRHTIRLPTYTLEAVYEAVFGKKKEKVYAEEIAEAWKSEEGLKRVAQYSMEDARATYELGREFFPAEVELAKLIGQSVWDVSRSSTGNLVEWYLLRVAYERNELAPNKPGGEEYQRRMRSSYIGGYVKEPEKGLWESIAYLDFRSSAGSIIVTHNVSPDTLEKECKNYDVAPIVGYRFCKDFKGFIPSILEDLIETRQKVKRKMKATIDPIEKKMLDYRQRALKILANSYYGYQGYPKARWYSKECAESVTAWGRHYIETTIKEAEKFGFKVLYADTDGFFATIPNEKPETIKSKAKKFLKHINEKLPGMLELEYEGFYLRGFFVTKKKYALIDEDGHITTRGLEVVRRDWSEIAKETQAKVLEVILREGSIEKAAGIVKKVVEDLANYRVPVEKLIIHELITRELKRYKATGPHVAIAKRLQARGIKVKPGTIISYVVLKGSKKISDRVILFDEYDSSRHKYDPDYYIHNQVLPAVLRILEAFGYKEKDLEYQRMKQTGLGAWLKMGKK

SEQ ID NO: 1268 - protein, 773 aa, unidentified
  REGION 1..773: note = Description of Unknown: Synthetic polypeptide
MILDTDYITENGKPVIRIFKKEKGEFKIEYDRNFEPYIYALLEDDESIEDIKKITGERHGKKVRIIRVEKVKKNFLGEPIEVWKLVFEHPQDYPAIRDAIRSHPAVREIFEYDIPFAKRYLIDKGLVPMEGGEELKLLAFAIATFYHEGDEFAEGEILMISYADESGAKVITWKKIDLPYVEVVSTEREAIKRFLQVLREKDPDVLLTYNGDNFDFAYIKKRCEKLGLKFTIGRDGSEPKIQRMGDRFAVEVKGRIHLDLAPVVRHTIRLPTYTLEAVYEAVFGKKKEKVYAEEIAEAWKSEEGLKRVAQYSMEDARATYELGREFFPMEVELAKLIGQSVWDVSRSSTGNLVEWYLLRVAYERNELAPNKPGGEEYQRRMRSSYIGGYVKEPEKGLWESIAYLDFRSSAGSIIVTHNVSPDTLEKECKNYDVAPIVGYRFCKDFKGFIPSILEDLIETRQKVKRKMKATIDPIEKKMLDYRQRALKILANSYYGYQGYPKARWYSKECAESVTAWGRHYIETTIKEAEKFGFKVLYADTDGFFATIPNEKPETVKSKAKKFLKHINEKLPGMLELEYEGFYLRGFFVTKKKYALIDEDGHITTRGLEVVRRDWSEIAKETQAKVLEVILREGSIEKAAGIVKKVVEDLANYRVPVEKLIIHEQITRELKRYKATGPHVAIAKRLQARGIKVKPGTIISYVVLKGSKKISDRVILFDEYDSSRHKYDPDYYIHNQVLPAVLRILEAFGYKEKDLEYQRMKQTGLGAWLKMGKK

SEQ ID NO: 1269 - protein, 766 aa, unidentified
  REGION 1..766: note = Description of Unknown: Synthetic polypeptide
MILDTDYITENGKPVIRIFKKEKGEFKIEYDRNFEPYIYALLEDDESIEDIKKITGERHGKKVRIIRVEKVKKKFLGEPIEVWKLVFEHPQDVPAIRDAIRSHPAVREIFEYDIPFAKRYLIDKGLVPMEGGEELKLLAFNIATFYHEGDEFAEGEILMISYADESGAKVITWKKIDLPYVEVVSTEREAIKRFLQVLREKDPDVLLTYNGDNFDFAYIKKRCEKLGLKFTIGRDGSEPKIQRMGDRFAVEVKGRIHLDLAPVVRHTIRLPTYTLEAVYEAVFGKKKEKVYAEEIAEAWKSEEGLKRVAQYSAEDARATYELGREFFPIEVELAKLIGQSVWDVSRSSTGNLVEWYLLRVAYERNELAPNKPGGEEYQRRMRSSYIGGYVKEPEKGLWESIAYLDFRSSAGSIIVTHNVSPDTLEKECKNYDVAPIVGYRFCKDFKGFIPSILEDLIETRQKVKRKMKATIDPIEKKMLDYRQRALKILANSYYGYQGYPKARWYSKECAESVTAWGRHYIETTIKEAEKFGFKVLYADTDGFFATIPNEKPETIKSKAKKFLKHINEKLPGMLELEYEGFYLRGFFVTKKKYALIDEDGHITTRGLEVVRRDWSEIAKETQAKVLEVILREGSIEKAAGIVKKVVEDLANYRVPVEKLIIHEQITRELKRYKATGPHVAIAKRLQARGIKVKPGTIISYVVLKGSKKISDRVILFDEYDSSRHKYDPDYYIHNQVLPAVLRILEAFGYKEKDLEYQRDKQTGLGA

SEQ ID NO: 1270 - protein, 773 aa, unidentified
  REGION 1..773: note = Description of Unknown: Synthetic polypeptide
MILDTDYITENGKPVIRIFKKEKGEFKIEYDRNFEPYIYALLEDDESIEDIKKITGERHGKKVRIIRVEKVKKNFLGEPIEVWKLVFEHPQDYPAIRDAIRSHPAVREIFEYDIPFAKRYLIDKGLVPMEGGEELKLLAFAIATFYHEGDEFAEGEILMISYADESGAKVITWKKIDLPYVEVVSTEREAIKRFLQVLREKDPDVLLTYNGDNFDFQYIKKRCEKLGLKFTIGRDGSEPKIQRMGDRFAVEVKGRIHLDLAPVVRHTIRLPTYTLEAVYEAVFGKKKEKVYAEEIAEAWKSEEGLARVAQYSMEDARATYELGREFFPMEVELAKLIGQSVWDVSRSSTGNLVEWYLLRVAYERNELAPNKPGGEEYQRRMRSSYIGGYVKEPEKGLWESIAYLDFRSSAGSIIVTHNVSPDTLEKECKNYDVAPEVGYRFCKDFKGFIPSILEDLIETRQKVKRKMKATIDPIEKKMLDYRQRALKILANSYYGYQGYPKARWYSKECAESVTAWGRHYIETTIKEAEKFGFKVLYADTDGFFATIPNEKPETIKSKAKKFLKHINEKLPGMLELEYEGFYLRGFFVTKKKYALIDEDGHITTRGLEVVRRDWSEIAKETQAKVLEVILREGSIEKAAGIVKKVVEDLANYRVPVEKLIIHEQITRELKRYKATGPHVAIAKRLQARGIKVKPGTIISYVVLKGSKKISDRVILFDEYDSSRHKYDPDYYIHNQVLPAVLRILEAFGYKEKDLEYQRDKQTGLGAWLKMGKK

SEQ ID NO: 1271 - protein, 773 aa, unidentified
  REGION 1..773: note = Description of Unknown: Synthetic polypeptide
MILDTDYITENGKPVIRIFKKEKGEFKIEYDRNFEPYIYALLEDDESIEDIKKITGERHGKKVRIIRVEKVKKNFLGEPIEVWKLVFEHPQDYPAIRDAIRSHPAVREIFEYDIPFAKRYLIDKGLVPMEGGEELKLLAFAIATFYHEGDEFAEGEILMISYADESGAKVITWKKIDLPYVEVVSTEREAIKRFLQVLREKDPDVLLTYNGDNFDFQYIKKRCEKLGLKFTIGRDGSEPKIQRMGDRFAVEVKGRIHLDLAPVVRHTIRLPTYTLEAVYEAVFGKKKEKVYAEEIAEAWKSEEGLKRVAQYSMEDARATYELGREFFPMEVELAKLIGQSVWDVSRSSTGNLVEWYLLRVAYERNELAPNKPGGEEYQRRMRSSYIGGYVKEPEKGLWESIAYLDFRSSAGSIIVTHNVSPDTLEKECKNYDVAPEVGYRFCKDFKGFIPSILEDLIETRQKVKRKMKATIDPIEKKMLDYRQRALKILANSYYGYQGYPKARWYSKECAESVTAWGRHYIETTIKEAEKFGFKVLYADTDGFFATIPNEKPETIKSKAKKFLKHINEKLPGMLELEYEGFYLRGFFVTKKKYALIDEDGHITTRGLEVVRRDWSEIAKETQAKVLEVILREGSIEKAAGIVKKVVEDLANYRVPVEKLIIHEQITRELKRYKATGPHVAIAKRLQARGIKVKPGTIISYVVLKGSKKISDRVILFDEYDSSRHKYDPDYYIHNQVLPAVLRILEAFGYKEKDLEYQRMKQTGLGAWLKMGKK

SEQ ID NO: 1272 - protein, 766 aa, unidentified
  REGION 1..766: note = Description of Unknown: Synthetic polypeptide
MILDTDYITENGKPVIRIFKKEKGEFKIEYDRNFEPYIYALLEDDESIEDIKKITGERHGKKVRIIRVEKVKKKFLGEPIEVWKLVFEHPQDFPAIRDAIRSHPAVREIFEYDIPFAKRYLIDKGLVPMEGGEELKLLAFNIATFYHEGDEFAEGEILMISYADESGAKVITWKKIDLPYVEVVSTEREAIKRFLQVLREKDPDVLLTYNGDNFDFAYIKKRCEKLGLKFTIGRDGSEPKIQRMGDRFAVEVKGRIHLDLAPVVRHTIRLPTYTLEAVYEAVFGKKKEKVYAEEIAEAWKSEEGLKRVAQYSMEDARATYELGREFFPLEVELAKLIGQSVWDVSRSSTGNLVEWYLLRVAYERNELAPNKPGGEEYQRRMRSSYIGGYVKEPEKGLWESIAYLDFRSSAGSIIVTHNVSPDTLEKECKNYDVAPIVGYRFCKDFKGFIPSILEDLIETRQKVKRKMKATIDPIEKKMLDYRQRALKILANSYYGYQGYPKARWYSKECAESVTAWGRHYIETTIKEAEKFGFKVLYADTDGFFATIPNEKPETIKSKAKKFLKHINEKLPGMLELEYEGFYLRGFFVTKKKYALIDEDGHITTRGLEVVRRDWSEIAKETQAKVLEVILREGSIEKAAGIVKKVVEDLANYRVPVEKLIIHEQITRELKRYKATGPHVAIAKRLQARGIKVKPGTIISYVVLKGSKKISDRVILFDEYDSSRHKYDPDYYIHNQVLPAVLRILEAFGYKEKDLEYQRDKQTGLGA

SEQ ID NO: 1273 - protein, 773 aa, unidentified
  REGION 1..773: note = Description of Unknown: Synthetic polypeptide
MILDTDYITENGKPVIRIFKKEKGEFKIEYDRNFEPYIYALLEDDESIEDIKKITGERHGKKVRIIRVEKVKKNFLGEPIEVWKLVFEHPQDYPAIRDAIRSHPAVREIFEYDIPFAKRYLIDKGLVPMEGGEELKLLAFAIATFYHEGDEFAEGEILMISYADESGAKVITWKKIDLPYVEVVSTEREAIKRFLQVLREKDPDVLLTYNGDNFDFAYIKKRCEKLGLKFTIGRDGSEPKIQRMGDRFAVEVKGRIHLDLAPVVRHTIRLPTYTLEAVYEAVFGKKKEKVYAEEIAEAWKSEEGLKRVAQYSMEDARATYELGREFFPMEVELAKLIGQSVWDVSRSSTGNLVEWYLLRVAYERNELAPNKPGGEEYQRRMRSSYIGGYVKEPEKGLWESIAYLDFRSSAGSIIVTHNVSPDTLEKECKNYDVAPIVGYRFCKDFKGFIPSILEDLIETRQKVKRKMKATIDPIEKKMLDYRQRALKILANSYYGYQGYPKARWYSKECAESVTAWGRHYIETTIKEAEKFGFKVLYADTDGFFATIPNEKPETIKSKAKKFLKHINEKLPGMLELEYEGFYLRGFFVTKKKYALIDEDGHITTRGLEVVRRDWSEIAKETQAKVLEVILREGSVEKAAGIVKKVVEDLANYRVPVEKLIIHEQITRELKRYKATGPHVAIAKRLQARGIKVKPGTIISYVVLKGSKKISDRVILFDEYDSSRHKYDPDYYIHNQVLPAVLRILEAFGYKEKDLEYQRMKQTGLGAWLKMGKK

SEQ ID NO: 1274 - protein, 766 aa, unidentified
  REGION 1..766: note = Description of Unknown: Synthetic polypeptide
MILDTDYITENGKPVIRIFKKEKGEFKIEYDRNFEPYIYALLEDDESIEDIKKITGERHGKKVRIIRVEKVKKKFLGEPIEVWKLVFEHPQDVPAIRDAIRSHPAVREIFEYDIPFAKRYLIDKGLVPMEGGEELKLLAFNIATFYHEGDEFAEGEILMISYADESGAKVITWKKIDLPYVEVVSTEREAIKRFLQVLREKDPDVLLTYNGDNFDFAYIKKRCEKLGLKFTIGRDGSEPKIQRMGDRFAVEVKGRIHLDLAPVVRHTIRLPTYTLEAVYEAVFGKKKEKVYAEEIAEAWKSEEGLKRVAQYSMEDARATYELGREFFPLEVELAKLIGQSVWDVSRSSTGNLVEWYLLRVAYERNELAPNQPGGEEYQRRMRSSYIGGYVKEPEKGLWESIAYLDFRSSAGSIIVTHNVSPDTLEKECKNYDVAPIVGYRFCKDFKGFIPSILEDLIETRQKVKRKMKATIDPIEKKMLDYRQRALKILANSYYGYQGYPKARWYSKECAESVTAWGRHYIETTIKEAEKFGFKVLYADTDGFFATIPNEKPETIKSKAKKFLKHINEKLPGMLELEYEGFYLRGFFVTKKKYALIDEDGHITTRGLEVVRRDWSEIAKETQAKVLEVILREGSIEKAAGIVKKVVEDLANYRVPVEKLIIHEQITRRLKRYKATGPHVAIAKRLQARGIKVKPGTIISYVVLKGSKKISDRVILFDEYDSSRHKYDPDYYIHNQVLPAVLRILEAFGYKEKDLEYQRDKQTGLGA

SEQ ID NO: 1275 - protein, 766 aa, unidentified; identical to SEQ ID NO: 1175
  REGION 1..766: note = Description of Unknown: Synthetic polypeptide

SEQ ID NO: 1276 - protein, 766 aa, unidentified
  REGION 1..766: note = Description of Unknown: Synthetic polypeptide
MILDTDYITENGKPVIRIFKKEKGEFKIEYDRNFEPYIYALLEDDESIEDIKKITGERHGKKVRIIRVEKVKKKFLGEPIEVWKLVFEHPQDIPAIRDAIRSHPAVREIFEYDIPFAKRYLIDKGLVPMEGGEELKLLAFNIATFYHEGDEFAEGEILMISYADESGAKVITWKKIDLPYVEVVSTEREAIKRFLQVLREKDPDVLLTYNGDNFDFAYIKKRCEKLGLKFTIGRDGSEPKIQRMGDRFAVEVKGRIHLDLAPVVRHTIRLPTYTLEAVYEAVFGKKKEKVYAEEIAEAWKSEEGLKRVAQYSMEDARATYELGREFFPLEVELAKLIGQSVWDVSRSSTGNLVEWYLLRVAYERNELAPNKPGGEEYQRRMRSSYIGGYVKEPEKGLWESIAYLDFRSSAGSIIVTHNVSPDTLEKECKNYDVAPIVGYRFCKDFKGFIPSILEDLIETRQKVKRKMKATIDPIEKKMLDYRQRALKILANSYYGYQGYPKARWYSKECAESVTAWGRHYIETTIKEAEKFGFKVLYADTDGFFATIPNEKPETIKSKAKKFLKHINEKLPGMLELEYEGFYLRGFFVTKKKYALIDEDGHITTRGLEVVRRDWSEIAKETQAKVLEVILREGSIEKAAGIVKKVVEDLANYRVPVEKLIIHEQITRELKRYKATGPHVAIAKRLQARGIKVKPGTIISYVVLKGSKKISDRVILFDEYDSSRHKYDPDYYIHNQVLPAVLRILEAFGYKEKDLEYQRDKQTGLGA

SEQ ID NO: 1277 - protein, 766 aa, unidentified
  REGION 1..766: note = Description of Unknown: Synthetic polypeptide
MILDTDYITENGKPVIRIFKKEKGEFKIEYDRNFEPYIYALLEDDESIEDIKKITGERHGKKVRIIRVEKVKKKFLGEPIEVWKLVFEHPQDVPAIRDAIRSHPAVREIFEYDIPFAKRYLIDKGLVPMEGGEELKLLAFNIATFYHEGDEFAEGEILMISYADESGAKVITWKKIDLPYVEVVSTEREAIKRFLQVLREKDPDVLLTYNGDNFDFAYIKKRCEKLGLKFTIGRDGSEPKIQRMGDRFAVEVKGRIHLDLAPVVRHTIRLPTYTLEAVYEAVFGKKKEKVYAEEIAEAWKSEEGLKRVAQYSMEDARATYELGREFFPLEVELAKLIGQSVWDVSRSSTGNLVEWYLLRVAYERNELAPNQPGGEEYQRRMRSSYIGGYVKEPEKGLWESIAYLDFRSSAGSIIVTHNVSPDTLEKECKNYDVAPIVGYRFCKDFKGFIPSILEDLIETRQKVKRKMKATIDPIEKKMLDYRQRALKILANSYYGYQGYPKARWYSKECAESVTAWGRHYIETTIKEAEKFGFKVLYADTDGFFATIPNEKPETIKSKAKKFLKHINEKLPGMLELEYEGFYLRGFFVTKKKYALIDEDGHITTRGLEVVRRDWSEIAKETQAKVLEVILREGSIEKAAGIVKKVVEDLANYRVPVEKLIIHEQITRKLKRYKATGPHVAIAKRLQARGIKVKPGTIISYVVLKGSKKISDRVILFDEYDSSRHKYDPDYYIHNQVLPAVLRILEAFGYKEKDLEYQRDKQTGLGA

SEQ ID NO: 1278 - protein, 773 aa, unidentified
  REGION 1..773: note = Description of Unknown: Synthetic polypeptide
MILDTDYITENGKPVIRIFKKEKGEFKIEYDRNFEPYIYALLEDDESIEDIKKITGERHGKKVRIIRVEKVKKKFLGEPIEVWKLVFEHPQDYPAIRDAIRSHPAVREIFEYDIPFAKRYLIDKGLVPMEGGEELKLLAFAIATFYHEGDEFAEGEILMISYADESGAKVITWKKIDLPYVEVVSTEREAIKRFLQVLREKDPDVLLTYNGDNFDFAYIKKRCEKLGLKFTIGRDGSEPKIQRMGDRFAVEVKGRIHLDLAPVVRHTIRLPTYTLEAVYEAVFGKKKEKVYAEEIAEAWKSEEGLKRVAQYSMEDARATYELGREFFPMEVELAKLIGQSVWDVSRSSTGNLVEWYLLRVAYERNELAPNKPGGEEYQRRMRSSYIGGYVKEPEKGLWESIAYLDFRSSAGSIIVTRNVSPDTLEKECKNYDVAPIVGYRFCKDFKGFIPSILEDLIETRQKVKRKMKATIDPIEKKMLDYRQRALKILANSYYGYQGYPKARWYSKECAESVTAWGRHYIETTIKEAEKFGFKVLYADTDGFFATIPNEKPETIKSKAKKFLKHINEKLPGMLELEYEGFYLRGFFVTKKKYALIDEDGHITTRGLEVVRRDWSEIAKETQAKVLEVILREGSIEKAAGIVKKVVEDLANYRVPVEKLIIHEQITRELKRYKATGPHVAIAKRLQARGIKVKPGTIISYVVLKGSKKISDRVILFDEYDSSRHKYDPDYYIHNQVLPAVLRILEAFGYKEKDLEYQRMKQTGLGAWLKMGKK

SEQ ID NO: 1279 - protein, 773 aa, unidentified
  REGION 1..773: note = Description of Unknown: Synthetic polypeptide
MILDTDYITENGKPVIRIFKKEKGEFKIEYDRNFEPYIYALLEDDESIEDIKKITGERHGKKVRIIRVEKVKKKFLGEPIEVWKLVFEHPQDYPAIRDAIRSHPAVREIFEYDIPFAKRYLIDKGLVPMEGGEELKLLAFAIATFYHEGDEFAEGEILMISYADESGAKVITWKKIDLPYVEVVSTEREAIKRFLQVLREKDPDVLLTYNGDNFDFAYIKKRCEKLGLKFTIGRDGSEPKIQRMGDRFAVEVKGRIHLDLAPVVRHTIRLPTYTLEAVYEAVFGKKKEKVYAEEIAEAWKSEEGLKRVAQYSMEDARATYELGREFFPMEVELAKLIGQSVWDVSRSSTGNLVEWYLLRVAYERNELAPNKPGGEEYQRRMRSSYIGGYVKEPEKGLWESIAYLDFRSASGSIIVTHNVSPDTLEKECKNYDVAPIVGYRFCKDFKGFIPSILEDLIETRQKVKRKMKATIDPIEKKMLDYRQRALKILANSYYGYQGYPKARWYSKECAESVTAWGRHYIETTIKEAEKFGFKVLYADTDGFFATIPNEKPETIKSKAKKFLKHINEKLPGMLELEYEGFYLRGFFVTKKKYALIDEDGHITTRGLEVVRRDWSEIAKETQAKVLEVILREGSIEKAAGIVKKVVEDLANYRVPVEKLIIHEQITRELKRYKATGPHVAIAKRLQARGIKVKPGTIISYVVLKGSKKISDRVILFDEYDSSRHKYDPDYYIHNQVLPAVLRILEAFGYKEKDLEYQRMKQTGLGAWLKMGKK

SEQ ID NO: 1280 - protein, 773 aa, unidentified; identical to SEQ ID NO: 188
  REGION 1..773: note = Description of Unknown: Synthetic polypeptide

SEQ ID NO: 1281 - protein, 773 aa, unidentified
  REGION 1..773: note = Description of Unknown: Synthetic polypeptide
MILDTDYITENGKPVIRIFKKEKGEFKIEYDRNFEPYIYALLEDDESIEDIKKITGERHGKKVRIIRVEKVKKKFLGEPIEVWKLVFEHPQDYPAIRDAIRSHPAVREIFEYDIPFAKRYLIDKGLVPMEGGEELKLLAFAIATFYHEGDEFAEGEILMISYADESGAKVITWKKIDLPYVEVVSTEREAIKRFLQVLREKDPDVLLTYNGDNFDFAYIKKRCEKLGLKFTIGRDGSEPKIQRMGDRFAVEVKGRIHLDLAPVVRHTIRLPTYTLEAVYEAVFGKKKEKVYAEEIAEAWKSEEGLARVAQYSVEDARATYELGREFFPMEVELAKLIGQSVWDVSRSSTGNLVEWYLLRVAYERNELAPNQPGGEEYQRRMRSSYEGGYVKEPEKGLWESIAYLDFRSSAGSIIVTHNVSPDTLEKECKNYDVAPIVGYRFCKDFKGFIPSILEDLIETRQKVKRKMKATIDPIEKKMLDYRQRALKILANSYYGYQGYPKARWYSKECAESVTAWGRHYIETTIKEAEKFGFKVLYADTDGFFATIPNEKPETIKSKAKKFLKHINEKLPGMLELEYEGFYLRGFFVTKKKYALIDEDGHITTRGLEVVRRDWSEIAKETQAKVLEVILREGSIEKAAGIVKKVVEDLANYRVPVEKLIIHEQITRELKRYKATGPHVAIAKRLQARGIKVKPGTIISYVVLKGSKKISDRVILFDEYDSSRHKYDPDYYIHNQVLPAVLRILEAFGYKEKDLEYQRDKQTGLGAWLKMGKK

SEQ ID NO: 1282 - protein, 773 aa, unidentified
  REGION 1..773: note = Description of Unknown: Synthetic polypeptide
MILDTDYITENGKPVIRIFKKEKGEFKIEYDRNFEPYIYALLEDDESIEDIKKITGERHGKKVRIIRVEKVKKKFLGEPIEVWKLVFEHPQDYPAIRDAIRSHPAVREIFEYDIPFAKRYLIDKGLVPMEGGEELKLLAFAIATFYHEGDEFAEGEILMISYADESGAKVITNKKIDLPYVEVVSTEREAIKRFLQVLREKDPDVLLTYNGDNFDFAYIKKRCEKLGLKFTIGRDGSEPKIQRMGDRFAVEVKGRIHLDLAPVVRHTIRLPTYTLEAVYEAVFGKKKEKVYAEEIAEAWKSEEGLKRVAQYSMEDARATYELGREFFPMEVELAKLIGQSVWDVSRSSTGNLVEWYLLRVAYERNELAPNKPGGEEYQRRMRSSYIGGYVKEPEKGLWESIAYLDFRSSAGSIIVTHNVSPDTLEKECKNYDVAPIVGYRFCKDFKGFIPSILEDLIETRQKVKRKMKATIDPIEKKMLDYRQRALKILANSYYGYQGYPKARWYSKECAESVTAWGRHYIETTIKEAEKFGFKVLYADTDGFFATIPNEKPETIKSKAKKFLKHINEKLPGMLELEYEGFYLRGFFVTKKKYALIDEDGHITTRGLEVVRRDWSEIAKETQAKVLEVILREGSIEKAAGIVKKVVEDLANYRVPVEKLIIHEQITRELKRYKATGPHVAIAKRLQARGIKVKPGTIISYVVLKGSKKISDRVILFDEYDSSRHKYDPDYYIHNQVLPAVLRILEAFGYKEKDLEYQRMKQTGLGAWLKMGKK

SEQ ID NO: 1283 - protein, 773 aa, unidentified
  REGION 1..773: note = Description of Unknown: Synthetic polypeptide
MILDTDYITENGKPVIRIFKKEKGEFKIEYDRNFEPYIYALLEDDESIEDIKKITGERHGKKVRIIRVEKVKKKFLGEPIEVWKLVFEHPQDVPAIRDAIRSHPAVREIFEYDIPFAKRYLIDKGLVPMEGGEELKLLAFNIATFYHEGDEFAEGEILMISYADESGAKVITWKKIDLPYVEVVSTEREAIKRFLQVLREKDPDVLLTYNGDNFDFAYIKKRCEKLGLKFTIGRDGSEPKIQRMGDRFAVEVKGRIHLDLAPVVRHTIRLPTYTLEAVYEAVFGKKKEKVYAEEIAEAWKSEEGLKRVAQYSMEDARATYELGREFFPLEVELAKLIGQSVWDVSRSSTGNLVEWYLLRVAYERNELAPNKPGGEEYQRRMRSSYIGGYVKEPEKGLWESIAYLDFRSSAGSIIVTHNVSPDTLEKECKNYDVAPIVGYRFCKDFKGFIPSILEDLIETRQKVKRKMKATIDPIEKKMLDYRQRALKILANSYYGYQGYPKARWYSKECAESVTAWGRHYIETTIKEAEKFGFKVLYADTDGFFATIPNEKPETIKSKAKKFLKHINEKLPGMLELEYEGFYLRGFFVTKKKYALIDEDGHITTRGLEVVRRDWSEIAKETQAKVLEVILREGSIEKAAGIVKKVVEDLANYRVPVEKLIIHEQITRKLKRYKATGPHVAIAKRLQARGIKVKPGTIISYVVLKGSKKISDRVILFDEYDSSRHKYDPDYYIHNQVLPAVLRILEAFGYKEKDLEYQRDKQTGLGAWLKMGKK

SEQ ID NO: 1284 - protein, 766 aa, unidentified
  REGION 1..766: note = Description of Unknown: Synthetic polypeptide
MILDTDYITENGKPVIRIFKKEKGEFKIEYDRNFEPYIYALLEDDESIEDIKKITGERHGKKVRIIRVEKVKKKFLGEPIEVWKLVFEHPQDVPAIRDAIRSHPAVREIFEYDIPFAKRYLIDKGLVPMEGGEELKLLAFNIATFYHEGDEFAEGEILMISYADESGAKVITWKKIDLPYVEVVSTEREAIKRFLQVLREKDPDVLLTYNGDNFDFAYIKKRCEKLGLKFTIGRDGSEPKIQRMGDRFAVEVKGRIHLDLAPVVRHTIRLPTYTLEAVYEAVFGKKKEKVYAEEIAEAWKSEEGLKRVAQYSVEDARATYELGREFFPLEVELAKLIGQSVWDVSRSSTGNLVEWYLLRVAYERNELAPNQPGGEEYQRRMRSSYIGGYVKEPEKGLWESIAYLDFRSSAGSIIVTHNVSPDTLEKECKNYDVAPIVGYRFCKDFKGFIPSILEDLIETRQKVKRKMKATIDPIEKKMLDYRQRALKILANSYYGYQGYPKARWYSKECAESVTAWGRHYIETTIKEAEKFGFKVLYADTDGFFATIPNEKPETIKSKAKKFLKHINEKLPGMLELEYEGFYLRGFFVTKKKYALIDEDGHITTRGLEVVRRDWSEIAKETQAKVLEVILREGSIEKAAGIVKKVVEDLANYRVPVEKLIIHEQITRELKRYKATGPHVAIAKRLQARGIKVKPGTIISYVVLKGSKKISDRVILFDEYDSSRHKYDPDYYIHNQVLPAVLRILEAFGYKEKDLEYQRDKQTGLGA

SEQ ID NO: 1285 - protein, 773 aa, unidentified; identical to SEQ ID NO: 1253
  REGION 1..773: note = Description of Unknown: Synthetic polypeptide

SEQ ID NO: 1286 - protein, 773 aa, unidentified; identical to SEQ ID NO: 916
  REGION 1..773: note = Description of Unknown: Synthetic polypeptide

SEQ ID NO: 1287 - protein, 766 aa, unidentified; identical to SEQ ID NO: 404
  REGION 1..766: note = Description of Unknown: Synthetic polypeptide

SEQ ID NO: 1288 - protein, 773 aa, unidentified
  REGION 1..773: note = Description of Unknown: Synthetic polypeptide
MILDTDYITENGKPVIRIFKKEKGEFKIEYDRNFEPYIYALLEDDESIEDIKKITGERHGKKVRIIRVEKVKKNFLGEPIEVWKLVFEHPQDYPAIRDAIRSHPAVREIFEYDIPFAKRYLIDKGLVPMEGGEELKLLAFNIATFYHEGDEFAEGEILMISYADESGAKVITWKKIDLPYVEVVSTEREAIKRFLQVLREKDPDVLLTYNGDNFDFAYIKKRCEKLGLKFTIGRDGSEPKIQRMGDRFAVEVKGRIHLDLAPVVRHTIRLPTYTLEAVYEAVFGKKKEKVYAEEIAEAWKSEEGLKRVAQYSMEDARATYELGREFFPMEVELAKLIGQSVWDVSRSSTGNLVEWYLLRVAYERNELAPNKPGGEEYQRRMRSSYIGGYVKEPEKGLWESIAYLDFRSSAGSIIVTHNVSPDTLEKECKNYDVAPEVGYRFCKDFKGFIPSILEDLIETRQKVKRKMKATIDPIEKKMLDYRQRALKILANSYYGYQGYPKARWYSKECAESVTAWGRHYIETTIKEAEKFGFKVLYADTDGFFATIPNEKPETIKSKAKKFLKHINEKLPGMLELEYEGFYLRGFFVTKKKYALIDEDGHITTRGLEVVRRDWSEIAKETQAKVLEVILREGSIEKAAGIVKKVVEDLANYRVPVEKLIIHEQITRELKRYKATGPHVAIAKRLQARGIKVKPGTIISYVVLKGSKKISDRVILFDEYDSSRHKYDPDYYIHNQVLPAVLRILEAFGYKEKDLEYQRMKQTGLGAWLKMGKK

SEQ ID NO: 1289 - protein, 773 aa, unidentified
  REGION 1..773: note = Description of Unknown: Synthetic polypeptide
MILDTDYITENGKPVIRIFKKEKGEFKIEYDRNFEPYIYALLEDDESIEDIKKITGERHGKKVRIIRVEKVKKKFLGEPIEVWKLVFEHPQDYPAIRDAIRSHPAVREIFEYDIPFAKRYLIDKGLVPMEGGEELKLLAFAIATFYHEGDEFAEGEILMISYADESGAKVITWKKIDLPYVEVVSTEREAIKRFLQVLREKDPDVLLTYNGDNFDFAYIKKRCEKLGLKFTIGRDGSEPKIQRMGDRFAVEVKGRIHLDLAPVVRHTIRLPTYTLEAVYEAVFGKKKEKVYAEEIAEAWKSEEGLKRVAQYSMEDARATYELGREFFPMEVELAKLIGQSVWDVSRSSTGNLVEWYLLRVAYERNELAPNKPGGEEYQRRMRSSYIGGYVKEPEKGLWESIAYLDFRSSAGSIIVTVNVSPDTLEKECKNYDVAPIVGYRFCKDFKGFIPSILEDLIETRQKVKRKMKATIDPIEKKMLDYRQRALKILANSYYGYQGYPKARWYSKECAESVTAWGRHYIETTIKEAEKFGFKVLYADTDGFFATIPNEKPETIKSKAKKFLKHINEKLPGMLELEYEGFYLRGFFVTKKKYALIDEDGHITTRGLEVVRRDWSEIAKETQAKVLEVILREGSIEKAAGIVKKVVEDLANYRVPVEKLIIHEQITRELKRYKATGPHVAIAKRLQARGIKVKPGTIISYVVLKGSKKISDRVILFDEYDSSRHKYDPDYYIHNQVLPAVLRILEAFGYKEKDLEYQRMKQTGLGAWLKMGKK

SEQ ID NO: 1290 - protein, 773 aa, unidentified; identical to SEQ ID NO: 1221
  REGION 1..773: note = Description of Unknown: Synthetic polypeptide

SEQ ID NO: 1291 - protein, 773 aa, unidentified
  REGION 1..773: note = Description of Unknown: Synthetic polypeptide
MILDTDYITENGKPVIRIFKKEKGEFKIEYDRNFEPYIYALLEDDESIEDIKKITGERHGKKVRIIRVEKVKKKFLGEPIEVWKLVFEHPADVPAIRDAIRSHPAVREIFEYDIPFAKRYLIDKGLVPMEGGEELKLLAFNIATFYHEGDEFAEGEILMISYADESGAKVITWKKIDLPYVEVVSTEREAIKRFLQVLREKDPDVLLTYNGDNFDFAYIKKRCEKLGLKFTIGRDGSEPKIQRMGDRFAVEVKGRIHLDLAPVVRHTIRLPTYTLEAVYEAVFGKKKEKVYAEEIAEAWKSEEGLKRVAQYSMEDARATYELGREFFPLEVELAKLIGQSVWDVSRSSTGNLVEWYLLRVAYERNELAPNKPGGEEYQRRMRSSYIGGYVKEPEKGLWESIAYLDFRSSAGSIIVTHNVSPDTLEKECKNYDVAPIVGYRFCKDFKGFIPSILEDLIETRQKVKRKMKATIDPIEKKMLDYRQRALKILANSYYGYQGYPKARWYSKECAESVTAWGRHYIETTIKEAEKFGFKVLYADTDGFFATIPNEKPETIKSKAKKFLKHINEKLPGMLELEYEGFYLRGFFVTKKKYALIDEDGHITTRGLEVVRRDWSEIAKETQAKVLEVILREGSIEKAAGIVKKVVEDLANYRVPVEKLIIHELITRELKRYKATGPHVAIAKRLQARGIKVKPGTIISYVVLKGSKKISDRVILFDEYDSSRHKYDPDYYIHNQVLPAVLRILEAFGYKEKDLEYQRMKQTGLGAWLKMGKK

SEQ ID NO: 1292 - protein, 773 aa, unidentified; identical to SEQ ID NO: 334
  REGION 1..773: note = Description of Unknown: Synthetic polypeptide

SEQ ID NO: 1293 - protein, 773 aa, unidentified
  REGION 1..773: note = Description of Unknown: Synthetic polypeptide
MILDTDYITENGKPVIRIFKKEKGEFKIEYDRNFEPYIYALLEDDESIEDIKKITGERHGKKVRVIRVEKVKKNFLGEPIEVWKLVFEHPQDYPAIRDAIRSHPAVREIFEYDIPFAKRYLIDKGLVPMEGGEELKLLAFAIATFYHEGDEFAEGEILMISYADESGAKVITWKKIDLPYVEVVSTEREAIKRFLQVLREKDPDVLLTYNGDNFDFAYIKKRCEKLGLKFTIGRDGSEPKIQRMGDRFAVEVKGRIHLDLAPVVRHTIRLPTYTLEAVYEAVFGKKKEKVYAEEIAEAWKSEEGLKRVAQYSMEDARATYELGREFFPMEVELAKLIGQSVWDVSRSSTGNLVEWYLLRVAYERNELAPNKPGGEEYQRRMRSSYIGGYVKEPEKGLWESIAYLDFRSSAGSIIVTHNVSPDTLEKECKNYDVAPIVGYRFCKDFKGFIPSILEDLIETRQKVKRKMKATIDPIEKKMLDYRQRALKILANSYYGYQGYPKARWYSKECAESVTAWGRHYIETTIKEAEKFGFKVLYADTDGFFATIPNEKPETIKSKAKKFLKHINEKLPGMLELEYEGFYLRGFFVTKKKYALIDEDGHITTRGLEVVRRDWSEIAKETQAKVLEVILREGSIEKAAGIVKKVVEDLANYRVPVEKLIIHEQITRELKRYKATGPHVAIAKRLQARGIKVKPGTIISYVVLKGSKKISDRVILFDEYDSSRHKYDPDYYIHNQVLPAVLRILEAFGYKEKDLEYQRMKQTGLGAWLKMGKK

SEQ ID NO: 1294 - protein, 773 aa, unidentified; identical to SEQ ID NO: 1219
  REGION 1..773: note = Description of Unknown: Synthetic polypeptide

SEQ ID NO: 1295 - protein, 773 aa, unidentified
  REGION 1..773: note = Description of Unknown: Synthetic polypeptide
MILDTDYITENGKPVIRIFKKEKGEFKIEYDRNFEPYIYALLEDDESIEDIKKITGERHGKKVRIIRVEKVKKKFLGEPIEVWKLVFEHPQDYPAIRDAIRSHPAVREIFEYDIPFAKRYLIDKGLVPMEGGEELKLLAFAIATFYHEGDEFAEGEILMISYADESGAKVITWKKIDLPYVEVVSTEREAIKRFLQVLREKDPDVLLTYNGDNFDFAYIKKRCEKLGLKFTIGRDGSEPKIQRMGDRFAVEVKGRIHLDLAPVVRHTIRLPTYTLEAVYEAVFGKKKEKVYAEEIAEAWKSEEGLKRVAQYSMEDARATYELGREFFPMEVELAKLIGQSVWDVSRSSTGNLVEWYLLRVAYERNELAPNKPGGEEYQRRMRSSYIGGYVKEPEKGLWESIAYLDFRSSAGSIIVTHNVSPDTLEKECKNYDVAPEVGYRFCKDFKGFIPSILEDLIETRQKVKRKMKATIDPIEKKMLDYRQRALKILANSYYGYMGYPKARWYSKECAESVTAWGRHYIETTIKEAEKFGFKVLYADTDGFFATIPNEKPETIKSKAKKFLKHINEKLPGMLELEYEGFYLRGFFVTKKKYALIDEDGHITTRGLEVVRRDWSEIAKETQAKVLEVILREGSIEKAAGIVKKVVEDLANYRVPVEKLIIHEQITRELKRYKATGPHVAIAKRLQARGIKVKPGTIISYVVLKGSKKISDRVILFDEYDSSRHKYDPDYYIHNQVLPAVLRILEAFGYKEKDLEYQRMKQTGLGAWLKMGKK

SEQ ID NO: 1296 - protein, 773 aa, unidentified
  REGION 1..773: note = Description of Unknown: Synthetic polypeptide
MILDTDYITENGKPVIRIFKKEKGEFKIEYDRNFEPYIYALLEDDESIEDIKKITGERHGKKVRIIRVEKVKKNFLGEPIEVWKLVFEHPQDYPAIRDAIRSHPAVREIFEYDIPFAKRYLIDKGLVPMEGGEELKLLAFAIATFYHEGDEFAEGEILMISYADESGAKVITWKKIDLPYVEVVSTEREAIKRFLQVLREKDPDVLLTYNGDNFDFAYIKKRCEKLGLKFTIGRDGSEPKIQRMGDRFAVEVKGRIHLDLAPVVRHTIRLPTYTLEAVYEAVFGKKKEKVYAEEIAEAWKSEEGLKRVAQYSMEDARATYELGREFFPMEVELAKLIGQSVWDVSRSSTGNLVEWYLLRVAYERNELAPNKPGGEEYQRRMRSSYIGGYVKEPEKGLWESIAYLDFRSSAGSIIVTHNVSPDTLEKECKNYDVAPIVGYRFCKDFKGFIPSILEDLIETRQKVKRKMKATIDPIEKKMLDYRQRALKILANSYYGYQGYPKARWYSKECAESVTAWGRHYIETTIKEAEKFGFKVLYADTDGFFATIPNEKPETIKSKAKKFLKHINEKLPGMLELEYEGFYLRGFFVTKKKYALIDEDGHITTRGLEVVRRDWSEIAKETQAKVLEVILREGSIEKAAGIVKKVVEDLSNYRVPVEKLIIHEQITRELKRYKATGPHVAIAKRLQARGIKVKPGTIISYVVLKGSKKISDRVILFDEYDSSRHKYDPDYYIHNQVLPAVLRILEAFGYKEKDLEYQRMKQTGLGAWLKMGKK

SEQ ID NO: 1297 - protein, 773 aa, unidentified
  REGION 1..773: note = Description of Unknown: Synthetic polypeptide
MILDTDYITENGKPVIRIFKKEKGEFKIEYDRNFEPYIYALLEDDESIEDIKKITGERHGKKVRIIRVEKVKKKFLGEPIEVWKLVFEHPQDYPAIRDAIRSHPAVREIFEYDIPFAKRYLIDKGLVPMEGGEELKLLAFAIATFYHEGDEFAEGEILMISYADESGAKVITWKKIDLPYVEVVSTEREAIKRFLQVLREKDPDVLLTYNGDNFDFAYIKKRCEKLGLKFTIGRDGSEPKIQRMGDRFAVEVKGRIHLDLAPVVRHTIRLPTYTLEAVYEAVFGKKKEKVYAEEIAEAWKSEEGLKRVAQYSMEDARATYELGREFFPMEVELAKLIGQSVWDVSRSSTGNLVEWYLLRVAYERNELAPNKPGGEEYQRRMRSSYIGGYVKEPEKGLWESIAYLDFRSSAGSIIVTHNVSPDTLEKECKNYDVAPIVGYRFCKDFKGFIPSILEDLIETRQKVKRKMKATIDPIEKKMLDYRQRALKILANSYYGYQGYPQARWYSKECAESVTAWGRHYIETTIKEAEKFGFKVLYADTDGFFATIPNEKPETIKSKAKKFLKHINEKLPGMLELEYEGFYLRGFFVTKKKYALIDEDGHITTRGLEVVRRDWSEIAKETQAKVLEVILREGSIEKAAGIVKKVVEDLANYRVPVEKLIIHEQITRELKRYKATGPHVAIAKRLQARGIKVKPGTIISYVVLKGSKKISDRVILFDEYDSSRHKYDPDYYIHNQVLPAVLRILEAFGYKEKDLEYQRMKQTGLGAWLKMGKK

SEQ ID NO: 1298 - protein, 766 aa, unidentified
  REGION 1..766: note = Description of Unknown: Synthetic polypeptide
MILDTDYITENGKPVIRIFKKEKGEFKIEYDRNFEPYIYALLEDDESIEDIKKITGERHGKKVRIIRVEKVKKKFLGEPIEVWKLVFEHPQDVPAIRDAIRSHPAVREIFEYDIPFAKRYLIDKGLVPMEGGEELKLLAFNIATFYHEGDEFAEGEILMISYADESGAKVITWKKIDLPYVEVVSTEREAIKRFLQVLREKDPDVLLTYNGDNFDFAYIKKRCEKLGLKFTIGRDGSEPKIQRMGDRFAVEVKGRIHLDLAPVVRHTIRLPTYTLEAVYEAVFGKKKEKVYAEEIAEAWKSEEGLKRVAQYSVEDARATYELGREFFPLEVELAKLIGQSVWDVSRSSTGNLVEWYLLRVAYERNELAPNKPGGEEYQRRMRSSYIGGYVKEPEKGLWESIAYLDFRSSAGSIIVTHNVSPDTLEKECKNYDVAPIVGYRFCKDFKGFIPSILEDLIETRQKVKRKMKATIDPIEKKMLDYRQRALKILANSYYGYQGYPKARWYSKECAESVTAWGRHYIETTIKEAEKFGFKVLYADTDGFFATIPNEKPETIKSKAKKFLKHINEKLPGMLELEYEGFYLRGFFVTKKKYALIDEDGHITTRGLEVVRRDWSEIAKETQAKVLEVILREGSIEKAAGIVKKVVEDLANYRVPVEKLIIHEQITRELKRYKATGPHVAIAKRLQARGIKVKPGTIISYVVLKGSKKISDRVILFDEYDSSRHKYDPDYYIHNQVLPAVLRILEAFGYKEKDLEYQRDKQTGLGA

SEQ ID NO: 1299 - protein, 773 aa, unidentified; identical to SEQ ID NO: 1139
  REGION 1..773: note = Description of Unknown: Synthetic polypeptide

SEQ ID NO: 1300 - protein, 773 aa, unidentified
  REGION 1..773: note = Description of Unknown: Synthetic polypeptide
MILDTDYITENGKPVIRIFKKEKGEFKIEYDRNFEPYIYALLEDDESIEDIKKITGERHGKKVRIIRVEKVKKKFLGEPIEVWKLVFEHPQDYPAIRDAIRSHPAVREIFEYDIPFAKRYLIDKGLVPMEGGEELKLLAFAIATFEHEGDEFAEGEILMISYADESGAKVITWKKIDLPYVEVVSTEREAIKRFLQVLREKDPDVLLTYNGDNFDFAYIKKRCEKLGLKFTIGRDGSEPKIQRMGDRFAVEVKGRIHLDLAPVVRHTIRLPTYTLEAVYEAVFGKKKEKVYAEEIAEAWKSEEGLARVAQYSVEDARATYELGREFFPMEVELAKLIGQSVWDVSRSSTGNLVEWYLLRVAYERNELAPNQPGGEEYQRRMRSSYIGGYVKEPEKGLWESIAYLDFRSSAGSIIVTHNVSPDTLEKECKNYDVAPIVGYRFCKDFKGFIPSILEDLIETRQKVKRKMKATIDPIEKKMLDYRQRALKILANSYYGYQGYPKARWYSKECAESVTAWGRHYIETTIKEAEKFGFKVLYADTDGFFATIPNEKPETIKSKAKKFLKHINEKLPGMLELEYEGFYLRGFFVTKKKYALIDEDGHITTRGLEVVRRDWSEIAKETQAKVLEVILREGSIEKAAGIVKKVVEDLANYRVPVEKLIIHEQITRELKRYKATGPHVAIAKRLQARGIKVKPGTIISYVVLKGSKKISDRVILFDEYDSSRHKYDPDYYIHNQVLPAVLRILEAFGYKEKDLEYQRDKQTGLGAWLKMGKK

SEQ ID NO: 1301 - protein, 773 aa, unidentified
  REGION 1..773: note = Description of Unknown: Synthetic polypeptide
MILDTDYITENGKPVIRIFKKEKGEFKIEYDRNFEPYIYALLEDDESIEDIKKITGERHGKKVRIIRVEKVKKKFLGEPIEVWKLVFEHPQDFPAIRDAIRSHPAVREIFEYDIPFAKRYLIDKGLVPMEGGEELKLLAFNIATFYHEGDEFAEGEILMISYADESGAKVITWKKIDLPYVEVVSTEREAIKRFLQVLREKDPDVLLTYNGDNFDFAYIKKRCEKLGLKFTIGRDGSEPKIQRMGDRFAVEVKGRIHLDLAPVVRHTIRLPTYTLEAVYEAVFGKKKEKVYAEEIAEAWKSEEGLARVAQYSMEDARATYELGREFFPLEVELAKLIGQSVWDVSRSSTGNLVEWYLLRVAYERNELAPNKPGGEEYQRRMRSSYIGGYVKEPEKGLWESIAYLDFRSSAGSIIVTHNVSPDTLEKECKNYDVAPIVGYRFCKDFKGFIPSILEDLIETRQKVKRKMKATIDPIEKKMLDYRQRALKILANSYYGYQGYPKARWYSKECAESVTAWGRHYIETTIKEAEKFGFKVLYADTDGFFATIPNEKPETIKSKAKKFLKHINEKLPGMLELEYEGFYLRGFFVTKKKYALIDEDGHITTRGLEVVRRDWSEIAKETQAKVLEVILREGSIEKAAGIVKKVVEDLANYRVPVEKLIIHEQITRELKRYKATGPHVAIAKRLQARGIKVKPGTIISYVVLKGSKKISDRVILFDEYDSSRHKYDPDYYIHNQVLPAVLRILEAFGYKEKDLEYQRDKQTGLGAWLKMGKK

SEQ ID NO: 1302 - protein, 773 aa, unidentified
  REGION 1..773: note = Description of Unknown: Synthetic polypeptide
MILDTDYITENGKPVIRIFKKEKGEFKIEYDRNFEPYIYALLEDDESIEDIKKITGERHGKKVRIIRVEKVKKKFLGEPIEVWKLVFEHPQDYPAIRDAIRSHPAVREIFEYDIPFARRYLIDKGLVPMEGGEELKLLAFAIATFYHEGDEFAEGEILMISYADESGAKVITWKKIDLPYVEVVSTEREAIKRFLQVLREKDPDVLLTYNGDNFDFAYIKKRCEKLGLKFTIGRDGSEPKIQRMGDRFAVEVKGRIHLDLAPVVRHTIRLPTYTLEAVYEAVFGKKKEKVYAEEIAEAWKSEEGLKRVAQYSMEDARATYELGREFFPMEVELAKLIGQSVWDVSRSSTGNLVEWYLLRVAYERNELAPNKPGGEEYQRRMRSSYIGGYVKEPEKGLWESIAYLDFRSSAGSIIVTHNVSPDTLEKECKNYDVAPIVGYRFCKDFKGFIPSILEDLIETRQKVKRKMKATIDPIEKKMLDYRQRALKILANSYYGYQGYPKARWYSKECAESVTAWGRHYIETTIKEAEKFGFKVLYADTDGFFATIPNEKPETIKSKAKKFLKHINEKLPGMLELEYEGFYLRGFFVTKKKYALIDEDGHITTRGLEVVRRDWSEIAKETQAKVLEVILREGSIEKAAGIVKKVVEDLANYRVPVEKLIIHEQITRELKRYKATGPHVAIAKRLQARGIKVKPGTIISYVVLKGSKKISDRVILFDEYDSSRHKYDPDYYIHNQVLPAVLRILEAFGYKEKDLEYQRMKQTGLGAWLKMGKK

SEQ ID NO: 1303 - protein, 773 aa, unidentified
  REGION 1..773: note = Description of Unknown: Synthetic polypeptide
MILDTDYITENGKPVIRIFKKEKGEFKIEYDRNFEPYIYALLEDDESIEDIKKITGERHGKKVRIIRVEKVKKKFLGEPIEVWKLVFEHPQDVPAIRDAIRSHPAVREIFEYDIPFAKRYLIDKGLVPMEGGEELKLLAFRIATFYHEGDEFAEGEILMISYADESGAKVITWKKIDLPYVEVVSTEREAIKRFLQVLREKDPDVLLTYNGDNFDFAYIKKRCEKLGLKFTIGRDGSEPKIQRMGDRFAVEVKGRIHLDLAPVVRHTIRLPTYTLEAVYEAVFGKKKEKVYAEEIAEAWKSEEGLKRVAQYSAEDARATYELGREFFPLEVELAKLIGQSVWDVSRSSTGNLVEWYLLRVAYERNELAPNKPGGEEYQRRMRSSYIGGYVKEPEKGLWESIAYLDFRSSAGSIIVTHNVSPDTLEKECKNYDVAPIVGYRFCKDFKGFIPSILEDLIETRQKVKRKMKATIDPIEKKMLDYRQRALKILANSYYGYQGYPKARWYSKECAESVTAWGRHYIETTIKEAEKFGFKVLYADTDGFFATIPNEKPETIKSKAKKFLKHINEKLPGMLELEYEGFYLRGFFVTKKKYALIDEDGHITTRGLEVVRRDWSEIAKETQAKVLEVILREGSIEKAAGIVKKVVEDLANYRVPVEKLIIHEQITRELKRYKATGPHVAIAKRLQARGIKVKPGTIISYVVLKGSKKISDRVILFDEYDSSRHKYDPDYYIHNQVLPAVLRILEAFGYKEKDLEYQRDKQTGLGAWLKMGKK

SEQ ID NO: 1304 - protein, 773 aa, unidentified; identical to SEQ ID NO: 1100
  REGION 1..773: note = Description of Unknown: Synthetic polypeptide

SEQ ID NO: 1305 - protein, 773 aa, unidentified
  REGION 1..773: note = Description of Unknown: Synthetic polypeptide
MILDTDYITENGKPVIRIFKKEKGEFKIEYDRNFEPYIYALLEDDESIEDIKKITGERHGKKVRIIRVEKVKKNFLGEPIEVWKLVFEHPQDYPAIRDAIRSHPAVREIFEYDIPFAKRYLIDKGLVPMEGGEELKLLAFAIATFYHEGDEFAEGEILMISYADESGAKVITWKKIDLPYVEVVSTEREAIKRFLQVLREKDPDVLLTYNGDNFDFAYIKKRCEKLGLKFTIGRDGSEPKIQRMGDRFAVEVKGRIHLDLAPVVRHTIRLPTYTLEAVYEAVFGKKKEKVYAEEIAEAWKSEEGLKRVAQYSMEDARATYELGREFFPMEAELAKLIGQSVWDVSRSSTGNLVEWYLLRVAYERNELAPNKPGGEEYQRRMRSSYIGGYVKEPEKGLWESIAYLDFRSSAGSIIVTHNVSPDTLEKECKNYDVAPIVGYRFCKDFKGFIPSILEDLIETRQKVKRKMKATIDPIEKKMLDYRQRALKILANSYYGYQGYPKARWYSKECAESVTAWGRHYIETTIKEAEKFGFKVLYADTDGFFATIPNEKPETIKSKAKKFLKHINEKLPGMLELEYEGFYLRGFFVTKKKYALIDEDGHITTRGLEVVRRDWSEIAKETQAKVLEVILREGSIEKAAGIVKKVVEDLANYRVPVEKLIIHEQITRELKRYKATGPHVAIAKRLQARGIKVKPGTIISYVVLKGSKKISDRVILFDEYDSSRHKYDPDYYIHNQVLPAVLRILEAFGYKEKDLEYQRMKQTGLGAWLKMGKK

SEQ ID NO: 1306 - protein, 773 aa, unidentified
  REGION 1..773: note = Description of Unknown: Synthetic polypeptide
MILDTDYITENGKPVIRIFKKEKGEFKIEYDRNFEPYIYALLEDDESIEDIKKITGERHGKKVRIIRVEKVKKKFLGEPIEVWKLVFEHPQDYPAIRDAIRSHPAVREIFEYDIPFAKRYLIDKGLVPMEGGEELKLLAFAIATFYHEGDEFAEGEILMISYADESGAKVITWKKIDLPYVEVVSTEREAIKRFLQVLREKDPDVLLTYNGDNFDFAYIKKRCEKLGLKFTIGRDGSEPKIQRMGDRFAVEVKGRIHLDLAPVVRHTIRLPTYTLEAVYEAVFGKKKEKVYAEEIAEAWKSEEGLKRVAQYSMEDARATYELGREFFPMEVELAKLIGQSVWDVSRSSTGNLVEWYLLRVAYERNELAPNKPGGEEYQRRMRSSYIGGYVKEPEKGLWESIAYLDFRSLYGSIIVTHNVSPDTLEKECKNYDVAPIVGYRFCKDFKGFIPSILEDLIETRQKVKRKMKATIDPIEKKMLDYRQRALKILANSYYGYQGYPKARWYSKECAESVTAWGRHYIETTIKEAEKFGFKVLYADTDGFFATIPNEKPETIKSKAKKFLKHINEKLPGMLELEYEGFYLRGFFVTKKKYALIDEDGHITTRGLEVVRRDWSEIAKETQAKVLEVILREGSIEKAAGIVKKVVEDLANYRVPVEKLIIHEQITRELKRYKATGPHVAIAKRLQARGIKVKPGTIISYVVLKGSKKISDRVILFDEYDSSRHKYDPDYYIHNQVLPAVLRILEAFGYKEKDLEYQRMKQTGLGAWLKMGKK

SEQ ID NO: 1307 - protein, 773 aa, unidentified
  REGION 1..773: note = Description of Unknown: Synthetic polypeptide
MILDTDYITENGKPVIRIFKKEKGEFKIEYDRNFEPYIYALLEDDESIEDIKKITGERHGKKVRIIRVEKVKKNFLGEPIEVWKLVFEHPQDYPAIRDAIRSHPAVREIFEYDIPFAKRYLIDKGLVPMEGGEELKLLAFAIATFYHEGDEFAEGEILMISYADESGAKVITWKKIDLPYVEVVSTEREAIKRFLQVLREKDPDVLLTYNGDNFDFAYIKKRCEKLGLKFTIGRDGSEPKIQRMGDRFAVEVKGRIHLDLAPVVRHTIRLPTYTLEAVYEAVFGKKKEKVYAEEIAEAWKSEEGLKRVAQYSMEDARATYELGREFFPMEVELAKLVGQSVWDVSRSSTGNLVEWYLLRVAYERNELAPNKPGGEEYQRRMRSSYIGGYVKEPEKGLWESIAYLDFRSSAGSIIVTHNVSPDTLEKECKNYDVAPIVGYRFCKDFKGFIPSILEDLIETRQKVKRKMKATIDPIEKKMLDYRQRALKILANSYYGYQGYPKARWYSKECAESVTAWGRHYIETTIKEAEKFGFKVLYADTDGFFATIPNEKPETIKSKAKKFLKHINEKLPGMLELEYEGFYLRGFFVTKKKYALIDEDGHITTRGLEVVRRDWSEIAKETQAKVLEVILREGSIEKAAGIVKKVVEDLANYRVPVEKLIIHEQITRELKRYKATGPHVAIAKRLQARGIKVKPGTIISYVVLKGSKKISDRVILFDEYDSSRHKYDPDYYIHNQVLPAVLRILEAFGYKEKDLEYQRMKQTGLGAWLKMGKK

SEQ ID NO: 1308 - protein, 773 aa, unidentified
  REGION 1..773: note = Description of Unknown: Synthetic polypeptide
MILDTDYITENGKPVIRIFKKEKGEFKIEYDRNFEPYIYALLEDDESIEDIKKITGERHGKKVRIIRVEKVKKKFLGEPIEVWKLVFEHPQDYPAIRDAIRSHPAVREIFEYDIPFAKRYLIDKGLVPMEGGEELKLLAFAIATFYHEGDEFAEGEILMISYADESGAKVITWKKIDLPYVEVVSTEREAIKRFLQVLREKDPDVLLTYNGDNFDFAYIKKRCEKLGLKFTIGRDGSEPKIQRMGDRFAVEVKGRIHLDLAPVVRHTIRLPTYTLEAVYEAVFGKKKEKVYAEEIAEAWKSEEGLARVAQYSVEDARATYELGREFFPMEVELAKLIGQSVWDVSRSSTGNLVEWYLLRVAYERNELAPNQPGGEEYQRRMRSSYIGGYVKEPEKGLWESIAYLDFRSSAGSIIVTHNVSPDTLEKECKNYDVAPIVGYRFCKDFKGFIPSILEDLIETRQKVKRKMKATIDPIEKKMLDYRQRALKILANSYYGYQGYPKARWYSKECAESVTAWGRHYIETTIKEAEKFGFKVLYADTDGFFATIPNEKPETIKSKAKKFLKHINEKLPGMLELEYEGFYLRGFFVTKKKYALIDEDGHITTRGLEVVRRDWSEIAKETQAKVLEVILREGSIEKAAGIVKKVVEDLANYRVPVEKLIIHEFITRELKRYKATGPHVAIAKRLQARGIKVKPGTIISYVVLKGSKKISDRVILFDEYDSSRHKYDPDYYIHNQVLPAVLRILEAFGYKEKDLEYQRDKQTGLGAWLKMGKK

SEQ ID NO: 1309 - protein, 773 aa, unidentified
  REGION 1..773: note = Description of Unknown: Synthetic polypeptide
MILDTDYITENGKPVIRIFKKEKGEFKIEYDRNFEPYIYALLEDDESIEDIKKITGERHGKKVRIIRVEKVKKKFLGEPIEVWKLVFEHPQDVPAIRDAIRSHPAVREIFEYDIPFAKRYLIDKGLVPMEGGEELKLLAFNIATFYHEGDEFAEGEILMISYADESGAKVITWKKIDLPYVEVVSTEREAIKRFLQVLREKDPDVLLTYNGDNFDFAYIKKRCEKLGLKFTIGRDGSEPKIQRMGDRFAVEVKGRIHLDLAPVVRHTIRLPTYTLEAVYEAVFGKKKEKVYAEEIAEAWKSEEGLKRVAQYSMEDARATYELGREFFPIEVELAKLIGQSVWDVSRSSTGNLVEWYLLRVAYERNELAPNKPGGEEYQRRMRSSYIGGYVKEPEKGLWESIAYLDFRSSAGSIIVTHNVSPDTLEKECKNYDVAPIVGYRFCKDFKGFIPSILEDLIETRQKVKRKMKATIDPIEKKMLDYRQRALKILANSYYGYQGYPKARWYSKECAESVTAWGRHYIETTIKEAEKFGFKVLYADTDGFFATIPNEKPETIKSKAKKFLKHINEKLPGMLELEYEGFYLRGFFVTKKKYALIDEDGHITTRGLEVVRRDWSEIAKETQAKVLEVILREGSIEKAAGIVKKVVEDLANYRVPVEKLIIHEQITRELKRYKATGPHVAIAKRLQARGIKVKPGTIISYVVLKGSKKISDRVILFDEYDSSRHKYDPDYYIHNQVLPAVLRILEAFGYKEKDLEYQRDKQTGLGAWLKMGKK

SEQ ID NO: 1310 - protein, 766 aa, unidentified
  REGION 1..766: note = Description of Unknown: Synthetic polypeptide
MILDTDYITENGKPVIRIFKKEKGEFKIEYDRNFEPYIYALLEDDESIEDIKKITGERHGKKVRIIRVEKVKKKFLGEPIEVWKLVFEHPQDFPAIRDAIRSHPAVREIFEYDIPFAKRYLIDKGLVPMEGGEELKLLAFNIATFYHEGDEFAEGEILMISYADESGAKVITWKKIDLPYVEVVSTEREAIKRFLQVLREKDPDVLLTYNGDNFDFAYIKKRCEKLGLKFTIGRDGSEPKIQRMGDRFAVEVKGRIHLDLAPVVRHTIRLPTYTLEAVYEAVFGKKKEKVYAEEIAEAWKSEEGLARVAQYSMEDARATYELGREFFPLEVELAKLIGQSVWDVSRSSTGNLVEWYLLRVAYERNELAPNKPGGEEYQRRMRSSYIGGYVKEPEKGLWESIAYLDFRSSAGSIIVTHNVSPDTLEKECKNYDVAPIVGYRFCKDFKGFIPSILEDLIETRQKVKRKMKATIDPIEKKMLDYRQRALKILANSYYGYQGYPKARWYSKECAESVTAWGRHYIETTIKEAEKFGFKVLYADTDGFFATIPNEKPETIKSKAKKFLKHINEKLPGMLELEYEGFYLRGFFVTKKKYALIDEDGHITTRGLEVVRRDWSEIAKETQAKVLEVILREGSIEKAAGIVKKVVEDLANYRVPVEKLIIHEQITRELKRYKATGPHVAIAKRLQARGIKVKPGTIISYVVLKGSKKISDRVILFDEYDSSRHKYDPDYYIHNQVLPAVLRILEAFGYKEKDLEYQRDKQTGLGA

SEQ ID NO: 1311 - protein, 773 aa, unidentified
  REGION 1..773: note = Description of Unknown: Synthetic polypeptide
MILDTDYITENGKPVIRIFKKENGEFKIEYDRNFEPYIYALLEDDESIEDIKKITGERHGKKVRIIRVEKVKKKFLGEPIEVWKLVFEHPQDYPAIRDAIRSHPAVREIFEYDIPFAKRYLIDKGLVPMEGGEELKLLAFAIATFYHEGDEFAEGEILMISYADESGAKVITWKKIDLPYVEVVSTEREAIKRFLQVLREKDPDVLLTYNGDNFDFAYIKKRCEKLGLKFTIGRDGSEPKIQRMGDRFAVEVKGRIHLDLAPVVRHTIRLPTYTLEAVYEAVFGKKKEKVYAEEIAEAWKSEEGLKRVAQYSMEDARATYELGREFFPMEVELAKLIGQSVWDVSRSSTGNLVEWYLLRVAYERNELAPNKPGGEEYQRRMRSSYIGGYVKEPEKGLWESIAYLDFRSSAGSIIVTHNVSPDTLEKECKNYDVAPIVGYRFCKDFKGFIPSILEDLIETRQKVKRKMKATIDPIEKKMLDYRQRALKILANSYYGYQGYPKARWYSKECAESVTAWGRHYIETTIKEAEKFGFKVLYADTDGFFATIPNEKPETIKSKAKKFLKHINEKLPGMLELEYEGFYLRGFFVTKKKYALIDEDGHITTRGLEVVRRDWSEIAKETQAKVLEVILREGSIEKAAGIVKKVVEDLANYRVPVEKLIIHEQITRELKRYKATGPHVAIAKRLQARGIKVKPGTIISYVVLKGSKKISDRVILFDEYDSSRHKYDPDYYIHNQVLPAVLRILEAFGYKEKDLEYQRMKQTGLGAWLKMGKK

SEQ ID NO: 1312 - protein, 766 aa, unidentified; identical to SEQ ID NO: 997
  REGION 1..766: note = Description of Unknown: Synthetic polypeptide

SEQ ID NO: 1313 - protein, 773 aa, unidentified
  REGION 1..773: note = Description of Unknown: Synthetic polypeptide
MILDTDYITENGKPVIRIFKKEKGEFKIEYDRNFEPYIYALLEDDESIEDIKKITGERHGKKVRIIRVEKVKKKFLGEPIEVWKLVFEHPQDYPAIRDAIRSHPAVREIFEYDIPFAKRYLIDKGLVPMEGGEELKLLAFAIATFYHEGDEFAEGEILMISYADESGAKVITWKKIDLPYVEVVSTEREAIKRFLQVLREKDPDVLLTYNGDNFDFAYIKKRCEKLGLKFTIGRDGSEPKIQRMGDRFAVEVKGRIHLDLAPVVRHTIRLPTYTLEAVYEAVFGKKKEKVYAEEIAEAWKSEEGLKRVAQYSMEDARATYELGREFFPMEVELAKLIGQSVWDVSRSSTGALVEWYLLRVAYERNELAPNKPGGEEYQRRMRSSYIGGYVKEPEKGLWESIAYLDFRSSAGSIIVTHNVSPDTLEKECKNYDVAPIVGYRFCKDFKGFIPSILEDLIETRQKVKRKMKATIDPIEKKMLDYRQRALKILANSYYGYQGYPKARWYSKECAESVTAWGRHYIETTIKEAEKFGFKVLYADTDGFFATIPNEKPETIKSKAKKFLKHINEKLPGMLELEYEGFYLRGFFVTKKKYALIDEDGHITTRGLEVVRRDWSEIAKETQAKVLEVILREGSIEKAAGIVKKVVEDLANYRVPVEKLIIHEQITRELKRYKATGPHVAIAKRLQARGIKVKPGTIISYVVLKGSKKISDRVILFDEYDSSRHKYDPDYYIHNQVLPAVLRILEAFGYKEKDLEYQRMKQTGLGAWLKMGKK

SEQ ID NO: 1314 - protein, 773 aa, unidentified; identical to SEQ ID NO: 1211
  REGION 1..773: note = Description of Unknown: Synthetic polypeptide

SEQ ID NO: 1315 - protein, 773 aa, unidentified
  REGION 1..773: note = Description of Unknown: Synthetic polypeptide
MILDTDYITENGKPVIRIFKKEKGEFKIEYDRNFEPYIYALLEDDESIEDIKKITGERHGKKVRIIRVEKVKKKFLGEPIEVWKLVFEHPQDYPAIRDAIRSHPAVREIFEYDIPFAKRYLIDKGLVPMEGGEELKLLAFNIATFYHEGDEFAEGEILMISYADESGAKVITWKKIDLPYVEVVSTEREAIKRFLQVLREKDPDVLLTYNGDNFDFAYIKKRCEKLGLKFTIGRDGSEPKIQRMGDRFAVEVKGRIHLDLAPVVRHTIRLPTYTLEAVYEAVFGKKKEKVYAEEIAEAWKSEEGLKRVAQYSMEDARATYELGREFFPLEVELAKLIGQSVWDVSRSSTGNLVEWYLLRVAYERNELAPNKPGGEEYQRRMRSSYIGGYVKEPEKGLWESIAYLDFRSTAGSIIVTHNVSPDTLEKECKNYDVAPIVGYRFCKDFKGFIPSILEDLIETRQKVKRKMKATIDPIEKKMLDYRQRALKILANSYYGYQGYPKARWYSKECAESVTAWGRHYIETTIKEAEKFGFKVLYADTDGFFATIPNEKPETIKSKAKKFLKHINEKLPGMLELEYEGFYLRGFFVTKKKYALIDEDGHITTRGLEVVRRDWSEIAKETQAKVLEVILREGSIEKAAGIVKKVVEDLANYRVPVEKLIIHEQITRELKRYKATGPHVAIAKRLQARGIKVKPGTIISYVVLKGSKKISDRVILFDEYDSSRHKYDPDYYIHNQVLPAVLRILEAFGYKEKDLEYQRMKQTGLGAWLKMGKK

SEQ ID NO: 1316 - protein, 773 aa, unidentified
  REGION 1..773: note = Description of Unknown: Synthetic polypeptide
MILDTDYITENGKPVIRIFKKEKGEFKIEYDRNFEPYIYALLEDDESIEDIKKITGERHGKKVRIIRVEKVKKKFLGEPIEVWKLVFEHPQDYPAIRDAIRSHPAVREIFEYDIPFAKRYLIDKGLVPMEGGEELKLLAFAIATFYHEGDEFAEGEILMISYADESGAKVITWKKIDLPYVEVVSTEREAIKRFLQVLREKDPDVLLTYNGDNFDFAYIKKRCEKLGLKFTIGRDGSEPKIQRMGDRFAVEVKGRIHLDLAPVVRHTIRLPTYTLEAVYEAVFGKKKEKVYAEEIAEAWKSEEGLARVAQYSVEDARATYELGREFFPMEVELAKLIGQSVWDVSRSSTGNLVEFYLLRVAYERNELAPNQPGGEEYQRRMRSSYIGGYVKEPEKGLWESIAYLDFRSSAGSIIVTHNVSPDTLEKECKNYDVAPIVGYRFCKDFKGFIPSILEDLIETRQKVKRKMKATIDPIEKKMLDYRQRALKILANSYYGYQGYPKARWYSKECAESVTAWGRHYIETTIKEAEKFGFKVLYADTDGFFATIPNEKPETIKSKAKKFLKHINEKLPGMLELEYEGFYLRGFFVTKKKYALIDEDGHITTRGLEVVRRDWSEIAKETQAKVLEVILREGSIEKAAGIVKKVVEDLANYRVPVEKLIIHEQITRELKRYKATGPHVAIAKRLQARGIKVKPGTIISYVVLKGSKKISDRVILFDEYDSSRHKYDPDYYIHNQVLPAVLRILEAFGYKEKDLEYQRDKQTGLGAWLKMGKK

SEQ ID NO: 1317 - protein, 773 aa, unidentified
  REGION 1..773: note = Description of Unknown: Synthetic polypeptide
MILDTDYITENGKPVIRIFKKEKGEFKIEYDRNFEPYIYALLEDDESIEDIKKITGERHGKKVRIIRVEKVKKKFLGEPIEVWKLVFEHPQDIPAIRDAIRSHPAVREIFEYDIPFAKRYLIDKGLVPMEGGEELKLLAFNIATFYHEGDEFAEGEILMISYADESGAKVITWKKIDLPYVEVVSTEREAIKRFLQVLREKDPDVLLTYNGDNFDFAYIKKRCEKLGLKFTIGRDGSEPKIQRMGDRFAVEVKGRIHLDLAPVVRHTIRLPTYTLEAVYEAVFGKKKEKVYAEEIAEAWKSEEGLKRVAQYSAEDARATYELGREFFPLEVELAKLIGQSVWDVSRSSTGNLVEWYLLRVAYERNELAPNKPGGEEYQRRMRSSYIGGYVKEPEKGLWESIAYLDFRSSAGSIIVTHNVSPDTLEKECKNYDVAPIVGYRFCKDFKGFIPSILEDLIETRQKVKRKMKATIDPIEKKMLDYRQRALKILANSYYGYQGYPKARWYSKECAESVTAWGRHYIETTIKEAEKFGFKVLYADTDGFFATIPNEKPETIKSKAKKFLKHINEKLPGMLELEYEGFYLRGFFVTKKKYALIDEDGHITTRGLEVVRRDWSEIAKETQAKVLEVILREGSIEKAAGIVKKVVEDLANYRVPVEKLIIHEQITRELKRYKATGPHVAIAKRLQARGIKVKPGTIISYVVLKGSKKISDRVILFDEYDSSRHKYDPDYYIHNQVLPAVLRILEAFGYKEKDLEYQRDKQTGLGAWLKMGKK

SEQ ID NO: 1318 - protein, 773 aa, unidentified
  REGION 1..773: note = Description of Unknown: Synthetic polypeptide
MILDTDYITENGKPVIRIFKKEKGEFKIEYDRNFEPYIYALLEDDESIEDIKKITGERHGKKVRIIRVEKVKKKFLGRPIEVWKLVFEHPQDYPAIRDAIRSHPAVREIFEYDIPFAKRYLIDKGLVPMEGGEELKLLAFAIATFYHEGDEFAEGEILMISYADESGAKVITWKKIDLPYVEVVSTEREAIKRFLQVLREKDPDVLLTYNGDNFDFAYIKKRCEKLGLKFTIGRDGSEPKIQRMGDRFAVEVKGRIHLDLAPVVRHTIRLPTYTLEAVYEAVFGKKKEKVYAEEIAEAWKSEEGLKRVAQYSMEDARATYELGREFFPMEVELAKLIGQSVWDVSRSSTGNLVEWYLLRVAYERNELAPNKPGGEEYQRRMRSSYIGGYVKEPEKGLWESIAYLDFRSSAGSIIVTHNVSPDTLEKECKNYDVAPIVGYRFCKDFKGFIPSILEDLIETRQKVKRKMKATIDPIEKKMLDYRQRALKILANSYYGYQGYPKARWYSKECAESVTAWGRHYIETTIKEAEKFGFKVLYADTDGFFATIPNEKPETIKSKAKKFLKHINEKLPGMLELEYEGFYLRGFFVTKKKYALIDEDGHITTRGLEVVRRDWSEIAKETQAKVLEVILREGSIEKAAGIVKKVVEDLANYRVPVEKLIIHEQITRELKRYKATGPHVAIAKRLQARGIKVKPGTIISYVVLKGSKKISDRVILFDEYDSSRHKYDPDYYIHNQVLPAVLRILEAFGYKEKDLEYQRMKQTGLGAWLKMGKK

SEQ ID NO: 1319 - protein, 773 aa, unidentified
  REGION 1..773: note = Description of Unknown: Synthetic polypeptide
MILDTDYITENGKPVIRIFKKEKGEFKIEYDRNFEPYIYALLEDDESIEDIKKITGERHGKKVRIIRVEKVKKKFLGEPIEVWKLVFEHPQDLPAIRDAIRSHPAVREIFEYDIPFAKRYLIDKGLVPMEGGEELKLLAFNIATFYHEGDEFAEGEILMISYADESGAKVITWKKIDLPYVEVVSTEREAIKRFLQVLREKDPDVLLTYNGDNFDFAYIKKRCEKLGLKFTIGRDGSEPKIQRMGDRFAVEVKGRIHLDLAPVVRHTIRLPTYTLEAVYEAVFGKKKEKVYAEEIAEAWKSEEGLKRVAQYSMEDARATYELGREFFPLEVELAKLIGQSVWDVSRSSTGNLVEWYLLRVAYERNELAPNKPGGEEYQRRMRSSYIGGYVKEPEKGLWESIAYLDFRSSAGSIIVTHNVSPDTLEKECKNYDVAPIVGYRFCKDFKGFIPSILEDLIETRQKVKRKMKATIDPIEKKMLDYRQRALKILANSYYGYQGYPKARWYSKECAESVTAWGRHYIETTIKEAEKFGFKVLYADTDGFFATIPNEKPETIKSKAKKFLKHINEKLPGMLELEYEGFYLRGFFVTKKKYALIDEDGHITTRGLEVVRRDWSEIAKETQAKVLEVILREGSIEKAAGIVKKVVEDLANYRVPVEKLIIHEQITRELKRYKATGPHVAIAKRLQARGIKVKPGTIISYVVLKGSKKISDRVILFDEYDSSRHKYDPDYYIHNQVLPAVLRILEAFGYKEKDLEYQRDKQTGLGAWLKMGKK

SEQ ID NO: 1320 - protein, 773 aa, unidentified
  REGION 1..773: note = Description of Unknown: Synthetic polypeptide
MILDTDYITENGKPVIRIFKKEKGEFKIEYDRNFEPYIYALLEDDESIEDIKKITGERHGKKVRIIRVEKVKKKFLGEPIEVWKLVFEHPQDYPAIRDAIRSHPAVREIFEYDIPFAKRYLIDKGLVPMEGGEELKLLAFAIATFYHEGDEFAEGEILMISYADESGAKVITWKKIDLPYVEVVSTEREAIKRFLQVLREKDPDVLLTYNGDNFDFAYIKKRCEKLGLKFTIGRDGSEPKIQRMGDRFAVEVKGRIHLDLAPVVRHTIRLPTYTLEAVYEAVFGKKKEQVYAEEIAEAWKSEEGLKRVAQYSMEDARATYELGREFFPMEVELAKLIGQSVWDVSRSSTGNLVEWYLLRVAYERNELAPNKPGGEEYQRRMRSSYIGGYVKEPEKGLWESIAYLDFRSSAGSIIVTHNVSPDTLEKECKNYDVAPIVGYRFCKDFKGFIPSILEDLIETRQKVKRKMKATIDPIEKKMLDYRQRALKILANSYYGYQGYPKARWYSKECAESVTAWGRHYIETTIKEAEKFGFKVLYADTDGFFATIPNEKPETIKSKAKKFLKHINEKLPGMLELEYEGFYLRGFFVTKKKYALIDEDGHITTRGLEVVRRDWSEIAKETQAKVLEVILREGSIEKAAGIVKKVVEDLANYRVPVEKLIIHEQITRELKRYKATGPHVAIAKRLQARGIKVKPGTIISYVVLKGSKKISDRVILFDEYDSSRHKYDPDYYIHNQVLPAVLRILEAFGYKEKDLEYQRMKQTGLGAWLKMGKK

SEQ ID NO: 1321 - protein, 773 aa, unidentified
  REGION 1..773: note = Description of Unknown: Synthetic polypeptide
MILDTDYITENGKPVIRIFKKEKGEFKIEYDRNFEPYIYALLEDDESIEDIKKITGERHGKKVRIIRVEKVKKKFLGEPIEVWKLVFEHPQDYPAIRDAIRSHPAVREIFEYDIPFAKRYLIDKGLVPMEGGEELKLLAFNIATFYHEGDEFAEGEILMISYADESGAKVITWKKIDLPYVEVVSTEREAIKRFLQVLREKDPDVLLTYNGDNFDFAYIKKRCEKLGLKFTIGRDGSEPKIQRMGDRFAVEVKGRIHLDLAPVVRHTIRLPTYTLEAVYEAVFGKKKEKVYAEEIAEAWKSEEGLKRVAQYSMEDARATYELGREFFPLEVELAKLIGQSVWDVSRSSTGNLVEWYLLRVAYERNELAPNKPGGEEYQRRMRSSYIGGYVKEPEKGLWESIAYLDFRSVLPSIIVTHNVSPDTLEKECKNYDVAPIVGYRFCKDFKGFIPSILEDLIETRQKVKRKMKATIDPIEKKMLDYRQRALKILANSYYGYQGYPKARWYSKECAESVTAWGRHYIETTIKEAEKFGFKVLYADTDGFFATIPNEKPETIKSKAKKFLKHINEKLPGMLELEYEGFYLRGFFVTKKKYALIDEDGHITTRGLEVVRRDWSEIAKETQAKVLEVILREGSIEKAAGIVKKVVEDLANYRVPVEKLIIHEQITRELKRYKATGPHVAIAKRLQARGIKVKPGTIISYVVLKGSKKISDRVILFDEYDSSRHKYDPDYYIHNQVLPAVLRILEAFGYKEKDLEYQRMKQTGLGAWLKMGKK

SEQ ID NO: 1322 - protein, 773 aa, unidentified
  REGION 1..773: note = Description of Unknown: Synthetic polypeptide
MILDTDYITENGKPVIRIFKKEKGEFKIEYDRNFEPYIYALLEDDESIEDIKKITGERHGKKVRIIRVEKVQKKFLGEPIEVWKLVFEHPQDYPAIRDAIRSHPAVREIFEYDIPFAKRYLIDKGLVPMEGGEELKLLAFAIATFYHEGDEFAEGEILMISYADESGAKVITWKKIDLPYVEVVSTEREAIKRFLQVLREKDPDVLLTYNGDNFDFAYIKKRCEKLGLKFTIGRDGSEPKIQRMGDRFAVEVKGRIHLDLAPVVRHTIRLPTYTLEAVYEAVFGKKKEKVYAEEIAEAWKSEEGLKRVAQYSMEDARATYELGREFFPMEVELAKLIGQSVWDVSRSSTGNLVEWYLLRVAYERNELAPNKPGGEEYQRRMRSSYIGGYVKEPEKGLWESIAYLDFRSSAGSIIVTHNVSPDTLEKECKNYDVAPIVGYRFCKDFKGFIPSILEDLIETRQKVKRKMKATIDPIEKKMLDYRQRALKILANSYYGYQGYPKARWYSKECAESVTAWGRHYIETTIKEAEKFGFKVLYADTDGFFATIPNEKPETIKSKAKKFLKHINEKLPGMLELEYEGFYLRGFFVTKKKYALIDEDGHITTRGLEVVRRDWSEIAKETQAKVLEVILREGSIEKAAGIVKKVVEDLANYRVPVEKLIIHEQITRELKRYKATGPHVAIAKRLQARGIKVKPGTIISYVVLKGSKKISDRVILFDEYDSSRHKYDPDYYIHNQVLPAVLRILEAFGYKEKDLEYQRMKQTGLGAWLKMGKK

SEQ ID NO: 1323 - protein, 773 aa, unidentified
  REGION 1..773: note = Description of Unknown: Synthetic polypeptide
MILDTDYITENGKPVIRIFKKEKGEFKIEYDRNFEPYIYALLEDDESIEDIKKITGERHGKKVRIIRVEKVKKKFLGEPIEVWKLVFEHPQDYPAIRDAIRSHPAVREIFEYDIPFAKRYLIDKGLVPMEGGEELKLLAFNIATFYHEGDEFAEGEILMISYADESGAKVITWKKIDLPYVEVVSTEREAIKRFLQVLREKDPDVLLTYNGDNFDFAYIKKRCEKLGLKFTIGRDGSEPKIQRMGDRFAVEVKGRIHLDLAPVVRHTIRLPTYTLEAVYEAVFGKKKEKVYAEEIAEAWKSEEGLKRVAQYSMEDARATYELGREFFPMEVELAKLIGQSVWDVSRSSTGNLVEWYLLRVAYERNELAPNKPGGEEYQRRMRSSYIGGYVKEPEKGLWESIAYLDFRSSAGSIIVTHNVSPDTLEKECKNYDVAPIVGYRFCKDFKGFIPSILEDLIETRQKVKRKMKATIDPIEKKMLDYRQRALKILANSYYGYQGYPKARWYSKECAESVTAWGRHYIETTIKEAEKFGFKVLYADTDGFFATIPNEKPETIKSKAKKFLKHINEKLPGMLELEYEGFYLRGFFVTKKKYALIDEDGHITTRGLEVVRRDWSEIAKETQAKVLEVILREGSIEKAAGIVKKVVEDLANYRVPVEKLIIHELITRELKRYKATGPHVAIAKRLQARGIKVKPGTIISYVVLKGSKKISDRVILFDEYDSSRHKYDPDYYIHNQVLPAVLRILEAFGYKEKDLEYQRMKQTGLGAWLKMGKK

SEQ ID NO: 1324 - protein, 773 aa, unidentified
  REGION 1..773: note = Description of Unknown: Synthetic polypeptide
MILDTDYITENGKPVIRIFKKEKGEFKIEYDRNFEPYIYALLEDDESIEDIKKITGERHGKKVRIIRVEKVKKNFLGEPIEVWKLVFEHPQDYPAIRDAIRSHPAVREIFEYDIPFAKRYLIDKGLVPMEGGEELKLLAFAIATFYHEGDEFAEGEILMISYADESGAKVITWKKIDLPYVEVVSTEREAIKRFLQVLREKDPDVLLTYNGDNFDFAYIKKRCEKLGLKFTIGRDGSEPKIQRMGDRFAVEVKGRIHLDLAPVVRHTIRLPTYTLEAVYEAVFGKKKEKVYAEEIAEAWKSEEGLKRVAQYSMEDARATYELGREFFPMEVELAKLIGQSVWDVSRSSTGNLVEWYLLRVAYERNELAPNKPGGEEYQRRMRSSYIGGYVKEPEKGLWESIAYLDFRSSAGSIIVTHNVSPDTLEKECKNYDVAPIVGYRFCKDFKGFIPSILEDLIETRQKVKRKMKATIDPIEKKMLDYRQRALKILANSYYGYQGYPKARWYSKECAESVTAWGRHYIETTIKELEKFGFKVLYADTDGFFATIPNEKPETIKSKAKKFLKHINEKLPGMLELEYEGFYLRGFFVTKKKYALIDEDGHITTRGLEVVRRDWSEIAKETQAKVLEVILREGSIEKAAGIVKKVVEDLANYRVPVEKLIIHEQITRELKRYKATGPHVAIAKRLQARGIKVKPGTIISYVVLKGSKKISDRVILFDEYDSSRHKYDPDYYIHNQVLPAVLRILEAFGYKEKDLEYQRMKQTGLGAWLKMGKK

SEQ ID NO: 1325 - protein, 773 aa, unidentified
  REGION 1..773: note = Description of Unknown: Synthetic polypeptide
MILDTDYITENGKPVIRIFKKEKGEFKIEYDRNFEPYIYALLEDDESIEDIKKITGERHGKKVRIIRVEKVKKKFLGEPIEVWKLVFEHPQDLPAIRDAIRSHPAVREIFEYDIPFAKRYLIDKGLVPMEGGEELKLLAFNIATFYHEGDEFAEGEILMISYADESGAKVITWKKIDLPYVEVVSTEREAIKRFLQVLREKDPDVLLTYNGDNFDFAYIKKRCEKLGLKFTIGRDGSEPKIQRMGDRFAVEVKGRIHLDLAPVVRHTIRLPTYTLEAVYEAVFGKKKEKVYAEEIAEAWKSEEGLKRVAQYSMEDARATYELGREFFPMEVELAKLIGQSVWDVSRSSTGNLVEWYLLRVAYERNELAPNKPGGEEYQRRMRSSYIGGYVKEPEKGLWESIAYLDFRSSAGSIIVTHNVSPDTLEKECKNYDVAPIVGYRFCKDFKGFIPSILEDLIETRQKVKRKMKATIDPIEKKMLDYRQRALKILANSYYGYQGYPKARWYSKECAESVTAWGRHYIETTIKEAEKFGFKVLYADTDGFFATIPNEKPETIKSKAKKFLKHINEKLPGMLELEYEGFYLRGFFVTKKKYALIDEDGHITTRGLEVVRRDWSEIAKETQAKVLEVILREGSIEKAAGIVKKVVEDLANYRVPVEKLIIHEQITRELKRYKATGPHVAIAKRLQARGIKVKPGTIISYVVLKGSKKISDRVILFDEYDSSRHKYDPDYYIHNQVLPAVLRILEAFGYKEKDLEYQRMKQTGLGAWLKMGKK

SEQ ID NO: 1326 - protein, 773 aa, unidentified
  REGION 1..773: note = Description of Unknown: Synthetic polypeptide
MILDTDYITENGKPVIRIFKKEKGEFKIEYDRNFEPYIYALLEDDESIEDIKKITGERHGKKVRIIRVEKVKKKFLGEPIEVWKLVFEHPYDVPAINDAIRSHPAVREIFEYDIPFAKRYLIDKGLVPMEGGEELKLLAFNIATFYHEGDEFAEGEILMISYADESGAKVITWKKIDLPYVEVVSTEREAIKRFLQVLREKDPDVLLTYNGDNFDFAYIKKRCEKLGLKFTIGRDGSEPKIQRMGDRFAVEVKGRIHLDLAPVVRHTIRLPTYTLEAVYEAVFGKKKEKVYAEEIAEAWKSEEGLKRVAQYSMEDARATYELGREFFPLEVELAKLIGQSVWDVSRSSTGNLVEWYLLRVAYERNELAPNKPGGEEYQRRMRSSYIGGYVKEPEKGLWESIAYLDFRSSAGSIIVTHNVSPDTLEKECKNYDVAPIVGYRFCKDFKGFIPSILEDLIETRQKVKRKMKATIDPIEKKMLDYRQRALKILANSYYGYQGYPKARWYSKECAESVTAWGRHYIETTIKEAEKFGFKVLYADTDGFFATIPNEKPETIKSKAKKFLKHINEKLPGMLELEYEGFYLRGFFVTKKKYALIDEDGHITTRGLEVVRRDWSEIAKETQAKVLEVILREGSIEKAAGIVKKVVEDLANYRVPVEKLIIHEQITRELKRYKATGPHVAIAKRLQARGIKVKPGTIISYVVLKGSKKISDRVILFDEYDSSRHKYDPDYYIHNQVLPAVLRILEAFGYKEKDLEYQRMKQTGLGAWLKMGKK

SEQ ID NO: 1327 - protein, 773 aa, unidentified
  REGION 1..773: note = Description of Unknown: Synthetic polypeptide
MILDTDYITENGKPVIRIFKKEKGEFKIEYDRNFEPYIYALLEDDESIEDIKKITGERHGKKVRIIRVEKVKKNFLGEPIEVWKLVFEHPQDYPAIRDAIRSHPAVREIFEYDIPFAKRYLIDKGLVPMEGGEELKLLAFAIATFYHEGDEFAEGEILMISYADESGAKVITWKKIDLPYVEVVSTEREAIKRFLQVLREKDPDVLLTYNGDNFDFAYIKKRCEKLGLKFTIGRDGSEPKIQRMGDRFAVEVKGRIHLDLAPVVRHTIRLPTYTLEAVYEAVFGKKKEKVYAEEIAEAWKSEEGLARVAQYSVEDARATYELGREFFPMEVELAKLIGQSVWDVSRSSTGNLVEWYLLRVAYERNELAPNQPGGEEYQRRMRSSYIGGYVKEPEKGLWESIAYLDFRSSAGSIIVTHNVSPDTLEKECKNYDVAPEVGYRFCKDFKGFIPSILEDLIETRQKVKRKMKATIDPIEKKMLDYRQRALKILANSYYGYQGYPKARWYSKECAESVTAWGRHYIETTIKEAEKFGFKVLYADTDGFFATIPNEKPETIKSKAKKFLKHINEKLPGMLELEYEGFYLRGFFVTKKKYALIDEDGHITTRGLEVVRRDWSEIAKETQAKVLEVILREGSIEKAAGIVKKVVEDLANYRVPVEKLIIHEQITRELKRYKATGPHVAIAKRLQARGIKVKPGTIISYVVLKGSKKISDRVILFDEYDSSRHKYDPDYYIHNQVLPAVLRILEAFGYKEKDLEYQRDKQTGLGAWLKMGKK

SEQ ID NO: 1328 - protein, 773 aa, unidentified
  REGION 1..773: note = Description of Unknown: Synthetic polypeptide
MILDTDYITENGKPVIRIFKKEKGEFKIEYDRNFEPYIYALLEDDESIEDIKKITGERHGKKVRIIRVEKVKKKFLGEPIEVWKLVFEHPQDVPAIRDAIRSHPAVREIFEYDIPFAKRYLIDKGLVPMEGGEELKLLAFNIATFYHEGDEFAEGEILMISYADESGAKVITWKKIDLPYVEVVSTEREAIKRFLQVLREKDPDVLLTYNGDNFDFAYIKKRCEKLGLKFTIGRDGSEPKIQRMGDRFAVEVKGRIHLDLAPVVRHTIRLPTYTLEAVYEAVFGKKKEKVYAEEIAEAWKSEEGLARVAQYSMEDARATYELGREFFPLEVELAKLIGQSVWDVSRSSTGNLVEWYLLRVAYERNELAPNKPGGEEYQRRMRSSYIGGYVKEPEKGLWESIAYLDFRSSAGSIIVTHNVSPDTLEKECKNYDVAPIVGYRFCKDFKGFIPSILEDLIETRQKVKRKMKATIDPIEKKMLDYRQRALKILANSYYGYQGYPKARWYSKECAESVTAWGRHYIETTIKEAEKFGFKVLYADTDGFFATIPNEKPETIKSKAKKFLKHINEKLPGMLELEYEGFYLRGFFVTKKKYALIDEDGHITTRGLEVVRRDWSEIAKETQAKVLEVILREGSIEKAAGIVKKVVEDLANYRVPVEKLIIHELITRELKRYKATGPHVAIAKRLQARGIKVKPGTIISYVVLKGSKKISDRVILFDEYDSSRHKYDPDYYIHNQVLPAVLRILEAFGYKEKDLEYQRDKQTGLGAWLKMGKK

SEQ ID NO: 1329 - protein, 773 aa, unidentified
  REGION 1..773: note = Description of Unknown: Synthetic polypeptide
MILDTDYITENGKPVIRIFKKEKGEFKIEYDRNFEPYIYALLEDDESIEDIKKITGERHGKKVRIIRVEKVKKNFLGEPIEVWKLVFEHPQDYPAIRDAIRSHPAVREIFEYDIPFAKRYLIDKGLVPMEGGEELKLLAFAIATFYHEGDEFAEGEILMISYADESGAKVITWKKIDLPYVEVVSTEREAIKRFLQVLREKDPDVLLTYNGDNFDFAYIKKRCEKLGLKFTIGRDGSEPKIQRMGDRFAVEVKGRIHLDLAPVVRHTIRLPTYTLEAVYEAVFGKKKEKVYAEEIAEAWKSEEGLKRVAQYSMEDARATYELGREFFPMEVELAKLIGQSVWDVSRSSTGNLVEWYLLRVAYERNELAPNKPGGEEYQRRMRSSYIGGYVKEPEKGLWESIAYLDFRSSAGSIIVTHNVSPDTLEKECKNYDVAPIVGYRFCKDFKGFIPSILEDLIETRQKVKRKMKATIDPIEKKMLDYRQRALKILANSYYGYQGYPKARWYSKECAESVTAWGRHYIETTIKEAEKFGFKVLYADTDGFFATIPNEKPETIKSKAKKFLKHINEKLPGMLELEYEGFYLRGFFVTKKKYALIDEDGHITTRGLEVVRRDWSEIAKETQAKVLEVILREGSIEKAAGIVKKVVEDLANYRVPVEKLIIHEQITRELKRYKATGPHVAIAKRLQARGIKVKPGTIISYVVLKGSKKISDRVIPFDEYDSSRHKYDPDYYIHNQVLPAVLRILEAFGYKEKDLEYQRMKQTGLGAWLKMGKK

SEQ ID NO: 1330 - protein, 773 aa, unidentified
  REGION 1..773: note = Description of Unknown: Synthetic polypeptide
MILDTDYITENGKPVIRIFKKEKGEFKIEYDRNFEPYIYALLEDDESIEDIKKITGERHGKKVRIIRVEKVKKKFLGEPIEVWKLVFEHPQDYPAIRDAIRSHPAVREIFEYDIPFAKRYLIDKGLVPMEGGEELKLLAFNIATFYHEGDEFAEGEILMISYADESGAKVITWKKIDLPYVEVVSTEREAIKRFLQVLREKDPDVLLTYNGDNFDFAYIKKRCEKLGLKFTIGRDGSEPKIQRMGDRFAVEVKGRIHLDLAPVVRHTIRLPTYELEAVYEAVFGKKKEKVYAEEIAEAWKSEEGLKRVAQYSMEDARATYELGREFFPLEVELAKLIGQSVWDVSRSSTGNLVEWYLLRVAYERNELAPNKPGGEEYQRRMRSSYIGGYVKEPEKGLWESIAYLDFRSSAGSIIVTHNVSPDTLEKECKNYDVAPIVGYRFCKDFKGFIPSILEDLIETRQKVKRKMKATIDPIEKKMLDYRQRALKILANSYYGYQGYPKARWYSKECAESVTAWGRHYIETTIKEAEKFGFKVLYADTDGFFATIPNEKPETIKSKAKKFLKHINEKLPGMLELEYEGFYLRGFFVTKKKYALIDEDGHITTRGLEVVRRDWSEIAKETQAKVLEVILREGSIEKAAGIVKKVVEDLANYRVPVEKLIIHELITRELKRYKATGPHVAIAKRLQARGIKVKPGTIISYVVLKGSKKISDRVILFDEYDSSRHKYDPDYYIHNQVLPAVLRILEAFGYKEKDLEYQRMKQTGLGAWLKMGKK

SEQ ID NO: 1331 - protein, 773 aa, unidentified
  REGION 1..773: note = Description of Unknown: Synthetic polypeptide
MILDTDYITENGKPVIRIFKKEKGEFKIEYDRNFEPYIYALLEDDESIEDIKKITGERHGKKVRIIRVEKVKKKFLGEPIEVWKLVFEHPQDVPAIRDAIRSHPAVREIFEYDIPFAKRYLIDKGLVPMEGGEELKLLAFNIATFYHEGDEFAEGEILMISYADESGAKVITWKKIDLPYVEVVSTEREAIKRFLQVLREKDPDVLLTYNGDNFDFAYIKKRCEKLGLKFTIGRDGSEPKIQRMGDRFAVEVKGRIHLDLAPVVRHTIRLPTYELEAVYEAVFGKKKEKVYAEEIAEAWKSEEGLKRVAQYSMEDARATYELGREFFPLEVELAKLIGQSVWDVSRSSTGNLVEWYLLRVAYERNELAPNKPGGEEYQRRMRSSYIGGYVKEPEKGLWESIAYLDFRSSAGSIIVTHNVSPDTLEKECKNYDVAPIVGYRFCKDFKGFIPSILEDLIETRQKVKRKMKATIDPIEKKMLDYRQRALKILANSYYGYQGYPKARWYSKECAESVTAWGRHYIETTIKEAEKFGFKVLYADTDGFFATIPNEKPETIKSKAKKFLKHINEKLPGMLELEYEGFYLRGFFVTKKKYALIDEDGHITTRGLEVVRRDWSEIAKETQAKVLEVILREGSIEKAAGIVKKVVEDLANYRVPVEKLIIHELITRELKRYKATGPHVAIAKRLQARGIKVKPGTIISYVVLKGSKKISDRVILFDEYDSSRHKYDPDYYIHNQVLPAVLRILEAFGYKEKDLEYQRMKQTGLGAWLKMGKK

SEQ ID NO: 1332 - protein, 773 aa, unidentified
  REGION 1..773: note = Description of Unknown: Synthetic polypeptide
MILDTDYITENGKPVIRIFKKEKGEFKIEYDRNFEPYIYALLEDDESIEDIKKITGERHGKKVRIIRVEKVKKKFLGEPIEVWKLVFEHPQDYPAIRDAIRSHPAVREIFEYDIPFAKRYLIDKGLVPMEGGEELKLLAFAIETFYHEGDEFAEGEILMISYADESGAKVITWKKIDLPYVEVVSTEREAIKRFLQVLREKDPDVLLTYNGDNFDFAYIKKRCEKLGLKFTIGRDGSEPKIQRMGDRFAVEVKGRIHLDLAPVVRHTIRLPTYTLEAVYEAVFGKKKEKVYAEEIAEAWKSEEGLARVAQYSMEDARATYELGREFFPMEVELAKLIGQSVWDVSRSSTGNLVEWYLLRVAYERNELAPNKPGGEEYQRRMRSSYIGGYVKEPEKGLWESIAYLDFRSSAGSIIVTHNVSPDTLEKECKNYDVAPIVGYRFCKDFKGFIPSILEDLIETRQKVKRKMKATIDPIEKKMLDYRQRALKILANSYYGYQGYPKARWYSKECAESVTAWGRHYIETTIKEAEKFGFKVLYADTDGFFATIPNEKPETIKSKAKKFLKHINEKLPGMLELEYEGFYLRGFFVTKKKYALIDEDGHITTRGLEVVRRDWSEIAKETQAKVLEVILREGSIEKAAGIVKKVVEDLANYRVPVEKLIIHEQITRELKRYKATGPHVAIAKRLQARGIKVKPGTIISYVVLKGSKKISDRVILFDEYDSSRHKYDPDYYIHNQVLPAVLRILEAFGYKEKDLEYQRMKQTGLGAWLKMGKK

SEQ ID NO: 1333 - protein, 766 aa, unidentified
  REGION 1..766: note = Description of Unknown: Synthetic polypeptide
MILDTDYITENGKPVIRIFKKEKGEFKIEYDRNFEPYIYALLEDDESIEDIKKITGERHGKKVRIIRVEKVKKKFLGEPIEVWKLVFEHPQDFPAIRDAIRSHPAVREIFEYDIPFAKRYLIDKGLVPMEGGEELKLLAFNIATFYHEGDEFAEGEILMISYADESGAKVITWKKIDLPYVEVVSTEREAIKRFLQVLREKDPDVLLTYNGDNFDFAYIKKRCEKLGLKFTIGRDGSEPKIQRMGDRFAVEVKGRIHLDLAPVVRHTIRLPTYTLEAVYEAVFGKKKEKVYAEEIAEAWKSEEGLKRVAQYSMEDARATYELGREFFPLEVELAKLIGQSVWDVSRSSTGNLVEWYLLRVAYERNELAPNQPGGEEYQRRMRSSYIGGYVKEPEKGLWESIAYLDFRSSAGSIIVTHNVSPDTLEKECKNYDVAPIVGYRFCKDFKGFIPSILEDLIETRQKVKRKMKATIDPIEKKMLDYRQRALKILANSYYGYQGYPKARWYSKECAESVTAWGRHYIETTIKEAEKFGFKVLYADTDGFFATIPNEKPETIKSKAKKFLKHINEKLPGMLELEYEGFYLRGFFVTKKKYALIDEDGHITTRGLEVVRRDWSEIAKETQAKVLEVILREGSIEKAAGIVKKVVEDLANYRVPVEKLIIHEQITRELKRYKATGPHVAIAKRLQARGIKVKPGTIISYVVLKGSKKISDRVILFDEYDSSRHKYDPDYYIHNQVLPAVLRILEAFGYKEKDLEYQRDKQTGLGA

SEQ ID NO: 1334 - protein, 766 aa, unidentified
  REGION 1..766: note = Description of Unknown: Synthetic polypeptide
MILDTDYITENGKPVIRIFKKEKGEFKIEYDRNFEPYIYALLEDDESIEDIKKITGERHGKKVRIIRVEKVKKKFLGEPIEVWKLVFEHPQDVPAIRDAIRSHPAVREIFEYDIPFAKRYLIDKGLVPMEGGEELKLLAFNIATFYHEGDEFAEGEILMISYADESGAKVITWKKIDLPYVEVVSTEREAIKRFLQVLREKDPDVLLTYNGDNFDFAYIKKRCEKLGLKFTIGRDGSEPKIQRMGDRFAVEVKGRIHLDLAPVVRHTIRLPTYTLEAVYEAVFGKKKEKVYAEEIAEAWKSEEGLKRVAQYSMEDARATYELGREFFPLEVELAKLIGQSVWDVSRSSTGNLVEWYLLRVAYERNELAPNKPGGEEYQRRMRSSYIGGYVKEPEKGLWESIAYLDFRSSAGSIIVTHNVSPDTLEKECKNYDVAPIVGYRFCKDFKGFIPSILEDLIETRQKVKRKMKATIDPIEKKMLDYRQRALKILANSYYGYQGYPKARWYSKECAESVTAWGRHYIETTIKEAEKFGFKVLYADTDGFFATIPNEKPETIKSKAKKFLKHINEKLPGMLELEYEGFYLRGFFVTKKKYALIDEDGHITTRGLEVVRRDWSEIAKETQAKVLEVILREGSIEKAAGIVKKVVEDLANYRVPVEKLIIHELITRELKRYKATGPHVAIAKRLQARGIKVKPGTIISYVVLKGSKKISDRVILFDEYDSSRHKYDPDYYIHNQVLPAVLRILEAFGYKEKDLEYQRDKQTGLGA

SEQ ID NO: 1335 - protein, 773 aa, unidentified
  REGION 1..773: note = Description of Unknown: Synthetic polypeptide
MILDTDYITENGKPVIRIFKKEKGEFKIEYDRNFEPYIYALLEDDESIEDIKKITGERHGKKVRIIRVEKVKKKFLGEPIEVWKLVFEHPQDYPAIRDAIRSHPAVREIFEYDIPFAKRYLIDKGLVPMEGGEELKLLAFAIATFYHEGDEFAEGEILMISYADESGAKVITWKKIDLPYVEVVSTEREAIKRFLQVLREKDPDVLLTYNGDNFDFAYIKKRCEKLGLKFTIGRDGSEPKIQRMGDRFAVEVKGRIHLDLAPVVRHTIRLPTYTLEAVYEAVFGKKKEKVYAEEIAEAWKSEEGLKRVAQYSMEDARATYELGREFFPMEVELAKLIGQSVWDVSRSSTGNLVEWYLLRVAYERNELAPNKPGGEEYQRRMRSSYIGGYVKEPEKGLWESIAYLDFRSLFASIIVTHNVSPDTLEKECKNYDVAPIVGYRFCKDFKGFIPSILEDLIETRQKVKRKMKATIDPIEKKMLDYRQRALKILANSYYGYQGYPKARWYSKECAESVTAWGRHYIETTIKEAEKFGFKVLYADTDGFFATIPNEKPETIKSKAKKFLKHINEKLPGMLELEYEGFYLRGFFVTKKKYALIDEDGHITTRGLEVVRRDWSEIAKETQAKVLEVILREGSIEKAAGIVKKVVEDLANYRVPVEKLIIHEQITRELKRYKATGPHVAIAKRLQARGIKVKPGTIISYVVLKGSKKISDRVILFDEYDSSRHKYDPDYYIHNQVLPAVLRILEAFGYKEKDLEYQRMKQTGLGAWLKMGKK

SEQ ID NO: 1336 - protein, 773 aa, unidentified
  REGION 1..773: note = Description of Unknown: Synthetic polypeptide
MILDTDYITENGKPVIRIFKKEKGEFKIEYDRNFEPYIYALLEDDESIEDIKKITGERHGKKVRIIRVEKVKKKFLGEPIEVWKLVFEHPQDYPAIRDAIRSHPAVREIFEYDIPFAKRYLIDKGLVPMEGGEELKLLAFAIATFYHEGDEFAEGEILMISYADESGAKVITWKKIDLPYVEVVSTEREAIKRFLQVLREKDPDVLLTYNGDNFDFAYIKKRCEKLGLKFTIGRDGSEPKIQRMGDRFAVEVKGRIHLDLAPVVRHTIRLPTYTLEAVYEAVFGKKKEKVYAEEIAEAWKSEEGLARVAQYSMEDARATYELGREFFPMEVELAKLIGQSVWDVSRSSTGNLVEWYLLRVAYERNELAPNKPGGEEYQRRMRSSYIGGYVKEPEKGLWESIAYLDFRSSAGSIIVTHNVSPDTLEKECKNYDVAPEVGYRFCKDFKGFIPSILEDLIETRQKVKRKMKATIDPIEKKMLDYRQRALKILANSYYGYQGYPKARWYSKECAESVTAWGRHYIETTIKEAEKFGFKVLYADTDGFFATIPNEKPETIKSKAKKFLKHINEKLPGMLELEYEGFYLRGFFVTKKKYALIDEDGHITTRGLEVVRRDWSEIAKETQAKVLEVILREGSIEKAAGIVKKVVEDLANYRVPVEKLIIHEQITRELKRYKATGPHVAIAKRLQARGIKVKPGTIISYVVLKGSKKISDRVILFDEYDSSRHKYDPDYYIHNQVLPAVLRILEAFGYKEKDLEYQRDKQTGLGAWLKMGKK

SEQ ID NO: 1337 - protein, 766 aa, unidentified; identical to SEQ ID NO: 1231
  REGION 1..766: note = Description of Unknown: Synthetic polypeptide

SEQ ID NO: 1338 - protein, 773 aa, unidentified
  REGION 1..773: note = Description of Unknown: Synthetic polypeptide
MILDTDYITENGKPVIRIFKKEKGEFKIEYDRNFEPYIYALLEDDESIEDIKKITGERHGKKVRIIRVEKVKKKFLGEPIEVWKLVFEHPQDYPAIRDAIRSHPAVREIFEYDIPFAKRYLIDKGLVPMEGGEELKLLAFAIATFEHEGDEFAEGEILMISYADESGAKVITWKKIDLPYVEVVSTEREAIKRFLQVLREKDPDVLLTYNGDNFDFAYIKKRCEKLGLKFTIGRDGSEPKIQRMGDRFAVEVKGRIHLDLAPVVRHTIRLPTYTLEAVYEAVFGKKKEKVYAEEIAEAWKSEEGLARVAQYSMEDARATYELGREFFPMEVELAKLIGQSVWDVSRSSTGNLVEWYLLRVAYERNELAPNKPGGEEYQRRMRSSYIGGYVKEPEKGLWESIAYLDFRSSAGSIIVTHNVSPDTLEKECKNYDVAPIVGYRFCKDFKGFIPSILEDLIETRQKVKRKMKATIDPIEKKMLDYRQRALKILANSYYGYQGYPKARWYSKECAESVTAWGRHYIETTIKEAEKFGFKVLYADTDGFFATIPNEKPETIKSKAKKFLKHINEKLPGMLELEYEGFYLRGFFVTKKKYALIDEDGHITTRGLEVVRRDWSEIAKETQAKVLEVILREGSIEKAAGIVKKVVEDLANYRVPVEKLIIHEQITRELKRYKATGPHVAIAKRLQARGIKVKPGTIISYVVLKGSKKISDRVILFDEYDSSRHKYDPDYYIHNQVLPAVLRILEAFGYKEKDLEYQRDKQTGLGAWLKMGKK

SEQ ID NO: 1339 - protein, 773 aa, unidentified
  REGION 1..773: note = Description of Unknown: Synthetic polypeptide
MILDTDYITENGKPVIRIFKKEKGEFKIEYDRNFEPYIYALLEDDESIEDIKKITGERHGKKVRIIRVEKVKKKFLGEPIEVWKLVFEHPQDYPAIRDAIRSHPAVREIFEYDIPFAKRYLIDKGLVPMEGGEELKLLAFAIATFYHEGDEFAEGEILMISYADESGAKVITWKKIDLPYVEVVSTEREAIKRFLQVLREKDPDVLLTYNGDNFDFAYIKKRCEKLGLKFTIGRDGSEPKIQRMGDRFAVEVKGRIHLDLAPVVRHTIRLPTYTLEAVYEAVFGKKKEKVYAEEIAEAWKSEEGLKRVAQYSMEDARATYELGREFFPMEVELAKLIGQSVWDVSRSSTGNLVEWYLLRVAYERNELAPNKPGGEEYQRRMRSSYIGGYVKEPEKGLWESIAYLDFRSMFPSIIVTHNVSPDTLEKECKNYDVAPIVGYRFCKDFKGFIPSILEDLIETRQKVKRKMKATIDPIEKKMLDYRQRALKILANSYYGYQGYPKARWYSKECAESVTAWGRHYIETTIKEAEKFGFKVLYADTDGFFATIPNEKPETIKSKAKKFLKHINEKLPGMLELEYEGFYLRGFFVTKKKYALIDEDGHITTRGLEVVRRDWSEIAKETQAKVLEVILREGSIEKAAGIVKKVVEDLANYRVPVEKLIIHEQITRELKRYKATGPHVAIAKRLQARGIKVKPGTIISYVVLKGSKKISDRVILFDEYDSSRHKYDPDYYIHNQVLPAVLRILEAFGYKEKDLEYQRMKQTGLGAWLKMGKK

SEQ ID NO: 1340 - protein, 773 aa, unidentified; identical to SEQ ID NO: 916
  REGION 1..773: note = Description of Unknown: Synthetic polypeptide

SEQ ID NO: 1341 - protein, 773 aa, unidentified; identical to SEQ ID NO: 740
  REGION 1..773: note = Description of Unknown: Synthetic polypeptide

SEQ ID NO: 1342 - protein, 773 aa, unidentified; identical to SEQ ID NO: 143
  REGION 1..773: note = Description of Unknown: Synthetic polypeptide

SEQ ID NO: 1343 - protein, 773 aa, unidentified
  REGION 1..773: note = Description of Unknown: Synthetic polypeptide
MILDTDYITENGKPVIRIFKKEKGEFKIEYDRNFEPYIYALLEDDESIEDIKKITGERHGKKVRIIRVEKVKKKFLGEPIEVWKLVFENPQDVPAINDAIRSHPAVREIFEYDIPFAKRYLIDKGLVPMEGGEELKLLAFNIATFYHEGDEFAEGEILMISYADESGAKVITWKKIDLPYVEVVSTEREAIKRFLQVLREKDPDVLLTYNGDNFDFAYIKKRCEKLGLKFTIGRDGSEPKIQRMGDRFAVEVKGRIHLDLAPVVRHTIRLPTYTLEAVYEAVFGKKKEKVYAEEIAEAWKSEEGLKRVAQYSMEDARATYELGREFFPLEVELAKLIGQSVWDVSRSSTGNLVEWYLLRVAYERNELAPNKPGGEEYQRRMRSSYIGGYVKEPEKGLWESIAYLDFRSSAGSIIVTHNVSPDTLEKECKNYDVAPIVGYRFCKDFKGFIPSILEDLIETRQKVKRKMKATIDPIEKKMLDYRQRALKILANSYYGYQGYPKARWYSKECAESVTAWGRHYIETTIKEAEKFGFKVLYADTDGFFATIPNEKPETIKSKAKKFLKHINEKLPGMLELEYEGFYLRGFFVTKKKYALIDEDGHITTRGLEVVRRDWSEIAKETQAKVLEVILREGSIEKAAGIVKKVVEDLANYRVPVEKLIIHEQITRELKRYKATGPHVAIAKRLQARGIKVKPGTIISYVVLKGSKKISDRVILFDEYDSSRHKYDPDYYIHNQVLPAVLRILEAFGYKEKDLEYQRMKQTGLGAWLKMGKK

SEQ ID NO: 1344 - protein, 773 aa, unidentified
  REGION 1..773: note = Description of Unknown: Synthetic polypeptide
MILDTDYITENGKPVIRIFKKEKGEFKIEYDRNFEPYIYALLEDDESIEDIKKITGERHGKKVRIIRVEKVKKNFLGEPIEVWKLVFEHPQDYPAIRDAIRSHPAVREIFEYDIPFAKRYLIDKGLVPMEGGEELKLLAFAIATFYHEGDEFAEGEILMISYADESGAKVITWKKIDLPYVEVVSTEREAIKRFLQVLREKDPDVLLTYNGDNFDFAYIKKRCEKLGVKFTIGRDGSEPKIQRMGDRFAVEVKGRIHLDLAPVVRHTIRLPTYTLEAVYEAVFGKKKEKVYAEEIAEAWKSEEGLKRVAQYSMEDARATYELGREFFPMEVELAKLIGQSVWDVSRSSTGNLVEWYLLRVAYERNELAPNKPGGEEYQRRMRSSYIGGYVKEPEKGLWESIAYLDFRSSAGSIIVTHNVSPDTLEKECKNYDVAPIVGYRFCKDFKGFIPSILEDLIETRQKVKRKMKATIDPIEKKMLDYRQRALKILANSYYGYQGYPKARWYSKECAESVTAWGRHYIETTIKEAEKFGFKVLYADTDGFFATIPNEKPETIKSKAKKFLKHINEKLPGMLELEYEGFYLRGFFVTKKKYALIDEDGHITTRGLEVVRRDWSEIAKETQAKVLEVILREGSIEKAAGIVKKVVEDLANYRVPVEKLIIHEQITRELKRYKATGPHVAIAKRLQARGIKVKPGTIISYVVLKGSKKISDRVILFDEYDSSRHKYDPDYYIHNQVLPAVLRILEAFGYKEKDLEYQRMKQTGLGAWLKMGKK

SEQ ID NO: 1345 - protein, 773 aa, unidentified
  REGION 1..773: note = Description of Unknown: Synthetic polypeptide
MILDTDYITENGKPVIRIFKKEKGEFKIEYDRNFEPYIYALLEDDESIEDIKKITGERHGKKVRIIRVEKVKKKFLGEPIEVWKLVFEHPADVPAINDAIRSHPAVREIFEYDIPFAKRYLIDKGLVPMEGGEELKLLAFNIATFYHEGDEFAEGEILMISYADESGAKVITWKKIDLPYVEVVSTEREAIKRFLQVLREKDPDVLLTYNGDNFDFAYIKKRCEKLGLKFTIGRDGSEPKIQRMGDRFAVEVKGRIHLDLAPVVRHTIRLPTYTLEAVYEAVFGKKKEKVYAEEIAEAWKSEEGLKRVAQYSMEDARATYELGREFFPLEVELAKLIGQSVWDVSRSSTGNLVEWYLLRVAYERNELAPNKPGGEEYQRRMRSSYIGGYVKEPEKGLWESIAYLDFRSSAGSIIVTHNVSPDTLEKECKNYDVAPIVGYRFCKDFKGFIPSILEDLIETRQKVKRKMKATIDPIEKKMLDYRQRALKILANSYYGYQGYPKARWYSKECAESVTAWGRHYIETTIKEAEKFGFKVLYADTDGFFATIPNEKPETIKSKAKKFLKHINEKLPGMLELEYEGFYLRGFFVTKKKYALIDEDGHITTRGLEVVRRDWSEIAKETQAKVLEVILREGSIEKAAGIVKKVVEDLANYRVPVEKLIIHEQITRELKRYKATGPHVAIAKRLQARGIKVKPGTIISYVVLKGSKKISDRVILFDEYDSSRHKYDPDYYIHNQVLPAVLRILEAFGYKEKDLEYQRMKQTGLGAWLKMGKK

SEQ ID NO: 1346 - protein, 773 aa, unidentified
  REGION 1..773: note = Description of Unknown: Synthetic polypeptide
MILDTDYITENGKPVIRIFKKEKGEFKIEYDRNFEPYIYAYLEDDESIEDIKKITGERHGKKVRIIRVEKVKKKFLGEPIEVWKLVFEHPQDYPAIRDAIRSHPAVREIFEYDIPFAKRYLIDKGLVPMEGGEELKLLAFAIATFYHEGDEFAEGEILMISYADESGAKVITWKKIDLPYVEVVSTEREAIKRFLQVLREKDPDVLLTYNGDNFDFAYIKKRCEKLGLKFTIGRDGSEPKIQRMGDRFAVEVKGRIHLDLAPVVRHTIRLPTYTLEAVYEAVFGKKKEKVYAEEIAEAWKSEEGLKRVAQYSMEDARATYELGREFFPMEVELAKLIGQSVWDVSRSSTGNLVEWYLLRVAYERNELAPNKPGGEEYQRRMRSSYIGGYVKEPEKGLWESIAYLDFRSSAGSIIVTHNVSPDTLEKECKNYDVAPIVGYRFCKDFKGFIPSILEDLIETRQKVKRKMKATIDPIEKKMLDYRQRALKILANSYYGYQGYPKARWYSKECAESVTAWGRHYIETTIKEAEKFGFKVLYADTDGFFATIPNEKPETIKSKAKKFLKHINEKLPGMLELEYEGFYLRGFFVTKKKYALIDEDGHITTRGLEVVRRDWSEIAKETQAKVLEVILREGSIEKAAGIVKKVVEDLANYRVPVEKLIIHEQITRELKRYKATGPHVAIAKRLQARGIKVKPGTIISYVVLKGSKKISDRVILFDEYDSSRHKYDPDYYIHNQVLPAVLRILEAFGYKEKDLEYQRMKQTGLGAWLKMGKK

SEQ ID NO: 1347 - protein, 766 aa, unidentified
  REGION 1..766: note = Description of Unknown: Synthetic polypeptide
MILDTDYITENGKPVIRIFKKEKGEFKIEYDRNFEPYIYALLEDDESIEDIKKITGERHGKKVRIIRVEKVKKKFLGEPIEVWKLVFEHPQDVPAIRDAIRSHPAVREIFEYDIPFAKRYLIDKGLVPMEGGEELKLLAFNIATFYHEGDEFAEGEILMISYADESGAKVITWKKIDLPYVEVVSTEREAIKRFLQVLREKDPDVLLTYNGDNFDFAYIKKRCEKLGLKFTIGRDGSEPKIQRMGDRFAVEVKGRIHLDLAPVVRHTIRLPTYTLEAVYEAVFGKKKEKVYAEEIAEAWKSEEGLKRVAQYSAEDARATYELGREFFPLEVELAKLIGQSVWDVSRSSTGNLVEWYLLRVAYERNELAPNKPGGEEYQRRMRSSYIGGYVKEPEKGLWESIAYLDFRSSAGSIIVTHNVSPDTLEKECKNYDVAPIVGYRFCKDFKGFIPSILEDLIETRQKVKRKMKATIDPIEKKMLDYRQRALKILANSYYGYQGYPKARWYSKECAESVTAWGRHYIETTIKEAEKFGFKVLYADTDGFFATIPNEKPETIKSKAKKFLKHINEKLPGMLELEYEGFYLRGFFVTKKKYALIDEDGHITTRGLEVVRRDWSEIAKETQAKVLEVILREGSIEKAAGIVKKVVEDLANYRVPVEKLIIHELITRELKRYKATGPHVAIAKRLQARGIKVKPGTIISYVVLKGSKKISDRVILFDEYDSSRHKYDPDYYIHNQVLPAVLRILEAFGYKEKDLEYQRDKQTGLGA

SEQ ID NO: 1348 - protein, 773 aa, unidentified
  REGION 1..773: note = Description of Unknown: Synthetic polypeptide
MILDTDYITENGKPVIRIFKKEKGEFKIEYDRNFEPYIYALLEDDESIEDIKKITGERHGKKVRIIRVEKVKKNFLGEPIEVWKLVFEHPQDYPAIRDAIRSHPAVREIFEYDIPFAKRYLIDKGLVPMEGGEELKLLAFAIATFYHEGDEFAEGEILMISYADESGAKVITWKKIDLPYVEVVSTEREAIKRFLQVLREKDPDVLLTYNGDNFDFAYIKKRCEKLGIKFTIGRDGSEPKIQRMGDRFAVEVKGRIHLDLAPVVRHTIRLPTYTLEAVYEAVFGKKKEKVYAEEIAEAWKSEEGLKRVAQYSMEDARATYELGREFFPMEVELAKLIGQSVWDVSRSSTGNLVEWYLLRVAYERNELAPNKPGGEEYQRRMRSSYIGGYVKEPEKGLWESIAYLDFRSSAGSIIVTHNVSPDTLEKECKNYDVAPIVGYRFCKDFKGFIPSILEDLIETRQKVKRKMKATIDPIEKKMLDYRQRALKILANSYYGYQGYPKARWYSKECAESVTAWGRHYIETTIKEAEKFGFKVLYADTDGFFATIPNEKPETIKSKAKKFLKHINEKLPGMLELEYEGFYLRGFFVTKKKYALIDEDGHITTRGLEVVRRDWSEIAKETQAKVLEVILREGSIEKAAGIVKKVVEDLANYRVPVEKLIIHEQITRELKRYKATGPHVAIAKRLQARGIKVKPGTIISYVVLKGSKKISDRVILFDEYDSSRHKYDPDYYIHNQVLPAVLRILEAFGYKEKDLEYQRMKQTGLGAWLKMGKK

SEQ ID NO: 1349 - protein, 773 aa, unidentified
  REGION 1..773: note = Description of Unknown: Synthetic polypeptide
MILDTDYITENGKPVIRIFKKEKGEFKIEYDRNFEPYIYALLEDDESIEDIKKITGERHGKKVRIIRVEKVKKKFLGEPIEVWKLVFEHPQDYPAIRDAIRSHPAVREIFEYDIPFAKRYLIDKGLVPMEGGEELKLLAFAIATFYHEGDEFAEGEILMISYADESGAKVITHKKIDLPYVEVVSTEREAIKRFLQVLREKDPDVLLTYNGDNFDFAYIKKRCEKLGLKFTIGRDGSEPKIQRMGDRFAVEVKGRIHLDLAPVVRHTIRLPTYTLEAVYEAVFGKKKEKVYAEEIAEAWKSEEGLKRVAQYSMEDARATYELGREFFPMEVELAKLIGQSVWDVSRSSTGNLVEWYLLRVAYERNELAPNKPGGEEYQRRMRSSYIGGYVKEPEKGLWESIAYLDFRSSAGSIIVTHNVSPDTLEKECKNYDVAPIVGYRFCKDFKGFIPSILEDLIETRQKVKRKMKATIDPIEKKMLDYRQRALKILANSYYGYQGYPKARWYSKECAESVTAWGRHYIETTIKEAEKFGFKVLYADTDGFFATIPNEKPETIKSKAKKFLKHINEKLPGMLELEYEGFYLRGFFVTKKKYALIDEDGHITTRGLEVVRRDWSEIAKETQAKVLEVILREGSIEKAAGIVKKVVEDLANYRVPVEKLIIHEQITRELKRYKATGPHVAIAKRLQARGIKVKPGTIISYVVLKGSKKISDRVILFDEYDSSRHKYDPDYYIHNQVLPAVLRILEAFGYKEKDLEYQRMKQTGLGAWLKMGKK

SEQ ID NO: 1350 - protein, 773 aa, unidentified
  REGION 1..773: note = Description of Unknown: Synthetic polypeptide
MILDTDYITENGKPVIRIFKKEKGEFKIEYDRNFEPYIYALLEDDESIEDIKKITGERHGKKVRIIRVEKVKKNFLGEPIEVWKLVFEHPQDYPAIRDAIRSHPAVREIFEYDIPFAKRYLIDKGLVPMEGGEELKLLAFAIATFYHEGDEFAEGEILMISYADESGAKVITWKKIDLPYVEVVSTEREAIKRFLQVVREKDPDVLLTYNGDNFDFAYIKKRCEKLGLKFTIGRDGSEPKIQRMGDRFAVEVKGRIHLDLAPVVRHTIRLPTYTLEAVYEAVFGKKKEKVYAEEIAEAWKSEEGLKRVAQYSMEDARATYELGREFFPMEVELAKLIGQSVWDVSRSSTGNLVEWYLLRVAYERNELAPNKPGGEEYQRRMRSSYIGGYVKEPEKGLWESIAYLDFRSSAGSIIVTHNVSPDTLEKECKNYDVAPIVGYRFCKDFKGFIPSILEDLIETRQKVKRKMKATIDPIEKKMLDYRQRALKILANSYYGYQGYPKARWYSKECAESVTAWGRHYIETTIKEAEKFGFKVLYADTDGFFATIPNEKPETIKSKAKKFLKHINEKLPGMLELEYEGFYLRGFFVTKKKYALIDEDGHITTRGLEVVRRDWSEIAKETQAKVLEVILREGSIEKAAGIVKKVVEDLANYRVPVEKLIIHEQITRELKRYKATGPHVAIAKRLQARGIKVKPGTIISYVVLKGSKKISDRVILFDEYDSSRHKYDPDYYIHNQVLPAVLRILEAFGYKEKDLEYQRMKQTGLGAWLKMGKK

SEQ ID NO: 1351 - protein, 774 aa, unidentified
  REGION 1..774: note = Description of Unknown: Synthetic polypeptide
MILDTDYITENGKPVIRIFKKEKGEFKIEYDRNFEPYIYALLEDDESIEDIKKITGERHGKKVRIIRVEKVKKKFLGEPIEVWKLVFEHPQDYPAIRDAIRSHPAVREIFEYDIPFAKRYLIDKGLVPMEGGEELKLLAFAIATFYHEGDEFAEGEILMISYADESGAKVITWKKIDLPYVEVVSTEREAIKRFLQVLREKDPDVLLTYNGDNFDFAYIKKRCEKLGLKFTIGRDGSEPKIQRMGDRFAVEVKGRIHLDLAPVVRHTIRLPTYTLEAVYEAVFGKKKEKVYAEEIAEAWKSEEGLKRVAQYSMEDARATYELGREFFPLEVELAKLIGQSVWDVSRSSTGNLVEWYLLRVAYERNELAPNKPGGEEYQRRMRSSYIGGYVKEPEKGLWESIAYLDFRSSAGGSIIVTHNVSPDTLEKECKNYDVAPIVGYRFCKDFKGFIPSILEDLIETRQKVKRKMKATIDPIEKKMLDYRQRALKILANSYYGYQGYPKARWYSKECAESVTAWGRHYIETTIKEAEKFGFKVLYADTDGFFATIPNEKPETIKSKAKKFLKHINEKLPGMLELEYEGFYLRGFFVTKKKYALIDEDGHITTRGLEVVRRDWSEIAKETQAKVLEVILREGSIEKAAGIVKKVVEDLANYRVPVEKLIIHEQITRELKRYKATGPHVAIAKRLQARGIKVKPGTIISYVVLKGSKKISDRVILFDEYDSSRHKYDPDYYIHNQVLPAVLRILEAFGYKEKDLEYQRMKQTGLGAWLKMGKK

SEQ ID NO: 1352 - protein, 773 aa, unidentified; identical to SEQ ID NO: 984
  REGION 1..773: note = Description of Unknown: Synthetic polypeptide

SEQ ID NO: 1353 - protein, 773 aa, unidentified
  REGION 1..773: note = Description of Unknown: Synthetic polypeptide
MILDTDYITENGKPVIRIFKKEKGEFKIEYDRNFEPYIYALLEDDESIEDIKKITGERHGKKVRIIRVEKVKKNFLGEPIEVWKLVFEHPQDYPAIRDAIRSHPAVREIFEYDIPFAKRYLIDKGLVPMEGGEELKLLAFAIATFYHEGDEFAEGEILMISYADESGAKVITWKKIDLPYVEVVSTEREAIKRFLQVLREKDPDVLITYNGDNFDFAYIKKRCEKLGLKFTIGRDGSEPKIQRMGDRFAVEVKGRIHLDLAPVVRHTIRLPTYTLEAVYEAVFGKKKEKVYAEEIAEAWKSEEGLKRVAQYSMEDARATYELGREFFPMEVELAKLIGQSVWDVSRSSTGNLVEWYLLRVAYERNELAPNKPGGEEYQRRMRSSYIGGYVKEPEKGLWESIAYLDFRSSAGSIIVTHNVSPDTLEKECKNYDVAPIVGYRFCKDFKGFIPSILEDLIETRQKVKRKMKATIDPIEKKMLDYRQRALKILANSYYGYQGYPKARWYSKECAESVTAWGRHYIETTIKEAEKFGFKVLYADTDGFFATIPNEKPETIKSKAKKFLKHINEKLPGMLELEYEGFYLRGFFVTKKKYALIDEDGHITTRGLEVVRRDWSEIAKETQAKVLEVILREGSIEKAAGIVKKVVEDLANYRVPVEKLIIHEQITRELKRYKATGPHVAIAKRLQARGIKVKPGTIISYVVLKGSKKISDRVILFDEYDSSRHKYDPDYYIHNQVLPAVLRILEAFGYKEKDLEYQRMKQTGLGAWLKMGKK

SEQ ID NO: 1354 - protein, 766 aa, unidentified; identical to SEQ ID NO: 581
  REGION 1..766: note = Description of Unknown: Synthetic polypeptide

SEQ ID NO: 1355 - protein, 773 aa, unidentified
  REGION 1..773: note = Description of Unknown: Synthetic polypeptide
MILDTDYITENGKPVIRIFKKEKGEFKIEYDRNFEPYIYALLEDDESIEDIKKITGERHGKKVRIIRVEKVKKKFLGEPIEVWKLVFEHPQDYPAIRDAIRSHPAVREIFEYDIPFAKRYLIDKGLVPMEGGEELKLLAFAIATFYHEGDEFAEGEILMISYADESGAKVITWKKIDLPYVEVVSTEREAIKRFLQVLREKDPDVLLTYNGDNFDFAYIKKRCEKLGLKFTIGRDGSEPKIQRMGDRFAVEVKGRIHLDLAPVVRHTIRLPTYTLEAVYEAVFGKKKEKVYAEEIAEAWKSEEGLKRVAQYSMEDARATYELGREFFPAEVELAKLIGQSVWDVSRSSTGNLVEWYLLRVAYERNELAPNKPGGEEYQRRMRSSYIGGYVKEPEKGLWESIAYLDFRSSAGSIIVTHNVSPDTLEKECKNYDVAPIVGYRFCKDFKGFIPSILEDLIETRQKVKRKMKATIDPIEKKMLDYRQRALKILANSYYGYQGYPKARWYSKECAESVTAWGRHYIETTIKEAEKFGFKVLYADTDGFFATIPNEKPETIKSKAKKFLKHINEKLPGMLELEYEGFYLRGFFVTKKKYALIDEDGHITTRGLEVVRRDWSEIAKETQAKVLEVILREGSIEKAAGIVKKVVEDLANYRVPVEKLIIHEQITRELKRYKATGPHVAIAKRLQARGIKVKPGTIISYVVLKGSKKISDRVILFDEYDSSRHKYDPDYYIHNQVLPAVLRILEAFGYKEKDLEYQRMKQTGLGAWLKMGKK

SEQ ID NO: 1356 - protein, 773 aa, unidentified
  REGION 1..773: note = Description of Unknown: Synthetic polypeptide
MILDTDYITENGKPVIRIFKKEKGEFKIEYDRNFEPYIYALLEDDESIEDIKKITGERHGKKVRIIRVEKVKKKFLGEPIEVWKLVFEHPQDYPAIRDAIRSHPAVREIFEYDIPFAKRYLIDKGLVPMEGGEELKLLAFAIATFYHEGDEFAEGEILMISYADESGAKVITWKKIDLPYVEVVSTEREAIKRFLQVLREKDPDVLLTYNGDNFDFAYIKKRCEKLGLKFTIGRDGSEPKIQRMGDRFAVEVKGRIHLDLAPVVRHTIRLPTYTLEAVYEAVFGKKKEKVYAEEIAEAWKSEEGLKRVAQYSMEDARATYELGREFFPMEVELAKLIGQSVWDVSRSSTGNLVEWYLLRVAYERNELAPNKPGGEEYQRRMRSSYIGGYVKEPEKGLWESIAYLDFRSMYPSIIVTHNVSPDTLEKECKNYDVAPIVGYRFCKDFKGFIPSILEDLIETRQKVKRKMKATIDPIEKKMLDYRQRALKILANSYYGYQGYPKARWYSKECAESVTAWGRHYIETTIKEAEKFGFKVLYADTDGFFATIPNEKPETIKSKAKKFLKHINEKLPGMLELEYEGFYLRGFFVTKKKYALIDEDGHITTRGLEVVRRDWSEIAKETQAKVLEVILREGSIEKAAGIVKKVVEDLANYRVPVEKLIIHEQITRELKRYKATGPHVAIAKRLQARGIKVKPGTIISYVVLKGSKKISDRVILFDEYDSSRHKYDPDYYIHNQVLPAVLRILEAFGYKEKDLEYQRMKQTGLGAWLKMGKK

SEQ ID NO: 1357 - protein, 773 aa, unidentified
  REGION 1..773: note = Description of Unknown: Synthetic polypeptide
MILDTDYITENGKPVIRIFKKEKGEFKIEYDRNFEPYIYALLEDDESIEDIKKITGERHGKKVRIIRVEKVKKKFLGEPIEVWKLVFEHPQDYPAIRDAIRSHPAVREIFEYDIPFAKRYLIDKGLVPMEGGEELKLLAFAIATFYHEGDEFAEGEILMISYADESGAKVITWKKIDLPYVEVVSTEREAIKRFLQVLREKDPDVLLTYNGDNFDFAYIKKRCEKLGLKFTIGRDGSEPKIQRMGDRFAVEVKGRIHLDLAPVVRHTIRLPTYTLEAVYEAVFGKKKEKVYAEEIAEAWKSEEGLARVAQYSMEDARATYELGREFFPMEVELAKLIGQSVWDVSRSSTGNLVEWYLLRVAYERNELAPNKPGGEEYQRRMRSSYIGGYVKEPEKGLWESIAYLDFRSSAGSIIVTHNVSPDTLEKECKNYDVAPIVGYRFCKDFKGFIPSILEDLIETRQKVKRKMKATIDPIEKKMLDYRQRALKILANSYYGYQGYPKARWYSKECAESVTAWGRHYIETTIKEAEKFGFKVLYADTDGFFATIPNEKPETIKSKAKKFLKHINEKLPGMLELEYEGFYLRGFFVTKKKYALIDEDGHITTRGLEVVRRDWSEIAKETQAKVLEVILREGSIEKAAGIVKKVVEDLANYRVPVEKLIIHEFITRELKRYKATGPHVAIAKRLQARGIKVKPGTIISYVVLKGSKKISDRVILFDEYDSSRHKYDPDYYIHNQVLPAVLRILEAFGYKEKDLEYQRDKQTGLGAWLKMGKK

SEQ ID NO: 1358 - protein, 773 aa, unidentified
  REGION 1..773: note = Description of Unknown: Synthetic polypeptide
MILDTDYITENGKPVIRIFKKEKGEFKIEYDRNFEPYIYALLEDDESIEDIKKITGERHGKKVRIIRVEKVKKKFLGEPIEVWKLVFEHPQDYPAIRDAIRSHPAVREIFEYDIPFAKRYLIDKGLVPMEGGEELKLLAFAIATFYHEGDEFAEGEILMISYADESGAKVITWKKIDLPYVEVVSTEREAIKRFLQVLREKDPDVLLTYNGDNFDFAYIKKRCEKLGLKFTIGRDGSEPKIQRMGDRFAVEVKGRIHLDLAPVVRHTIRLPTYTLEAVYEAVFGKKKEKVYAEEIAEAWKSEEGLKRVAQYSMEDARATYELGREFFPMEVELAKLIGQSVWDVSRSSTGNLVEWYLLRVAYERNELAPNKPGGEEYQRRMRSSYIGGYVKEPEKGLWESIAYLDFRSCAGSIIVTHNVSPDTLEKECKNYDVAPIVGYRFCKDFKGFIPSILEDLIETRQKVKRKMKATIDPIEKKMLDYRQRALKILANSYYGYQGYPKARWYSKECAESVTAWGRHYIETTIKEAEKFGFKVLYADTDGFFATIPNEKPETIKSKAKKFLKHINEKLPGMLELEYEGFYLRGFFVTKKKYALIDEDGHITTRGLEVVRRDWSEIAKETQAKVLEVILREGSIEKAAGIVKKVVEDLANYRVPVEKLIIHEQITRELKRYKATGPHVAIAKRLQARGIKVKPGTIISYVVLKGSKKISDRVILFDEYDSSRHKYDPDYYIHNQVLPAVLRILEAFGYKEKDLEYQRMKQTGLGAWLKMGKK

SEQ ID NO: 1359 - protein, 766 aa, unidentified
  REGION 1..766: note = Description of Unknown: Synthetic polypeptide
MILDTDYITENGKPVIRIFKKEKGEFKIEYDRNFEPYIYALLEDDESIEDIKKITGERHGKKVRIIRVEKVKKKFLGEPIEVWKLVFEHPQDVPAIRDAIRSHPAVREIFEYDIPFAKRYLIDKGLVPMEGGEELKLLAFNIATFYHEGDEFAEGEILMISYADESGAKVITWKKIDLPYVEVVSTEREAIKRFLQVLREKDPDVLLTYNGDNFDFAYIKKRCEKLGLKFTIGRDGSEPKIQRMGDRFAVEVKGRIHLDLAPVVRHTIRLPTYTLEAVYEAVFGKKKEKVYAEEIAEAWKSEEGLARVAQYSMEDARATYELGREFFPLEVELAKLIGQSVWDVSRSSTGNLVEWYLLRVAYERNELAPNKPGGEEYQRRMRSSYIGGYVKEPEKGLWESIAYLDFRSSAGSIIVTHNVSPDTLEKECKNYDVAPIVGYRFCKDFKGFIPSILEDLIETRQKVKRKMKATIDPIEKKMLDYRQRALKILANSYYGYQGYPKARWYSKECAESVTAWGRHYIETTIKEAEKFGFKVLYADTDGFFATIPNEKPETIKSKAKKFLKHINEKLPGMLELEYEGFYLRGFFVTKKKYALIDEDGHITTRGLEVVRRDWSEIAKETQAKVLEVILREGSIEKAAGIVKKVVEDLANYRVPVEKLIIHEQITRKLKRYKATGPHVAIAKRLQARGIKVKPGTIISYVVLKGSKKISDRVILFDEYDSSRHKYDPDYYIHNQVLPAVLRILEAFGYKEKDLEYQRDKQTGLGA

SEQ ID NO: 1360 - protein, 773 aa, unidentified
  REGION 1..773: note = Description of Unknown: Synthetic polypeptide
MILDTDYITENGKPVIRIFKKEKGEFKIEYDRNFEPYIYALLEDDESIEDIKKITGERHGKKVRIIRVEKVKKKFLGEPIEVWKLVFEHPQDYPAIRDAIRSHPAVREIFEYDIPFAKRYLIDKGLVPMEGGEELKLLAFAIATFYHEGDEFAEGEILMISYADESGAKVITWKKIDLPYVEVVSTEREAIKRFLQVLREKDPDVLLTYNGDNFDFAYIKKRCEKLGLKFTIGRDGSEPKIQRMGDRFAVEVKGRIHLDLAPVVRHTIRLPTYTLEAVYEAVFGKKKEKVYAEEIAEAWKSEEGLKRVAQYSMEDARATYELGREFFPMEVELAKLIGQSVWDVSRSSTGNLVEWYLLRVAYERNELAPNKPGGEEYQRRMRSSYIGGYVKEPEKGLWESIAYLDFRSSFASIIVTHNVSPDTLEKECKNYDVAPIVGYRFCKDFKGFIPSILEDLIETRQKVKRKMKATIDPIEKKMLDYRQRALKILANSYYGYQGYPKARWYSKECAESVTAWGRHYIETTIKEAEKFGFKVLYADTDGFFATIPNEKPETIKSKAKKFLKHINEKLPGMLELEYEGFYLRGFFVTKKKYALIDEDGHITTRGLEVVRRDWSEIAKETQAKVLEVILREGSIEKAAGIVKKVVEDLANYRVPVEKLIIHEQITRELKRYKATGPHVAIAKRLQARGIKVKPGTIISYVVLKGSKKISDRVILFDEYDSSRHKYDPDYYIHNQVLPAVLRILEAFGYKEKDLEYQRMKQTGLGAWLKMGKK

SEQ ID NO: 1361 - protein, 773 aa, unidentified
  REGION 1..773: note = Description of Unknown: Synthetic polypeptide
MILDTDYITENGKPVIRIFKKEKGEFKIEYDRNFEPYIYALLEDDESIEDIKKITGERHGKKVRIIRVEKVKKKFLGEPIEVWKLVFEHPQDYPAIRDAIRSHPAVREIFEYDIPFAKRYLIDKGLVPMEGGEELKLLAFNIATFYHEGDEFAEGEILMISYADESGAKVITWKKIDLPYVEVVSTEREAIKRFLQVLREKDPDVLLTYNGDNFDFAYIKKRCEKLGLKFTIGRDGSEPKIQRMGDRFAVEVKGRIHLDLAPVVRHTIRLPTYTLEAVYEAVFGKKKEKVYAEEIAEAWKSEEGLKRVAQYSAEDARATYELGREFFPLEVELAKLIGQSVWDVSRSSTGNLVEWYLLRVAYERNELAPNKPGGEEYQRRMRSSYIGGYVKEPEKGLWESIAYLDFRSSAGSIIVTHNVSPDTLEKECKNYDVAPIVGYRFCKDFKGFIPSILEDLIETRQKVKRKMKATIDPIEKKMLDYRQRALKILANSYYGYQGYPKARWYSKECAESVTAWGRHYIETTIKEAEKFGFKVLYADTDGFFATIPNEKPETIKSKAKKFLKHINEKLPGMLELEYEGFYLRGFFVTKKKYALIDEDGHITTRGLEVVRRDWSEIAKETQAKVLEVILREGSIEKAAGIVKKVVEDLANYRVPVEKLIIHEQITRELKRYKATGPHVAIAKRLQARGIKVKPGTIISYVVLKGSKKISDRVILFDEYDSSRHKYDPDYYIHNQVLPAVLRILEAFGYKEKDLEYQRDKQTGLGAWLKMGKK

SEQ ID NO: 1362 - protein, 773 aa, unidentified
  REGION 1..773: note = Description of Unknown: Synthetic polypeptide
MILDTDYITENGKPVIRIFKKEKGEFKIEYDRNFEPYIYALLEDDESIEDIKKITGERHGKKVRIIRVEKVKKKFLGEPIEVWKLVFEHPQDYPAIRDAIRSHPAVREIFEYDIPFAKRYLIDKGLVPMEGGEELKLLAFAIATFYHEGDEFAEGEILMISYADESGAKVITWKKIDLPYVEVVSTEREAIKRFLQVLREKDPDVLLTYNGDNFDFAYIKKRCEKLGLKFTIGRDGSEPKIQRMGDRFAVEVKGRIHLDLAPVVRHTIRLPTYTLEAVYEAVFGKKKEKVYAEEIAEAWKSEEGLARVAQYSVEDARATYELGREFFPMEVELAKLIGQSVWDVSRSSTGNLVEWYLLRVAYERNELAPNQPGGEEYQRRMRSSYIGGYVKEPEKGLWESIAYLDFRSSAGSIIVTHNVSPDTLEKECKNYDVAPIVGYRFCKDFKGFIPSILEDLIETRQKVKRKMKATIDPIEKKMLDYRQRALKILANSYYGYQGYPKARWYSQECAESVTAWGRHYIETTIKEAEKFGFKVLYADTDGFFATIPNEKPETIKSKAKKFLKHINEKLPGMLELEYEGFYLRGFFVTKKKYALIDEDGHITTRGLEVVRRDWSEIAKETQAKVLEVILREGSIEKAAGIVKKVVEDLANYRVPVEKLIIHEQITRELKRYKATGPHVAIAKRLQARGIKVKPGTIISYVVLKGSKKISDRVILFDEYDSSRHKYDPDYYIHNQVLPAVLRILEAFGYKEKDLEYQRDKQTGLGAWLKMGKK

SEQ ID NO: 1363 - protein, 773 aa, unidentified
  REGION 1..773: note = Description of Unknown: Synthetic polypeptide
MILDTDYITENGKPVIRIFKKEKGEFKIEYDRNFEPYIYALLEDDESIEDIKKITGERHGKKVRIIRVEKVKKKFLGEPIEVWKLVFEHPQDYPAIRDAIRSHPAVREIFEYDIPFAKRYLIDKGLVPMEGGEELKLLAFAIATFYHEGDEFAEGEILMISYADESGAKVITWKKIDLPYVEVVSTEREAIKRFLQVLREKDPDVLLTYNGDNFDFAYIKKRCEKLGLKFTIGRDGSEPKIQRMGDRFAVEVKGRIHLDLAPVVRHTIRLPTYTLEAVYEAVFGKKKEKVYAEEIAEAWKSEEGLKRVAQYSMEDARATYELGREFFPMEVELAKLIGQSVWDVSRSSTGNLVEWYLLRVAYERNELAPNKPGGEEYQRRMRSSYIGGYVKEPEKGLWESIAYLDFRSSYGSIIVTHNVSPDTLEKECKNYDVAPIVGYRFCKDFKGFIPSILEDLIETRQKVKRKMKATIDPIEKKMLDYRQRALKILANSYYGYQGYPKARWYSKECAESVTAWGRHYIETTIKEAEKFGFKVLYADTDGFFATIPNEKPETIKSKAKKFLKHINEKLPGMLELEYEGFYLRGFFVTKKKYALIDEDGHITTRGLEVVRRDWSEIAKETQAKVLEVILREGSIEKAAGIVKKVVEDLANYRVPVEKLIIHEQITRELKRYKATGPHVAIAKRLQARGIKVKPGTIISYVVLKGSKKISDRVILFDEYDSSRHKYDPDYYIHNQVLPAVLRILEAFGYKEKDLEYQRMKQTGLGAWLKMGKK

SEQ ID NO: 1364 - protein, 773 aa, unidentified
  REGION 1..773: note = Description of Unknown: Synthetic polypeptide
MILDTDYITENGKPVIRIFKKEKGEFKIEYDRNFEPYIYALLEDDESIEDIKKITGERHGKKVRIIRAEKVKKNFLGEPIEVWKLVFEHPQDYPAIRDAIRSHPAVREIFEYDIPFAKRYLIDKGLVPMEGGEELKLLAFAIATFYHEGDEFAEGEILMISYADESGAKVITWKKIDLPYVEVVSTEREAIKRFLQVLREKDPDVLLTYNGDNFDFAYIKKRCEKLGLKFTIGRDGSEPKIQRMGDRFAVEVKGRIHLDLAPVVRHTIRLPTYTLEAVYEAVFGKKKEKVYAEEIAEAWKSEEGLKRVAQYSMEDARATYELGREFFPMEVELAKLIGQSVWDVSRSSTGNLVEWYLLRVAYERNELAPNKPGGEEYQRRMRSSYIGGYVKEPEKGLWESIAYLDFRSSAGSIIVTHNVSPDTLEKECKNYDVAPIVGYRFCKDFKGFIPSILEDLIETRQKVKRKMKATIDPIEKKMLDYRQRALKILANSYYGYQGYPKARWYSKECAESVTAWGRHYIETTIKEAEKFGFKVLYADTDGFFATIPNEKPETIKSKAKKFLKHINEKLPGMLELEYEGFYLRGFFVTKKKYALIDEDGHITTRGLEVVRRDWSEIAKETQAKVLEVILREGSIEKAAGIVKKVVEDLANYRVPVEKLIIHEQITRELKRYKATGPHVAIAKRLQARGIKVKPGTIISYVVLKGSKKISDRVILFDEYDSSRHKYDPDYYIHNQVLPAVLRILEAFGYKEKDLEYQRMKQTGLGAWLKMGKK

SEQ ID NO: 1365 - protein, 773 aa, unidentified
  REGION 1..773: note = Description of Unknown: Synthetic polypeptide
MILDTDYITENGKPVIRIFKKEKGEFKIEYDRNFEPYIYALLEDDESIEDIKKITGERHGKKVRIIRVEKVKKNFLGEPIEVWKLVFEHPQDYPAIRDAIRSHPAVREIFEYDIPFAKRYLIDKGLVPMEGGEELKLLAFAIATFYHEGDEFAEGEILMISYADESGAKVITWKKIDLPYVEVVSTEREAIKRFLQVLREKDPDVLLTYNGDNFDFAYIKKRCEKLGLKFTIGRDGSEPKIQRMGDRFAVEVKGRIHLDLAPVVRHTIRLPTYTLEAVYEAVFGKKKEKVYAEEIAEAWKSEEGLKRVAQYSMEDARATYELGREFFPMEVELAKLIGQSVWDVSRSSTGNLVEWYLLRVAYERNELAPNKPGGEEYQRRMRSSYIGGYVKEPEKGLWESIAYLDFRSSAGSIIVTHNVSPDTLEKECKNYDVAPIVGYRFCKDFKGFIPSILEDLIETRQKVKRKMKATIDPIEKKMLDYRQRALKILANSYYGYQGYPKARWYSKECAESVTAWGRHYIETTIKEAEKFGFKVLYADTDGFFATIPNEKPETIKSKAKKFLKHINEKLPGMLELEYEGFYLRGFFVTKKKYAVIDEDGHITTRGLEVVRRDWSEIAKETQAKVLEVILREGSIEKAAGIVKKVVEDLANYRVPVEKLIIHEQITRELKRYKATGPHVAIAKRLQARGIKVKPGTIISYVVLKGSKKISDRVILFDEYDSSRHKYDPDYYIHNQVLPAVLRILEAFGYKEKDLEYQRMKQTGLGAWLKMGKK

SEQ ID NO: 1366 - protein, 773 aa, unidentified
  REGION 1..773: note = Description of Unknown: Synthetic polypeptide
MILDTDYITENGKPVIRIFKKEKGEFKIEYDRNFEPYIYALLEDDESIEDIKKITGERHGKKVRIIRVEKVKKKFLGEPIEVWKLVFEHPQDYPAIRDAIRSHPAVREIFEYDIPFAKRYLIDKGLVPMEGGEELKLLAFAIATFYHEGREFAEGEILMISYADESGAKVITWKKIDLPYVEVVSTEREAIKRFLQVLREKDPDVLLTYNGDNFDFAYIKKRCEKLGLKFTIGRDGSEPKIQRMGDRFAVEVKGRIHLDLAPVVRHTIRLPTYTLEAVYEAVFGKKKEKVYAEEIAEAWKSEEGLKRVAQYSMEDARATYELGREFFPMEVELAKLIGQSVWDVSRSSTGNLVEWYLLRVAYERNELAPNKPGGEEYQRRMRSSYIGGYVKEPEKGLWESIAYLDFRSSAGSIIVTHNVSPDTLEKECKNYDVAPIVGYRFCKDFKGFIPSILEDLIETRQKVKRKMKATIDPIEKKMLDYRQRALKILANSYYGYQGYPKARWYSKECAESVTAWGRHYIETTIKEAEKFGFKVLYADTDGFFATIPNEKPETIKSKAKKFLKHINEKLPGMLELEYEGFYLRGFFVTKKKYALIDEDGHITTRGLEVVRRDWSEIAKETQAKVLEVILREGSIEKAAGIVKKVVEDLANYRVPVEKLIIHEQITRELKRYKATGPHVAIAKRLQARGIKVKPGTIISYVVLKGSKKISDRVILFDEYDSSRHKYDPDYYIHNQVLPAVLRILEAFGYKEKDLEYQRMKQTGLGAWLKMGKK

SEQ ID NO: 1367 - protein, 766 aa, unidentified
  REGION 1..766: note = Description of Unknown: Synthetic polypeptide
MILDTDYITENGKPVIRIFKKEKGEFKIEYDRNFEPYIYALLEDDESIEDIKKITGERHGKKVRIIRVEKVKKKFLGEPIEVWKLVFEHPQDVPAIRDAIRSHPAVREIFEYDIPFAKRYLIDKGLVPMEGGEELKLLAFNIATFYHEGDEFAEGEILMISYADESGAKVITWKKIDLPYVEVVSTEREAIKRFLQVLREKDPDVLLTYNGDNFDFAYIKKRCEKLGLKFTIGRDGSEPKIQRMGDRFAVEVKGRIHLDLAPVVRHTIRLPTYTLEAVYEAVFGKKKEKVYAEEIAEAWKSEEGLARVAQYSMEDARATYELGREFFPLEVELAKLIGQSVWDVSRSSTGNLVEWYLLRVAYERNELAPNKPGGEEYQRRMRSSYIGGYVKEPEKGLWESIAYLDFRSSAGSIIVTHNVSPDTLEKECKNYDVAPIVGYRFCKDFKGFIPSILEDLIETRQKVKRKMKATIDPIEKKMLDYRQRALKILANSYYGYQGYPKARWYSKECAESVTAWGRHYIETTIKEAEKFGFKVLYADTDGFFATIPNEKPETIKSKAKKFLKHINEKLPGMLELEYEGFYLRGFFVTKKKYALIDEDGHITTRGLEVVRRDWSEIAKETQAKVLEVILREGSIEKAAGIVKKVVEDLANYRVPVEKLIIHEQITRRLKRYKATGPHVAIAKRLQARGIKVKPGTIISYVVLKGSKKISDRVILFDEYDSSRHKYDPDYYIHNQVLPAVLRILEAFGYKEKDLEYQRDKQTGLGA

SEQ ID NO: 1368 - protein, 773 aa, unidentified
  REGION 1..773: note = Description of Unknown: Synthetic polypeptide
MILDTDYITENGKPVIRIFKKEKGEFKIEYDRNFEPYIYALLEDDESIEDIKKITGERHGKKVRIIRVEKVKKKFLGEPIEVWKLVFEHPQDYPAIRDAIRSHPAVREIFEYDIPFAKRYLIDKGLVPMEGGEELKLLAFAIETFEHEGDEFAEGEILMISYADESGAKVITWKKIDLPYVEVVSTEREAIKRFLQVLREKDPDVLLTYNGDNFDFAYIKKRCEKLGLKFTIGRDGSEPKIQRMGDRFAVEVKGRIHLDLAPVVRHTIRLPTYTLEAVYEAVFGKKKEKVYAEEIAEAWKSEEGLKRVAQYSMEDARATYELGREFFPMEVELAKLIGQSVWDVSRSSTGNLVEWYLLRVAYERNELAPNKPGGEEYQRRMRSSYIGGYVKEPEKGLWESIAYLDFRSSAGSIIVTHNVSPDTLEKECKNYDVAPIVGYRFCKDFKGFIPSILEDLIETRQKVKRKMKATIDPIEKKMLDYRQRALKILANSYYGYQGYPKARWYSKECAESVTAWGRHYIETTIKEAEKFGFKVLYADTDGFFATIPNEKPETIKSKAKKFLKHINEKLPGMLELEYEGFYLRGFFVTKKKYALIDEDGHITTRGLEVVRRDWSEIAKETQAKVLEVILREGSIEKAAGIVKKVVEDLANYRVPVEKLIIHEQITRELKRYKATGPHVAIAKRLQARGIKVKPGTIISYVVLKGSKKISDRVILFDEYDSSRHKYDPDYYIHNQVLPAVLRILEAFGYKEKDLEYQRMKQTGLGAWLKMGKK

SEQ ID NO: 1369 - protein, 773 aa, unidentified
  REGION 1..773: note = Description of Unknown: Synthetic polypeptide
MILDTDYITENGKPVIRIFKKEKGEFKIEYDRNFEPYIYALLEDDESIEDIKKITGERHGKKVRIIRVEKVKKNFLGEPIEVWKLVFEHPQDYPAIRDAIRSHPAVREIFEYDIPFAKRYLIDKGLVPMEGGEELKLLAFAIATFYHEGDEFAEGEILMISYADESGAKVITWKKIDLPYVEVVSTEREAIKRFLQVLREKDPDVLVTYNGDNFDFAYIKKRCEKLGLKFTIGRDGSEPKIQRMGDRFAVEVKGRIHLDLAPVVRHTIRLPTYTLEAVYEAVFGKKKEKVYAEEIAEAWKSEEGLKRVAQYSMEDARATYELGREFFPMEVELAKLIGQSVWDVSRSSTGNLVEWYLLRVAYERNELAPNKPGGEEYQRRMRSSYIGGYVKEPEKGLWESIAYLDFRSSAGSIIVTHNVSPDTLEKECKNYDVAPIVGYRFCKDFKGFIPSILEDLIETRQKVKRKMKATIDPIEKKMLDYRQRALKILANSYYGYQGYPKARWYSKECAESVTAWGRHYIETTIKEAEKFGFKVLYADTDGFFATIPNEKPETIKSKAKKFLKHINEKLPGMLELEYEGFYLRGFFVTKKKYALIDEDGHITTRGLEVVRRDWSEIAKETQAKVLEVILREGSIEKAAGIVKKVVEDLANYRVPVEKLIIHEQITRELKRYKATGPHVAIAKRLQARGIKVKPGTIISYVVLKGSKKISDRVILFDEYDSSRHKYDPDYYIHNQVLPAVLRILEAFGYKEKDLEYQRMKQTGLGAWLKMGKK

SEQ ID NO: 1370 - protein, 773 aa, unidentified; identical to SEQ ID NO: 49
  REGION 1..773: note = Description of Unknown: Synthetic polypeptide

SEQ ID NO: 1371 - protein, 773 aa, unidentified
  REGION 1..773: note = Description of Unknown: Synthetic polypeptide
MILDTDYITENGKPVIRIFKKEKGEFKIEYDRNFEPYIYALLEDDESIEDIKKITGERHGKKVRIIRVEKVKKKFLGEPIEVWKLVFEHPQDYPAIRDAIRSHPAVREIFEYDIPFAKRYLIDKGLVPMEGGEELKLLAFAIATFYHEGDEFAEGEILMISYADESGAKVITWKKIDLPYVEVVSTEREAIKRFLQVLREKDPDVLLTYNGDNFDFAYIKKRAEKLGLKFTIGRDGSEPKIQRMGDRFAVEVKGRIHLDLAPVVRHTIRLPTYTLEAVYEAVFGKKKEKVYAEEIAEAWKSEEGLKRVAQYSMEDARATYELGREFFPMEVELAKLIGQSVWDVSRSSTGNLVEWYLLRVAYERNELAPNKPGGEEYQRRMRSSYIGGYVKEPEKGLWESIAYLDFRSSAGSIIVTHNVSPDTLEKECKNYDVAPEVGYRFCKDFKGFIPSILEDLIETRQKVKRKMKATIDPIEKKMLDYRQRALKILANSYYGYQGYPKARWYSKECAESVTAWGRHYIETTIKEAEKFGFKVLYADTDGFFATIPNEKPETIKSKAKKFLKHINEKLPGMLELEYEGFYLRGFFVTKKKYALIDEDGHITTRGLEVVRRDWSEIAKETQAKVLEVILREGSIEKAAGIVKKVVEDLANYRVPVEKLIIHEQITRELKRYKATGPHVAIAKRLQARGIKVKPGTIISYVVLKGSKKISDRVILFDEYDSSRHKYDPDYYIHNQVLPAVLRILEAFGYKEKDLEYQRMKQTGLGAWLKMGKK

SEQ ID NO: 1372 - protein, 773 aa, unidentified; identical to SEQ ID NO: 782
  REGION 1..773: note = Description of Unknown: Synthetic polypeptide

SEQ ID NO: 1373 - protein, 773 aa, unidentified
  REGION 1..773: note = Description of Unknown: Synthetic polypeptide
MILDTDYITENGKPVIRIFKKEKGEFKIEYDRNFEPYIYALLEDDESIEDIKKITGERHGKKVRIIRVEKVKKKFLGEPIEVWKLVFEHPQDYPAIRDAIRSHPAVREIFEYDIPFAKRYLIDKGLVPMEGGEELKLLAFAIATFYHEGDEFAEGEILMISYADESGAKVITWKKIDLPYVEVVSTEREAIKRFLQVLREKDPDVLLTYNGDNFDFAYIKKRCEKLGLKFTIGRDGSEPKIQRMGDRFAVEVKGRIHLDLAPVVRHTIRLPTYTLEAVYEAVFGKKKEKVYAEEIAEAWKSEEGLKRVAQYSMEDARATYELGREFFPMEVELAKLIGQSVWDVSRSSTGNLVEWYLLRVAYERNELAPNKPGGEEYQRRMRSSYIGGYVKEPEKGLWESIAYLDFRSSAGSIIVTHNVSPDTLEKECKNYDVAPIVGYRFCKDFKGFIPSILEDLIETRQKVKRKMKATIDPIEKKMLDYRQRALQILANSYYGYQGYPKARWYSKECAESVTAWGRHYIETTIKEAEKFGFKVLYADTDGFFATIPNEKPETIKSKAKKFLKHINEKLPGMLELEYEGFYLRGFFVTKKKYALIDEDGHITTRGLEVVRRDWSEIAKETQAKVLEVILREGSIEKAAGIVKKVVEDLANYRVPVEKLIIHEQITRELKRYKATGPHVAIAKRLQARGIKVKPGTIISYVVLKGSKKISDRVILFDEYDSSRHKYDPDYYIHNQVLPAVLRILEAFGYKEKDLEYQRMKQTGLGAWLKMGKK

SEQ ID NO: 1374 - protein, 773 aa, unidentified
  REGION 1..773: note = Description of Unknown: Synthetic polypeptide
MILDTDYITENGKPVIRIFKKEKGEFKIEYDRNFEPYIYALLEDDESIEDIKKITGERHGKKVRIIRVEKVKKKFLGEPIEVWKLVFEHPQDIPAIRDAIRSHPAVREIFEYDIPFAKRYLIDKGLVPMEGGEELKLLAFNIATFYHEGDEFAEGEILMISYADESGAKVITWKKIDLPYVEVVSTEREAIKRFLQVLREKDPDVLLTYNGDNFDFAYIKKRCEKLGLKFTIGRDGSEPKIQRMGDRFAVEVKGRIHLDLAPVVRHTIRLPTYTLEAVYEAVFGKKKEKVYAEEIAEAWKSEEGLARVAQYSMEDARATYELGREFFPLEVELAKLIGQSVWDVSRSSTGNLVEWYLLRVAYERNELAPNKPGGEEYQRRMRSSYIGGYVKEPEKGLWESIAYLDFRSSAGSIIVTHNVSPDTLEKECKNYDVAPIVGYRFCKDFKGFIPSILEDLIETRQKVKRKMKATIDPIEKKMLDYRQRALKILANSYYGYQGYPKARWYSKECAESVTAWGRHYIETTIKEAEKFGFKVLYADTDGFFATIPNEKPETIKSKAKKFLKHINEKLPGMLELEYEGFYLRGFFVTKKKYALIDEDGHITTRGLEVVRRDWSEIAKETQAKVLEVILREGSIEKAAGIVKKVVEDLANYRVPVEKLIIHEQITRELKRYKATGPHVAIAKRLQARGIKVKPGTIISYVVLKGSKKISDRVILFDEYDSSRHKYDPDYYIHNQVLPAVLRILEAFGYKEKDLEYQRDKQTGLGAWLKMGKK

SEQ ID NO: 1375 - protein, 773 aa, unidentified
  REGION 1..773: note = Description of Unknown: Synthetic polypeptide
MILDTDYITENGKPVIRIFKKEKGEFKIEYDRNFEPYIYALLEDDESIEDIKKITGERHGKKVRIIRVEKVKKKFLGEPIEVWKLVFEHPQDYPAIRDAIRSHPAVREIFEYDIPFAKRYLIDKGLVPMEGGEELKLLAFAIATFYHEGDEFAEGEILMISYADESGAKVITWKKIDLPYVEVVSTEREAIKRFLQVLREKDPDVLLTYNGDNFDFAYIKKRCEKLGLKFTIGRDGSEPKIQRMGDRFAVEVKGRIHLDLAPVVRHTIRLPTYTLEAVYEAVFGKKKEKVYAEEIAEAWKSEEGLKRVAQYSMEDARATYELGREFFPMEVELAKLIGQSVWDVSRSSTGNLVEWYLLRVAYERNELAPNKPGGEEYQRRMRSSYIGGYVKEPEKGLWESIAYLDFRSMYGSIIVTHNVSPDTLEKECKNYDVAPIVGYRFCKDFKGFIPSILEDLIETRQKVKRKMKATIDPIEKKMLDYRQRALKILANSYYGYQGYPKARWYSKECAESVTAWGRHYIETTIKEAEKFGFKVLYADTDGFFATIPNEKPETIKSKAKKFLKHINEKLPGMLELEYEGFYLRGFFVTKKKYALIDEDGHITTRGLEVVRRDWSEIAKETQAKVLEVILREGSIEKAAGIVKKVVEDLANYRVPVEKLIIHEQITRELKRYKATGPHVAIAKRLQARGIKVKPGTIISYVVLKGSKKISDRVILFDEYDSSRHKYDPDYYIHNQVLPAVLRILEAFGYKEKDLEYQRMKQTGLGAWLKMGKK

SEQ ID NO: 1376 - protein, 773 aa, unidentified
  REGION 1..773: note = Description of Unknown: Synthetic polypeptide
MILDTDYITENGKPVIRIFKKEKGEFKIEYDRNFEPYIYALLEDDESIEDIKKITGERHGKKVRIIRVEKVKKKFLGEPIEVWKLVFEHPQDYPAIRDAIRSHPAVREIFEYDIPFAKRYLIDKGLVPMEGGEELKLLAFAIATFYHEGDEFAEGEILMISYADESGAKVITWKKIDLPYVEVVSTEREAIKRFLQVLREKDPDVLLTYNGDNFDFAYIKKRCEKLGLKFTIGRDGSEPKIQRMGDRFAVEVKGRIHLDLAPVVRHTIRLPTYDLEAVYEAVFGKKKEKVYAEEIAEAWKSEEGLARVAQYSMEDARATYELGREFFPMEVELAKLIGQSVWDVSRSSTGNLVEWYLLRVAYERNELAPNKPGGEEYQRRMRSSYIGGYVKEPEKGLWESIAYLDFRSSAGSIIVTHNVSPDTLEKECKNYDVAPIVGYRFCKDFKGFIPSILEDLIETRQKVKRKMKATIDPIEKKMLDYRQRALKILANSYYGYQGYPKARWYSKECAESVTAWGRHYIETTIKEAEKFGFKVLYADTDGFFATIPNEKPETIKSKAKKFLKHINEKLPGMLELEYEGFYLRGFFVTKKKYALIDEDGHITTRGLEVVRRDWSEIAKETQAKVLEVILREGSIEKAAGIVKKVVEDLANYRVPVEKLIIHEQITRELKRYKATGPHVAIAKRLQARGIKVKPGTIISYVVLKGSKKISDRVILFDEYDSSRHKYDPDYYIHNQVLPAVLRILEAFGYKEKDLEYQRDKQTGLGAWLKMGKK

SEQ ID NO: 1377 - protein, 773 aa, unidentified
  REGION 1..773: note = Description of Unknown: Synthetic polypeptide
MILDTDYITENGKPVIRIFKKEKGEFKIEYDRNFEPYIYALLEDDESIEDIKKITGERHGKKVRIIRVEKVKKKFLGEPIEVWKLVFEHPQDYPAIRDAIRSHPAVREIFEYDIPFAKRYLIDKGLVPMEGGEELKLLAFAIATFYHEGDEFAEGEILMISYADESGAKVITWKKIDLPYVEVVSTEREAIKRFLQVLREKDPDVLLTYNGDNFDFAYIKKRCEKLGLKFTIGRDGSEPKIQRMGDRFAVEVKGRIHLDLAPVVRHTIRLPTYTLEAVYEAVFGKKKEKVYAEEIAEAWKSEEGLARVAQYSMEDARATYELGREFFPLEVELAKLIGQSVWDVSRSSTGNLVEWYLLRVAYERNELAPNKPGGEEYQRRMRSSYIGGYVKEPEKGLWESIAYLDFRSSAGSIIVTHNVSPDTLEKECKNYDVAPIVGYRFCKDFKGFIPSILEDLIETRQKVKRKMKATIDPIEKKMLDYRQRALKILANSYYGYQGYPKARWYSKECAESVTAWGRHYIETTIKEAEKFGFKVLYADTDGFFATIPNEKPETIKSKAKKFLKHINEKLPGMLELEYEGFYLRGFFVTKKKYALIDEDGHITTRGLEVVRRDWSEIAKETQAKVLEVILREGSIEKAAGIVKKVVEDLANYRVPVEKLIIHEQITRELKRYKATGPHVAIAKRLQARGIKVKPGTIISYVVLKGSKKISDRVILFDEYDSSRHKYDPDYYIHNQVLPAVLRILEAFGYKEKDLEYQRDKQTGLGAWLKMGKK

SEQ ID NO: 1378 - protein, 773 aa, unidentified
  REGION 1..773: note = Description of Unknown: Synthetic polypeptide
MILDTDYITENGKPVIRIFKKEKGEFKIEYDRNFEPYIYALLEDDESIEDIKKITGERHGKKVRIIRVEKVKKKFLGEPIEVWKLVFEHPQDIPAIRDAIRSHPAVREIFEYDIPFAKRYLIDKGLVPMEGGEELKLLAFNIATFYHEGDEFAEGEILMISYADESGAKVITWKKIDLPYVEVVSTEREAIKRFLQVLREKDPDVLLTYNGDNFDFAYIKKRCEKLGLKFTIGRDGSEPKIQRMGDRFAVEVKGRIHLDLAPVVRHTIRLPTYTLEAVYEAVFGKKKEKVYAEEIAEAWKSEEGLKRVAQYSMEDARATYELGREFFPLEVELAKLIGQSVWDVSRSSTGNLVEWYLLRVAYERNELAPNKPGGEEYQRRMRSSYIGGYVKEPEKGLWESIAYLDFRSSAGSIIVTHNVSPDTLEKECKNYDVAPIVGYRFCKDFKGFIPSILEDLIETRQKVKRKMKATIDPIEKKMLDYRQRALKILANSYYGYQGYPKARWYSKECAESVTAWGRHYIETTIKEAEKFGFKVLYADTDGFFATIPNEKPETIKSKAKKFLKHINEKLPGMLELEYEGFYLRGFFVTKKKYALIDEDGHITTRGLEVVRRDWSEIAKETQAKVLEVILREGSIEKAAGIVKKVVEDLANYRVPVEKLIIHELITRELKRYKATGPHVAIAKRLQARGIKVKPGTIISYVVLKGSKKISDRVILFDEYDSSRHKYDPDYYIHNQVLPAVLRILEAFGYKEKDLEYQRMKQTGLGAWLKMGKK

SEQ ID NO: 1379 - protein, 773 aa, unidentified
  REGION 1..773: note = Description of Unknown: Synthetic polypeptide
MILDTDYITENGKPVIRIFKKEKGEFKIEYDRNFEPYIYALLEDDESIEDIKKITGERHGKKVRIIRVEKVKKKFLGEPIEVWKLVFEHPQDYPAIRDAIRSHPAVREIFEYDIPFAKRYLIDKGLVPMEGGEELKLLAFAIATFYHEGDEFAEGEILMISYADESGAKVITWKKIDLPYVEVVSTEREAIKRFLQVLREKDPDVLLTYNGDNFDFAYIKKRCEKLGLKFTIGRDGSEPKIQRMGDRFAVEVKGRIHLDLAPVVRHTIRLPTYTLEAVYEAVFGKKKEKVYAEEIAEAWKSEEGLKRVAQYSMEDARATYELGREFFPMEVELAKLIGQSVWDVSRSSTGNLVEWYLLRVAYERNELAPNKPGGEEYQRRMRSSYIGGYVKEPEKGLWESIAYLDFRSSAGSIIVTHNVSPDTLEKECKNYDVAPIVGYRFCKDFKGFIPSILEDLIETRQKVKRKMKATIDPIEKKMLDYRQRALKILANSYYGYQGYPKARWYSKECAESVTAWGRHYIETTIKEAEKFGFKVLYADTDGFFATIPNEKPETIKSKAKKFLKHINEKLPGMLELEYEGFYLRGFFVTKKKYALIDEDGHITTRGLEVVRRDWSEIAKETQAKVLEVILREGSIEKAAGIVKKVVEDLANYRVPVEKLIIHEQITRKLKRYKATGPHVAIAKRLQARGIKVKPGTIISYVVLKGSKKISDRVILFDEYDSSRHKYDPDYYIHNQVLPAVLRILEAFGYKEKDLEYQRMKQTGLGAWLKMGKK

SEQ ID NO: 1380 - protein, 773 aa, unidentified; identical to SEQ ID NO: 748
  REGION 1..773: note = Description of Unknown: Synthetic polypeptide

SEQ ID NO: 1381 - protein, 773 aa, unidentified; identical to SEQ ID NO: 1212
  REGION 1..773: note = Description of Unknown: Synthetic polypeptide

SEQ ID NO: 1382 - protein, 773 aa, unidentified
  REGION 1..773: note = Description of Unknown: Synthetic polypeptide
MILDTDYITENGKPVIRIFKKEKGEFKIEYDRNFEPYIYALLEDDESIEDIKKITGERHGKKVRIIRVEKVKKKFLGEPIEVWKLVFEHPQDFPAIRDAIRSHPAVREIFEYDIPFAKRYLIDKGLVPMEGGEELKLLAFDIATFYHEGDEFAEGEILMISYADESGAKVITWKKIDLPYVEVVSTEREAIKRFLQVLREKDPDVLLTYNGDNFDFAYIKKRCEKLGLKFTIGRDGSEPKIQRMGDRFAVEVKGRIHLDLAPVVRHTIRLPTYTLEAVYEAVFGKKKEKVYAEEIAEAWKSEEGLKRVAQYSMEDARATYELGREFFPLEVELAKLIGQSVWDVSRSSTGNLVEWYLLRVAYERNELAPNKPGGEEYQRRMRSSYIGGYVKEPEKGLWESIAYLDFRSSAGSIIVTHNVSPDTLEKECKNYDVAPIVGYRFCKDFKGFIPSILEDLIETRQKVKRKMKATIDPIEKKMLDYRQRALKILANSYYGYQGYPKARWYSKECAESVTAWGRHYIETTIKEAEKFGFKVLYADTDGFFATIPNEKPETIKSKAKKFLKHINEKLPGMLELEYEGFYLRGFFVTKKKYALIDEDGHITTRGLEVVRRDWSEIAKETQAKVLEVILREGSIEKAAGIVKKVVEDLANYRVPVEKLIIHEQITRELKRYKATGPHVAIAKRLQARGIKVKPGTIISYVVLKGSKKISDRVILFDEYDSSRHKYDPDYYIHNQVLPAVLRILEAFGYKEKDLEYQRMKQTGLGAWLKMGKK

SEQ ID NO: 1383 - protein, 773 aa, unidentified
  REGION 1..773: note = Description of Unknown: Synthetic polypeptide
MILDTDYITENGKPVIRIFKKEKGEFKIEYDRNFEPYIYALLEDDESIEDIKKITGERHGKKVRIIRVEKVKKKFLGEPIEVWKLVFEHPQDYPAIRDAIRSHPAVREIFEYDIPFAKRYLIDKGLVPMEGGEELKLLAFAIATFYHEGDEFAEGEILMISYADESGAKVITWKKIDLPYVEVVSTEREAIKRFLQVLREKDPDVLLTYNGDNFDFAYIKKRCEKLGLKFTIGRDGSEPKIQRMGDRFAVEVKGRIHLDLAPVVRHTIRLPTYTLEAVYEAVFGKKKEKVYAEEIAEAWKSEEGLARVAQYSVEDARATYELGREFFPMEVELAKLIGQSVWDVSRSSTGNLVEWYLLRVAYERNELAPNQPGGEEYQRRMRSSYIGGYVKEPEKGLWESIAYLDFRSSAPSIIVTHNVSPDTLEKECKNYDVAPIVGYRFCKDFKGFIPSILEDLIETRQKVKRKMKATIDPIEKKMLDYRQRALKILANSYYGYQGYPKARWYSKECAESVTAWGRHYIETTIKEAEKFGFKVLYADTDGFFATIPNEKPETIKSKAKKFLKHINEKLPGMLELEYEGFYLRGFFVTKKKYALIDEDGHITTRGLEVVRRDWSEIAKETQAKVLEVILREGSIEKAAGIVKKVVEDLANYRVPVEKLIIHEQITRELKRYKATGPHVAIAKRLQARGIKVKPGTIISYVVLKGSKKISDRVILFDEYDSSRHKYDPDYYIHNQVLPAVLRILEAFGYKEKDLEYQRDKQTGLGAWLKMGKK

SEQ ID NO: 1384 - protein, 766 aa, unidentified
  REGION 1..766: note = Description of Unknown: Synthetic polypeptide
MILDTDYITENGKPVIRIFKKEKGEFKIEYDRNFEPYIYALLEDDESIEDIKKITGERHGKKVRIIRVEKVKKKFLGEPIEVWKLVFEHPQDYPAIRDAIRSHPAVREIFEYDIPFAKRYLIDKGLVPMEGGEELKLLAFNIATFYHEGDEFAEGEILMISYADESGAKVITWKKIDLPYVEVVSTEREAIKRFLQVLREKDPDVLLTYNGDNFDFAYIKKRCEKLGLKFTIGRDGSEPKIQRMGDRFAVEVKGRIHLDLAPVVRHTIRLPTYTLEAVYEAVFGKKKEKVYAEEIAEAWKSEEGLARVAQYSMEDARATYELGREFFPLEVELAKLIGQSVWDVSRSSTGNLVEWYLLRVAYERNELAPNKPGGEEYQRRMRSSYIGGYVKEPEKGLWESIAYLDFRSSAGSIIVTHNVSPDTLEKECKNYDVAPIVGYRFCKDFKGFIPSILEDLIETRQKVKRKMKATIDPIEKKMLDYRQRALKILANSYYGYQGYPKARWYSKECAESVTAWGRHYIETTIKEAEKFGFKVLYADTDGFFATIPNEKPETIKSKAKKFLKHINEKLPGMLELEYEGFYLRGFFVTKKKYALIDEDGHITTRGLEVVRRDWSEIAKETQAKVLEVILREGSIEKAAGIVKKVVEDLANYRVPVEKLIIHEQITRELKRYKATGPHVAIAKRLQARGIKVKPGTIISYVVLKGSKKISDRVILFDEYDSSRHKYDPDYYIHNQVLPAVLRILEAFGYKEKDLEYQRDKQTGLGA

SEQ ID NO: 1385 - protein, 773 aa, unidentified
  REGION 1..773: note = Description of Unknown: Synthetic polypeptide
MILDTDYITENGKPVIRIFKKEKGEFKIEYDRNFEPYIYALLEDDESIEDIKKITGERHGKKVRIIRVEKVKKKFLGEPIEVWKLVFEHPQDYPAIRDAIRSHPAVREIFEYDIPFAKRYLIDKGLVPMEGGEELKLLAFAIATFYHEGDEFAEGEILMISYADESGAKVITWKKIDLPYVEVVSTEREAIKRFLQVLREKDPDVLLTYNGDNFDFAYIKKRCEKLGLKFTIGRDGSEPKIQRMGDRFAVEVKGRIHLDLAPVVRHTIRLPTYTLEAVYEAVFGKKKEKVYAEEIAEAWKSEEGLKRVAQYSMEDARATYELGREFFPMEVELAKLIGQSVWDVSRSSTGNLVEWYLLRVAYERNELAPNKPGGEEYQRRMRSSYIGGYVKEPEKGLWESIAYLDFRSSAGSIIVTHNVSPDTLEKECKNYDVAPEVGYRFCKDFKGFIPSILEDLIETRQKVKRKMKATIDPIEKKMLDYRQRALKILANSYYGYQGYPKARWYSKEAAESVTAWGRHYIETTIKEAEKFGFKVLYADTDGFFATIPNEKPETIKSKAKKFLKHINEKLPGMLELEYEGFYLRGFFVTKKKYALIDEDGHITTRGLEVVRRDWSEIAKETQAKVLEVILREGSIEKAAGIVKKVVEDLANYRVPVEKLIIHEQITRELKRYKATGPHVAIAKRLQARGIKVKPGTIISYVVLKGSKKISDRVILFDEYDSSRHKYDPDYYIHNQVLPAVLRILEAFGYKEKDLEYQRMKQTGLGAWLKMGKK

SEQ ID NO: 1386 - protein, 773 aa, unidentified
  REGION 1..773: note = Description of Unknown: Synthetic polypeptide
MILDTDYITENGKPVIRIFKKEKGEFKIEYDRNFEPYIYALLEDDESIEDIKKITGERHGKKVRIIRVEKVKKKFLGEPIEVWKLVFEHPQDYPAIRDAIRSHPAVREIFEYDIPFAKRYLIDKGLVPMEGGEELKLLAFNIATFYHEGDEFAEGEILMISYADESGAKVITWKKIDLPYVEVVSTEREAIKRFLQVLREKDPDVLLTYNGDNFDFAYIKKRCEKLGLKFTIGRDGSEPKIQRMGDRFAVEVKGRIHLDLAPVVRHTIRLPTYTLEAVYEAVFGKKKEKVYAEEIAEAWKSEEGLKRVAQYSMEDARATYELGREFFPLEVELAKLIGQSVWDVSRSSTGNLVEWYLLRVAYERNELAPNKPGGEEYQRRMRSSYIGGYVKEPEKGLWESIAYLDFRSSSGSIIVTHNVSPDTLEKECKNYDVAPIVGYRFCKDFKGFIPSILEDLIETRQKVKRKMKATIDPIEKKMLDYRQRALKILANSYYGYQGYPKARWYSKECAESVTAWGRHYIETTIKEAEKFGFKVLYADTDGFFATIPNEKPETIKSKAKKFLKHINEKLPGMLELEYEGFYLRGFFVTKKKYALIDEDGHITTRGLEVVRRDWSEIAKETQAKVLEVILREGSIEKAAGIVKKVVEDLANYRVPVEKLIIHEQITRELKRYKATGPHVAIAKRLQARGIKVKPGTIISYVVLKGSKKISDRVILFDEYDSSRHKYDPDYYIHNQVLPAVLRILEAFGYKEKDLEYQRMKQTGLGAWLKMGKK

SEQ ID NO: 1387 - protein, 773 aa, unidentified
  REGION 1..773: note = Description of Unknown: Synthetic polypeptide
MILDTDYITENGKPVIRIFKKEKGEFKIEYDRNFEPYIYALLEDDESIEDIKKITGERHGKKVRIIRVEKVKKNFLGEPIEVWKLVFEHPQDYPAIRDAIRSHPAVREIFEYDIPFAKRYLIDKGLVPMEGGEELKLLAFAIATFYHEGDEFAEGEILMISYADESGAKVITWKKIDLPYVEVVSTEREAIKRFLQVLREKDPDVLLTYNGDNFDFAYIKKRCEKLGLKFTIGRDGSEPKIQRMGDRFAVEVKGRIHLDLAPVVRHTIRLPTYTLEAVYEAVFGKKKEKVYAEEIAEAWKSEEGLKRVAQYSMEDARATYELGREFFPMEVELAKLIGQSVWDVSRSSTGNLVEWYLLRVAYERNELAPNKPGGEEYQRRMRSSYIGGYVKEPEKGLWESIAYLDFRSSAGSIIVTHNVSPDTLEKECKNYDVAPIVGYRFCKDFKGFIPSILEDLIETRQKVKRKMKATIDPIEKKMLDYRQRALKILANSYYGYQGYPKARWYSKECAESVTAWGRHYIETTIKEAEKFGFKVLYADTDGFFATIPNEKPETIKSKAKKFLKHINEKLPGMLELEYEGFYLRGFFVTKKKYALIDEDGHITTRGLEIVRRDWSEIAKETQAKVLEVILREGSIEKAAGIVKKVVEDLANYRVPVEKLIIHEQITRELKRYKATGPHVAIAKRLQARGIKVKPGTIISYVVLKGSKKISDRVILFDEYDSSRHKYDPDYYIHNQVLPAVLRILEAFGYKEKDLEYQRMKQTGLGAWLKMGKK

SEQ ID NO: 1388 - protein, 766 aa, unidentified
  REGION 1..766: note = Description of Unknown: Synthetic polypeptide
MILDTDYITENGKPVIRIFKKEKGEFKIEYDRNFEPYIYALLEDDESIEDIKKITGERHGKKVRIIRVEKVKKKFLGEPIEVWKLVFEHPQDVPAIRDAIRSHPAVREIFEYDIPFAKRYLIDKGLVPMEGGEELKLLAFNIATFYHEGDEFAEGEILMISYADESGAKVITWKKIDLPYVEVVSTEREAIKRFLQVLREKDPDVLLTYNGDNFDFAYIKKRCEKLGLKFTIGRDGSEPKIQRMGDRFAVEVKGRIHLDLAPVVRHTIRLPTYTLEAVYEAVFGKKKEKVYAEEIAEAWKSEEGLKRVAQYSAEDARATYELGREFFPLEVELAKLIGQSVWDVSRSSTGNLVEWYLLRVAYERNELAPNKPGGEEYQRRMRSSYIGGYVKEPEKGLWESIAYLDFRSSAGSIIVTHNVSPDTLEKECKNYDVAPIVGYRFCKDFKGFIPSILEDLIETRQKVKRKMKATIDPIEKKMLDYRQRALKILANSYYGYQGYPKARWYSKECAESVTAWGRHYIETTIKEAEKFGFKVLYADTDGFFATIPNEKPETIKSKAKKFLKHINEKLPGMLELEYEGFYLRGFFVTKKKYALIDEDGHITTRGLEVVRRDWSEIAKETQAKVLEVILREGSIEKAAGIVKKVVEDLANYRVPVEKLIIHEQITRRLKRYKATGPHVAIAKRLQARGIKVKPGTIISYVVLKGSKKISDRVILFDEYDSSRHKYDPDYYIHNQVLPAVLRILEAFGYKEKDLEYQRDKQTGLGA

SEQ ID NO: 1389 - protein, 773 aa, unidentified
  REGION 1..773: note = Description of Unknown: Synthetic polypeptide
MILDTDYITENGKPVIRIFKKEKGEFKIEYDRNFEPYIYALLEDDESIEDIKKITGERHGKKVRIIRVEKVKKKFLGEPIEVWKLVFEHPQDYPAIRDAIRSHPAVREIFEYDIPFAKRYLIDKGLVPMEGGEELKLLAFAIATFYHEGDEFAEGEILMISYADESGAKVITWKKIDLPYVEVVSTEREAIKRFLQVLREKDPDVLLTYNGDNFDFAYIKKRCEKLGLKFTIGRDGSEPKIQRMGDRFAVEVKGRIHLDLAPVVRHTIRLPTYTLEAVYEAVFGKKKEKVYAEEIAEAWKSEEGLARVAQYSVEDARATYELGREFFPMEVELAKLIGQSVWDVSRSSTGNLVEWYLLRVAYERNELAPNQPGGEEYQRRMRSSYIGGYVKEPEKGLWESIAYLDFRSSAGSIIVTHNVSPDTLEKECKNYDVAPIVGYRFCKDFKGFIPSILEDLIETRQKVKRKMKATIDPIEKKMLDYRQRALKILANSYYGYQGYPKARWYSKECAESVTAWGRHYIETTIKEAEKFGFKVLYADTDGFFATIPNEKPETIKSKAKKFLKHINEKLPGMLELEYEGFYLRGFFVTKKKYALIDEDGHITTRGLEVVRRDWSEIAKETQAKVLEVILREGSIEQAAGIVKKVVEDLANYRVPVEKLIIHEQITRELKRYKATGPHVAIAKRLQARGIKVKPGTIISYVVLKGSKKISDRVILFDEYDSSRHKYDPDYYIHNQVLPAVLRILEAFGYKEKDLEYQRDKQTGLGAWLKMGKK

SEQ ID NO: 1390 - protein, 773 aa, unidentified
  REGION 1..773: note = Description of Unknown: Synthetic polypeptide
MILDTDYITENGKPVIRIFKKEKGEFKIEYDRNFEPYIYALLEDDESIEDIKKITGERHGKKVRIIRVEKVKKKFLGEPIEVWKLVFEHPQDYPAIRDAIRSHPAVREIFEYDIPFAKRYLIDKGLVPMEGGEELKLLAFAIATFYHEGDEFAEGEILMISYADESGAKVITWKKIDLPYVEVVSTEREAIKRFLQVLREKDPDVLLTYNGDNFDFAYIKKRCEKLGLKFTIGRDGSEPKIQRMGDRFAVEVKGRIHLDLAPVVRHTIRLPTYTLEAVYEAVFGKKKEKVYAEEIAEAWKSEEGLKRVAQYSMEDARATYELGREFFPMEVELAKLIGQSVWDVSRSSTGNLVEWYLLRVAYERNELAPNKPGGEEYQRRMRSSYIGGYVKEPEKGLWESIAYLDFRSMAASIIVTHNVSPDTLEKECKNYDVAPIVGYRFCKDFKGFIPSILEDLIETRQKVKRKMKATIDPIEKKMLDYRQRALKILANSYYGYQGYPKARWYSKECAESVTAWGRHYIETTIKEAEKFGFKVLYADTDGFFATIPNEKPETIKSKAKKFLKHINEKLPGMLELEYEGFYLRGFFVTKKKYALIDEDGHITTRGLEVVRRDWSEIAKETQAKVLEVILREGSIEKAAGIVKKVVEDLANYRVPVEKLIIHEQITRELKRYKATGPHVAIAKRLQARGIKVKPGTIISYVVLKGSKKISDRVILFDEYDSSRHKYDPDYYIHNQVLPAVLRILEAFGYKEKDLEYQRMKQTGLGAWLKMGKK

SEQ ID NO: 1391 - protein, 773 aa, unidentified
  REGION 1..773: note = Description of Unknown: Synthetic polypeptide
MILDTDYITENGKPVIRIFKKEKGEFKIEYDRNFEPYIYADLEDDESIEDIKKITGERHGKKVRIIRVEKVKKKFLGEPIEVWKLVFEHPQDYPAIRDAIRSHPAVREIFEYDIPFAKRYLIDKGLVPMEGGEELKLLAFAIATFYHEGDEFAEGEILMISYADESGAKVITWKKIDLPYVEVVSTEREAIKRFLQVLREKDPDVLLTYNGDNFDFAYIKKRCEKLGLKFTIGRDGSEPKIQRMGDRFAVEVKGRIHLDLAPVVRHTIRLPTYTLEAVYEAVFGKKKEKVYAEEIAEAWKSEEGLKRVAQYSMEDARATYELGREFFPMEVELAKLIGQSVWDVSRSSTGNLVEWYLLRVAYERNELAPNKPGGEEYQRRMRSSYIGGYVKEPEKGLWESIAYLDFRSSAGSIIVTHNVSPDTLEKECKNYDVAPIVGYRFCKDFKGFIPSILEDLIETRQKVKRKMKATIDPIEKKMLDYRQRALKILANSYYGYQGYPKARWYSKECAESVTAWGRHYIETTIKEAEKFGFKVLYADTDGFFATIPNEKPETIKSKAKKFLKHINEKLPGMLELEYEGFYLRGFFVTKKKYALIDEDGHITTRGLEVVRRDWSEIAKETQAKVLEVILREGSIEKAAGIVKKVVEDLANYRVPVEKLIIHEQITRELKRYKATGPHVAIAKRLQARGIKVKPGTIISYVVLKGSKKISDRVILFDEYDSSRHKYDPDYYIHNQVLPAVLRILEAFGYKEKDLEYQRMKQTGLGAWLKMGKK

SEQ ID NO: 1392 - protein, 773 aa, unidentified
  REGION 1..773: note = Description of Unknown: Synthetic polypeptide
MILDTDYITENGKPVIRIFKKEKGEFKIEYDRNFEPYIYALLEDDESIEDIKKITGERHGKKVRIIRVEKVKKKFLGEPIEVWKLVFEHPQDVPAIRDAIRSHPAVREIFEYDIPFAKRYLIDKGLVPMEGGEELKLLAFNIATFYHEGDEFAEGEILMISYADESGAKVITWKKIDLPYVEVVSTEREAIKRFLQVLREKDPDVLLTYNGDNFDFAYIKKRCEKLGLKFTIGRDGSEPKIQRMGDRFAVEVKGRIHLDLAPVVRHTIRLPTYTLEAVYEAVFGKKKEKVYAEEIAEAWKSEEGLARVAQYSMEDARATYELGREFFPLEVELAKLIGQSVWDVSRSSTGNLVEWYLLRVAYERNELAPNKPGGEEYQRRMRSSYIGGYVKEPEKGLWESIAYLDFRSSAGSIIVTHNVSPDTLEKECKNYDVAPIVGYRFCKDFKGFIPSILEDLIETRQKVKRKMKATIDPIEKKMLDYRQRALKILANSYYGYQGYPKARWYSKECAESVTAWGRHYIETTIKEAEKFGFKVLYADTDGFFATIPNEKPETIKSKAKKFLKHINEKLPGMLELEYEGFYLRGFFVTKKKYALIDEDGHITTRGLEVVRRDWSEIAKETQAKVLEVILREGSIEKAAGIVKKVVEDLANYRVPVEKLIIHELITRELKRYKATGPHVAIAKRLQARGIKVKPGTIISYVVLKGSKKISDRVILFDEYDSSRHKYDPDYYIHNQVLPAVLRILEAFGYKEKDLEYQRMKQTGLGAWLKMGKK

SEQ ID NO: 1393 - protein, 773 aa, unidentified
  REGION 1..773: note = Description of Unknown: Synthetic polypeptide
MILDTDYITENGKPVIRIFKKEKGEFKIEYDRNFEPYIYALLEDDESIEDIKKITGERHGKKVRIIRVEKVKKKFLGEPIEVWKLVFEHPQDYPAIRDAIRSHPAVREIFEYDIPFAKRYLIDKGLVPMEGGEELKLLAFAIATFYHEGDEFAEGEILMISYADESGAKVITWKKIDLPYVEVVSTEREAIKRFLQVLREKDPDVLLTYNGDNFDFAYIKKRCEKLGLKFTIGRDGSEPKIQRMGDRFAVEVKGRIHLDLAPVVRHTIRLPTYTLEAVYEAVFGKKKEKVYAEEIAEAWKSEEGLKRVAQYSMEDARATYELGREFFPMEVELAKLIGQSVWDVSRSSTGNLVEWYLLRVAYERNELAPNKPGGEEYQRRMRSSYIGGYVKEPEKGLWESIAYLDFRSLAPSIIVTHNVSPDTLEKECKNYDVAPIVGYRFCKDFKGFIPSILEDLIETRQKVKRKMKATIDPIEKKMLDYRQRALKILANSYYGYQGYPKARWYSKECAESVTAWGRHYIETTIKEAEKFGFKVLYADTDGFFATIPNEKPETIKSKAKKFLKHINEKLPGMLELEYEGFYLRGFFVTKKKYALIDEDGHITTRGLEVVRRDWSEIAKETQAKVLEVILREGSIEKAAGIVKKVVEDLANYRVPVEKLIIHEQITRELKRYKATGPHVAIAKRLQARGIKVKPGTIISYVVLKGSKKISDRVILFDEYDSSRHKYDPDYYIHNQVLPAVLRILEAFGYKEKDLEYQRMKQTGLGAWLKMGKK

SEQ ID NO: 1394 - protein, 773 aa, unidentified
  REGION 1..773: note = Description of Unknown: Synthetic polypeptide
MILDTDYITENGKPIIRIFKKEKGEFKIEYDRNFEPYIYALLEDDESIEDIKKITGERHGKKVRIIRVEKVKKNFLGEPIEVWKLVFEHPQDYPAIRDAIRSHPAVREIFEYDIPFAKRYLIDKGLVPMEGGEELKLLAFAIATFYHEGDEFAEGEILMISYADESGAKVITWKKIDLPYVEVVSTEREAIKRFLQVLREKDPDVLLTYNGDNFDFAYIKKRCEKLGLKFTIGRDGSEPKIQRMGDRFAVEVKGRIHLDLAPVVRHTIRLPTYTLEAVYEAVFGKKKEKVYAEEIAEAWKSEEGLKRVAQYSMEDARATYELGREFFPMEVELAKLIGQSVWDVSRSSTGNLVEWYLLRVAYERNELAPNKPGGEEYQRRMRSSYIGGYVKEPEKGLWESIAYLDFRSSAGSIIVTHNVSPDTLEKECKNYDVAPIVGYRFCKDFKGFIPSILEDLIETRQKVKRKMKATIDPIEKKMLDYRQRALKILANSYYGYQGYPKARWYSKECAESVTAWGRHYIETTIKEAEKFGFKVLYADTDGFFATIPNEKPETIKSKAKKFLKHINEKLPGMLELEYEGFYLRGFFVTKKKYALIDEDGHITTRGLEVVRRDWSEIAKETQAKVLEVILREGSIEKAAGIVKKVVEDLANYRVPVEKLIIHEQITRELKRYKATGPHVAIAKRLQARGIKVKPGTIISYVVLKGSKKISDRVILFDEYDSSRHKYDPDYYIHNQVLPAVLRILEAFGYKEKDLEYQRMKQTGLGAWLKMGKK

SEQ ID NO: 1395 - protein, 773 aa, unidentified
  REGION 1..773: note = Description of Unknown: Synthetic polypeptide
MILDTDYITENGKPVIRIFKKEKGEFKIEYDRNFEPYIYALLEDDESIEDIKKITGERHGKKVRIIRVEKVKKKFLGEPIEVWKLVFEHPQDYPAIRDAIRSHPAVREIFEYDIPFAKRYLIDKGLVPMEGGEELKLLAFAIATFYHEGDEFAEGEILMISYADESGAKVITWKKIDLPYVEVVSTEREAIKRFLQVLREKDPDVLLTYNGDNFDFAYIKKRCEKLGLKFTIGRDGSEPKIQRMGDRFAVEVKGRIHLDLAPVVRHTIRLPTYDLEAVYEAVFGKKKEKVYAEEIAEAWKSEEGLARVAQYSVEDARATYELGREFFPMEVELAKLIGQSVWDVSRSSTGNLVEWYLLRVAYERNELAPNQPGGEEYQRRMRSSYIGGYVKEPEKGLWESIAYLDFRSSAGSIIVTHNVSPDTLEKECKNYDVAPIVGYRFCKDFKGFIPSILEDLIETRQKVKRKMKATIDPIEKKMLDYRQRALKILANSYYGYQGYPKARWYSKECAESVTAWGRHYIETTIKEAEKFGFKVLYADTDGFFATIPNEKPETIKSKAKKFLKHINEKLPGMLELEYEGFYLRGFFVTKKKYALIDEDGHITTRGLEVVRRDWSEIAKETQAKVLEVILREGSIEKAAGIVKKVVEDLANYRVPVEKLIIHEQITRELKRYKATGPHVAIAKRLQARGIKVKPGTIISYVVLKGSKKISDRVILFDEYDSSRHKYDPDYYIHNQVLPAVLRILEAFGYKEKDLEYQRDKQTGLGAWLKMGKK

SEQ ID NO: 1396 - protein, 766 aa, unidentified
  REGION 1..766: note = Description of Unknown: Synthetic polypeptide
MILDTDYITENGKPVIRIFKKEKGEFKIEYDRNFEPYIYALLEDDESIEDIKKITGERHGKKVRIIRVEKVKKKFLGEPIEVWKLVFEHPQDYPAIRDAIRSHPAVREIFEYDIPFAKRYLIDKGLVPMEGGEELKLLAFNIATFYHEGDEFAEGEILMISYADESGAKVITWKKIDLPYVEVVSTEREAIKRFLQVLREKDPDVLLTYNGDNFDFAYIKKRCEKLGLKFTIGRDGSEPKIQRMGDRFAVEVKGRIHLDLAPVVRHTIRLPTYTLEAVYEAVFGKKKEKVYAEEIAEAWKSEEGLKRVAQYSAEDARATYELGREFFPLEVELAKLIGQSVWDVSRSSTGNLVEWYLLRVAYERNELAPNKPGGEEYQRRMRSSYIGGYVKEPEKGLWESIAYLDFRSSAGSIIVTHNVSPDTLEKECKNYDVAPIVGYRFCKDFKGFIPSILEDLIETRQKVKRKMKATIDPIEKKMLDYRQRALKILANSYYGYQGYPKARWYSKECAESVTAWGRHYIETTIKEAEKFGFKVLYADTDGFFATIPNEKPETIKSKAKKFLKHINEKLPGMLELEYEGFYLRGFFVTKKKYALIDEDGHITTRGLEVVRRDWSEIAKETQAKVLEVILREGSIEKAAGIVKKVVEDLANYRVPVEKLIIHEQITRELKRYKATGPHVAIAKRLQARGIKVKPGTIISYVVLKGSKKISDRVILFDEYDSSRHKYDPDYYIHNQVLPAVLRILEAFGYKEKDLEYQRDKQTGLGA

SEQ ID NO: 1397 - protein, 773 aa, unidentified
  REGION 1..773: note = Description of Unknown: Synthetic polypeptide
MILDTDYITENGKPVIRIFKKEKGEFKIEYDRNFEPYIYALLEDDESIEDIKKITGERHGKKVRIIRVEKVKKKFLGEPIEVWKLVFEHPQDYPAIRDAIRSHPAVREIFEYDIPFAKRYLIDKGLVPMEGGEELKLLAFAIATFYHEGDEFAEGEILMISYADESGAKVITWKKIDLPYVEVVSTEREAIKRFLQVLREKDPDVLLTYNGDNFDFAYIKKRCEKLGLKFTIGRDGSEPKIQRMGDRFAVEVKGRIHLDLAPVVRHTIRLPTYTLEAVYEAVFGKKKEKVYAEEIAEAWKSEEGLKRVAQYSMEDARATYELGREFFPMEVELAKLIGQSVWDVSRSSTGNLVEWYLLRVAYERNELAPNKPGGEEYQRRMRSSYIGGYVKEPEKGLWESIAYLDFRSSFGSIIVTHNVSPDTLEKECKNYDVAPIVGYRFCKDFKGFIPSILEDLIETRQKVKRKMKATIDPIEKKMLDYRQRALKILANSYYGYQGYPKARWYSKECAESVTAWGRHYIETTIKEAEKFGFKVLYADTDGFFATIPNEKPETIKSKAKKFLKHINEKLPGMLELEYEGFYLRGFFVTKKKYALIDEDGHITTRGLEVVRRDWSEIAKETQAKVLEVILREGSIEKAAGIVKKVVEDLANYRVPVEKLIIHEQITRELKRYKATGPHVAIAKRLQARGIKVKPGTIISYVVLKGSKKISDRVILFDEYDSSRHKYDPDYYIHNQVLPAVLRILEAFGYKEKDLEYQRMKQTGLGAWLKMGKK

SEQ ID NO: 1398 - protein, 773 aa, unidentified
  REGION 1..773: note = Description of Unknown: Synthetic polypeptide
MILDTDYITENGKPVIRIFKKEKGEFKIEYDRNFEPYIYALLEDDESIEDIKKITGERHGKKVRIIRVEKVKKNFLGEPIEVWKLVFEHPQDYPAIRDAIRSHPAVREIFEYDIPFAKRYLIDKGLVPMEGGEELKLLAFAIATFYHEGDEFAEGEILMISYADESGAKVITWKKIDLPYVEVVSTEREAIKRFLQVLREKDPDVLLTYNGDNFDFAYIKKRCEKLGLKFTIGRDGSEPKIQRMGDRFAVEVKGRIHLDLAPVVRHTIRLPTYTLEAVYEAVFGKKKEKVYAEEIAEAWKSEEGLARVAQYSMEDARATYELGREFFPMEVELAKLIGQSVWDVSRSSTGNLVEWYLLRVAYERNELAPNKPGGEEYQRRMRSSYIGGYVKEPEKGLWESIAYLDFRSSAGSIIVTHNVSPDTLEKECKNYDVAPEVGYRFCKDFKGFIPSILEDLIETRQKVKRKMKATIDPIEKKMLDYRQRALKILANSYYGYQGYPKARWYSKECAESVTAWGRHYIETTIKEAEKFGFKVLYADTDGFFATIPNEKPETIKSKAKKFLKHINEKLPGMLELEYEGFYLRGFFVTKKKYALIDEDGHITTRGLEVVRRDWSEIAKETQAKVLEVILREGSIEKAAGIVKKVVEDLANYRVPVEKLIIHEQITRELKRYKATGPHVAIAKRLQARGIKVKPGTIISYVVLKGSKKISDRVILFDEYDSSRHKYDPDYYIHNQVLPAVLRILEAFGYKEKDLEYQRDKQTGLGAWLKMGKK

SEQ ID NO: 1399 - protein, 773 aa, unidentified
  REGION 1..773: note = Description of Unknown: Synthetic polypeptide
MILDTDYITENGKPVIRIFKKEAGEFKIEYDRNFEPYIYALLEDDESIEDIKKITGERHGKKVRIIRVEKVKKKFLGEPIEVWKLVFEHPQDYPAIRDAIRSHPAVREIFEYDIPFAKRYLIDKGLVPMEGGEELKLLAFAIATFYHEGDEFAEGEILMISYADESGAKVITWKKIDLPYVEVVSTEREAIKRFLQVLREKDPDVLLTYNGDNFDFAYIKKRCEKLGLKFTIGRDGSEPKIQRMGDRFAVEVKGRIHLDLAPVVRHTIRLPTYTLEAVYEAVFGKKKEKVYAEEIAEAWKSEEGLKRVAQYSMEDARATYELGREFFPMEVELAKLIGQSVWDVSRSSTGNLVEWYLLRVAYERNELAPNKPGGEEYQRRMRSSYIGGYVKEPEKGLWESIAYLDFRSSAGSIIVTHNVSPDTLEKECKNYDVAPIVGYRFCKDFKGFIPSILEDLIETRQKVKRKMKATIDPIEKKMLDYRQRALKILANSYYGYQGYPKARWYSKECAESVTAWGRHYIETTIKEAEKFGFKVLYADTDGFFATIPNEKPETIKSKAKKFLKHINEKLPGMLELEYEGFYLRGFFVTKKKYALIDEDGHITTRGLEVVRRDWSEIAKETQAKVLEVILREGSIEKAAGIVKKVVEDLANYRVPVEKLIIHEQITRELKRYKATGPHVAIAKRLQARGIKVKPGTIISYVVLKGSKKISDRVILFDEYDSSRHKYDPDYYIHNQVLPAVLRILEAFGYKEKDLEYQRMKQTGLGAWLKMGKK

SEQ ID NO: 1400 - protein, 773 aa, unidentified
  REGION 1..773: note = Description of Unknown: Synthetic polypeptide
MILDTDYITENGKPVIRIFKKEKGEFKIEYDRNFEPYIYALLEDDESIEDIKKITGERHGKKVRIIRVEKVKKKFLGEPIEVWKLVFEHPQDVPAIRDAIRSHPAVREIFEYDIPFAKRYLIDKGLVPMEGGEELKLLAFNIATFYHEGDEFAEGEILMISYADESGAKVITWKKIDLPYVEVVSTEREAIKRFLQVLREKDPDVLLTYNGDNFDFAYIKKRCEKLGLKFTIGRDGSEPKIQRMGDRFAVEVKGRIHLDLAPVVRHTIRLPTYTLEAVYEAVFGKKKEKVYAEEIAEAWKSEEGLKRVAQYSMEDARATYELGREFFPMEVELAKLIGQSVWDVSRSSTGNLVEWYLLRVAYERNELAPNKPGGEEYQRRMRSSYIGGYVKEPEKGLWESIAYLDFRSSAGSIIVTHNVSPDTLEKECKNYDVAPIVGYRFCKDFKGFIPSILEDLIETRQKVKRKMKATIDPIEKKMLDYRQRALKILANSYYGYQGYPKARWYSKECAESVTAWGRHYIETTIKEAEKFGFKVLYADTDGFFATIPNEKPETIKSKAKKFLKHINEKLPGMLELEYEGFYLRGFFVTKKKYALIDEDGHITTRGLEVVRRDWSEIAKETQAKVLEVILREGSIEKAAGIVKKVVEDLANYRVPVEKLIIHELITRELKRYKATGPHVAIAKRLQARGIKVKPGTIISYVVLKGSKKISDRVILFDEYDSSRHKYDPDYYIHNQVLPAVLRILEAFGYKEKDLEYQRDKQTGLGAWLKMGKK

SEQ ID NO: 1401 - protein, 773 aa, unidentified
  REGION 1..773: note = Description of Unknown: Synthetic polypeptide
MILDTDYITENGKPVIRIFKKEKGEFKIEYDRNFEPYIYALLEDDESIEDIKKITGERHGKKVRIIRVEKVKKKFLGEPIEVWKLVFEHPQDYPAIRDAIRSHPAVREIFEYDIPFAKRYLIDKGLVPMEGGEELKLLAFAIATFYHEGDEFAEGEILMISYADESGAKVITWKKIDLPYVEVVSTEREAIKRFLQVLREKDPDVLLTYNGDNFDFAYIKKRCEKLGLKFTIGRDGSEPKIQRMGDRFAVEVKGRIHLDLAPVVRHTIRLPTYTLEAVYEAVFGKKKEQVYAEEIAEAWKSEEGLARVAQYSVEDARATYELGREFFPMEVELAKLIGQSVWDVSRSSTGNLVEWYLLRVAYERNELAPNQPGGEEYQRRMRSSYIGGYVKEPEKGLWESIAYLDFRSSAGSIIVTHNVSPDTLEKECKNYDVAPIVGYRFCKDFKGFIPSILEDLIETRQKVKRKMKATIDPIEKKMLDYRQRALKILANSYYGYQGYPKARWYSKECAESVTAWGRHYIETTIKEAEKFGFKVLYADTDGFFATIPNEKPETIKSKAKKFLKHINEKLPGMLELEYEGFYLRGFFVTKKKYALIDEDGHITTRGLEVVRRDWSEIAKETQAKVLEVILREGSIEKAAGIVKKVVEDLANYRVPVEKLIIHEQITRELKRYKATGPHVAIAKRLQARGIKVKPGTIISYVVLKGSKKISDRVILFDEYDSSRHKYDPDYYIHNQVLPAVLRILEAFGYKEKDLEYQRMKQTGLGAWLKMGKK

SEQ ID NO: 1402 - protein, 766 aa, unidentified; identical to SEQ ID NO: 1122
  REGION 1..766: note = Description of Unknown: Synthetic polypeptide

SEQ ID NO: 1403 - protein, 773 aa, unidentified
  REGION 1..773: note = Description of Unknown: Synthetic polypeptide
MILDTDYITENGKPVIRIFKKEKGEFKIEYDRNFEPYIYALLEDDESIEDIKKITGERHGKKVRIIRVEKVKKKFLGEPIEVWKLVFEHPQDIPAIRDAIRSHPAVREIFEYDIPFAKRYLIDKGLVPMEGGEELKLLAFAIATFYHEGDEFAEGEILMISYADESGAKVITWKKIDLPYVEVVSTEREAIKRFLQVLREKDPDVLLTYNGDNFDFAYIKKRCEKLGLKFTIGRDGSEPKIQRMGDRFAVEVKGRIHLDLAPVVRHTIRLPTYTLEAVYEAVFGKKKEKVYAEEIAEAWKSEEGLKRVAQYSMEDARATYELGREFFPLEVELAKLIGQSVWDVSRSSTGNLVEWYLLRVAYERNELAPNKPGGEEYQRRMRSSYIGGYVKEPEKGLWESIAYLDFRSSAGSIIVTHNVSPDTLEKECKNYDVAPIVGYRFCKDFKGFIPSILEDLIETRQKVKRKMKATIDPIEKKMLDYRQRALKILANSYYGYQGYPKARWYSKECAESVTAWGRHYIETTIKEAEKFGFKVLYADTDGFFATIPNEKPETIKSKAKKFLKHINEKLPGMLELEYEGFYLRGFFVTKKKYALIDEDGHITTRGLEVVRRDWSEIAKETQAKVLEVILREGSIEKAAGIVKKVVEDLANYRVPVEKLIIHEQITRELKRYKATGPHVAIAKRLQARGIKVKPGTIISYVVLKGSKKISDRVILFDEYDSSRHKYDPDYYIHNQVLPAVLRILEAFGYKEKDLEYQRMKQTGLGAWLKMGKK

SEQ ID NO: 1404 - protein, 773 aa, unidentified
  REGION 1..773: note = Description of Unknown: Synthetic polypeptide
MILDTDYITENGKPVIRIFKKEKGEFKIEYDRNFEPYIYALLEDDESIEDIKKITGERHGKKVRIIRVEKVKKNFLGEPIEVWKLVFEHPQDYPAIRDAIRSHPAVREIFEYDIPFAKRYLIDKGLVPMEGGEELKLLAFAIATFYHEGDEFAEGEILMISYADESGAKVITWKKIDLPYVEVVSTEREAIKRFLQVLREKDPDVLLTYNGDNFDFAYIKKRCEKLGLKFTIGRDGSEPKIQRMGDRFAVEVKGRIHLDLAPVVRHTIRLPTYTLEAVYEAVFGKKKEKVYAEEIAEAWKSEEGLKRVAQYSMEDARVTYELGREFFPMEVELAKLIGQSVWDVSRSSTGNLVEWYLLRVAYERNELAPNKPGGEEYQRRMRSSYIGGYVKEPEKGLWESIAYLDFRSSAGSIIVTHNVSPDTLEKECKNYDVAPIVGYRFCKDFKGFIPSILEDLIETRQKVKRKMKATIDPIEKKMLDYRQRALKILANSYYGYQGYPKARWYSKECAESVTAWGRHYIETTIKEAEKFGFKVLYADTDGFFATIPNEKPETIKSKAKKFLKHINEKLPGMLELEYEGFYLRGFFVTKKKYALIDEDGHITTRGLEVVRRDWSEIAKETQAKVLEVILREGSIEKAAGIVKKVVEDLANYRVPVEKLIIHEQITRELKRYKATGPHVAIAKRLQARGIKVKPGTIISYVVLKGSKKISDRVILFDEYDSSRHKYDPDYYIHNQVLPAVLRILEAFGYKEKDLEYQRMKQTGLGAWLKMGKK

SEQ ID NO: 1405 - protein, 773 aa, unidentified
  REGION 1..773: note = Description of Unknown: Synthetic polypeptide
MILDTDYITENGKPVIRIFKKEKGEFKIEYDRNFEPYIYALLEDDESIEDIKKITGERHGKKVRIIRVEKVKKKFLGEPIEVWKLVFEHPQDVPAIRDAIRSHPAVREIFEYDIPFAKRYLIDKGLVPMEGGEELKLLAFNIATFYHEGDEFAEGEILMISYADESGAKVITWKKIDLPYVEVVSTEREAIKRFLQVLREKDPDVLLTYNGDNFDFAYIKKRCEKLGLKFTIGRDGSEPKIQRMGDRFAVEVKGRIHLDLAPVVRHTIRLPTYTLEAVYEAVFGKKKEKVYAEEIAEAWKSEEGLKRVAQYSAEDARATYELGREFFPLEVELAKLIGQSVWDVSRSSTGNLVEWYLLRVAYERNELAPNKPGGEEYQRRMRSSYIGGYVKEPEKGLWESIAYLDFRSSAGSIIVTHNVSPDTLEKECKNYDVAPIVGYRFCKDFKGFIPSILEDLIETRQKVKRKMKATIDPIEKKMLDYRQRALKILANSYYGYQGYPKARWYSKECAESVTAWGRHYIETTIKEAEKFGFKVLYADTDGFFATIPNEKPETIKSKAKKFLKHINEKLPGMLELEYEGFYLRGFFVTKKKYALIDEDGHITTRGLEVVRRDWSEIAKETQAKVLEVILREGSIEKAAGIVKKVVEDLANYRVPVEKLIIHEQITRKLKRYKATGPHVAIAKRLQARGIKVKPGTIISYVVLKGSKKISDRVILFDEYDSSRHKYDPDYYIHNQVLPAVLRILEAFGYKEKDLEYQRDKQTGLGAWLKMGKK

SEQ ID NO: 1406 - protein, 773 aa, unidentified
  REGION 1..773: note = Description of Unknown: Synthetic polypeptide
MILDTDYITENGKPVIRIFKKEKGEFKIEYDRNFEPYIYALLEDDESIEDIKKITGERHGKKVRIIRVEKVKKKFLGEPIEVWKLVFEHPQDYPAIRDAIRSHPAVREIFEYDIPFAKRYLIDKGLVPMEGGEELKLLAFAIATFYHEGDRFAEGEILMISYADESGAKVITWKKIDLPYVEVVSTEREAIKRFLQVLREKDPDVLLTYNGDNFDFAYIKKRCEKLGLKFTIGRDGSEPKIQRMGDRFAVEVKGRIHLDLAPVVRHTIRLPTYTLEAVYEAVFGKKKEKVYAEEIAEAWKSEEGLKRVAQYSMEDARATYELGREFFPMEVELAKLIGQSVWDVSRSSTGNLVEWYLLRVAYERNELAPNKPGGEEYQRRMRSSYIGGYVKEPEKGLWESIAYLDFRSSAGSIIVTHNVSPDTLEKECKNYDVAPIVGYRFCKDFKGFIPSILEDLIETRQKVKRKMKATIDPIEKKMLDYRQRALKILANSYYGYQGYPKARWYSKECAESVTAWGRHYIETTIKEAEKFGFKVLYADTDGFFATIPNEKPETIKSKAKKFLKHINEKLPGMLELEYEGFYLRGFFVTKKKYALIDEDGHITTRGLEVVRRDWSEIAKETQAKVLEVILREGSIEKAAGIVKKVVEDLANYRVPVEKLIIHEQITRELKRYKATGPHVAIAKRLQARGIKVKPGTIISYVVLKGSKKISDRVILFDEYDSSRHKYDPDYYIHNQVLPAVLRILEAFGYKEKDLEYQRMKQTGLGAWLKMGKK

SEQ ID NO: 1407 - protein, 773 aa, unidentified
  REGION 1..773: note = Description of Unknown: Synthetic polypeptide
MILDTDYITENGKPVIRIFKKEKGEFKIEYDRNFEPYIYALLEDDESIEDIKKITGERHGKKVRIIRVEKVKKKFLGEPIEVWKLVFEHPQDYPAIRDAIRSHPAVREIFEYDIPFAYRYLIDKGLVPMEGGEELKLLAFAIATFYHEGDEFAEGEILMISYADESGAKVITWKKIDLPYVEVVSTEREAIKRFLQVLREKDPDVLLTYNGDNFDFAYIKKRCEKLGLKFTIGRDGSEPKIQRMGDRFAVEVKGRIHLDLAPVVRHTIRLPTYTLEAVYEAVFGKKKEKVYAEEIAEAWKSEEGLKRVAQYSMEDARATYELGREFFPMEVELAKLIGQSVWDVSRSSTGNLVEWYLLRVAYERNELAPNKPGGEEYQRRMRSSYIGGYVKEPEKGLWESIAYLDFRSSAGSIIVTHNVSPDTLEKECKNYDVAPIVGYRFCKDFKGFIPSILEDLIETRQKVKRKMKATIDPIEKKMLDYRQRALKILANSYYGYQGYPKARWYSKECAESVTAWGRHYIETTIKEAEKFGFKVLYADTDGFFATIPNEKPETIKSKAKKFLKHINEKLPGMLELEYEGFYLRGFFVTKKKYALIDEDGHITTRGLEVVRRDWSEIAKETQAKVLEVILREGSIEKAAGIVKKVVEDLANYRVPVEKLIIHEQITRELKRYKATGPHVAIAKRLQARGIKVKPGTIISYVVLKGSKKISDRVILFDEYDSSRHKYDPDYYIHNQVLPAVLRILEAFGYKEKDLEYQRMKQTGLGAWLKMGKK

SEQ ID NO: 1408 - protein, 773 aa, unidentified
  REGION 1..773: note = Description of Unknown: Synthetic polypeptide
MILDTDYITENGKPVIRIFKKEKGEFKIEYDRNFEPYIYALLEDDESIEDIKKITGERHGKKVRIIRVEKVKKNFLGEPIEVWKLVFEHPQDYPAIRDAIRSHPAVREIFEYDIPFAKRYLIDKGLVPMEGGEELKLLAFAIATFYHEGDEFAEGEILMISYADESGAKVITWKKIDLPYVEVVSTEREAIKRFLQVLREKDPDVLLTYNGDNFDFAYIKKRCEKLGLKFTIGRDGSEPKIQRMGDRFAVEVKGRIHLDLAPVVRHTIRLPTYTLEAVYEAVFGKKKEKVYAEEIAEAWKSEEGLKRVAQYSMEDARATYELGREFFPMEVELSKLIGQSVWDVSRSSTGNLVEWYLLRVAYERNELAPNKPGGEEYQRRMRSSYIGGYVKEPEKGLWESIAYLDFRSSAGSIIVTHNVSPDTLEKECKNYDVAPIVGYRFCKDFKGFIPSILEDLIETRQKVKRKMKATIDPIEKKMLDYRQRALKILANSYYGYQGYPKARWYSKECAESVTAWGRHYIETTIKEAEKFGFKVLYADTDGFFATIPNEKPETIKSKAKKFLKHINEKLPGMLELEYEGFYLRGFFVTKKKYALIDEDGHITTRGLEVVRRDWSEIAKETQAKVLEVILREGSIEKAAGIVKKVVEDLANYRVPVEKLIIHEQITRELKRYKATGPHVAIAKRLQARGIKVKPGTIISYVVLKGSKKISDRVILFDEYDSSRHKYDPDYYIHNQVLPAVLRILEAFGYKEKDLEYQRMKQTGLGAWLKMGKK

SEQ ID NO: 1409 - protein, 773 aa, unidentified
  REGION 1..773: note = Description of Unknown: Synthetic polypeptide
MILDTDYITENGKPVIRIFKKEKGEFKIEYDRNFEPYIYALLEDDESIEDIKKITGERHGKKVRIIRVEKVKKKFLGEPIEVWKLVFEHPQDYPAIRDAIRSHPAVREIFEYDIPFAKRYLIDKGLVPMEGGEELKLLAFAIATFYHEGDEFAEGEILMISYADESGAKVITWKKIDLPYVEVVSTEREAIKRFLQVLREKDPDVLLTYNGDNFDFAYIKKRCEKLGLKFTIGRDGSEPKIQRMGDRFAVEVKGRIHLDLAPVVRHTIRLPTYTLEAVYEAVFGKKKEKVYAEEIAEAWKSEEGLKRVAQYSMEDARATYELGREFFPMEVELAKLIGQSVWDVSRSSTGYLVEWYLLRVAYERNELAPNKPGGEEYQRRMRSSYIGGYVKEPEKGLWESIAYLDFRSSAGSIIVTHNVSPDTLEKECKNYDVAPIVGYRFCKDFKGFIPSILEDLIETRQKVKRKMKATIDPIEKKMLDYRQRALKILANSYYGYQGYPKARWYSKECAESVTAWGRHYIETTIKEAEKFGFKVLYADTDGFFATIPNEKPETIKSKAKKFLKHINEKLPGMLELEYEGFYLRGFFVTKKKYALIDEDGHITTRGLEVVRRDWSEIAKETQAKVLEVILREGSIEKAAGIVKKVVEDLANYRVPVEKLIIHEQITRELKRYKATGPHVAIAKRLQARGIKVKPGTIISYVVLKGSKKISDRVILFDEYDSSRHKYDPDYYIHNQVLPAVLRILEAFGYKEKDLEYQRMKQTGLGAWLKMGKK

SEQ ID NO: 1410 - protein, 773 aa, unidentified
  REGION 1..773: note = Description of Unknown: Synthetic polypeptide
MILDTDYITENGKPVIRIFKKEKGEFKIEYDRNFEPYIYALLEDDESIEDIKKITGERHGKKVRIIRVEKVKKKFLGEPIEVWKLVFEHPQDYPAIRDAIRSHPAVREIFEYDIPFAKRYLIDKGLVPMEGGEELKLLAFAIATFYHEGDEFAEGEILMISYADESGAKVITWKKIDLPYVEVVSTEREAIKRFLQVLREKDPDVLLTYNGDNFDFAYIKKRCEKLGLKFTIGRDGSEPKIQRMGDRFAVEVKGRIHLDLAPVVRHTIRLPTYTLEAVYEAVFGKKKEKVYAEEIAEAWKSEEGLKRVAQYSMEDARATYELGREFFPMEVELAKLIGQSVWDVSRSSTGNLVEWYLLRVAYERNELAPNKPGGEEYQRRMRSSYIGGYVKEPEKGLWESIAYLDFRSSAGSIIVTHNVSPDTLEKECKNYDVAPIVGYRFCKDFKGFIPSILEDLIETRQKVKRKMKATIDPIEKKMLDYRQRALYILANSYYGYQGYPKARWYSKECAESVTAWGRHYIETTIKEAEKFGFKVLYADTDGFFATIPNEKPETIKSKAKKFLKHINEKLPGMLELEYEGFYLRGFFVTKKKYALIDEDGHITTRGLEVVRRDWSEIAKETQAKVLEVILREGSIEKAAGIVKKVVEDLANYRVPVEKLIIHEQITRELKRYKATGPHVAIAKRLQARGIKVKPGTIISYVVLKGSKKISDRVILFDEYDSSRHKYDPDYYIHNQVLPAVLRILEAFGYKEKDLEYQRMKQTGLGAWLKMGKK

SEQ ID NO: 1411 - protein, 773 aa, unidentified
  REGION 1..773: note = Description of Unknown: Synthetic polypeptide
MILDTDYITENGKPVIRIFKKEKGEFKIEYDRNFEPYIYALLEDDESIEDIKKITGERHGKKVRIIRVEKVKKNFLGEPIEVWKLVFEHPQDYPAIRDAIRSHPAVREIFEYDIPFAKRYLIDKGLVPMEGGEELKLLAFAIATLYHEGDEFAEGEILMISYADESGAKVITWKKIDLPYVEVVSTEREAIKRFLQVLREKDPDVLLTYNGDNFDFAYIKKRCEKLGLKFTIGRDGSEPKIQRMGDRFAVEVKGRIHLDLAPVVRHTIRLPTYTLEAVYEAVFGKKKEKVYAEEIAEAWKSEEGLKRVAQYSMEDARATYELGREFFPMEVELAKLIGQSVWDVSRSSTGNLVEWYLLRVAYERNELAPNKPGGEEYQRRMRSSYIGGYVKEPEKGLWESIAYLDFRSSAGSIIVTHNVSPDTLEKECKNYDVAPIVGYRFCKDFKGFIPSILEDLIETRQKVKRKMKATIDPIEKKMLDYRQRALKILANSYYGYQGYPKARWYSKECAESVTAWGRHYIETTIKEAEKFGFKVLYADTDGFFATIPNEKPETIKSKAKKFLKHINEKLPGMLELEYEGFYLRGFFVTKKKYALIDEDGHITTRGLEVVRRDWSEIAKETQAKVLEVILREGSIEKAAGIVKKVVEDLANYRVPVEKLIIHEQITRELKRYKATGPHVAIAKRLQARGIKVKPGTIISYVVLKGSKKISDRVILFDEYDSSRHKYDPDYYIHNQVLPAVLRILEAFGYKEKDLEYQRMKQTGLGAWLKMGKK

SEQ ID NO: 1412 - protein, 773 aa, unidentified; identical to SEQ ID NO: 1058
  REGION 1..773: note = Description of Unknown: Synthetic polypeptide

SEQ ID NO: 1413 - protein, 773 aa, unidentified
  REGION 1..773: note = Description of Unknown: Synthetic polypeptide
MILDTDYITENGKPVIRIFKKEKGEFKIEYDRNFEPYIYALLEDDESIEDIKKITGERHGKKVRIIRVEKVKKKFLGEPIEVWKLVFEHPQDYPAIRDAIRSHPAVREIFEYDIPFAKRYLIDKGLVPMEGGEELKLLAFDIATFYHEGDEFAEGEILMISYADESGAKVITWKKIDLPYVEVVSTEREAIKRFLQVLREKDPDVLLTYNGDNFDFAYIKKRCEKLGLKFTIGRDGSEPKIQRMGDRFAVEVKGRIHLDLAPVVRHTIRLPTYTLEAVYEAVFGKKKEKVYAEEIAEAWKSEEGLKRVAQYSMEDARATYELGREFFPMEVELAKLIGQSVWDVSRSSTGNLVEWYLLRVAYERNELAPNKPGGEEYQRRMRSSYIGGYVKEPEKGLWESIAYLDFRSSAGSIIVTHNVSPDTLEKECKNYDVAPIVGYRFCKDFKGFIPSILEDLIETRQKVKRKMKATIDPIEKKMLDYRQRALKILANSYYGYQGYPKARWYSKECAESVTAWGRHYIETTIKEAEKFGFKVLYADTDGFFATIPNEKPETIKSKAKKFLKHINEKLPGMLELEYEGFYLRGFFVTKKKYALIDEDGHITTRGLEVVRRDWSEIAKETQAKVLEVILREGSIEKAAGIVKKVVEDLANYRVPVEKLIIHEQITRELKRYKATGPHVAIAKRLQARGIKVKPGTIISYVVLKGSKKISDRVILFDEYDSSRHKYDPDYYIHNQVLPAVLRILEAFGYKEKDLEYQRMKQTGLGAWLKMGKK

SEQ ID NO: 1414 - protein, 773 aa, unidentified
  REGION 1..773: note = Description of Unknown: Synthetic polypeptide
MILDTDYITENGKPVIRIFKKEKGEFKIEYDRNFEPYIYALLEDDESIEDIKKITGERHGKKVRIIRVEKVKKKFLGEPIEVWKLVFEHPQDYPAIRDAIRSHPAVREIFEYDIPFAKRYLIDKGLVPMEGGEELKLLAFAIATFYHEGDEFAEGEILMISYADESGAKVITWKKIDLPYVEVVSTEREAIKRFLQVLREKDPDVLLTYNGDNFDFAYIKKRCEKLGLKFTIGRDGSEPKIQRMGDRFAVEVKGRIHLDLAPVVRHTIRLPTYTLEAVYEAVFGKKKEKVYAEEIAEAWKSEEGLKRVAQYSMEDARATYELGREFFPMEVELAKLIGQSVWDVSRSSTGNLVEWYLLRVAYERNELAPNKPGGEEYQRRMRSSYIGGYVKEPEKGLWESIAYLDFRSSAGSIIVTHNVSPDTLEKECKNYDVAPIVGYRFCKDFKGFIPDILEDLIETRQKVKRKMKATIDPIEKKMLDYRQRALKILANSYYGYQGYPKARWYSKECAESVTAWGRHYIETTIKEAEKFGFKVLYADTDGFFATIPNEKPETIKSKAKKFLKHINEKLPGMLELEYEGFYLRGFFVTKKKYALIDEDGHITTRGLEVVRRDWSEIAKETQAKVLEVILREGSIEKAAGIVKKVVEDLANYRVPVEKLIIHEQITRELKRYKATGPHVAIAKRLQARGIKVKPGTIISYVVLKGSKKISDRVILFDEYDSSRHKYDPDYYIHNQVLPAVLRILEAFGYKEKDLEYQRMKQTGLGAWLKMGKK

SEQ ID NO: 1415 - protein, 773 aa, unidentified
  REGION 1..773: note = Description of Unknown: Synthetic polypeptide
MILDTDYITENGKPVIRIFKKEKGEFKIEYDRNFEPYIYALLEDDESIEDIKKITGERHGKKVRIIRVEKVKKKFLGEPIEVWKLVFEHPQDYPAIRDAIRSHPAVREIFEYDIPFAKRYLIDKGLVPMEGGEELKLLAFAIATFYHEGDEFAEGEILMISYADESGAKVITWKKIDLPYVEVVSTEREAIKRFLQVLREKDPDVLLTYNGDNFDFAYIKKRCEKLGLKFTIGRDGSEPKIQRMGDRFAVEVKGRIHLDLAPVVRHTIRLPTYTLEAVYEAVFGKKKEKVYAEEIAEAWKSEEGLKRVAQYSMEDARATYELGREFFPMEVELAKLIGQSVWDVSRSSTGNLVEWYLLRVAYERNELAPNKPGGEEYQRRMRSSYIGGYVKEPEKGLWESIAYLDFRSSAGSIIVTINVSPDTLEKECKNYDVAPIVGYRFCKDFKGFIPSILEDLIETRQKVKRKMKATIDPIEKKMLDYRQRALKILANSYYGYQGYPKARWYSKECAESVTAWGRHYIETTIKEAEKFGFKVLYADTDGFFATIPNEKPETIKSKAKKFLKHINEKLPGMLELEYEGFYLRGFFVTKKKYALIDEDGHITTRGLEVVRRDWSEIAKETQAKVLEVILREGSIEKAAGIVKKVVEDLANYRVPVEKLIIHEQITRELKRYKATGPHVAIAKRLQARGIKVKPGTIISYVVLKGSKKISDRVILFDEYDSSRHKYDPDYYIHNQVLPAVLRILEAFGYKEKDLEYQRMKQTGLGAWLKMGKK

SEQ ID NO: 1416 - protein, 773 aa, unidentified
  REGION 1..773: note = Description of Unknown: Synthetic polypeptide
MILDTDYITENGKPVIRIFKKEKGEFKIEYDRNFEPYIYAFLEDDESIEDIKKITGERHGKKVRIIRVEKVKKKFLGEPIEVWKLVFEHPQDYPAIRDAIRSHPAVREIFEYDIPFAKRYLIDKGLVPMEGGEELKLLAFAIATFYHEGDEFAEGEILMISYADESGAKVITWKKIDLPYVEVVSTEREAIKRFLQVLREKDPDVLLTYNGDNFDFAYIKKRCEKLGLKFTIGRDGSEPKIQRMGDRFAVEVKGRIHLDLAPVVRHTIRLPTYTLEAVYEAVFGKKKEKVYAEEIAEAWKSEEGLKRVAQYSMEDARATYELGREFFPMEVELAKLIGQSVWDVSRSSTGNLVEWYLLRVAYERNELAPNKPGGEEYQRRMRSSYIGGYVKEPEKGLWESIAYLDFRSSAGSIIVTHNVSPDTLEKECKNYDVAPIVGYRFCKDFKGFIPSILEDLIETRQKVKRKMKATIDPIEKKMLDYRQRALKILANSYYGYQGYPKARWYSKECAESVTAWGRHYIETTIKEAEKFGFKVLYADTDGFFATIPNEKPETIKSKAKKFLKHINEKLPGMLELEYEGFYLRGFFVTKKKYALIDEDGHITTRGLEVVRRDWSEIAKETQAKVLEVILREGSIEKAAGIVKKVVEDLANYRVPVEKLIIHEQITRELKRYKATGPHVAIAKRLQARGIKVKPGTIISYVVLKGSKKISDRVILFDEYDSSRHKYDPDYYIHNQVLPAVLRILEAFGYKEKDLEYQRMKQTGLGAWLKMGKK

SEQ ID NO: 1417 - protein, 773 aa, unidentified
  REGION 1..773: note = Description of Unknown: Synthetic polypeptide
MILDTDYITENGKPVIRIFKKEKGEFKIEYDRNFEPYIYALLEDDESIEDIKKITGERHGKKVRIIRVEKVKKKFLGEPIEVWKLVFEHPQDFPAIRDAIRSHPAVREIFEYDIPFAKRYLIDKGLVPMEGGEELKLLAFNIATFYHEGDEFAEGEILMISYADESGAKVITWKKIDLPYVEVVSTEREAIKRFLQVLREKDPDVLLTYNGDNFDFAYIKKRCEKLGLKFTIGRDGSEPKIQRMGDRFAVEVKGRIHLDLAPVVRHTIRLPTYTLEAVYEAVFGKKKEKVYAEEIAEAWKSEEGLKRVAQYSMEDARATYELGREFFPLEVELAKLIGQSVWDVSRSSTGNLVEWYLLRVAYERNELAPNKPGGEEYQRRMRSSYIGGYVKEPEKGLWESIAYLDFRSSAGSIIVTHNVSPDTLEKECKNYDVAPIVGYRFCKDFKGFIPSILEDLIETRQKVKRKMKATIDPIEKKMLDYRQRALKILANSYYGYQGYPKARWYSKECAESVTAWGRHYIETTIKEAEKFGFKVLYADTDGFFATIPNEKPETIKSKAKKFLKHINEKLPGMLELEYEGFYLRGFFVTKKKYALIDEDGHITTRGLEVVRRDWSEIAKETQAKVLEVILREGSIEKAAGIVKKVVEDLANYRVPVEKLIIHELITRELKRYKATGPHVAIAKRLQARGIKVKPGTIISYVVLKGSKKISDRVILFDEYDSSRHKYDPDYYIHNQVLPAVLRILEAFGYKEKDLEYQRMKQTGLGAWLKMGKK

SEQ ID NO: 1418 - protein, 773 aa, unidentified
  REGION 1..773: note = Description of Unknown: Synthetic polypeptide
MILDTDYITENGKPVIRIFKKEKGEFKIEYDRNFEPYIYALLEDDESIEDIKKITGERHGKKVRIIRVEKVKKKFLGEPIEVWKLVFEHPQDYPAIRDAIRSHPAVREIFEYDIPFAKRYLIDKGLVPMEGGEELKLLAFAIATFYHEGDEFAEGEILMISYADESGAKVITWKKIDLPYVEVVSTEREAIKRFLQVLREKDPDVLLTYNGDNFDFAYIKKRCEKLGLKFTIGRDGSEPKIQRMGDRFAVEVKGRIHLDLAPVVRHTIRLPTYTLEAVYEAVFGKKKEKVYAEEIAEAWKSEEGLKRVAQYSMEDARATYELGREFFPMEVELAKLIGQSVWDVSRSSTGNLVEWYLLRVAYERNELAPNKPGGEEYQRRMRSSYIGGYVKEPEKGLWESIAYLDFRSSFPSIIVTHNVSPDTLEKECKNYDVAPIVGYRFCKDFKGFIPSILEDLIETRQKVKRKMKATIDPIEKKMLDYRQRALKILANSYYGYQGYPKARWYSKECAESVTAWGRHYIETTIKEAEKFGFKVLYADTDGFFATIPNEKPETIKSKAKKFLKHINEKLPGMLELEYEGFYLRGFFVTKKKYALIDEDGHITTRGLEVVRRDWSEIAKETQAKVLEVILREGSIEKAAGIVKKVVEDLANYRVPVEKLIIHEQITRELKRYKATGPHVAIAKRLQARGIKVKPGTIISYVVLKGSKKISDRVILFDEYDSSRHKYDPDYYIHNQVLPAVLRILEAFGYKEKDLEYQRMKQTGLGAWLKMGKK

SEQ ID NO: 1419 - protein, 773 aa, unidentified
  REGION 1..773: note = Description of Unknown: Synthetic polypeptide
MILDTDYITENGKPVIRIFKKEKGEFKIEYDRNFEPYIYALLEDDESIEDIKKITGERHGKKVRIIRVEKVKKKFLGEPIEVWKLVFEHPQDVPAIRDAIRSHPAVREIFEYDIPFAKRYLIDKGLVPMEGGEELKLLAFNIATFYHEGDEFAEGEILMISYADESGAKVITWKKIDLPYVEVVSTEREAIKRFLQVLREKDPDVLLTYNGDNFDFAYIKKRCEKLGLKFTIGRDGSEPKIQRMGDRFAVEVKGRIHLDLAPVVRHTIRLPTYTLEAVYEAVFGKKKEKVYAEEIAEAWKSEEGLKRVAQYSAEDARATYELGREFFPLEVELAKLIGQSVWDVSRSSTGNLVEWYLLRVAYERNELAPNKPGGEEYQRRMRSSYIGGYVKEPEKGLWESIAYLDFRSSAGSIIVTHNVSPDTLEKECKNYDVAPIVGYRFCKDFKGFIPSILEDLIETRQKVKRKMKATIDPIEKKMLDYRQRALKILANSYYGYQGYPKARWYSKECAESVTAWGRHYIETTIKEAEKFGFKVLYADTDGFFATIPNEKPETIKSKAKKFLKHINEKLPGMLELEYEGFYLRGFFVTKKKYALIDEDGHITTRGLEVVRRDWSEIAKETQAKVLEVILREGSIEKAAGIVKKVVEDLANYRVPVEKLIIHELITRELKRYKATGPHVAIAKRLQARGIKVKPGTIISYVVLKGSKKISDRVILFDEYDSSRHKYDPDYYIHNQVLPAVLRILEAFGYKEKDLEYQRDKQTGLGAWLKMGKK

SEQ ID NO: 1420 - protein, 773 aa, unidentified
  REGION 1..773: note = Description of Unknown: Synthetic polypeptide
MILDTDYITENGKPVIRIFKKEAGEFKIEYDRNFEPYIYALLEDDESIEDIKKITGERHGKKVRIIRVEKVKKKFLGEPIEVWKLVFEHPQDYPAIRDAIRSHPAVREIFEYDIPFAKRYLIDKGLVPMEGGEELKLLAFAIATFYHEGDEFAEGEILMISYADESGAKVITWKKIDLPYVEVVSTEREAIKRFLQVLREKDPDVLLTYNGDNFDFAYIKKRCEKLGLKFTIGRDGSEPKIQRMGDRFAVEVKGRIHLDLAPVVRHTIRLPTYTLEAVYEAVFGKKKEKVYAEEIAEAWKSEEGLKRVAQYSMEDARATYELGREFFPMEVELAKLIGQSVWDVSRSSTGNLVEWYLLRVAYERNELAPNKPGGEEYQRRMRSSYIGGYVKEPEKGLWESIAYLDFRSSAGSIIVTHNVSPDTLEKECKNYDVAPEVGYRFCKDFKGFIPSILEDLIETRQKVKRKMKATIDPIEKKMLDYRQRALKILANSYYGYQGYPKARWYSKECAESVTAWGRHYIETTIKEAEKFGFKVLYADTDGFFATIPNEKPETIKSKAKKFLKHINEKLPGMLELEYEGFYLRGFFVTKKKYALIDEDGHITTRGLEVVRRDWSEIAKETQAKVLEVILREGSIEKAAGIVKKVVEDLANYRVPVEKLIIHEQITRELKRYKATGPHVAIAKRLQARGIKVKPGTIISYVVLKGSKKISDRVILFDEYDSSRHKYDPDYYIHNQVLPAVLRILEAFGYKEKDLEYQRMKQTGLGAWLKMGKK

SEQ ID NO: 1421 - protein, 766 aa, unidentified; identical to SEQ ID NO: 1060
  REGION 1..766: note = Description of Unknown: Synthetic polypeptide

SEQ ID NO: 1422 - protein, 773 aa, unidentified
  REGION 1..773: note = Description of Unknown: Synthetic polypeptide
MILDTDYITENGKPVIRIFKKEKGEFKIEYDRNFEPYIYALLEDDESIEDIKKITGERHGKKVRIIRVEKVKKKFLGEPIEVWKLVFEHPQDYPAIRDAIRSHPAVREIFEYDIPFAKRYLIDKGLVPMEGGEELKLLAFAIATFYHEGDEFAEGEILMISYADESGAKVITWKKIDLPYVEVVSTEREAIKRFLQVLREKDPDVLLTYNGDNFDFAYIKKRCEKLGLKFTIGRDGSEPKIQRMGDRFAVEVKGRIHLDLAPVVRHTIRLPTYTLEAVYEAVFGKKKEKVYAEEIAEAWKSEEGLARVAQYSMEDARATYELGREFFPMEVELAKLIGQSVWDVSRSSTGNLVEWYLLRVAYERNELAPNKPGGEEYQRRMRSSYIGGYVKEPEKGLWESIAYLDFRSSAGSIIVTHNVSPDTLEKECKNYDVAPIVGYRFCKDFKGFIPSILEDLIETRQKVKRKMKATIDPIEKKMLDYRQRALKILANSYYGYQGYPKARWYSQECAESVTAWGRHYIETTIKEAEKFGFKVLYADTDGFFATIPNEKPETIKSKAKKFLKHINEKLPGMLELEYEGFYLRGFFVTKKKYALIDEDGHITTRGLEVVRRDWSEIAKETQAKVLEVILREGSIEKAAGIVKKVVEDLANYRVPVEKLIIHEQITRELKRYKATGPHVAIAKRLQARGIKVKPGTIISYVVLKGSKKISDRVILFDEYDSSRHKYDPDYYIHNQVLPAVLRILEAFGYKEKDLEYQRDKQTGLGAWLKMGKK

SEQ ID NO: 1423 - protein, 773 aa, unidentified
  REGION 1..773: note = Description of Unknown: Synthetic polypeptide
MILDTDYITENGKPVIRIFKKEKGEFKIEYDRNFEPYIYALLEDDESIEDIKKITGERHGKKVRIIRVEKVKKNFLGEPIEVWKLVFEHPQDYPAIRDAIRSHPAVREIFEYDIPFAKRYLIDKGLVPMEGGEELKLLAFAIATFYHEGDEFAEGEILMISYADESGAKVITWKKIDLPYVEVVSTEREAIKRFLQVIREKDPDVLLTYNGDNFDFAYIKKRCEKLGLKFTIGRDGSEPKIQRMGDRFAVEVKGRIHLDLAPVVRHTIRLPTYTLEAVYEAVFGKKKEKVYAEEIAEAWKSEEGLKRVAQYSMEDARATYELGREFFPMEVELAKLIGQSVWDVSRSSTGNLVEWYLLRVAYERNELAPNKPGGEEYQRRMRSSYIGGYVKEPEKGLWESIAYLDFRSSAGSIIVTHNVSPDTLEKECKNYDVAPIVGYRFCKDFKGFIPSILEDLIETRQKVKRKMKATIDPIEKKMLDYRQRALKILANSYYGYQGYPKARWYSKECAESVTAWGRHYIETTIKEAEKFGFKVLYADTDGFFATIPNEKPETIKSKAKKFLKHINEKLPGMLELEYEGFYLRGFFVTKKKYALIDEDGHITTRGLEVVRRDWSEIAKETQAKVLEVILREGSIEKAAGIVKKVVEDLANYRVPVEKLIIHEQITRELKRYKATGPHVAIAKRLQARGIKVKPGTIISYVVLKGSKKISDRVILFDEYDSSRHKYDPDYYIHNQVLPAVLRILEAFGYKEKDLEYQRMKQTGLGAWLKMGKK

SEQ ID NO: 1424 - protein, 773 aa, unidentified
  REGION 1..773: note = Description of Unknown: Synthetic polypeptide
MILDTDYITENGKPVIRIFKKEKGEFKIEYDRNFEPYIYALLEDDESIEDIKKITGERHGKKVRIIRVEKVKKNFLGEPIEVWKLVFEHPQDYPAIRDAIRSHPAVREIFEYDIPFAKRYLIDKGLVPMEGGEELKMLAFAIATFYHEGDEFAEGEILMISYADESGAKVITWKKIDLPYVEVVSTEREAIKRFLQVLREKDPDVLLTYNGDNFDFAYIKKRCEKLGLKFTIGRDGSEPKIQRMGDRFAVEVKGRIHLDLAPVVRHTIRLPTYTLEAVYEAVFGKKKEKVYAEEIAEAWKSEEGLKRVAQYSMEDARATYELGREFFPMEVELAKLIGQSVWDVSRSSTGNLVEWYLLRVAYERNELAPNKPGGEEYQRRMRSSYIGGYVKEPEKGLWESIAYLDFRSSAGSIIVTHNVSPDTLEKECKNYDVAPIVGYRFCKDFKGFIPSILEDLIETRQKVKRKMKATIDPIEKKMLDYRQRALKILANSYYGYQGYPKARWYSKECAESVTAWGRHYIETTIKEAEKFGFKVLYADTDGFFATIPNEKPETIKSKAKKFLKHINEKLPGMLELEYEGFYLRGFFVTKKKYALIDEDGHITTRGLEVVRRDWSEIAKETQAKVLEVILREGSIEKAAGIVKKVVEDLANYRVPVEKLIIHEQITRELKRYKATGPHVAIAKRLQARGIKVKPGTIISYVVLKGSKKISDRVILFDEYDSSRHKYDPDYYIHNQVLPAVLRILEAFGYKEKDLEYQRMKQTGLGAWLKMGKK

SEQ ID NO: 1425 - protein, 773 aa, unidentified
  REGION 1..773: note = Description of Unknown: Synthetic polypeptide
MILDTDYITENGKPVIRIFKKEKGEFKIEYDRNFEPYIYALLEDDESIEDIKKITGERHGKKVRIIRVEKVKKKFLGEPIEVWKLVFEHPQDFPAIRDAIRSHPAVREIFEYDIPFAKRYLIDKGLVPMEGGEELKLLAFNIATFYHEGDEFAEGEILMISYADESGAKVITWKKIDLPYVEVVSTEREAIKRFLQVLREKDPDVLLTYNGDNFDFAYIKKRCEKLGLKFTIGRDGSEPKIQRMGDRFAVEVKGRIHLDLAPVVRHTIRLPTYTLEAVYEAVFGKKKEKVYAEEIAEAWKSEEGLKRVAQYSMEDARATYELGREFFPLEVELAKLIGQSVWDVSRSSTGNLVEWYLLRVAYERNELAPNKPGGEEYQRRMRSSYIGGYVKEPEKGLWESIAYLDFRSSAASIIVTHNVSPDTLEKECKNYDVAPIVGYRFCKDFKGFIPSILEDLIETRQKVKRKMKATIDPIEKKMLDYRQRALKILANSYYGYQGYPKARWYSKECAESVTAWGRHYIETTIKEAEKFGFKVLYADTDGFFATIPNEKPETIKSKAKKFLKHINEKLPGMLELEYEGFYLRGFFVTKKKYALIDEDGHITTRGLEVVRRDWSEIAKETQAKVLEVILREGSIEKAAGIVKKVVEDLANYRVPVEKLIIHEQITRELKRYKATGPHVAIAKRLQARGIKVKPGTIISYVVLKGSKKISDRVILFDEYDSSRHKYDPDYYIHNQVLPAVLRILEAFGYKEKDLEYQRMKQTGLGAWLKMGKK

SEQ ID NO: 1426 - protein, 773 aa, unidentified
  REGION 1..773: note = Description of Unknown: Synthetic polypeptide
MILDTDYITENGKPVIRIFKKEKGEFKIEYDRNFEPYIYALLEDDESIEDIKKITGERHGKKVRIIRVEKVKKKFLGEPIEVWKLVFEHPQDVPAIRDAIRSHPAVREIFEYDIPFAKRYLIDKGLVPMEGGEELKLLAFDIETFYHEGDEFAEGEILMISYADESGAKVITWKKIDLPYVEVVSTEREAIKRFLQVLREKDPDVLLTYNGDNFDFAYIKKRCEKLGLKFTIGRDGSEPKIQRMGDRFAVEVKGRIHLDLYPVVRHTIRLPTYTLEAVYEAVFGKKKEKVYAEEIAEAWKSEEGLKRVAQYSMEDARATYELGREFFPMEVELAKLIGQSVWDVSRSSTGNLVEWYLLRVAYERNELAPNKPGGEEYQRRMRSSYIGGYVKEPEKGLWESIAYLDFRSLYPSIIVTHNVSPDTLEKECKNYDVAPIVGYRFCKDFKGFIPSILEDLIETRQKVKRKMKATIDPIEKKMLDYRQRALKILANSYYGYQGYPKARWYSKECAESVTAWGRHYIETTIKEAEKFGFKVLYADTDGFFATIPNEKPETIKSKAKKFLKHINEKLPGMLELEYEGFYLRGFFVTKKKYALIDEDGHITTRGLEVVRRDWSEIAKETQAKVLEVILREGSIEKAAGIVKKVVEDLANYRVPVEKLIIHEQITRELKRYKATGPHVAIAKRLQARGIKVKPGTIISYVVLKGSKKISDRVILFDEYDSSRHKYDPDYYIHNQVLPAVLRILEAFGYKEKDLEYQRMKQTGLGAWLKMGKK

SEQ ID NO: 1427 - protein, 773 aa, unidentified
  REGION 1..773: note = Description of Unknown: Synthetic polypeptide
MILDTDYITENGKPVIRIFKKEKGEFKIEYDRNFEPYIYALLEDDESIEDIKKITGERHGKKVRIIRVEKVKKKFLGEPIEVWKLVFEHPQDYPAIRDAIRSHPAVREIFEYDIPFAKRYLIDKGLVPMEGGEELKLLAFAIATFYHEGDEFAEGEILMISYADESGAKVITWKKIDLPYVEVVSTEREAIKRFLQVLREKDPDVLLTYNGDNFDFAYIKKRCEKLGLKFTIGRDGSEPKIQRMGDRFAVEVKGRIHLDLAPVVRHTIRLPTYTLEAVYEAVFGKKKEKVYAEEIAEAWKSEEGLKRVAQYSMEDARATYELGREFFPMEVELAKLIGQSVWDVSRSSTGNLVEWYLLRVAYERNELAPNKPGGEEYQRRMRSSYIGGYVKEPEKGLWESIAYLDFRSSAGSIIVTHNVSPDTLEKECKNYDVAPIVGYRFCKDFKGFIPSILEDLIETRQKVKRKMKATIDPLEKKMLDYRQRALKILANSYYGYQGYPKARWYSKECAESVTAWGRHYIETTIKEAEKFGFKVLYADTDGFFATIPNEKPETIKSKAKKFLKHINEKLPGMLELEYEGFYLRGFFVTKKKYALIDEDGHITTRGLEVVRRDWSEIAKETQAKVLEVILREGSIEKAAGIVKKVVEDLANYRVPVEKLIIHEQITRELKRYKATGPHVAIAKRLQARGIKVKPGTIISYVVLKGSKKISDRVILFDEYDSSRHKYDPDYYIHNQVLPAVLRILEAFGYKEKDLEYQRMKQTGLGAWLKMGKK

SEQ ID NO: 1428 - protein, 773 aa, unidentified
  REGION 1..773: note = Description of Unknown: Synthetic polypeptide
MILDTDYITENGKPVIRIFKKEKGEFKIEYDRNFEPYIYALLEDDESIEDIKKITGERHGKKVRIIRVEKVKKKFLGEPIEVWKLVFEHPQDYPAIRDAIRSHPAVREIFEYDIPFAKRYLIDKGLVPMEGGEELKLLAFAIATFYHEGDEFAEGEILMISYADESGAKVITWKKIDLPYVEVVSTEREAIKRFLQVLREKDPDVLLTYNGDNFDFAYIKKRCEKLGLKFTIGRDGSEPKIQRMGDRFAVEVKGRIHLDLAPVVRHTIRLPTYTLEAVYEAVFGKKKEKVYAEEIAEAWKSEEGLKRVAQYSMEDARATYELGREFFPMEVELAKLIGQSVWDVSRSSTGNLVEWYLLRVAYERNELAPNKPGGEEYQRRMRSSYIGGYVKEPEKGLWESIAYLDFRSSAGSIIVTHNVSPDTLEKECKNYDVAPIVGYRFCKDFKGFIPSILEDLIETRQKVKRKMKATIDPIEKKMLDYRQRALKILANSYYGYQGYPKARWYSKECAESVTAWGRHYIETTIKEAEKFGFKVLYADTDGFFATIPNEKPETIKSKAKKFLKHINEKLPGLLELEYEGFYLRGFFVTKKKYALIDEDGHITTRGLEVVRRDWSEIAKETQAKVLEVILREGSIEKAAGIVKKVVEDLANYRVPVEKLIIHEQITRELKRYKATGPHVAIAKRLQARGIKVKPGTIISYVVLKGSKKISDRVILFDEYDSSRHKYDPDYYIHNQVLPAVLRILEAFGYKEKDLEYQRMKQTGLGAWLKMGKK

SEQ ID NO: 1429 - protein, 773 aa, unidentified
  REGION 1..773: note = Description of Unknown: Synthetic polypeptide
MILDTDYITENGKPVIRIFKKEKGEFKIEYDRNFEPYIYALLEDDESIEDIKKITGERHGKKVRIIRVEKVKKKFLGEPIEVWKLVFEHPQDYPAIRDAIRSHPAVREIFEYDIPFAKRYLIDKGLVPMEGGEELKLLAFAIATFYHEGDEFAEGEILMISYADESGAKVITWKKIDLPYVEVVSTEREAIKRFLQVLREKDPDVLLTYNGDNFDFAYIKKRCEKLGLKFTIGRDGSEPKIQRMGDRFAVEVKGRIHLDLAPVVRHTIRLPTYTLEAVYEAVFGKKKEKVYAEEIAEAWKSEEGLKRVAQYSMEDARATYELGREFFPMEVELAKLIGQSVWDVSRSSTGNLVEWYLLRVAYERNELAPNKPGGEEYQRRMRSSYIGGYVKEPEKGLWESIAYLDFRSSAGSIIVTHNVSPDTLEKECKNYDVAPIVGYRFCKDFKGFIPSILEDLIETRQKVKRKMKATIDPIEKKMLDYRQRALKILANSYYGYQGYPKARWYSKECAESVTAWGRHYIETTIKEAEKFGFKVLYADTDGFFATIPNEKPETIKSKAKKFLKHINEKLPGMLELEYEGFYLRGFFVTKKKYALIDEDGHITTQGLEVVRRDWSEIAKETQAKVLEVILREGSIEKAAGIVKKVVEDLANYRVPVEKLIIHEQITRELKRYKATGPHVAIAKRLQARGIKVKPGTIISYVVLKGSKKISDRVILFDEYDSSRHKYDPDYYIHNQVLPAVLRILEAFGYKEKDLEYQRMKQTGLGAWLKMGKK

SEQ ID NO: 1430 - protein, 773 aa, unidentified
  REGION 1..773: note = Description of Unknown: Synthetic polypeptide
MILDTDYITENGKPVIRIFKKEKGEFKIEYDRNFEPYIYALLEDDESIEDIKKITGERHGKKVRIIRVEKVKKKFLGEPIEVWKLVFEHPQDYPAIRDAIRSHPAVREIFEYDIPFAKRYLIDKGLVPMEGGEELKLLAFAIATFYHEGDEFAEGEILMISYADESGAKVITWKKIDLPYVEVVSTEREAIKRFLQVLREKDPDVLLTYNGDNFDFAYIKKRCEKLGLKFTIGRDGSEPKIQRMGDRFAVEVKGRIHLDLAPVVRHTIRLPTYTLEAVYEAVFGKKKEKVYAEEIAEAWKSEEGLKRVAQYSMEDARATYELGREFFPMEVELAKLIGQSVWDVSRSSTGNLVEWYLLRVAYERNELAPNKPGGEEYQRRMRSSYIGGYVKEPEKGLWDSIAYLDFRSSAGSIIVTHNVSPDTLEKECKNYDVAPIVGYRFCKDFKGFIPSILEDLIETRQKVKRKMKATIDPIEKKMLDYRQRALKILANSYYGYQGYPKARWYSKECAESVTAWGRHYIETTIKEAEKFGFKVLYADTDGFFATIPNEKPETIKSKAKKFLKHINEKLPGMLELEYEGFYLRGFFVTKKKYALIDEDGHITTRGLEVVRRDWSEIAKETQAKVLEVILREGSIEKAAGIVKKVVEDLANYRVPVEKLIIHEQITRELKRYKATGPHVAIAKRLQARGIKVKPGTIISYVVLKGSKKISDRVILFDEYDSSRHKYDPDYYIHNQVLPAVLRILEAFGYKEKDLEYQRMKQTGLGAWLKMGKK

SEQ ID NO: 1431 - protein, 773 aa, unidentified
  REGION 1..773: note = Description of Unknown: Synthetic polypeptide
MILDTDYITENGKPVIRIFKKEKGEFKIEYDRNFEPYIYALLEDDESIEDIKKITGERHGKKVRIIRVEKVKKKFLGEPIEVWKLVFEHPQDYPAIRDAIRSHPAVREIFEYDIPFAKRYLIDKGLVPMEGGEELKLLAFAIATFYHEGDEFAEGEILMISYADESGAKVITWKKIDLPYVEVVSTEREAIKRFLQVLREKDPDVLLTYNGDNFDFAYIKKRCEKLGLKFTIGRDGSEPKIQRMGDRFAVEVKGRIHLDLAPVVRHTIRLPTYTLEAVYEAVFGKKKEKVYAEEIAEAWKSEEGLKRVAQYSMEDARATYELGREFFPMEVELAKLIGQSVWDVSRSSTGNLVEWYLLRVAYERNELAPNKPGGEEYQRRMRSSYIGGYVKEPEKGLWESIAYLDFRSSAGSIIVTHNVSPDTLEKECKNYDVAPIVGYRFCKDFKGFIPSILEDLIETRQKVKRKMKATIDPIEKKMLDYRQRALKILANSYYGYQGYPKARWYSKECAESVTAWGRHYIETTIKEAEKFGFKVLYADTDGFFATIPNEKPETIKSKAKKFLKHINEKLPGMLELEYEGFYLRGFFVTKKKYALIDEDGHITTSGLEVVRRDWSEIAKETQAKVLEVILREGSIEKAAGIVKKVVEDLANYRVPVEKLIIHEQITRELKRYKATGPHVAIAKRLQARGIKVKPGTIISYVVLKGSKKISDRVILFDEYDSSRHKYDPDYYIHNQVLPAVLRILEAFGYKEKDLEYQRMKQTGLGAWLKMGKK

SEQ ID NO: 1432 - protein, 773 aa, unidentified
  REGION 1..773: note = Description of Unknown: Synthetic polypeptide
MILDTDYITENGKPVIRIFKKEKGEFKIEYDRNFEPYIYALLEDDESIEDIKKITGERHGKKVRIIRVEKVKKKFLGEPIEVWKLVFEHPQDYPAIRDAIRSHPAVREIFEYDIPFAKRYLIDKGLVPMEGGEELKLLAFAIATFYHEGDEFAEGEILMISYADESGAKVITWKKIDLPYVEVVSTEREAIKRFLQVLREKDPDVLLTYNGDNFDFAYIKKRCEKLGLKFTIGRDGSEPKIQRMGDRFAVEVKGRIHLDLAPVVRHTIRLPTYTLEAVYEAVFGKKKEKVYAEEIAEAWKSEEGLKRVAQYSMEDARATYELGREFFPMEVELAKLIGQSVWDVSRSSTGNLVEWYLLRVAYERNELAPNKPGGEEYQRRMRSSYIGGYVKEPEKGLWESIAYLDFRSSAGSIIVTHNVSPDTLEKECKNYDAAPIVGYRFCKDFKGFIPSILEDLIETRQKVKRKMKATIDPIEKKMLDYRQRALKILANSYYGYQGYPKARWYSKECAESVTAWGRHYIETTIKEAEKFGFKVLYADTDGFFATIPNEKPETIKSKAKKFLKHINEKLPGMLELEYEGFYLRGFFVTKKKYALIDEDGHITTRGLEVVRRDWSEIAKETQAKVLEVILREGSIEKAAGIVKKVVEDLANYRVPVEKLIIHEQITRELKRYKATGPHVAIAKRLQARGIKVKPGTIISYVVLKGSKKISDRVILFDEYDSSRHKYDPDYYIHNQVLPAVLRILEAFGYKEKDLEYQRMKQTGLGAWLKMGKK

SEQ ID NO: 1433 - protein, 773 aa, unidentified
  REGION 1..773: note = Description of Unknown: Synthetic polypeptide
MILDTDYITENGKPVIRIFKKEKGEFKIEYDRNFEPYIYALLEDDESIEDIKKITGERHGKKVRIIRVEKVKKNFLGEPIEVWKLVFEHPQDYPAIRDAIRSHPAVREIFEYDIPFAKRYLIDKGLVPMEGGEELKLLAFAIATFYHEGDEFAEGEILMISYADESGAKVITWKKIDLPYVEVVSTEREAIKRFLQVLREKDPDVLLTYNGDNFDFAYIKKRCEKLGLKFTIGRDGSEPKIQRMGDRFAVEVKGRIHLDLAPVVRHTIRLPTYTLEAVYEAVFGKKKEKVYAEEIAEAWKSEEGLKRVAQYSMEDARATYELGREFFPMEVELAKLIGQSVWDVSRSSTGNLVEWYLLRVAYERNELAPNKPGGEEYQRRMRSSYTGGYVKEPEKGLWESIAYLDFRSSAGSIIVTHNVSPDTLEKECKNYDVAPIVGYRFCKDFKGFIPSILEDLIETRQKVKRKMKATIDPIEKKMLDYRQRALKILANSYYGYQGYPKARWYSKECAESVTAWGRHYIETTIKEAEKFGFKVLYADTDGFFATIPNEKPETIKSKAKKFLKHINEKLPGMLELEYEGFYLRGFFVTKKKYALIDEDGHITTRGLEVVRRDWSEIAKETQAKVLEVILREGSIEKAAGIVKKVVEDLANYRVPVEKLIIHEQITRELKRYKATGPHVAIAKRLQARGIKVKPGTIISYVVLKGSKKISDRVILFDEYDSSRHKYDPDYYIHNQVLPAVLRILEAFGYKEKDLEYQRMKQTGLGAWLKMGKK

SEQ ID NO: 1434 - protein, 773 aa, unidentified
  REGION 1..773: note = Description of Unknown: Synthetic polypeptide
MILDTDYITENGKPVIRIFKKEKGEFKIEYDRNFEPYIYALLEDDESIEDIKKITGERHGKKVRIIRVEKVKKKFLGEPIEVWKLVFEHPQDYPAIRDAIRSHPAVREIFEYDIPFAKRYLIDKGLVPMEGGEELKLLAFAIATFYHEGDEFAEGEILMISYADESGAKVITWKKIDLPYVEVVSTEREAIKRFLQVLREKDPDVLLTYNGDNFDFAYIKKRCEKLGLKFTIGRDGSEPKIQRMGDRFAVEVKGRIHLDLAPVVRHTIRLPTYTLEAVYEAVFGKKKEKVYAEEIAEAWKSEEGLKRVAQYSMEDARATYELGREFFPMEVELAKLIGQSVWDVSRSSTGNLVEWYLLRVAYERNELAPNKPGGEEYQRRMRSSYIGGYVKEPEKGLWESIAYLDFRSSAGSIIVTHNVSPDTLEKECKNYDVAPIVGYRFCKDFKGFIPSILEDLIETRQKVKRKMKATIDPIEKKMLDYRQRALKILANSYYGYQGYPKARWYSKECAESVTAWGRHYIETTIKEAEKFGFKVLYADTDGFFATIPNEKPETIKSKAKKFLKHINEKLPGMLELEYEGFYLRGFFVTKKKYALIDEDGHITTDGLEVVRRDWSEIAKETQAKVLEVILREGSIEKAAGIVKKVVEDLANYRVPVEKLIIHEQITRELKRYKATGPHVAIAKRLQARGIKVKPGTIISYVVLKGSKKISDRVILFDEYDSSRHKYDPDYYIHNQVLPAVLRILEAFGYKEKDLEYQRMKQTGLGAWLKMGKK

SEQ ID NO: 1435 - protein, 773 aa, unidentified
  REGION 1..773: note = Description of Unknown: Synthetic polypeptide
MILDTDYITENGKPVIRIFKKEKGEFKIEYDRNFEPYIYALLEDDESIEDIKKITGERHGKKVRIIRVEKVKKNFLGEPIEVWKLVFEHPQDYPAIRDAIRSHPAVREIFEYDIPFAKRYLIDKGLVPMEGGEELKLLAFAIATFYHEGDEFAEGEILMISYADESGAKVITWKKIDLPYVEVVSTEREAIKRFLQVLREKDPDVLLTYNGDNFDFAYIKKRCEKLGLKFTIGRDGSEPKIQRMGDRFAVEVKGRIHLDLAPVVRHTIRLPTYTLEAVYEAVFGKKKEKVYAEEIAEAWKSEEGLKRVAQYSMEDARATYELGREFFPMEVELAKLIGQSVWDVSRSSTGNLVEWYLLRVAYERNELAPNKPGGEEYQRRMRSSYIGGYVKEPEKGLWESIAYLDFRSSAGSIIVTHNVSPDTLEKECKNYDVAPIVGYRFCKDFKGFIPSILEDLIETRQKVKRKMKATIDPIEKKMLDYRQRALKILANSYYGYQGYPKARWYSKECAESVTAWGRHYIETTIKEAEKFGFKVLYADTDGFFATIPNEKPETIKSKAKKFLKHINEKLPGMLELEYEGFYLRGFFVTKKKYALIDEEGHITTRGLEVVRRDWSEIAKETQAKVLEVILREGSIEKAAGIVKKVVEDLANYRVPVEKLIIHEQITRELKRYKATGPHVAIAKRLQARGIKVKPGTIISYVVLKGSKKISDRVILFDEYDSSRHKYDPDYYIHNQVLPAVLRILEAFGYKEKDLEYQRMKQTGLGAWLKMGKK

SEQ ID NO: 1436 - protein, 773 aa, unidentified
  REGION 1..773: note = Description of Unknown: Synthetic polypeptide
MILDTDYITENGKPVIRIFKKEKGEFKIEYDRNFEPYIYALLEDDESIEDIKKITGERHGKKVRIIRVEKVKKKFLGEPIEVWKLVFEHPQDYPAIRDAIRSHPAVREIFEYDIPFAKRYLIDKGLVPMEGGEELKLLAFAIATFYHEGDEFAEGEILMISYADESGAKVITWKKIDLPYVEVVSTEREAIKRFLQVLREKDPDVLLTYNGDNFDFAYIKKRCEKLGLQFTIGRDGSEPKIQRMGDRFAVEVKGRIHLDLAPVVRHTIRLPTYTLEAVYEAVFGKKKEKVYAEEIAEAWKSEEGLKRVAQYSMEDARATYELGREFFPMEVELAKLIGQSVWDVSRSSTGNLVEWYLLRVAYERNELAPNKPGGEEYQRRMRSSYIGGYVKEPEKGLWESIAYLDFRSSAGSIIVTHNVSPDTLEKECKNYDVAPIVGYRFCKDFKGFIPSILEDLIETRQKVKRKMKATIDPIEKKMLDYRQRALKILANSYYGYQGYPKARWYSKECAESVTAWGRHYIETTIKEAEKFGFKVLYADTDGFFATIPNEKPETIKSKAKKFLKHINEKLPGMLELEYEGFYLRGFFVTKKKYALIDEDGHITTRGLEVVRRDWSEIAKETQAKVLEVILREGSIEKAAGIVKKVVEDLANYRVPVEKLIIHEQITRELKRYKATGPHVAIAKRLQARGIKVKPGTIISYVVLKGSKKISDRVILFDEYDSSRHKYDPDYYIHNQVLPAVLRILEAFGYKEKDLEYQRMKQTGLGAWLKMGKK

SEQ ID NO: 1437 - protein, 773 aa, unidentified
  REGION 1..773: note = Description of Unknown: Synthetic polypeptide
MILDTDYITENGKPVIRIFKKEKGEFKIEYDRNFEPYIYALLEDDESIEDIKKITGERHGKKVRIIRVEKVKKNFLGEPIEVWKLVFEHPQDYPAIRDAIRSHPAVREIFEYDIPFAKRYLIDKGLVPMEGGEELKLLAFAIATFYHEGDEFAEGEILMISYADESGAKVITWKKIDLPYVEVVSTEREAIKRFLQVLREKDPDVLLTYNGDNFDFAYIKKRCEKLGLKFTIGRDGSEPKIQRMGDRFAVEVKGRIHLDLAPVVRHTIRLPTYTLEAVYEAVFGKKKEKVYAEEIAEAWKSEEGLKRVAQYSMEDARATYELGREFFPMEVELAKLIGQSVWDVSRSSTGNLVEWYLLRVAYERNELAPNKPGGEEYQRRMRSSYAGGYVKEPEKGLWESIAYLDFRSSAGSIIVTHNVSPDTLEKECKNYDVAPIVGYRFCKDFKGFIPSILEDLIETRQKVKRKMKATIDPIEKKMLDYRQRALKILANSYYGYQGYPKARWYSKECAESVTAWGRHYIETTIKEAEKFGFKVLYADTDGFFATIPNEKPETIKSKAKKFLKHINEKLPGMLELEYEGFYLRGFFVTKKKYALIDEDGHITTRGLEVVRRDWSEIAKETQAKVLEVILREGSIEKAAGIVKKVVEDLANYRVPVEKLIIHEQITRELKRYKATGPHVAIAKRLQARGIKVKPGTIISYVVLKGSKKISDRVILFDEYDSSRHKYDPDYYIHNQVLPAVLRILEAFGYKEKDLEYQRMKQTGLGAWLKMGKK

SEQ ID NO: 1438 - protein, 774 aa, unidentified
  REGION 1..774: note = Description of Unknown: Synthetic polypeptide
MILDTDYITENGKPVIRIFKKEKGEFKIEYDRNFEPYIYALLEDDESIEDIKKITGERHGKKVRIIRVEKVKKKFLGEPIEVWKLVFEHPQDYPAIRDAIRSHPAVREIFEYDIPFAKRYLIDKGLVPMEGGEELKLLAFAIATFYHEGDEFAEGEILMISYADESGAKVITWKKIDLPYVEVVSTEREAIKRFLQVLREKDPDVLLTYNGDNFDFAYIKKRCEKLGLKFTIGRDGSEPKIQRMGDRFAVEVKGRIHLDLAPVVRHTIRLPTYTLEAVYEAVFGKKKEKVYAEEIAEAWKSEEGLKRVAQYSMEDARATYELGREFFPMEVELAKLIGQSVWDVSRSSTGNLVEWYLLRVAYERNELAPNKPGGEEYQRRMRSSYIGGYVKEPEKGLWESIAYLDFRSSAGSIIVTHNVSPDTLEKEGCKNYDVAPIVGYRFCKDFKGFIPSILEDLIETRQKVKRKMKATIDPIEKKMLDYRQRALKILANSYYGYQGYPKARWYSKECAESVTAWGRHYIETTIKEAEKFGFKVLYADTDGFFATIPNEKPETIKSKAKKFLKHINEKLPGMLELEYEGFYLRGFFVTKKKYALIDEDGHITTRGLEVVRRDWSEIAKETQAKVLEVILREGSIEKAAGIVKKVVEDLANYRVPVEKLIIHEQITRELKRYKATGPHVAIAKRLQARGIKVKPGTIISYVVLKGSKKISDRVILFDEYDSSRHKYDPDYYIHNQVLPAVLRILEAFGYKEKDLEYQRMKQTGLGAWLKMGKK

SEQ ID NO: 1439 - protein, 773 aa, unidentified
  REGION 1..773: note = Description of Unknown: Synthetic polypeptide
MILDTDYITENGKPVIRIFKKEKGEFKIEYDRNFEPYIYALLEDDESIEDIKKITGERHGKKVRIIRVEKVKKNFLGEPIEVWKLVFEHPQDYPAIRDAIRSHPAVREIFEYDIPFAKRYLIDKGLVPMEGGEELKLLAFAIATFYHEGDEFAEGEILMISYADESGAKVITWKKIDLPYVEVVSTEREAIKRFLQVLREKDPDVLLTYNGDNFDFAYIKKRCEKLGLKFTIGRDGSEPKIQRMGDRFAVEVKGRIHLDLAPVVRHTIRLPTYTLEAVYEAVFGKKKEKVYAEEIAEAWKSEEGLKRVAQYSMEDARATYELGREFFPMEVELAKLIGQSVWDVSRSSTGNLVEWYLLRVAYERNELAPNKPGGEEYQRRMRSSYIGGYVKEPEKGLWESIAYLDFRSSAGSIIVTHNVSPDTLEKECKNYDVAPIVGYRFCKDFKGFIPSILEDLIETRQKVKRKMKATIDPIEKKMLDYRQRALKILANSYYGYQGYPKARWYSKECAESVTAWGRHYIETTIKEAEKFGFKVLYADTDGFFATIPNEKPETIKSKAKKFLKHINEKLPGMLELEYEGFYLRGFFVTKKKYALIDEDGHITTRGLEVVRRDWSEIAKETQAKVLEVILREGSIEKAAGIVKKVVEDLANYEVPVEKLIIHEQITRELKRYKATGPHVAIAKRLQARGIKVKPGTIISYVVLKGSKKISDRVILFDEYDSSRHKYDPDYYIHNQVLPAVLRILEAFGYKEKDLEYQRMKQTGLGAWLKMGKK

SEQ ID NO: 1440 - protein, 773 aa, unidentified
  REGION 1..773: note = Description of Unknown: Synthetic polypeptide
MILDTDYITENGKPVIRIFKKEKGEFKIEYDRNFEPYIYALLEDDESIEDIKKITGERHGKKVRIIRVEKVKKKFLGEPIEVWKLVFEHPQDYPAIRDAIRSHPAVREIFEYDIPFAKRYLIDKGLVPMEGGEELKLLAFAIATFYHEGDEFAEGEILMISYADESGAKVITWKKIDLPYVEVVSTEREAIKRFLQVLREKDPDVLLTYNGDNFAFAYIKKRCEKLGLKFTIGRDGSEPKIQRMGDRFAVEVKGRIHLDLAPVVRHTIRLPTYTLEAVYEAVFGKKKEKVYAEEIAEAWKSEEGLKRVAQYSMEDARATYELGREFFPMEVELAKLIGQSVWDVSRSSTGNLVEWYLLRVAYERNELAPNKPGGEEYQRRMRSSYIGGYVKEPEKGLWESIAYLDFRSSAGSIIVTHNVSPDTLEKECKNYDVAPIVGYRFCKDFKGFIPSILEDLIETRQKVKRKMKATIDPIEKKMLDYRQRALKILANSYYGYQGYPKARWYSKECAESVTAWGRHYIETTIKEAEKFGFKVLYADTDGFFATIPNEKPETIKSKAKKFLKHINEKLPGMLELEYEGFYLRGFFVTKKKYALIDEDGHITTRGLEVVRRDWSEIAKETQAKVLEVILREGSIEKAAGIVKKVVEDLANYRVPVEKLIIHEQITRELKRYKATGPHVAIAKRLQARGIKVKPGTIISYVVLKGSKKISDRVILFDEYDSSRHKYDPDYYIHNQVLPAVLRILEAFGYKEKDLEYQRMKQTGLGAWLKMGKK

SEQ ID NO: 1441 - protein, 773 aa, unidentified
  REGION 1..773: note = Description of Unknown: Synthetic polypeptide
MILDTDYITENGKPVIRIFKKEKGEFKIEYDRNFEPYIYALLEDDESIEDIKKITGERHGKKVRIIRVEKVKKNFLGEPIEVWKLVFEHPQDYPAIRDAIRSHPAVREIFEYDIPFAKRYLIDKGLVPMEGGEELKLLAFAIATFYHEGDEFAEGEILMISYADESGAKVITWKKIDLPYVEVVSTEREAIKRFLQVLREKDPDVLLTYNGDNFDFAYIKKRCEKLGLKFTIGRDGSEPKIQRMGDRFAVEVKGRIHLDLAPVVRHTIRLPTYTLEAVYEAVFGKKKEKVYAEEIAEAWKSEEGLKRVAQYSMEDARATYELGREFFPMEVELAKLIGQSVWDVSRSSTGNLVEWYLLRVAYERNELAPNKPGGEEYARRMRSSYIGGYVKEPEKGLWESIAYLDFRSSAGSIIVTHNVSPDTLEKECKNYDVAPIVGYRFCKDFKGFIPSILEDLIETRQKVKRKMKATIDPIEKKMLDYRQRALKILANSYYGYQGYPKARWYSKECAESVTAWGRHYIETTIKEAEKFGFKVLYADTDGFFATIPNEKPETIKSKAKKFLKHINEKLPGMLELEYEGFYLRGFFVTKKKYALIDEDGHITTRGLEVVRRDWSEIAKETQAKVLEVILREGSIEKAAGIVKKVVEDLANYRVPVEKLIIHEQITRELKRYKATGPHVAIAKRLQARGIKVKPGTIISYVVLKGSKKISDRVILFDEYDSSRHKYDPDYYIHNQVLPAVLRILEAFGYKEKDLEYQRMKQTGLGAWLKMGKK

SEQ ID NO: 1442 - protein, 772 aa, unidentified
  REGION 1..772: note = Description of Unknown: Synthetic polypeptide
MILDTDYITENGKPVIRIFKKEKGEFKIEYDRNFEPYIYALLEDDESIEDIKKITGERHGKKVRIIRVEKVKKKFLGEPIEVWKLVFEHPQDYPAIRDAIRSHPAVREIFEYDIPFAKRYLIDKGLVPMEGGEELKLLAFAIATFYHEGDEFAEGEILMISYADESGAKVITWKKIDLPYVEVVSTEREAIKRFLQVLREKDPDVLLTYNGDNFDFAYIKKRCEKLGLKFTIGRDGSEPKIQRMGDRFAVEVKGRIHLDLAPVVRHTIRLPTYTLEAVYEAVFGKKKEKVYAEEIAEAWKSEEGLKRVAQYSMEDARATYELGREFFPMEVELAKLIGQSVWDVSRSSTGNLVEWYLLRVAYERNELAPNKPDERELARRRGGYAGGYVKEPEKGLWESIAYLDFRSSAGSIIVTHNVSPDTLEKECKNYDVAPIVGYRFCKDFKGFIPSILEDLIETRQKVKRKMKATIDPIEKKMLDYRQRALKILANSYYGYQGYPKARWYSKECAESVTAWGRHYIETTIKEAEKFGFKVLYADTDGFFATIPNEKPETIKSKAKKFLKHINEKLPGMLELEYEGFYLRGFFVTKKKYALIDEDGHITTRGLEVVRRDWSEIAKETQAKVLEVILREGSIEKAAGIVKKVVEDLANYRVPVEKLIIHEQITRELKRYKATGPHVAIAKRLQARGIKVKPGTIISYVVLKGSKKISDRVILFDEYDSSRHKYDPDYYIHNQVLPAVLRILEAFGYKEKDLEYQRMKQTGLGAWLKMGKK

SEQ ID NO: 1443 - protein, 773 aa, unidentified
  REGION 1..773: note = Description of Unknown: Synthetic polypeptide
MILDTDYITENGKPVIRIFKKEKGEFKIEYDRNFEPYIYALLEDDESIEDIKKITGERHGKKVRIIRVEKVKKKFLGEPIEVWKLVFEHPQDYPAIRDAIRSHPAVREIFEYDIPFAKRYLIDKGLVPMEGGEELKLLAFAIATFYHEGDEFAEGEILMISYADESGAKVITWKKIDLPYVEVVSTEREAIKRFLQVLREKDPDVLLTYNGDNFQFAYIKKRCEKLGLKFTIGRDGSEPKIQRMGDRFAVEVKGRIHLDLAPVVRHTIRLPTYTLEAVYEAVFGKKKEKVYAEEIAEAWKSEEGLKRVAQYSMEDARATYELGREFFPMEVELAKLIGQSVWDVSRSSTGNLVEWYLLRVAYERNELAPNKPGGEEYQRRMRSSYIGGYVKEPEKGLWESIAYLDFRSSAGSIIVTHNVSPDTLEKECKNYDVAPIVGYRFCKDFKGFIPSILEDLIETRQKVKRKMKATIDPIEKKMLDYRQRALKILANSYYGYQGYPKARWYSKECAESVTAWGRHYIETTIKEAEKFGFKVLYADTDGFFATIPNEKPETIKSKAKKFLKHINEKLPGMLELEYEGFYLRGFFVTKKKYALIDEDGHITTRGLEVVRRDWSEIAKETQAKVLEVILREGSIEKAAGIVKKVVEDLANYRVPVEKLIIHEQITRELKRYKATGPHVAIAKRLQARGIKVKPGTIISYVVLKGSKKISDRVILFDEYDSSRHKYDPDYYIHNQVLPAVLRILEAFGYKEKDLEYQRMKQTGLGAWLKMGKK

SEQ ID NO: 1444 - protein, 773 aa, unidentified
  REGION 1..773: note = Description of Unknown: Synthetic polypeptide
MILDTDYITENGKPVIRIFKKEKGEFKIEYDRNFEPYIYALLEDDESIEDIKKITGERHGKKVRIIRVEKVKKNFLGEPIEVWKLVFEHPQDYPAIRDAIRSHPAVREIFEYDIPFAKRYLIDKGLVPMEGGEELKLLAFAIATFYHEGDEFAEGEILMISYADESGAKVITWKKIDLPYVEVVSTEREAIKRFLQVLREKDPDVLLTYNGDNFDFAYIKKRCEKLGLKFTIGRDGSEPKIQRMGDRFAVEVKGRIHLDLAPVVRHTIRLPTYTLEAVYEAVFGKKKEKVYAEEIAEAWKSEEGLKRVAQYSMEDARATYELGREFFPMEVELAKLIGQSVWDVSRSSTGNLVEWYLLRVAYERNELAPNKPGGEEYQRRMRSSYIGGFVKEPEKGLWESIAYLDFRSSAGSIIVTHNVSPDTLEKECKNYDVAPIVGYRFCKDFKGFIPSILEDLIETRQKVKRKMKATIDPIEKKMLDYRQRALKILANSYYGYQGYPKARWYSKECAESVTAWGRHYIETTIKEAEKFGFKVLYADTDGFFATIPNEKPETIKSKAKKFLKHINEKLPGMLELEYEGFYLRGFFVTKKKYALIDEDGHITTRGLEVVRRDWSEIAKETQAKVLEVILREGSIEKAAGIVKKVVEDLANYRVPVEKLIIHEQITRELKRYKATGPHVAIAKRLQARGIKVKPGTIISYVVLKGSKKISDRVILFDEYDSSRHKYDPDYYIHNQVLPAVLRILEAFGYKEKDLEYQRMKQTGLGAWLKMGKK

SEQ ID NO: 1445 - protein, 773 aa, unidentified
  REGION 1..773: note = Description of Unknown: Synthetic polypeptide
MILDTDYITENGKPVIRIFKKEKGEFKIEYDRNFEPYIYALLEDDESIEDIKKITGERHGKKVRIIRVEKVKKKFLGEPIEVWKLVFEHPQDYPAIRDAIRSHPAVREIFEYDIPFAKRYLIDKGLVPMEGGEELKLLAFAIATFYEEGDEFAEGEILMISYADESGAKVITWKKIDLPYVEVVSTEREAIKRFLQVLREKDPDVLLTYNGDNFDFAYIKKRCEKLGLKFTIGRDGSEPKIQRMGDRFAVEVKGRIHLDLAPVVRHTIRLPTYTLEAVYEAVFGKKKEKVYAEEIAEAWKSEEGLKRVAQYSMEDARATYELGREFFPMEVELAKLIGQSVWDVSRSSTGNLVEWYLLRVAYERNELAPNKPGGEEYQRRMRSSYIGGYVKEPEKGLWESIAYLDFRSSAGSIIVTHNVSPDTLEKECKNYDVAPIVGYRFCKDFKGFIPSILEDLIETRQKVKRKMKATIDPIEKKMLDYRQRALKILANSYYGYQGYPKARWYSKECAESVTAWGRHYIETTIKEAEKFGFKVLYADTDGFFATIPNEKPETIKSKAKKFLKHINEKLPGMLELEYEGFYLRGFFVTKKKYALIDEDGHITTRGLEVVRRDWSEIAKETQAKVLEVILREGSIEKAAGIVKKVVEDLANYRVPVEKLIIHEQITRELKRYKATGPHVAIAKRLQARGIKVKPGTIISYVVLKGSKKISDRVILFDEYDSSRHKYDPDYYIHNQVLPAVLRILEAFGYKEKDLEYQRMKQTGLGAWLKMGKK

SEQ ID NO: 1446 - protein, 773 aa, unidentified
  REGION 1..773: note = Description of Unknown: Synthetic polypeptide
MILDTDYITENGKPVIRIFKKEKGEFKIEYDRNFEPYIYALLEDDESIEDIKKITGERHGKKVRIIRVEKVKKNFLGEPIEVWKLVFEHPQDYPAIRDAIRSHPAVREIFEYDIPFAKRYLIDKGLVPMEGGEELKLLAFAIATFYHEGDEFAEGEILMISYADESGAKVITWKKIDLPYVEVVSTEREAIKRFLQVLREKDPDVLLTYNGDNFDFAYIKKRCEKLGLKFTIGRDGSEPKIQRMGDRFAVEVKGRIHLDLAPVVRHTIRLPTYTLEAVYEAVFGKKKEKVYAEEIAEAWKSEEGLKRVAQYSMEDARATYELGREFFPMEVELAKLIGQSVWDVSRSSTGNLVEWYLLRVAYERNELAPNKPGGEEYQRRMRSSYIGGYVKEPEKGLWESIAYLDFRSSAGSIIVTHNVSPDTLEKECKNYDVAPIVGYRFCKDFKGFIPSILEDLIETRQKVKRKMKATIDPIEKKMLDYRQRALKILANSYYGYQGYPKARWYSKECAESVTAWGRHYIETTIKEAEKFGFKVLYADTDGFFATIPNEKPETIKSKAKKFLKHINEKLPGMLELEYEGFYLRGFFVTKKKYALIDEDGHITTRGLEVVRRDWSEIAKETQAKVLEVILREGSIEKAAGIVKKVVEDLANYRVPVEKLIIHEQITRELKRYKATGPHVAIAKRLQARGIKVKPGTIISYVVLKGSKKISDRVILFDEYDSSRHKYDADYYIHNQVLPAVLRILEAFGYKEKDLEYQRMKQTGLGAWLKMGKK

SEQ ID NO: 1447 - protein, 773 aa, unidentified
  REGION 1..773: note = Description of Unknown: Synthetic polypeptide
MILDTDYITANGKPVIRIFKKEKGEFKIEYDRNFEPYIYALLEDDESIEDIKKITGERHGKKVRIIRVEKVKKKFLGEPIEVWKLVFEHPQDYPAIRDAIRSHPAVREIFEYDIPFAKRYLIDKGLVPMEGGEELKLLAFAIATFYHEGDEFAEGEILMISYADESGAKVITWKKIDLPYVEVVSTEREAIKRFLQVLREKDPDVLLTYNGDNFDFAYIKKRCEKLGLKFTIGRDGSEPKIQRMGDRFAVEVKGRIHLDLAPVVRHTIRLPTYTLEAVYEAVFGKKKEKVYAEEIAEAWKSEEGLKRVAQYSMEDARATYELGREFFPMEVELAKLIGQSVWDVSRSSTGNLVEWYLLRVAYERNELAPNKPGGEEYQRRMRSSYIGGYVKEPEKGLWESIAYLDFRSSAGSIIVTHNVSPDTLEKECKNYDVAPIVGYRFCKDFKGFIPSILEDLIETRQKVKRKMKATIDPIEKKMLDYRQRALKILANSYYGYQGYPKARWYSKECAESVTAWGRHYIETTIKEAEKFGFKVLYADTDGFFATIPNEKPETIKSKAKKFLKHINEKLPGMLELEYEGFYLRGFFVTKKKYALIDEDGHITTRGLEVVRRDWSEIAKETQAKVLEVILREGSIEKAAGIVKKVVEDLANYRVPVEKLIIHEQITRELKRYKATGPHVAIAKRLQARGIKVKPGTIISYVVLKGSKKISDRVILFDEYDSSRHKYDPDYYIHNQVLPAVLRILEAFGYKEKDLEYQRMKQTGLGAWLKMGKK

SEQ ID NO: 1448 - protein, 773 aa, unidentified
  REGION 1..773: note = Description of Unknown: Synthetic polypeptide
MILDTDYITENGKPVIRIFKKEKGEFKIEYDRNFEPYIYALLEDDESIEDIKKITGERHGKKVRIIRVEKVKKNFLGEPIEVWKLVFEHPQDYPAIRDAIRSHPAVREIFEYDIPFAKRYLIDKGLVPMEGGEELKLLAFNIATFYHEGDEFAEGEILMISYADESGAKVITWKKIDLPYVEVVSTEREAIKRFLQVLREKDPDVLLTYNGDNFDFAYIKKRCEKLGLKFTIGRDGSEPKIQRMGDRFAVEVKGRIHLDLAPVVRHTIRLPTYTLEAVYEAVFGKKKEKVYAEEIAEAWKSEEGLKRVAQYSMEDARATYELGREFFPMEVELAKLIGQSVWDVSRSSTGNLVEWYLLRVAYERNELAPNKPGGEEYQRRMRSSYIGGYVKEPEKGLWESIAYLDFRSSAGSIIVTHNVSPDTLEKECKNYDVAPIVGYRFCKDFKGFIPSILEDLIETRQKVKRKMKATIDPIEKKMLDYRQRALKILANSYYGYQGYPKARWYSKECAESVTAWGRHYIETTIKEAEKFGFKVLYADTDGFFATIPNEKPETIKSKAKKFLKHINEKLPGMLELEYEGFYLRGFFVTKKKYALIDEDGHITTRGLEVVRRDWSEIAKETQAKVLEVILREGDIEKAAGIVKKVVEDLANYRVPVEKLIIHEQITRELKRYKATGPHVAIAKRLQARGIKVKPGTIISYVVLKGSKKISDRVILFDEYDSSRHKYDPDYYIHNQVLPAVLRILEAFGYKEKDLEYQRMKQTGLGAWLKMGKK

SEQ ID NO: 1449 - protein, 773 aa, unidentified
  REGION 1..773: note = Description of Unknown: Synthetic polypeptide
MILDTDYITENGKPVIRIFKKEKGEFKIEYDRNFEPYIYALLEDDESIEDIKKITGERHGKTVRIIRVEKVKKNFLGEPIEVWKLVFEHPQDYPAIRDAIRSHPAVREIFEYDIPFAKRYLIDKGLVPMEGGEELKLLAFAIATFYHEGDEFAEGEILMISYADESGAKVITWKKIDLPYVEVVSTEREAIKRFLQVLREKDPDVLLTYNGDNFDFAYIKKRCEKLGLKFTIGRDGSEPKIQRMGDRFAVEVKGRIHLDLAPVVRHTIRLPTYTLEAVYEAVFGKKKEKVYAEEIAEAWKSEEGLKRVAQYSMEDARATYELGREFFPMEVELAKLIGQSVWDVSRSSTGNLVEWYLLRVAYERNELAPNKPGGEEYQRRMRSSYIGGYVKEPEKGLWESIAYLDFRSSAGSIIVTHNVSPDTLEKECKNYDVAPIVGYRFCKDFKGFIPSILEDLIETRQKVKRKMKATIDPIEKKMLDYRQRALKILANSYYGYQGYPKARWYSKECAESVTAWGRHYIETTIKEAEKFGFKVLYADTDGFFATIPNEKPETIKSKAKKFLKHINEKLPGMLELEYEGFYLRGFFVTKKKYALIDEDGHITTRGLEVVRRDWSEIAKETQAKVLEVILREGSIEKAAGIVKKVVEDLANYRVPVEKLIIHEQITRELKRYKATGPHVAIAKRLQARGIKVKPGTIISYVVLKGSKKISDRVILFDEYDSSRHKYDPDYYIHNQVLPAVLRILEAFGYKEKDLEYQRMKQTGLGAWLKMGKK

SEQ ID NO: 1450 - protein, 773 aa, unidentified
  REGION 1..773: note = Description of Unknown: Synthetic polypeptide
MILDTDYITENGKPVIRIFKKEKGEFKIEYDRNFEPYIYALLEDDESIEDIKKITGERHGKKVRIIRVEKVKKKFLGEPIEVWKLVFEHPQDYPAIRDAIRSHPAVREIFEYDIPFAKRYLIDKGLVPMEGGEELKLLAFAIATFYHEGDEFAEGEILMISYADESGAKVITWKKIDLPYVEVVSTEREAIKRFLQVLREKDPDVLLTYNGDNFDFAYIQKRCEKLGLKFTIGRDGSEPKIQRMGDRFAVEVKGRIHLDLAPVVRHTIRLPTYTLEAVYEAVFGKKKEKVYAEEIAEAWKSEEGLKRVAQYSMEDARATYELGREFFPMEVELAKLIGQSVWDVSRSSTGNLVEWYLLRVAYERNELAPNKPGGEEYQRRMRSSYIGGYVKEPEKGLWESIAYLDFRSSAGSIIVTHNVSPDTLEKECKNYDVAPIVGYRFCKDFKGFIPSILEDLIETRQKVKRKMKATIDPIEKKMLDYRQRALKILANSYYGYQGYPKARWYSKECAESVTAWGRHYIETTIKEAEKFGFKVLYADTDGFFATIPNEKPETIKSKAKKFLKHINEKLPGMLELEYEGFYLRGFFVTKKKYALIDEDGHITTRGLEVVRRDWSEIAKETQAKVLEVILREGSIEKAAGIVKKVVEDLANYRVPVEKLIIHEQITRELKRYKATGPHVAIAKRLQARGIKVKPGTIISYVVLKGSKKISDRVILFDEYDSSRHKYDPDYYIHNQVLPAVLRILEAFGYKEKDLEYQRMKQTGLGAWLKMGKK

SEQ ID NO: 1451 - protein, 773 aa, unidentified
  REGION 1..773: note = Description of Unknown: Synthetic polypeptide
MILDTDYITENGKPVIRIFKKEKGEFKIEYDRNFEPYIYALLEDDESIEDIKKITGERHGKKVRIIRVEKVKKNFLGEPIEVWKLYFEHPQDYPAIRDAIRSHPAVREIFEYDIPFAKRYLIDKGLVPMEGGEELKLLAFAIATFYHEGDEFAEGEILMISYADESGAKVITWKKIDLPYVEVVSTEREAIKRFLQVLREKDPDVLLTYNGDNFDFAYIKKRCEKLGLKFTIGRDGSEPKIQRMGDRFAVEVKGRIHLDLAPVVRHTIRLPTYTLEAVYEAVFGKKKEKVYAEEIAEAWKSEEGLKRVAQYSMEDARATYELGREFFPMEVELAKLIGQSVWDVSRSSTGNLVEWYLLRVAYERNELAPNKPGGEEYQRRMRSSYIGGYVKEPEKGLWESIAYLDFRSSAGSIIVTHNVSPDTLEKECKNYDVAPIVGYRFCKDFKGFIPSILEDLIETRQKVKRKMKATIDPIEKKMLDYRQRALKILANSYYGYQGYPKARWYSKECAESVTAWGRHYIETTIKEAEKFGFKVLYADTDGFFATIPNEKPETIKSKAKKFLKHINEKLPGMLELEYEGFYLRGFFVTKKKYALIDEDGHITTRGLEVVRRDWSEIAKETQAKVLEVILREGSIEKAAGIVKKVVEDLANYRVPVEKLIIHEQITRELKRYKATGPHVAIAKRLQARGIKVKPGTIISYVVLKGSKKISDRVILFDEYDSSRHKYDPDYYIHNQVLPAVLRILEAFGYKEKDLEYQRMKQTGLGAWLKMGKK

SEQ ID NO: 1452 - protein, 773 aa, unidentified
  REGION 1..773: note = Description of Unknown: Synthetic polypeptide
MILDTDYITENGKPVIRIFKKEKGEFKIEYDRNFEPYIYALLEDDESIEDIKKITGERHGKKVRIIRVEKVKKNFLGEPIEVWKLVFEHPQDYPAIRDAIRSHPAVREIFEYDIPFAKRYLIDKGLVPMEGGEELKLLAFNIATFYHEGDEFAEGEILMISYADESGAKVITWKKIDLPYVEVVSTEREAIKRFLQVLREKDPDVLLTYNGDNFPFAYIKKRCEKLGLKFTIGRDGSEPKIQRMGDRFAVEVKGRIHLDLAPVVRHTIRLPTYTLEAVYEAVFGKKKEKVYAEEIAEAWKSEEGLKRVAQYSMEDARATYELGREFFPMEVELAKLIGQSVWDVSRSSTGNLVEWYLLRVAYERNELAPNKPGGEEYQRRMRSSYIGGYVKEPEKGLWESIAYLDFRSSAGSIIVTHNVSPDTLEKECKNYDVAPIVGYRFCKDFKGFIPSILEDLIETRQKVKRKMKATIDPIEKKMLDYRQRALKILANSYYGYQGYPKARWYSKECAESVTAWGRHYIETTIKEAEKFGFKVLYADTDGFFATIPNEKPETIKSKAKKFLKHINEKLPGMLELEYEGFYLRGFFVTKKKYALIDEDGHITTRGLEVVRRDWSEIAKETQAKVLEVILREGSIEKAAGIVKKVVEDLANYRVPVEKLIIHEQITRELKRYKATGPHVAIAKRLQARGIKVKPGTIISYVVLKGSKKISDRVILFDEYDSSRHKYDPDYYIHNQVLPAVLRILEAFGYKEKDLEYQRMKQTGLGAWLKMGKK

SEQ ID NO: 1453 - protein, 773 aa, unidentified
  REGION 1..773: note = Description of Unknown: Synthetic polypeptide
MILDTDYITENGKPVIRIFKKEKGEFKIEYDRNFEPYIYALLEDDESIEDIKKITGERHGKKVRIIRVEKVKKKFLGEPIEVWKLVFEHPQDYPAIRDAIRSHPAVREIFEYDIPFAKRYLIDKGLVPMEGGEELKLLAFAIATFYHEGDEFAEGEILMISYADESGAKVITWKKIDLPYVEVVSTEREAIKRFLQVLREKDPDVLLTYNGDNFDFAYINKRCEKLGLKFTIGRDGSEPKIQRMGDRFAVEVKGRIHLDLAPVVRHTIRLPTYTLEAVYEAVFGKKKEKVYAEEIAEAWKSEEGLKRVAQYSMEDARATYELGREFFPMEVELAKLIGQSVWDVSRSSTGNLVEWYLLRVAYERNELAPNKPGGEEYQRRMRSSYIGGYVKEPEKGLWESIAYLDFRSSAGSIIVTHNVSPDTLEKECKNYDVAPIVGYRFCKDFKGFIPSILEDLIETRQKVKRKMKATIDPIEKKMLDYRQRALKILANSYYGYQGYPKARWYSKECAESVTAWGRHYIETTIKEAEKFGFKVLYADTDGFFATIPNEKPETIKSKAKKFLKHINEKLPGMLELEYEGFYLRGFFVTKKKYALIDEDGHITTRGLEVVRRDWSEIAKETQAKVLEVILREGSIEKAAGIVKKVVEDLANYRVPVEKLIIHEQITRELKRYKATGPHVAIAKRLQARGIKVKPGTIISYVVLKGSKKISDRVILFDEYDSSRHKYDPDYYIHNQVLPAVLRILEAFGYKEKDLEYQRMKQTGLGAWLKMGKK

SEQ ID NO: 1454 - protein, 773 aa, unidentified
  REGION 1..773: note = Description of Unknown: Synthetic polypeptide
MILDTDYITENGKPVIRIFKKEKGEFKIEYDRNFEPYIYALLEDDESIEDIKKITGERHGKKVRIIRVEKVKKNFLGEPIEVWKLVFEHPQDYPAIRDAIRSHPAVREIFEYDIPFAKRYLIDKGLVPMEGGEELKLLAFAIATFYHEGDEFAEGEILMISYADEEGAKVITWKKIDLPYVEVVSTEREAIKRFLQVLREKDPDVLLTYNGDNFDFAYIKKRCEKLGLKFTIGRDGSEPKIQRMGDRFAVEVKGRIHLDLAPVVRHTIRLPTYTLEAVYEAVFGKKKEKVYAEEIAEAWKSEEGLKRVAQYSMEDARATYELGREFFPMEVELAKLIGQSVWDVSRSSTGNLVEWYLLRVAYERNELAPNKPGGEEYQRRMRSSYIGGYVKEPEKGLWESIAYLDFRSSAGSIIVTHNVSPDTLEKECKNYDVAPIVGYRFCKDFKGFIPSILEDLIETRQKVKRKMKATIDPIEKKMLDYRQRALKILANSYYGYQGYPKARWYSKECAESVTAWGRHYIETTIKEAEKFGFKVLYADTDGFFATIPNEKPETIKSKAKKFLKHINEKLPGMLELEYEGFYLRGFFVTKKKYALIDEDGHITTRGLEVVRRDWSEIAKETQAKVLEVILREGSIEKAAGIVKKVVEDLANYRVPVEKLIIHEQITRELKRYKATGPHVAIAKRLQARGIKVKPGTIISYVVLKGSKKISDRVILFDEYDSSRHKYDPDYYIHNQVLPAVLRILEAFGYKEKDLEYQRMKQTGLGAWLKMGKK

SEQ ID NO: 1455 - protein, 773 aa, unidentified
  REGION 1..773: note = Description of Unknown: Synthetic polypeptide
MILDTDYITENGKPVIRIFKKEKGEFKIEYDRNFEPYIYALLEDDESIEDIKKITGERHGKKVRIIRVEKVKKNFLGEPIEVWKLVFEHPQDYPAIRDAIRSHPAVREIFEYDIPFAKRYLIDKGLVPMEGGEELKLLAFAIATFYHEGDEFAEGEILMISYADESGAKVITWKKIDLPYVEVVSTEREAIKRFLQVLREKDPDVLLTYNGDNFDFAYIKKRCEKLGLKFTIGRDGSEPKIQRMGDRFAVEVKGRIHLDLAPVVRHTIRLPTYTLEAVYEAVFGKKKEKVYAEEIAEAWKSEEGLKRVAQYSMEDARATYELGREFFPMEVELAKLIGQSVWDVSRSSTGNLVEWYLLRVAYERNELAPNKPGGEEYQRRMRSSYIGGYVKEPEKGLWESIAYLDFRSSAGSIIVTHNVSPDTLEKECKNYDVAPIVGYRFCKDFKGFIPSILEDLIETRQKVKRKMKATIDPIEKKMLDYRQRALKILANSYYGYQGYPKARWYSKECAESVTAWGRHYIETTIKEAEKFGFKVLYADTDGFFATIPNEDPETIKSKAKKFLKHINEKLPGMLELEYEGFYLRGFFVTKKKYALIDEDGHITTRGLEVVRRDWSEIAKETQAKVLEVILREGSIEKAAGIVKKVVEDLANYRVPVEKLIIHEQITRELKRYKATGPHVAIAKRLQARGIKVKPGTIISYVVLKGSKKISDRVILFDEYDSSRHKYDPDYYIHNQVLPAVLRILEAFGYKEKDLEYQRMKQTGLGAWLKMGKK

SEQ ID NO: 1456 - protein, 773 aa, unidentified
  REGION 1..773: note = Description of Unknown: Synthetic polypeptide
MILDTDYITENGKPVIRIFKKEKGEFKIEYDRNFEPYIYALLEDDESIEDIKKITGERHGKKVRIIRVEKVKKNFLGEPIEVWKLVFEHPQDYPAIRDAIRSHPAVREIFEYDIPFAKRYLIDKGLVPMEGGEELKLLAFAIATFYHEGDEFAEGEILMISYADESGAKVITWKKIDLPYVEVVSTEREAIKRFLQVLREKDPDVLLTYNGDNFDFAYIKKRCEKLGLKFTIGRDGSEPKIQRMGDRFAVEVKGRIHLDLAPVVRHTIRLPTYTLEAVYEAVFGKKKEKVYAEEIAEAWKSEEGLKRVAQYSMEDARATYELGREFFPMEVELAKLIGQSVWDVSRSSTGNLVEWYLLRVAYERNELAPNKPGGEEYQRRMRSSYIGGYVKEPEKGLWESIAYLDFRSSAGSIIVTHNVSPDTLEKECKEYDVAPIVGYRFCKDFKGFIPSILEDLIETRQKVKRKMKATIDPIEKKMLDYRQRALKILANSYYGYQGYPKARWYSKECAESVTAWGRHYIETTIKEAEKFGFKVLYADTDGFFATIPNEKPETIKSKAKKFLKHINEKLPGMLELEYEGFYLRGFFVTKKKYALIDEDGHITTRGLEVVRRDWSEIAKETQAKVLEVILREGSIEKAAGIVKKVVEDLANYRVPVEKLIIHEQITRELKRYKATGPHVAIAKRLQARGIKVKPGTIISYVVLKGSKKISDRVILFDEYDSSRHKYDPDYYIHNQVLPAVLRILEAFGYKEKDLEYQRMKQTGLGAWLKMGKK

SEQ ID NO: 1457 - protein, 773 aa, unidentified
  REGION 1..773: note = Description of Unknown: Synthetic polypeptide
MILDTDYITRNGKPVIRIFKKEKGEFKIEYDRNFEPYIYALLEDDESIEDIKKITGERHGKKVRIIRVEKVKKKFLGEPIEVWKLVFEHPQDYPAIRDAIRSHPAVREIFEYDIPFAKRYLIDKGLVPMEGGEELKLLAFAIATFYHEGDEFAEGEILMISYADESGAKVITWKKIDLPYVEVVSTEREAIKRFLQVLREKDPDVLLTYNGDNFDFAYIKKRCEKLGLKFTIGRDGSEPKIQRMGDRFAVEVKGRIHLDLAPVVRHTIRLPTYTLEAVYEAVFGKKKEKVYAEEIAEAWKSEEGLKRVAQYSMEDARATYELGREFFPMEVELAKLIGQSVWDVSRSSTGNLVEWYLLRVAYERNELAPNKPGGEEYQRRMRSSYIGGYVKEPEKGLWESIAYLDFRSSAGSIIVTHNVSPDTLEKECKNYDVAPIVGYRFCKDFKGFIPSILEDLIETRQKVKRKMKATIDPIEKKMLDYRQRALKILANSYYGYQGYPKARWYSKECAESVTAWGRHYIETTIKEAEKFGFKVLYADTDGFFATIPNEKPETIKSKAKKFLKHINEKLPGMLELEYEGFYLRGFFVTKKKYALIDEDGHITTRGLEVVRRDWSEIAKETQAKVLEVILREGSIEKAAGIVKKVVEDLANYRVPVEKLIIHEQITRELKRYKATGPHVAIAKRLQARGIKVKPGTIISYVVLKGSKKISDRVILFDEYDSSRHKYDPDYYIHNQVLPAVLRILEAFGYKEKDLEYQRMKQTGLGAWLKMGKK

SEQ ID NO: 1458 - protein, 773 aa, unidentified
  REGION 1..773: note = Description of Unknown: Synthetic polypeptide
MILDTDYITENGKPVIRIFKKEKGEFKIEYDRNFEPYIYALLEDDESIEDIKKITGERHGKKVRIIRVEKVKKKFLGEPIEVWKLVFEHPQDYPAIRDAIRSHPAVREIFEYDIPFAKRYLIDKGLVPMEGGEELKLLAFAIATFYHEGDEFAEGEILMISYADESGAKVITWKKIDLPYVEVVSTEREAIKRFLQVLREKDPDVLLTYNGDNFPFAYIKKRCEKLGLKFTIGRDGSEPKIQRMGDRFAVEVKGRIHLDLAPVVRHTIRLPTYTLEAVYEAVFGKKKEKVYAEEIAEAWKSEEGLKRVAQYSMEDARATYELGREFFPMEVELAKLIGQSVWDVSRSSTGNLVEWYLLRVAYERNELAPNKPGGEEYQRRMRSSYIGGYVKEPEKGLWESIAYLDFRSSAGSIIVTHNVSPDTLEKECKNYDVAPIVGYRFCKDFKGFIPSILEDLIETRQKVKRKMKATIDPIEKKMLDYRQRALKILANSYYGYQGYPKARWYSKECAESVTAWGRHYIETTIKEAEKFGFKVLYADTDGFFATIPNEKPETIKSKAKKFLKHINEKLPGMLELEYEGFYLRGFFVTKKKYALIDEDGHITTRGLEVVRRDWSEIAKETQAKVLEVILREGSIEKAAGIVKKVVEDLANYRVPVEKLIIHEQITRELKRYKATGPHVAIAKRLQARGIKVKPGTIISYVVLKGSKKISDRVILFDEYDSSRHKYDPDYYIHNQVLPAVLRILEAFGYKEKDLEYQRMKQTGLGAWLKMGKK

SEQ ID NO: 1459 - protein, 773 aa, unidentified
  REGION 1..773: note = Description of Unknown: Synthetic polypeptide
MILDTDFITENGKPVIRIFKKEKGEFKIEYDRNFEPYIYALLEDDESIEDIKKITGERHGKKVRIIRVEKVKKNFLGEPIEVWKLVFEHPQDYPAIRDAIRSHPAVREIFEYDIPFAKRYLIDKGLVPMEGGEELKLLAFNIATFYHEGDEFAEGEILMISYADESGAKVITWKKIDLPYVEVVSTEREAIKRFLQVLREKDPDVLLTYNGDNFDFAYIKKRCEKLGLKFTIGRDGSEPKIQRMGDRFAVEVKGRIHLDLAPVVRHTIRLPTYTLEAVYEAVFGKKKEKVYAEEIAEAWKSEEGLKRVAQYSMEDARATYELGREFFPMEVELAKLIGQSVWDVSRSSTGNLVEWYLLRVAYERNELAPNKPGGEEYQRRMRSSYIGGYVKEPEKGLWESIAYLDFRSSAGSIIVTHNVSPDTLEKECKNYDVAPEVGYRFCKDFKGFIPSILEDLIETRQKVKRKMKATIDPIEKKMLDYRQRALKILANSYYGYQGYPKARWYSKECAESVTAWGRHYIETTIKEAEKFGFKVLYADTDGFFATIPNEKPETIKSKAKKFLKHINEKLPGMLELEYEGFYLRGFFVTKKRYALIDEDGHITTRGLEVVRRDWSEIAKETQAKVLEVILREGSIEKAAGIVKKVVEDLANYRVPVEKLIIHEQITRELKRYKATGPHVAIAKRLQARGIKVKPGTIISYVVLKGSKKISDRVILFDEYDSSRHKYDPDYYIHNQVLPAVLRILEAFGYKEKDLEYQRMKQTGLGAWLKMGKK

SEQ ID NO: 1460 - protein, 773 aa, unidentified
  REGION 1..773: note = Description of Unknown: Synthetic polypeptide
MILDTDYITENGKPVIRIFKKEKGEFKIEYDRNFEPYIYALLEDDESIEDIKKITGERHGKKVRIIRVEKVKKKFLGEPIEVWKLVFEHPQDYPAIRDAIRSHPAVREIFEYDIPFAKRYLIDKGLVPMEGGEELKLLAFAIATFYHEGDEFAEGEILMISYADESGAKVITWKKIDLPYVEVVSTEREAIKRFLQVLREKDPDVLLTYNGDNFDFAYIKKRCEKLGLKFTIGRDGSEPKIQRMGDRFAVEVKGRIHLDLAPVVRHTIRLPTYTLEAVYEAVFGKKKEKVYAEEIAEAWKSEEGLKRVAQYSMEDARATYELGREFFPMEVELAKLIGQSVWDVSRSSTGNLVEWYLLRVAYERNELAPNKPGGEEYQRRMRSSYIGGYVKEPEKGLWESIAYLDFRSSAGSIIVTHNVSPDTLEKECKNYDVAPIVGYRFCKDFKGFIPSILEDLIETRQKVKRKMKATKDPIEKKMLDYRQRALKILANSYYGYQGYPKARWYSKECAESVTAWGRHYIETTIKEAEKFGFKVLYADTDGFFATIPNEKPETIKSKAKKFLKHINEKLPGMLELEYEGFYLRGFFVTKKKYALIDEDGHITTRGLEVVRRDWSEIAKETQAKVLEVILREGSIEKAAGIVKKVVEDLANYRVPVEKLIIHEQITRELKRYKATGPHVAIAKRLQARGIKVKPGTIISYVVLKGSKKISDRVILFDEYDSSRHKYDPDYYIHNQVLPAVLRILEAFGYKEKDLEYQRMKQTGLGAWLKMGKK

SEQ ID NO: 1461 - protein, 773 aa, unidentified
  REGION 1..773: note = Description of Unknown: Synthetic polypeptide
MILDTDYITENGKPVIRIFKKEKGEFKIEYDRNFEPYIYALLEDDESIEDIKKITGERHGKKVRIIRVEKVKKKFLGEPIEVWKLVFEHPQDYPAIRDAIRSHPAVREIFEYDIPFAKRYLIDKGLVPMEGGEELKLLAFAIATFYHEGDEFAEGEILMISYADESGAKVITWKKIDLPYVEVVSTEREAIKRFLQVLREKDPDVLLTYNGDNFDFAYILKRCEKLGLKFTIGRDGSEPKIQRMGDRFAVEVKGRIHLDLAPVVRHTIRLPTYTLEAVYEAVFGKKKEKVYAEEIAEAWKSEEGLKRVAQYSMEDARATYELGREFFPMEVELAKLIGQSVWDVSRSSTGNLVEWYLLRVAYERNELAPNKPGGEEYQRRMRSSYIGGYVKEPEKGLWESIAYLDFRSSAGSIIVTHNVSPDTLEKECKNYDVAPIVGYRFCKDFKGFIPSILEDLIETRQKVKRKMKATIDPIEKKMLDYRQRALKILANSYYGYQGYPKARWYSKECAESVTAWGRHYIETTIKEAEKFGFKVLYADTDGFFATIPNEKPETIKSKAKKFLKHINEKLPGMLELEYEGFYLRGFFVTKKKYALIDEDGHITTRGLEVVRRDWSEIAKETQAKVLEVILREGSIEKAAGIVKKVVEDLANYRVPVEKLIIHEQITRELKRYKATGPHVAIAKRLQARGIKVKPGTIISYVVLKGSKKISDRVILFDEYDSSRHKYDPDYYIHNQVLPAVLRILEAFGYKEKDLEYQRMKQTGLGAWLKMGKK

SEQ ID NO: 1462 - protein, 773 aa, unidentified
  REGION 1..773: note = Description of Unknown: Synthetic polypeptide
MILDTDYITENGKPVIRIFKKEKGEFKIEYDRNFEPYIYALLEDDESIEDIKKITGERHGKKVRIIRVEKVKKKFLGEPIEVWKLVFEHPQDYPAIRDAIRSHPAVREIFEYDIPFAKRYLIDKGLVPMEGGEELKLLAFAIATFYHEGDEFAEGEILMISYADESGAKVITWKKIDLPYVEVVSTEREAIKRFLQVLREKDPDVLLTYNGDNFDFAYIYKRCEKLGLKFTIGRDGSEPKIQRMGDRFAVEVKGRIHLDLAPVVRHTIRLPTYTLEAVYEAVFGKKKEKVYAEEIAEAWKSEEGLKRVAQYSMEDARATYELGREFFPMEVELAKLIGQSVWDVSRSSTGNLVEWYLLRVAYERNELAPNKPGGEEYQRRMRSSYIGGYVKEPEKGLWESIAYLDFRSSAGSIIVTHNVSPDTLEKECKNYDVAPIVGYRFCKDFKGFIPSILEDLIETRQKVKRKMKATIDPIEKKMLDYRQRALKILANSYYGYQGYPKARWYSKECAESVTAWGRHYIETTIKEAEKFGFKVLYADTDGFFATIPNEKPETIKSKAKKFLKHINEKLPGMLELEYEGFYLRGFFVTKKKYALIDEDGHITTRGLEVVRRDWSEIAKETQAKVLEVILREGSIEKAAGIVKKVVEDLANYRVPVEKLIIHEQITRELKRYKATGPHVAIAKRLQARGIKVKPGTIISYVVLKGSKKISDRVILFDEYDSSRHKYDPDYYIHNQVLPAVLRILEAFGYKEKDLEYQRMKQTGLGAWLKMGKK

SEQ ID NO: 1463 - protein, 773 aa, unidentified
  REGION 1..773: note = Description of Unknown: Synthetic polypeptide
MILDTDYITENGKPVIRIFKKEKGEFKIEYDRNFEPYIYALLEDDESIEDIKKITGERHGKKVRIIRVEKVKKKFLGEPIEVWKLVFEHPQDYPAIRDAIRSHPAVREIFEYDIPFAKRYLIDKGLVPMEGGEELKLLAFAIATFYHEGDEFAEGEILMISYADESGAKVITWKKIDLPYVEVVSTEREAIKRFLQVLREKDPDVLLTYNGDNFDFAYIKKRCEKLGLKFTIGRDGSEPKIQRMGDRFAVEVKGRIHLDLAPVVRRTINLPTYTLEAVYEAVFGKKKEKVYAEEIAEAWKSEEGLKRVAQYSMEDARATYELGREFFPMEVELAKLIGQSVWDVSRSSTGNLVEWYLLRVAYERNELAPNKPGGEEYQRRMRSSYIGGYVKEPEKGLWESIAYLDFRSSAGSIIVTHNVSPDTLEKECKNYDVAPIVGYRFCKDFKGFIPSILEDLIETRQKVKRKMKATIDPIEKKMLDYRQRALKILANSYYGYQGYPKARWYSKECAESVTAWGRHYIETTIKEAEKFGFKVLYADTDGFFATIPNEKPETIKSKAKKFLKHINEKLPGMLELEYEGFYLRGFFVTKKKYALIDEDGHITTRGLEVVRRDWSEIAKETQAKVLEVILREGSIEKAAGIVKKVVEDLANYRVPVEKLIIHEQITRELKRYKATGPHVAIAKRLQARGIKVKPGTIISYVVLKGSKKISDRVILFDEYDSSRHKYDPDYYIHNQVLPAVLRILEAFGYKEKDLEYQRMKQTGLGAWLKMGKK

SEQ ID NO: 1464 - protein, 773 aa, unidentified
  REGION 1..773: note = Description of Unknown: Synthetic polypeptide
MILDTDYITENGKPVIRIFKKEKGEFKIEYDRNFEPYIYALLEDDESIEDIKKITGERHGKKVRIIRVEKVKKNFLGEPIEVWKLVFEHPQDYPAIRDAIRSHPAVREIFEYDIPFAKRYLIDKGLVPMEGGEELKLLAFAIATFYHEGDEFAEGEILMISYADESGAKVITWKKIDLPYVEVVSTEREAIKRFLQVLREKDPDVLLTYNGDNFDFAYIKKRCEKLGLKFTIGRDGSEPKIQRMGDRFAVEVKGRIHLDLAPVVRHTIRLPTYTLEAVYEAVFGKKKEKVYAEEIAEAWKSEEGLKRVAQYSMEDARATYELGREFFPMEVELAKLIGQSVWDVSRSSTGNLVEWYLLRVAYERNELAPNKPGGEEYQRRMRSSYIGGYVKEPEKGLWESIAYLDFRSSAGSIIVTHNVSPDTLEKECKNYDVAPIVGYRFCKDFKGFIPSILEDLIETRQKVKRKMKATIDPIEKKMLDYRQRALKILANSYYGYQGYPKARWYSKECAESVTAWGRHYIETTIKEAEKFGFKVLYADTDGFFATIPNEKPETIKSKAKKFLKHINEKLPGMLELEYEGFYLRGFFVTKKKYALIDEDGHITTRGLEVVRRDWSEIAKETQAKVLEVILREGSIEKAAGIVKKVVEDLANYRVPVEKLIIHEQITRELKRYKATGPHVAIAKRLAARGIKVKPGTIISYVVLKGSKKISDRVILFDEYDSSRHKYDPDYYIHNQVLPAVLRILEAFGYKEKDLEYQRMKQTGLGAWLKMGKK

SEQ ID NO: 1465 - protein, 773 aa, unidentified
  REGION 1..773: note = Description of Unknown: Synthetic polypeptide
MILDTDYITENGKPVIRIFKKEKGEFKIEYDRNFEPYIYALLEDDESIEDIKKITGERHGKKVRIIRVEKVKKKFLGEPIEVWKLVFEHPQDYPAIRDAIRSHPAVREIFEYDIPFAKRYLIDKGLVPMEGGEELKLLAFAIATFYHEGDEFAEGEILMISYADESGAKVITWKKIDLPYVEVVSTEREAIKRFLQVLREKDPDVLLTYNGDNFDFAYIKKRCEKLGLKFTIGRDGSEPKIQRMGDRFAVEVKGRIHLDLAPVVRHTIRLPTYTLEAVYEAVFGKKKEKVYAEEIAEAWKSEEGLKRVAQYSMEDARATYELGREFFPMEVELAKLIGQSVWDVSRSSTGNLVEWYLLRVAYERNELAPNKPGGEEYQRRMRSSYIGGYVKEPEKGLWESIAYLDFRSSAGSIIVTHNVSPDTLEKECKNYDVAPIVGYRFCKDFKGFIPSILEDLIETRQKVKRKMKATIDPIEKKMLDYRQRALKILANSYYGYQGYPKARWYSKECAESVTAWGRHYIETTIKEAEKFGFKVLYADTDGFFATIPNEKPETIKSKAKKFLKHINEKLPGMLELEYEGFYLRGFFVTKKKYALIDEDGHITTRGLELVRRDWSEIAKETQAKVLEVILREGSIEKAAGIVKKVVEDLANYRVPVEKLIIHEQITRELKRYKATGPHVAIAKRLQARGIKVKPGTIISYVVLKGSKKISDRVILFDEYDSSRHKYDPDYYIHNQVLPAVLRILEAFGYKEKDLEYQRMKQTGLGAWLKMGKK

SEQ ID NO: 1466 - protein, 773 aa, unidentified
  REGION 1..773: note = Description of Unknown: Synthetic polypeptide
MILDTDYITENGKPVIRIFKKEKGEFKIEYDRNFEPYIYALLEDDESIEDIKKITGERHGKKVRIIRVEKVKKKFLGEPIEVWKLVFEHPQDYPAIRDAIRSHPAVREIFEYDIPFAKRYLIDKGLVPMEGGEELKLLAFAIATFYHEGDEFAEGEILMISYADESGAKVITWKKIDLPYVEVVSTEREAIKRFLQVLREKDPDVLLTYNGDNFDFAYIKKRCEKLGLKFTIGRDGSEPKIQRMGDRFAVEVKGRIHLDLAPVVRHTIRLPTYTLEAVYEAVFGKKKEKVYAEEIAEAWKSEEGLKRVAQYSMEDARATYELGREFFPMEVELAKLIGQSVWDVSRSSTGNLVEWYLLRVAYERNELAPNKPGGEEYQRRMRSSYIGGYVKEPEKGLWEDIAYLDFRSSAGSIIVTHNVSPDTLEKECKNYDVAPIVGYRFCKDFKGFIPSILEDLIETRQKVKRKMKATIDPIEKKMLDYRQRALKILANSYYGYQGYPKARWYSKECAESVTAWGRHYIETTIKEAEKFGFKVLYADTDGFFATIPNEKPETIKSKAKKFLKHINEKLPGMLELEYEGFYLRGFFVTKKKYALIDEDGHITTRGLEVVRRDWSEIAKETQAKVLEVILREGSIEKAAGIVKKVVEDLANYRVPVEKLIIHEQITRELKRYKATGPHVAIAKRLQARGIKVKPGTIISYVVLKGSKKISDRVILFDEYDSSRHKYDPDYYIHNQVLPAVLRILEAFGYKEKDLEYQRMKQTGLGAWLKMGKK

SEQ ID NO: 1467 - protein, 773 aa, unidentified
  REGION 1..773: note = Description of Unknown: Synthetic polypeptide
MILDTDYITENGKPVIRIFKKEKGEFKIEYDRNFEPYIYALLEDDESIEDIKKITGERHGKKVRIIRVEKVKKKFLGEPIEVWKLVFEHPQDYPAIRDAIRSHPAVREIFEYDIPFAKRYLIDKGLVPMEGGEELKLLAFAIATFYHEGDEFAEGEILMISYADESGAKVITWKKIDLPYVEVVSTEREAIKRFLQVLREKDPDVLLTYNGDNFDFAYIKKRCEKLGLKFTIGRDGSEPKIQRMGDRFAVEVKGRIHLDLAPVVRHTIRLPTYTLEAVYEAVFGKKKEKVYAEEIAEAWKSEEGLKRVAQYSMEDARATYELGREFFPMEVELAKLIGQSVWDVSRSSTGNLVEWYLLRVAYERNELAPNKPGGEEYQRRMRSSYIGGYVKEPEKGLWESIAYLDFRSSAGSIIVTHNVSPDTLEKECKNYDVAPIVGYRFCKDFKGFIPSILEDLIETRQKVKRKMKATIDPIEKKMLDYRQRALKILANSYYGYQGYPKARWYSKECAESVTAWGRHYIETTIKEAEKFGFKVLYADTDGFFATIPNEKPETIKSKAKKFLKHINEKLPGMLELEYEGFYLRGFFVTKKKYALIDEDGHITTRGLEVVRRDWSEIAKETQAKVLEVILREGSIDKAAGIVKKVVEDLANYRVPVEKLIIHEQITRELKRYKATGPHVAIAKRLQARGIKVKPGTIISYVVLKGSKKISDRVILFDEYDSSRHKYDPDYYIHNQVLPAVLRILEAFGYKEKDLEYQRMKQTGLGAWLKMGKK

SEQ ID NO: 1468 - protein, 773 aa, unidentified
  REGION 1..773: note = Description of Unknown: Synthetic polypeptide
MILDTDYITENGKPVIRIFKKEKGEFKIEYDRNFEPYIYALLEDDESIEDIKKITGERHGKKVRIIRVEKVKKKFLGEPIEVWKLVFEHPQDYPAIRDAIRSHPAVREIFEYDIPFAKRYLIDKGLVPMEGGEELKLLAFAIATFYDEGDEFAEGEILMISYADESGAKVITWKKIDLPYVEVVSTEREAIKRFLQVLREKDPDVLLTYNGDNFDFAYIKKRCEKLGLKFTIGRDGSEPKIQRMGDRFAVEVKGRIHLDLAPVVRHTIRLPTYTLEAVYEAVFGKKKEKVYAEEIAEAWKSEEGLKRVAQYSMEDARATYELGREFFPMEVELAKLIGQSVWDVSRSSTGNLVEWYLLRVAYERNELAPNKPGGEEYQRRMRSSYIGGYVKEPEKGLWESIAYLDFRSSAGSIIVTHNVSPDTLEKECKNYDVAPIVGYRFCKDFKGFIPSILEDLIETRQKVKRKMKATIDPIEKKMLDYRQRALKILANSYYGYQGYPKARWYSKECAESVTAWGRHYIETTIKEAEKFGFKVLYADTDGFFATIPNEKPETIKSKAKKFLKHINEKLPGMLELEYEGFYLRGFFVTKKKYALIDEDGHITTRGLEVVRRDWSEIAKETQAKVLEVILREGSIEKAAGIVKKVVEDLANYRVPVEKLIIHEQITRELKRYKATGPHVAIAKRLQARGIKVKPGTIISYVVLKGSKKISDRVILFDEYDSSRHKYDPDYYIHNQVLPAVLRILEAFGYKEKDLEYQRMKQTGLGAWLKMGKK

SEQ ID NO: 1469 - protein, 773 aa, unidentified
  REGION 1..773: note = Description of Unknown: Synthetic polypeptide
MILDTDYITENGKPVIRIFKKEKGEFKIEYDRNFEPYIYALLEDDESIEDIKKITGERHGKKVRIIRVEKVKKKFLGEPIEVWKLVFEHPQDYPAIRDAIRSHPAVREIFEYDIPFAKRYLIDKGLVPMEGGEELKLLAFDIETFYHEGDEFAEGEILMISYADESGAKVITWKKIDLPYVEVVSTEREAIKRFLQVLREKDPDVLLTYNGDNFDFAYIKKRCEKLGLKFTIGRDGSEPKIQRMGDRFAVEVKGRIHLDLYPVVRHTIRLPTYTLEAVYEAVFGKKKEKVYAEEIAEAWKSEEGLKRVAQYSMEDARATYELGREFFPMEVELAKLIGQSVWDVSRSSTGNLVEWYLLRVAYERNELAPNKPGGEEYQRRMRSSYIGGYVKEPEKGLWESIAYLDFRSLYPSIIVTHNVSPDTLEKECKNYDVAPIVGYRFCKDFKGFIPSILEDLIETRQKVKRKMKATIDPIEKKMLDYRQRALKILANSYYGYQGYPKARWYSKECAESVTAWGRHYIETTIKEAEKFGFKVLYADTDGFFATIPNEKPETIKSKAKKFLKHINEKLPGMLELEYEGFYLRGFFVTKKKYALIDEDGHITTRGLEVVRRDWSEIAKETQAKVLEVILREGSIEKAAGIVKKVVEDLANYRVPVEKLIIHEQITRELKDYKATGPHVAIAKRLQARGIKVKPGTIISYVVLKGSKKISDRVILFDEYDSSRHKYDPDYYIHNQVLPAVLRILEAFGYKEKDLEYQRMKQTGLGAWLKMGKK

SEQ ID NO: 1470 - protein, 773 aa, unidentified
  REGION 1..773: note = Description of Unknown: Synthetic polypeptide
MILDTDYITENGKPVIRIFKKEKGEFKIEYDRNFEPYIYALLEDDESIEDIKKITGERHGKKVRIIRVEKVKKNFLGEPIEVWKLVFEHPQDYPAIRDAIRSHPAVREIFEYDIPFAKRYLIDKGLVPMEGGEELKLLAFAIATFYHEGDEFAEGEILMISYADESGAKVITWKKIDLPYVEVVSTEREAIKRFLQVLREKDPDVLLTYNGDNFDFAYIKKRCEKLGLKFTIGRDGSEPKIQRMGDRFAVEVKGRIHLDLAPVVRHTIRLPTYTLEAVYEAVFGKKKEKVYAEEIAEAWKSEEGLKRVAQYSMEDARATYELGREFFPMEVELAKLIGQSVWDVSRSSTGNLVEWYLLRVAYERNELAPNKPGGEEYQRRMRSSYIGGYVKEPEKGLWESIAYLDFRSSAGSIIVTHNVSPDTLEKECKNYDVAPIVGYRFCKDFKGFIPSILEDLIETRQKVKRKMKATIDPIEKKMLDYRQRALKILANSYYGYQGYPKARWYSKECAESVTAWGRHYIETTIKEAEKFGFKVLYADTDGFFATIPNEKPETIKSKAKKFLKHINEKLPGMLELEYEGFYLRGFFVTKKKYALIDEDGHITTRGLEVVRRDWSEIAKETQAKVLEVILREGSIEKAAGIVKKVVEDLAKYRVPVEKLIIHEQITRELKRYKATGPHVAIAKRLQARGIKVKPGTIISYVVLKGSKKISDRVILFDEYDSSRHKYDPDYYIHNQVLPAVLRILEAFGYKEKDLEYQRMKQTGLGAWLKMGKK

SEQ ID NO: 1471 - protein, 773 aa, unidentified
  REGION 1..773: note = Description of Unknown: Synthetic polypeptide
MILDTDYITENGKPVIRIFKKEKGEFKIEYDRNFEPYIYALLEDDESIEDIKKITGERHGKKVRIIRVEKVKKNFLGEPIEVWKLVFEHPQDYPAIRDAIRSHPAVREIFEYDIPFAKRYLIDKGLVPMEGGEELKLLAFAIATFYHEGDEFAEGEILMISYADESGAKVITWKKIDLPYVEVVSTEREAIKRFLQVLREKDPDVLLTYNGDNFDFAYIKKRCEKLGLKFTIGRDGSEPKIQRMGDRFAVEVKGRIHLDLAPVVRHTIRLPTYTLEAVYEAVFGKKKEKVYAEEIAEAWKSEEGLKRVAQYSMEDARATYELGREFFPMEVELAKLIGQSVWDVSRSSTGNLVEWYLLRVAYERNELAPNKPGGEEYQRRMRSSYIGGYVKEPEKGLWESIAYLDFRSSAGSIIVTHNVSPDTLEKECKNYDVAPIVGYRFCKDFKGFIPSILEDLIETRQKVKRKMKATIDPIEKKMLDYRQRALKILANSYYGYQGYPKARWYSKECAESVTAWGRHYIETTIKEAEKFGFKVLYANTDGFFATIPNEKPETIKSKAKKFLKHINEKLPGMLELEYEGFYLRGFFVTKKKYALIDEDGHITTRGLEVVRRDWSEIAKETQAKVLEVILREGSIEKAAGIVKKVVEDLANYRVPVEKLIIHEQITRELKRYKATGPHVAIAKRLQARGIKVKPGTIISYVVLKGSKKISDRVILFDEYDSSRHKYDPDYYIHNQVLPAVLRILEAFGYKEKDLEYQRMKQTGLGAWLKMGKK

SEQ ID NO: 1472 - protein, 773 aa, unidentified
  REGION 1..773: note = Description of Unknown: Synthetic polypeptide
MILDTDYITENGKPVIRIFKKEKGEFKIEYDRNFEPYIYALLEDDESIEDIKKITGERHGKKVRIIRVEKVKKNFLGEPIEVWKLVFEHPQDYPAIRDAIRSHPAVREIFEYDIPFAKRYLIDKGLVPMEGGEELKLLAFNIATFYHEGDEFAEGEILMISYADESGAKVITWKKIDLPYVEVVSTEREAIKRFLQVLREKDPDVLLTYNGDNFDFAYIKKRCEKLGLKFTIGRDGSEPKIQRMGDRFAVEVKGRIHLDLAPVVRHTIRLPTYTLEAVYEAVFGKKKEKVYAEEIAEAWKSEEGLKRVAQYSMEDARATYELGREFFPLEVELAKLIGQSVWDVSRSSTGNLVEWYLLRVAYERNELAPNKPGGEEYQRRMRSSYIGGYVKEPEKGLWESIAYLDFRSSAGSIIVTHNVSPDTLEKECKNYDVAPIVGYRFCKDFKGFIPSILEDLIETRQKVKRKMKATIDPIEKKMLDYRQRALKILANSYYGYQGYPKARWYSKECAESVTAWGRHYIETTIKEAEKFGFKVLYADTDGFFATIPNEKPETIKSKAKKFLKHINEKLPGMLELEYEGFYLRGFFVTKKKYALIDEDGHITTRGLEVVRRDWSEIAKETQAKVLEVILREGSIEKAAGIVKKVVEDLANYRVPVEKLIIHEQITRELKRYKATGPHVAIAKRLQARGIKVKPGTIISYVVLKGSKKISDRVILFDEYDSSRHKYDPDYYIHNQVLPAVLRILEAFGYKEKDLEYQRMKQTGLGAWLKMGKK

SEQ ID NO: 1473 - protein, 773 aa, unidentified
  REGION 1..773: note = Description of Unknown: Synthetic polypeptide
MILDTDYITENGKPVIRIFKKEKGEFKIEYDRNFEPYIYALLEDDESIEDIKKITGERHGKKVRIIRVEKVKKNFLGEPIEVWKLVFEHPQDYPAIRDAIRSHPAVREIFEYDIPFAKRYLIDKGLVPMEGGEELKLLAFNIATFYHEGDEFAEGEILMISYADESGAKVITWKKIDLPYVEVVSTEREAIKRFLQVLREKDPDVLLTYNGDNFDFAYIKKRCEKLGLKFTIGRDGSEPKIQRMGDRFAVEVKGRIHLDLAPVVRHTIRLPTYTLEAVYEAVFGKKKEKVYAEEIAEAWKSEEGLKRVAQYSMEDARATYELGREFFPMEVELAKLIGQSVWDVSRSSTGNLVEWYLLRVAYERNELAPNKPGGEEYQRRMRSSYIGGYVKEPEKGLWESIAYLDFRSSAGSIIVTHNVSPDTLEKECKNYDVAPIVGYRFCKDFKGFIPSILEDLIETRQKVKRKMKATIDPIEKKMLDYRQRALKILANSYYGYQGYPKARWYSKECAESVTAWGRHYIETTIKEAEKFGFKVLYADTDGFFATIPNEKPETIKSKAKKFLKHINEKLPGMLELEYEGFYLRGFFVTKKKYALIDEDGHITTRGLEVVRRDWSEIAKETQAKVLEVILRHGSIEEAAGIVKKVVEDLANYRVPVEKLIIHEQITRELKRYKATGPHVAIAKRLQARGIKVKPGTIISYVVLKGSKKISDRVILFDEYDSSRHKYDPDYYIHNQVLPAVLRILEAFGYKEKDLEYQRMKQTGLGAWLKMGKK

SEQ ID NO: 1474 - protein, 773 aa, unidentified
  REGION 1..773: note = Description of Unknown: Synthetic polypeptide
MILDTDYITENGKPVIRIFKKEAGEFKIEYDRNFEPYIYALLEDDESIEDIKKITGERHGKKVRIIRVEKVKKKFLGEPIEVWKLVFEHPQDYPAIRDAIRSHPAVREIFEYDIPFAKRYLIDKGLVPMEGGEELKLLAFNIATFYHEGDEFAEGEILMISYADESGAKVITWKKIDLPYVEVVSTEREAIKRFLQVLREKDPDVLLTYNGDNFDFAYIKKRCEKLGLKFTIGRDGSEPKIQRMGDRFAVEVKGRIHLDLAPVVRHTIRLPTYTLEAVYEAVFGKKKEKVYAEEIAEAWKSEEGLKRVAQYSMEDARATYELGREFFPMEVELAKLIGQSVWDVSRSSTGNLVEWYLLRVAYERNELAPNKPGGEEYQRRMRSSYIGGYVKEPEKGLWESIAYLDFRSSAGSIIVTHNVSPDTLEKECKNYDVAPEVGYRFCKDFKGFIPSILEDLIETRQKVKRKMKATIDPIEKKMLDYRQRALKILANSYYGYQGYPKARWYSKECAESVTAWGRHYIETTIKEAEKFGFKVLYADTDGFFATIPNEKPETIKSKAKKFLKHINEKLPGMLELEYEGFYLRGFFVTKKKYALIDEDGHITTRGLEVVRRDWSEIAKETQAKVLEVILREGSIEKAAGIVKKVVEDLANYRVPVEKLIIHEQITRELKRYKATGPHVAIAKRLQARGIKVKPGTIISYVVLKGSKKISDRVILFDEYDSSRHKYDPDYYIHNQVLPAVLRILEAFGYKEKDLEYQRMKQTGLGAWLKMGKK

SEQ ID NO: 1475 - protein, 773 aa, unidentified
  REGION 1..773: note = Description of Unknown: Synthetic polypeptide
MILDTDYITENGKPVIRIFKKEKGEFKIEYDRNFEPYIYALLEDDESIEDIKKITGERHGKKVRIIRVEKVKKNFLGEPIEVWKLVFEHPQDYPAIRDAIRSHPAVREIFEYDIPFAKRYLIDKGLVPMEGGEELKLLAFAIATFYHEGDEFAEGEILMISYADESGAKVITWKKIDLPYVEVVSTEREAIKRFLQVLREKDPDVLLTYNGDNFDFAYIKKRCEKLGLKFTIGRDGSEPKIQRMGDRFAVEVKGRIHLDLAPVVRHTIRLPTYTLEAVYEAVFGKKKEKVYAEEIAEAWKSEEGLKRVAQYSMEDARATYELGREFFPMEVELAKLIGQSVWDVSRSSTGNLVEWYLLRVAYERNELAPNKPGGEEYQRRMRSSYIGGYVKEPEKGLWESIAYLDFRSSAGSIIVTHNVSPDTLEKECKNYDVAPIVGYRFCKDFKGFIPSILGDLIETRQKVKRKMKATIDPIEKKMLDYRQRALKILANSYYGYQGYPKARWYSKECAESVTAWGRHYIETTIKEAEKFGFKVLYADTDGFFATIPNEKPETIKSKAKKFLKHINEKLPGMLELEYEGFYLRGFFVTKKKYALIDEDGHITTRGLEVVRRDWSEIAKETQAKVLEVILREGSIEKAAGIVKKVVEDLANYRVPVEKLIIHEQITRELKRYKATGPHVAIAKRLQARGIKVKPGTIISYVVLKGSKKISDRVILFDEYDSSRHKYDPDYYIHNQVLPAVLRILEAFGYKEKDLEYQRMKQTGLGAWLKMGKK

SEQ ID NO: 1476 - protein, 772 aa, unidentified
  REGION 1..772: note = Description of Unknown: Synthetic polypeptide
MILDTDYITENGKPVIRIFKKEKGEFKIEYDRNFEPYIYALLEDDESIEDIKKITGERHGKKVRIIRVEKVKKKFLGEPIEVWKLVFEHPQDYPAIRDAIRSHPAVREIFEYDIPFAKRYLIDKGLVPMEGGEELKLLAFAIATFYHEGDEFAEGEILMISYADESGAKVITWKKIDLPYVEVVSTEREAIKRFLQVLREKDPDVLLTYNGDNFDFAYIKKRCEKLGLKFTIGRDGSEPKIQRMGDRFAVEVKGRIHLDLAPVVRHTIRLPTYTLEAVYEAVFGKKKEKVYAEEIAEAWKSEEGLKRVAQYSMEDARATYELGREFFPMEVELAKLIGQSVWDVSRSSTGNLVEWYLLRVAYERNELAPNKPDEKELARRRQSYEGGYVKEPEKGLWESIAYLDFRSSAGSIIVTHNVSPDTLEKECKNYDVAPIVGYRFCKDFKGFIPSILEDLIETRQKVKRKMKATIDPIEKKMLDYRQRALKILANSYYGYQGYPKARWYSKECAESVTAWGRHYIETTIKEAEKFGFKVLYADTDGFFATIPNEKPETIKSKAKKFLKHINEKLPGMLELEYEGFYLRGFFVTKKKYALIDEDGHITTRGLEVVRRDWSEIAKETQAKVLEVILREGSIEKAAGIVKKVVEDLANYRVPVEKLIIHEQITRELKRYKATGPHVAIAKRLQARGIKVKPGTIISYVVLKGSKKISDRVILFDEYDSSRHKYDPDYYIHNQVLPAVLRILEAFGYKEKDLEYQRMKQTGLGAWLKMGKK

SEQ ID NO: 1477 - protein, 773 aa, unidentified
  REGION 1..773: note = Description of Unknown: Synthetic polypeptide
MILDTDYITENGKPVIRIFKKEKGEFKIEYDRNFEPYIYALLEDDESIEDIKKITGERHGKKVRIIRVEKVKKKFLGEPIEVWKLVFEHPQDYPAIRDAIRSHPAVREIFEYDIPFAKRYLIDKGLVPMEGGEELKLLAFAIATFYHEGDEFAEGEILMISYADESGAKVITWKKIDLPYVEVVSTEREAIKRFLQVLREKDPDVLLTYNGDNFEFAYIKKRCEKLGLKFTIGRDGSEPKIQRMGDRFAVEVKGRIHLDLAPVVRHTIRLPTYTLEAVYEAVFGKKKEKVYAEEIAEAWKSEEGLKRVAQYSMEDARATYELGREFFPMEVELAKLIGQSVWDVSRSSTGNLVEWYLLRVAYERNELAPNKPGGEEYQRRMRSSYIGGYVKEPEKGLWESIAYLDFRSSAGSIIVTHNVSPDTLEKECKNYDVAPIVGYRFCKDFKGFIPSILEDLIETRQKVKRKMKATIDPIEKKMLDYRQRALKILANSYYGYQGYPKARWYSKECAESVTAWGRHYIETTIKEAEKFGFKVLYADTDGFFATIPNEKPETIKSKAKKFLKHINEKLPGMLELEYEGFYLRGFFVTKKKYALIDEDGHITTRGLEVVRRDWSEIAKETQAKVLEVILREGSIEKAAGIVKKVVEDLANYRVPVEKLIIHEQITRELKRYKATGPHVAIAKRLQARGIKVKPGTIISYVVLKGSKKISDRVILFDEYDSSRHKYDPDYYIHNQVLPAVLRILEAFGYKEKDLEYQRMKQTGLGAWLKMGKK

SEQ ID NO: 1478 - protein, 773 aa, unidentified
  REGION 1..773: note = Description of Unknown: Synthetic polypeptide
MILDTDYITENGKPVIRIFKKEKGEFKIEYDRNFEPYIYALLEDDESIEDIKKITGERHGKKVRIIRVEKVKKKFLGEPIEVWKLVFEHPQDYPAIRDAIRSHPAVREIFEYDIPFAKRYLIDKGLVPMEGGEELKLLAFAIATFYHEGDEFAEGEILMISYADESGAKVITWKKIDLPYVEVVSTEREAIKRFLQVLREKDPDVLLTYNGDNFDFAYIKKRCEKLGLKFTIGRDGSEPKIQRMGDRFAVEVKGRIHLDLAPVVRHTIRLPTYTLEAVYEAVFGKKKEKVYAEEIAEAWKSEEGLKRVAQYSMEDARATYELGREFFPMEVELAKLIGQSVWDVSRSSTGNLVEWYLLRVAYERNELAPNKPGGEEYQRRMRSSYIGGYVKEPEKGLWESIAYLDFRSSAGSIIVTHNVSPDTLEKECKNYDVAPIVGYRFCKDFKGFIPSILEDLIETRQKVKRKMKATSDPIEKKMLDYRQRALKILANSYYGYQGYPKARWYSKECAESVTAWGRHYIETTIKEAEKFGFKVLYADTDGFFATIPNEKPETIKSKAKKFLKHINEKLPGMLELEYEGFYLRGFFVTKKKYALIDEDGHITTRGLEVVRRDWSEIAKETQAKVLEVILREGSIEKAAGIVKKVVEDLANYRVPVEKLIIHEQITRELKRYKATGPHVAIAKRLQARGIKVKPGTIISYVVLKGSKKISDRVILFDEYDSSRHKYDPDYYIHNQVLPAVLRILEAFGYKEKDLEYQRMKQTGLGAWLKMGKK

SEQ ID NO: 1479 - protein, 773 aa, unidentified
  REGION 1..773: note = Description of Unknown: Synthetic polypeptide
MILDTDYITENGKPVIRIFKKEKGEFKIEYDRNFEPYIYALLEDDESIEDIKKITGERHGKKVRIIRVEKVKKNFLGEPIEVWKLVFEHPQDYPAIRDAIRSHPAVREIFEYDIPFAKRYLIDKGLVPMEGGEELKLLAFAIATFYHEGDEFAEGEILMISYADESGAKVITWKKIDLPYVEVVSTEREAIKRFLQVLREKDPDVLLTYNGDNFDFAYIKKRCEKLGLKFTIGRDGSEPKIQRMGDRFAVEVKGRIHLDLYPVVRHTIRLPTYTLEAVYEAVFGKKKEKVYAEEIAEAWKSEEGLKRVAQYSMEDARATYELGREFFPMEVELAKLIGQSVWDVSRSSTGNLVEWYLLRVAYERNELAPNKPGGEEYQRRMRSSYIGGYVKEPEKGLWESIAYLDFRSSAGSIIVTHNVSPDTLEKECKNYDVAPIVGYRFCKDFKGFIPSILEDLIETRQKVKRKMKATIDPIEKKMLDYRQRALKILANSYYGYQGYPKARWYSKECAESVTAWGRHYIETTIKEAEKFGFKVLYADTDGFFATIPNEKPETIKSKAKKFLKHINEKLPGMLELEYEGFYLRGFFVTKKKYALIDEDGHITTRGLEVVRRDWSEIAKETQAKVLEVILREGSIEKAAGIVKKVVEDLANYRVPVEKLIIHEQITRELKRYKATGPHVAIAKRLQARGIKVKPGTIISYVVLKGSKKISDRVILFDEYDSSRHKYDPDYYIHNQVLPAVLRILEAFGYKEKDLEYQRMKQTGLGAWLKMGKK

SEQ ID NO: 1480 - protein, 773 aa, unidentified
  REGION 1..773: note = Description of Unknown: Synthetic polypeptide
MILDTDYITENGKPVIRIFKKEKGEFKIEYDRNFEPYIYALLEDDESIEDIKKITGERHGKKVRIIRVEKVKKKFLGEPIEVWKLVFEHPQDYPAIRDAIRSHPAVREIFEYDIPFAKRYLIDKGLVPMEGGEELKLLAFAIATFYHAGDEFAEGEILMISYADESGAKVITWKKIDLPYVEVVSTEREAIKRFLQVLREKDPDVLLTYNGDNFDFAYIKKRCEKLGLKFTIGRDGSEPKIQRMGDRFAVEVKGRIHLDLAPVVRHTIRLPTYTLEAVYEAVFGKKKEKVYAEEIAEAWKSEEGLKRVAQYSMEDARATYELGREFFPMEVELAKLIGQSVWDVSRSSTGNLVEWYLLRVAYERNELAPNKPGGEEYQRRMRSSYIGGYVKEPEKGLWESIAYLDFRSSAGSIIVTHNVSPDTLEKECKNYDVAPIVGYRFCKDFKGFIPSILEDLIETRQKVKRKMKATIDPIEKKMLDYRQRALKILANSYYGYQGYPKARWYSKECAESVTAWGRHYIETTIKEAEKFGFKVLYADTDGFFATIPNEKPETIKSKAKKFLKHINEKLPGMLELEYEGFYLRGFFVTKKKYALIDEDGHITTRGLEVVRRDWSEIAKETQAKVLEVILREGSIEKAAGIVKKVVEDLANYRVPVEKLIIHEQITRELKRYKATGPHVAIAKRLQARGIKVKPGTIISYVVLKGSKKISDRVILFDEYDSSRHKYDPDYYIHNQVLPAVLRILEAFGYKEKDLEYQRMKQTGLGAWLKMGKK

SEQ ID NO: 1481 - protein, 773 aa, unidentified
  REGION 1..773: note = Description of Unknown: Synthetic polypeptide
MILDTDYITENGKPVIRIFKKEKGEFKIEYDRNFEPYIYALLEDDESIEDIKKITGERHGKKVRIIRVEKVKKNFLGEPIEVWKLVFEHPQDYPAIRDAIRSHPAVREIFEYDIPFAKRYLIDKGLVPMEGGEELKLLAFAIATFYHEGDEFAEGEILMISYADESGAKVITWKKIDLPYVEVVSTEREAIKRFLQVLREKDPDVLLTYNGDNFDFAYIKKRCEKLGLKFTIGRDGSEPKIQRMGDRFAVEVKGRIHLDLAPVVRHTIRLPTYTLEAVYEAVFGKKKEKVYAEEIAEAWKSEEGLKRVAQYSMEDARATYELGREFFPMEVELAKLIGQSVWDVSRSSTGNLVEWYLLRVAYERNELAPNKPGGEEYQRRMRSSYIGGYVKEPERGLWESIAYLDFRSSAGSIIVTHNVSPDTLEKECKNYDVAPIVGYRFCKDFKGFIPSILEDLIETRQKVKRKMKATIDPIEKKMLDYRQRALKILANSYYGYQGYPKARWYSKECAESVTAWGRHYIETTIKEAEKFGFKVLYADTDGFFATIPNEKPETIKSKAKKFLKHINEKLPGMLELEYEGFYLRGFFVTKKKYALIDEDGHITTRGLEVVRRDWSEIAKETQAKVLEVILREGSIEKAAGIVKKVVEDLANYRVPVEKLIIHEQITRELKRYKATGPHVAIAKRLQARGIKVKPGTIISYVVLKGSKKISDRVILFDEYDSSRHKYDPDYYIHNQVLPAVLRILEAFGYKEKDLEYQRMKQTGLGAWLKMGKK

SEQ ID NO: 1482 - protein, 773 aa, unidentified
  REGION 1..773: note = Description of Unknown: Synthetic polypeptide
MILDTDYITENGKPVIRIFKKEKGEFKIEYDRNFEPYIYALLEDDESIEDIKKITGERHGKKVRIIRVEKVKKNFLGEPIEVWKLVFEHPQDYPAIRDAIRSHPAVREIFEYDIPFAKRYLIDKGLVPMEGGEELKLLAFAIETFYHEGDEFAEGEILMISYADESGAKVITWKKIDLPYVEVVSTEREAIKRFLQVLREKDPDVLLTYNGDNFDFAYIKKRCEKLGLKFTIGRDGSEPKIQRMGDRFAVEVKGRIHLDLAPVVRHTIRLPTYTLEAVYEAVFGKKKEKVYAEEIAEAWKSEEGLKRVAQYSMEDARATYELGREFFPMEVELAKLIGQSVWDVSRSSTGNLVEWYLLRVAYERNELAPNKPGGEEYQRRMRSSYIGGYVKEPEKGLWESIAYLDFRSSAGSIIVTHNVSPDTLEKECKNYDVAPIVGYRFCKDFKGFIPSILEDLIETRQKVKRKMKATIDPIEKKMLDYRQRALKILANSYYGYQGYPKARWYSKECAESVTAWGRHYIETTIKEAEKFGFKVLYADTDGFFATIPNEKPETIKSKAKKFLKHINEKLPGMLELEYEGFYLRGFFVTKKKYALIDEDGHITTRGLEVVRRDWSEIAKETQAKVLEVILREGSIEKAAGIVKKVVEDLANYRVPVEKLIIHEQITRELKRYKATGPHVAIAKRLQARGIKVKPGTIISYVVLKGSKKISDRVILFDEYDSSRHKYDPDYYIHNQVLPAVLRILEAFGYKEKDLEYQRMKQTGLGAWLKMGKK

SEQ ID NO: 1483 - protein, 773 aa, unidentified
  REGION 1..773: note = Description of Unknown: Synthetic polypeptide
MILDTDYITENGKPVIRIFKKEKGEFKIEYDRNFEPYIYALLEDDESIEDIKKITGERHGKKVRIIRVEKVKKNFLGEPIEVWKLVFEHPQDYPAIRDAIRSHPAVREIFEYDIPFAKRYLIDKGLVPMEGDEELKLLAFAIATFYHEGDEFAEGEILMISYADESGAKVITWKKIDLPYVEVVSTEREAIKRFLQVLREKDPDVLLTYNGDNFDFAYIKKRCEKLGLKFTIGRDGSEPKIQRMGDRFAVEVKGRIHLDLAPVVRHTIRLPTYTLEAVYEAVFGKKKEKVYAEEIAEAWKSEEGLKRVAQYSMEDARATYELGREFFPMEVELAKLIGQSVWDVSRSSTGNLVEWYLLRVAYERNELAPNKPGGEEYQRRMRSSYIGGYVKEPEKGLWESIAYLDFRSSAGSIIVTHNVSPDTLEKECKNYDVAPIVGYRFCKDFKGFIPSILEDLIETRQKVKRKMKATIDPIEKKMLDYRQRALKILANSYYGYQGYPKARWYSKECAESVTAWGRHYIETTIKEAEKFGFKVLYADTDGFFATIPNEKPETIKSKAKKFLKHINEKLPGMLELEYEGFYLRGFFVTKKKYALIDEDGHITTRGLEVVRRDWSEIAKETQAKVLEVILREGSIEKAAGIVKKVVEDLANYRVPVEKLIIHEQITRELKRYKATGPHVAIAKRLQARGIKVKPGTIISYVVLKGSKKISDRVILFDEYDSSRHKYDPDYYIHNQVLPAVLRILEAFGYKEKDLEYQRMKQTGLGAWLKMGKK

SEQ ID NO: 1484 - protein, 773 aa, unidentified
  REGION 1..773: note = Description of Unknown: Synthetic polypeptide
MILDTDYITENGKPVIRIFKKEKGEFKIEYDRNFEPYIYALLEDDESIEDIKKITGERHGKKVRIIRVEKVKKKFLGEPIEVWKLVFEHPQDYPAIRDAIRSHPAVREIFEYDIPFAKRYLIDKGLVPMEGGEELKLLAFAIATFYHEGDEFAEGEILMISYADESGAKVITWKKIDLPYVEVVSTEREAIKRFLQVLREKDPDVLLTYNGDNFDFAYIKKRCEKLGLKFTIGRDGSEPKIQRMGDRFAVEVKGRIHLDLAPVVRHTIRLPTYTLEAVYEAVFGKKKEKVYAEEIAEAWKSEEGLKRVAQYSMEDARATYELGREFFPMEVELAKLIGQSVWDVSRSSTGNLVEWYLLRVAYERNELAPNKPGGEEYQRRMRSSYIGGYVKEPEKGLWESIAYLDFRSSAGSIIVTHNVSPDTLEKECKNYDVAPIVGYRFCKDFKGFIPSILEDLIETRQKVKRKMKATIDPIEKKMLDYRQRALKILANSYYGYQGYPKARWYSKECAESVTAWGRHYIETTIKEAEKFGFKVLYADTDGFFATIPNEKPETIKSKAKKFLKHINEKLPGMLELEYEGFYLRGFFVTKKKYALIDEDGHITTTGLEVVRRDWSEIAKETQAKVLEVILREGSIEKAAGIVKKVVEDLANYRVPVEKLIIHEQITRELKRYKATGPHVAIAKRLQARGIKVKPGTIISYVVLKGSKKISDRVILFDEYDSSRHKYDPDYYIHNQVLPAVLRILEAFGYKEKDLEYQRMKQTGLGAWLKMGKK

SEQ ID NO: 1485 - protein, 773 aa, unidentified
  REGION 1..773: note = Description of Unknown: Synthetic polypeptide
MILDTDYITENGKPVIRIFKKEKGEFKIEYDRNFEPYIYALLEDDESIEDIKKITGERHGKKVRIIRVEKVKKKFLGEPIEVWKLVFEHPQDYPAIRDAIRSHPAVREIFEYDIPFAKRYLIDKGLVPMEGGEELKLLAFAIATFYHEGDEFAEGEILMISYADESGAKVITWKKIDLPYVEVVSTEREAIKRFLQVLREKDPDVLLTYNGDNFDFAYIKKRCEKLGLKFTIGRDGSEPKIQRMGDRFAVEVKGRIHLDLAPVVRHTIRLPTYTLEAVYEAVFGKKKEKVYAEEIAEAWKSEEGLKRVAQYSMEDARATYELGREFFPMEVELAKLIGQSVWDVSRSSTGNLVEWYLLRVAYERNELAPNKPGGEEYQRRMRSSYIGGYVKEPEKGLWDDIAYLDFRSSAGSIIVTHNVSPDTLEKECKNYDVAPIVGYRFCKDFKGFIPSILEDLIETRQKVKRKMKATIDPIEKKMLDYRQRALKILANSYYGYQGYPKARWYSKECAESVTAWGRHYIETTIKEAEKFGFKVLYADTDGFFATIPNEKPETIKSKAKKFLKHINEKLPGMLELEYEGFYLRGFFVTKKKYALIDEDGHITTRGLEVVRRDWSEIAKETQAKVLEVILREGSIEKAAGIVKKVVEDLANYRVPVEKLIIHEQITRELKRYKATGPHVAIAKRLQARGIKVKPGTIISYVVLKGSKKISDRVILFDEYDSSRHKYDPDYYIHNQVLPAVLRILEAFGYKEKDLEYQRMKQTGLGAWLKMGKK

SEQ ID NO: 1486 - protein, 773 aa, unidentified
  REGION 1..773: note = Description of Unknown: Synthetic polypeptide
MILDTDYITENGKPVIRIFKKEKGEFKIEYDRNFEPYIYALLEDDESIEDIKKITGERHGKKVRIIRVEKVKKNFLGEPIEVWKLVFEHPQDYPAIRDAIRSHPAVREIFEYDIPFAKRYLIDKGLVPMEGGEELKLLAFAIATFYHEGDEFAEGEILMISYADESGAKVITWKKIDLPYVEVVSTEREAIKRFLQVLREKDPDVLLTYNGDNFDFAYIKKRCEKLGLKFTIGRDGSEPKIQRMGDRFAVEVKGRIHLDLAPVVRHTIRLPTYTLEAVYEAVFGKKKEKVYAEEIAEAWKSEEGLKRVAQYSMEDARATYELGREFFPMEVELAKLIGQSVWDVSRSSTGNLVEWYLLRVAYERNELAPNKPGGEEYQRRMRSSYIGGYVKEPEKGLWESIAYLDFRSSAGSIIVTHNVSPDTLEKECKNYDVAPIVGYRFCKDFKGFIPSILEDLIETRQKVKRKMKATIDPIEKKMLDYRQRALKILANSYYGYQGYPKARWYSKECAESVTAWGRHYIETTIKEAEKFGFKVLYADTDGFFATIPNEKPETIKSKAKKFLKHINEKLPGMLELEYEGFYLRGFFVTKKKYALIDEDGHITTRGLEVVRRDWSEIAKETQAKVLEVILREGSIEKAAGIVKKVVEDLANYRVPVEKLIIHEQITRELKRYKATGPHVAIAKRLQARGIKVKPGTIISYVVLKGSKKISDRVILFDEYDSSRHKYDPDYYIHNQVLPAVLRILRAFGYKEKDLEYQRMKQTGLGAWLKMGKK

SEQ ID NO: 1487 - protein, 773 aa, unidentified
  REGION 1..773: note = Description of Unknown: Synthetic polypeptide
MILDTDYITENGKPVIRIFKKEKGEFKIEYDRNFEPYIYALLEDDESIEDIKKITGERHGKKVRIIRVEKVKKKFLGEPIEVWKLVFEHPQDYPAIRDAIRSHPAVREIFEYDIPFAKRYLIDKGLVPMEGGEELKLLAFAIATFYHEGDEFAEGEILMISYADESGAKVITWKKIDLPYVEVVSTEREAIKRFLQVLREKDPDVLLTYNGDNFDFAYIKKRCKKLGLKFTIGRDGSEPKIQRMGDRFAVEVKGRIHLDLAPVVRHTIRLPTYTLEAVYEAVFGKKKEKVYAEEIAEAWKSEEGLKRVAQYSMEDARATYELGREFFPMEVELAKLIGQSVWDVSRSSTGNLVEWYLLRVAYERNELAPNKPGGEEYQRRMRSSYIGGYVKEPEKGLWESIAYLDFRSSAGSIIVTHNVSPDTLEKECKNYDVAPIVGYRFCKDFKGFIPSILEDLIETRQKVKRKMKATIDPIEKKMLDYRQRALKILANSYYGYQGYPKARWYSKECAESVTAWGRHYIETTIKEAEKFGFKVLYADTDGFFATIPNEKPETIKSKAKKFLKHINEKLPGMLELEYEGFYLRGFFVTKKKYALIDEDGHITTRGLEVVRRDWSEIAKETQAKVLEVILREGSIEKAAGIVKKVVEDLANYRVPVEKLIIHEQITRELKRYKATGPHVAIAKRLQARGIKVKPGTIISYVVLKGSKKISDRVILFDEYDSSRHKYDPDYYIHNQVLPAVLRILEAFGYKEKDLEYQRMKQTGLGAWLKMGKK

SEQ ID NO: 1488 - protein, 773 aa, unidentified
  REGION 1..773: note = Description of Unknown: Synthetic polypeptide
MILDTDYITENGKPVIRIFKKEKGEFKIEYDRNFEPYIYALLEDDESIEDIKKITGERHGKKVRIIRVEKVKKKFLGEPIEVWKLVFEHPQDYPAIRDAIRSHPAVREIFEYDIPFAKRYLIDKGLVPMEGGEELKLLAFAIATFYHEGDEFAEGEILMISYADESGAKVITWKKIDLPYVEVVSTEREAIKRFLQVLREKDPDVLLTYNGDNFDFAYIKKRCEKLGLKFTIGRDGSEPKIQRMGDRFAVEVKGRIHLDLAPVVRHTIRLPTYTLEAVYEAVFGKKKEKVYAEEIAEAWKSEEGLKRVAQYSMEDARATYELGREFFPMEVELAKLIGQSVWDVSRSSTGNLVEWYLLRVAYERNELAPNKPGGEEYQRRMRSSYIGGYVKEPEKGLWESIAYLDFRSSAGSIIVTHNVSPDTLEKECKNYDVAPIVGYRFCKDFKGFIPSILEDLIETRQKVKRKMKATIDPIEKKMLDYRQRALKILANSYYGYQGYPKARWYSKECAESVTAWGRHYIETTIKEAEKFGFKVLYADTDGFFATIPNEKPETIKSKAKKFLKHINEKLPGMLELEYEGFYLRGFFVTKKKYALIDEDGHITTHGLEVVRRDWSEIAKETQAKVLEVILREGSIEKAAGIVKKVVEDLANYRVPVEKLIIHEQITRELKRYKATGPHVAIAKRLQARGIKVKPGTIISYVVLKGSKKISDRVILFDEYDSSRHKYDPDYYIHNQVLPAVLRILEAFGYKEKDLEYQRMKQTGLGAWLKMGKK

SEQ ID NO: 1489 - protein, 773 aa, unidentified
  REGION 1..773: note = Description of Unknown: Synthetic polypeptide
MILDTDYITENGKPVIRIFKKEKGEFKIEYDRNFEPYIYALLEDDESIEDIKKITGERHGKKVRIIRVEKVKKNFLGEPIEVWKLVFEHPQDYPAIRDAIRSHPAVREIFEYDIPFAKRYLIDKGLVPMEGGEELKLLAFAIATFYHEGDEFAEGEILMISYADESGAKVITWKKIDLPYVEVVSTEREAIKRFLQVLREKDPDVLLTYNGDNFDFAYIKKRCEKLGLKFTIGRDGSEPKIQRMGDRFAVEVKGRIHLDLAPVVRHTIRLPTYTLEAVYEAVFGKKKEKVYAEEIAEAWKTEEGLKRVAQYSMEDARATYELGREFFPMEVELAKLIGQSVWDVSRSSTGNLVEWYLLRVAYERNELAPNKPGGEEYQRRMRSSYIGGYVKEPEKGLWESIAYLDFRSSAGSIIVTHNVSPDTLEKECKNYDVAPIVGYRFCKDFKGFIPSILEDLIETRQKVKRKMKATIDPIEKKMLDYRQRALKILANSYYGYQGYPKARWYSKECAESVTAWGRHYIETTIKEAEKFGFKVLYADTDGFFATIPNEKPETIKSKAKKFLKHINEKLPGMLELEYEGFYLRGFFVTKKKYALIDEDGHITTRGLEVVRRDWSEIAKETQAKVLEVILREGSIEKAAGIVKKVVEDLANYRVPVEKLIIHEQITRELKRYKATGPHVAIAKRLQARGIKVKPGTIISYVVLKGSKKISDRVILFDEYDSSRHKYDPDYYIHNQVLPAVLRILEAFGYKEKDLEYQRMKQTGLGAWLKMGKK

SEQ ID NO: 1490 - protein, 773 aa, unidentified
  REGION 1..773: note = Description of Unknown: Synthetic polypeptide
MILDTDYITENGKPVIRIFKKEKGEFKIEYDRNFEPYIYALLEDDESIEDIKKITGERHGKKVRIIRVEKVKKKFLGEPIEVWKLVFEHPQDYPAIRDAIRSHPAVREIFEYDIPFAKRYLIDKGLVPMEGGEELKLLAFNIATFYHEGDEFAEGEILMISYADESGAKVITWKKIDLPYVEVVSTEREAIKRFLQVLREKDPDVLLTYNGDNFDFAYIKKRCEKLGLKFTIGRDGSEPKIQRMGDRFAVEVKGRIHLDLAPVVRHTIRLPTYTLEAVYEAVFGKKKEKVYAEEIAEAWKSEEGLKRVAQYSMEDARATYELGREFFPMEVELAKLIGQSVWDVSRSSTGNLVEWYLLRVAYERNELAPNKPGGEEYQRRMRSSYIGGYVKEPEKGLWESIAYLDFRSSAGSIIVTHNVSPDTLEKECKNYDVAPEVGYRFCKDFKGFIPSILEDLIETRQKVKRKMKATIDPIEKKMLDYRQRALKILANSYYGYQGYPKARWYSKECAESVTAWGRHYIETTIKEAEKFGFKVLYADTDGLYATIPNEKPETIKSKAKKFLKHINEKLPGMLELEYEGFYLRGFFVTKKKYALIDEDGHITTRGLEVVRRDWSEIAKETQAKVLEVILREGSIEKAAGIVKKVVEDLANYRVPVEKLIIHEQITRELKRYKATGPHVAIAKRLQARGIKVKPGTIISYVVLKGSKKISDRVILFDEYDSSRHKYDPDYYIHNQVLPAVLRILEAFGYKEKDLEYQRMKQTGLGAWLKMGKK

SEQ ID NO: 1491 - protein, 773 aa, unidentified
  REGION 1..773: note = Description of Unknown: Synthetic polypeptide
MILDTDYITENGKPVIRIFKKEKGEFKIEYDRNFEPYIYALLEDDESIEDIKKITGERHGKVVRIIRVEKVKKNFLGEPIEVWKLVFEHPQDYPAIRDAIRSHPAVREIFEYDIPFAKRYLIDKGLVPMEGGEELKLLAFAIATFYHEGDEFAEGEILMISYADESGAKVITWKKIDLPYVEVVSTEREAIKRFLQVLREKDPDVLLTYNGDNFDFAYIKKRCEKLGLKFTIGRDGSEPKIQRMGDRFAVEVKGRIHLDLAPVVRHTIRLPTYTLEAVYEAVFGKKKEKVYAEEIAEAWKSEEGLKRVAQYSMEDARATYELGREFFPMEVELAKLIGQSVWDVSRSSTGNLVEWYLLRVAYERNELAPNKPGGEEYQRRMRSSYIGGYVKEPEKGLWESIAYLDFRSSAGSIIVTHNVSPDTLEKECKNYDVAPIVGYRFCKDFKGFIPSILEDLIETRQKVKRKMKATIDPIEKKMLDYRQRALKILANSYYGYQGYPKARWYSKECAESVTAWGRHYIETTIKEAEKFGFKVLYADTDGFFATIPNEKPETIKSKAKKFLKHINEKLPGMLELEYEGFYLRGFFVTKKKYALIDEDGHITTRGLEVVRRDWSEIAKETQAKVLEVILREGSIEKAAGIVKKVVEDLANYRVPVEKLIIHEQITRELKRYKATGPHVAIAKRLQARGIKVKPGTIISYVVLKGSKKISDRVILFDEYDSSRHKYDPDYYIHNQVLPAVLRILEAFGYKEKDLEYQRMKQTGLGAWLKMGKK

SEQ ID NO: 1492 - protein, 773 aa, unidentified
  REGION 1..773: note = Description of Unknown: Synthetic polypeptide
MILDTDFITENGKPVIRIFKKEKGEFKIEYDRNFEPYIYALLEDDESIEDIKKITGERHGKKVRIIRVEKVKKNFLGEPIEVWKLVFEHPQDYPAIRDAIRSHPAVREIFEYDIPFAKRYLIDKGLVPMEGGEELKLLAFNIATFYHEGDEFAEGEILMISYADESGAKVITWKKIDLPYVEVVSTEREAIKRFLQVLREKDPDVLLTYNGDNFDFAYIKKRCEKLGLKFTIGRDGSEPKIQRMGDRFAVEVKGRIHLDLAPVVRHTIRLPTYTLEAVYEAVFGKKKEKVYAEEIAEAWKSEEGLKRVAQYSMEDARATYELGREFFPMEVELAKLIGQSVWDVSRSSTGNLVEWYLLRVAYERNELAPNKPGGEEYQRRMRSSYIGGYVKEPEKGLWESIAYLDFRSSAGSIIVTHNVSPDTLEKECKNYDVAPIVGYRFCKDFKGFIPSILEDLIETRQKVKRKMKATIDPIEKKMLDYRQRALKILANSYYGYQGYPKARWYSKECAESVTAWGRHYIETTIKEAEKFGFKVLYADTDGFFATIPNEKPETIKSKAKKFLKHINEKLPGMLELEYEGFYLRGFFVTKKKYALIDEDGHITTRGLEVVRRDWSEIAKETQAKVLEVILREGSIEKAAGIVKKVVEDLANYRVPVEKLIIHEQITRELKRYKATGPHVAIAKRLQARGIKVKPGTIISYVVLKGSKKISDRVILFDEYDSSRHKYDPDYYIHNQVLPAVLRILEAFGYKEKDLEYQRMKQTGLGAWLKMGKK

SEQ ID NO: 1493 - protein, 773 aa, unidentified
  REGION 1..773: note = Description of Unknown: Synthetic polypeptide
MILDTDYITENGKPVIRIFKKEKGEFKIEYDRNFEPYIYALLEDDESIEDIKKITGERHGKKVRIIRVEKVKKKFLGEPIEVWKLVFEHPQDVPAIRDAIRSHPAVREIFEYDIPFAKRYLIDKGLVPMEGGEELKLLAFAIETFYHEGDEFAEGEILMISYADESGAKVITWKKIDLPYVEVVSTEREAIKRFLQVLREKDPDVLLTYNGDNFDFAYIKKRCEKLGLKFTIGRDGSEPKIQRMGDRFAVEVKGRIHLDLYPVVRHTIRLPTYTLEAVYEAVFGKKKEKVYAEEIAEAWKSEEGLKRVAQYSMEDARATYELGREFFPMEVELAKLIGQSVWDVSRSSTGNLVEWYLLRVAYERNELAPNKPGGEEYQRRMRSSYIGGYVKEPEKGLWESIAYLDFRSLYPSIIVTHNVSPDTLEKECKNYDVAPIVGYRFCKDFKGFIPSILEDLIETRQKVKRKMKATIDPIEKKMLDYRQRALKILANSYYGYQGYPKARWYSKECAESVTAWGRHYIETTIKEAEKFGFKVLYADTDGFFATIPNEKPETIKSKAKKFLKHINEKLPGMLELEYEGFYLRGFFVTKKKYALIDEDGHITTRGLEVVRRDWSEIAKETQAKVLEVILREGSIEKAAGIVKKVVEDLANYRVPVEKLIIHEQITRELKDYKATGPHVAIAKRLQARGIKVKPGTIISYVVLKGSKKISDRVILFDEYDSSRHKYDPDYYIHNQVLPAVLRILEAFGYKEKDLEYQRMKQTGLGAWLKMGKK

SEQ ID NO: 1494 - protein, 773 aa, unidentified
  REGION 1..773: note = Description of Unknown: Synthetic polypeptide
MILDTDYITENGKPVIRIFKKEKGEFKIEYDRNFEPYIYALLEDDESIEDIKKITGERHGKKVRIIRVEKVKKNFLGEPIEVWKLVFEHPQDYPAIRDAIRSHPAVREIFEYDIPFAKRYLIDKGLVPMEGGEELKLLAFAIATFYHEGDEFAEGPILMISYADESGAKVITWKKIDLPYVEVVSTEREAIKRFLQVLREKDPDVLLTYNGDNFDFAYIKKRCEKLGLKFTIGRDGSEPKIQRMGDRFAVEVKGRIHLDLAPVVRHTIRLPTYTLEAVYEAVFGKKKEKVYAEEIAEAWKSEEGLKRVAQYSMEDARATYELGREFFPMEVELAKLIGQSVWDVSRSSTGNLVEWYLLRVAYERNELAPNKPGGEEYQRRMRSSYIGGYVKEPEKGLWESIAYLDFRSSAGSIIVTHNVSPDTLEKECKNYDVAPIVGYRFCKDFKGFIPSILEDLIETRQKVKRKMKATIDPIEKKMLDYRQRALKILANSYYGYQGYPKARWYSKECAESVTAWGRHYIETTIKEAEKFGFKVLYADTDGFFATIPNEKPETIKSKAKKFLKHINEKLPGMLELEYEGFYLRGFFVTKKKYALIDEDGHITTRGLEVVRRDWSEIAKETQAKVLEVILREGSIEKAAGIVKKVVEDLANYRVPVEKLIIHEQITRELKRYKATGPHVAIAKRLQARGIKVKPGTIISYVVLKGSKKISDRVILFDEYDSSRHKYDPDYYIHNQVLPAVLRILEAFGYKEKDLEYQRMKQTGLGAWLKMGKK

SEQ ID NO: 1495 - protein, 773 aa, unidentified
  REGION 1..773: note = Description of Unknown: Synthetic polypeptide
MILDTDYITENGKPVIRIFKKEKGEFKIEYDRNFEPYIYALLEDDESIEDIKKITGERHGKKVRIIRVEKVKKKFLGEPIEVWKLVFEHPQDYPAIRDAIRSHPAVREIFEYDIPFAKRYLIDKGLVPMEGGEELKLLAFAIATFYHEGDEFAEGEILMISYADESGAKVITWKKIDLPYVEVVSTEREAIKRFLQVLREKDPDVLLTYNGDNFDFAYIKKRCEKLGLKFTIGRDGSEPKIQRMGDRFAVEVKGRIHLDLAPVVRHTIRLPTYTLEAVYEAVFGKKKEKVYAEEIAEAWKSEEGLKRVAQYSMEDARATYELGREFFPMEVELAKLIGQSVWDVSRSSTGNLVEWYLLRVAYERNELAPNKPGGEEYQRRMRSSYIGGYVKEPEKGLWESIAYLDFRSSAGSIIVTHNVSPDTLEKECKNYDVAPIVGYRFCKDFKGFIPSILEDLIETRQKVKRKMKATIDPIEKKMLDYRQRALKILANSYYGYQGYPKARWYSKECAESVTAWGRHYIETTIKEAEKFGFKVLYADTDGFFATIPNEKPETIKSKAKKFLKHINEKLPGMLELEYEGFYLRGFFVTKKKYALIDEDGHITTYGLEVVRRDWSEIAKETQAKVLEVILREGSIEKAAGIVKKVVEDLANYRVPVEKLIIHEQITRELKRYKATGPHVAIAKRLQARGIKVKPGTIISYVVLKGSKKISDRVILFDEYDSSRHKYDPDYYIHNQVLPAVLRILEAFGYKEKDLEYQRMKQTGLGAWLKMGKK

SEQ ID NO: 1496 - protein, 773 aa, unidentified
  REGION 1..773: note = Description of Unknown: Synthetic polypeptide
MILDTDFITENGKPVIRIFKKEKGEFKIEYDRNFEPYIYALLEDDESIEDIKKITGERHGKKVRIIRVEKVKKKFLGEPIEVWKLVFEHPQDYPAIRDAIRSHPAVREIFEYDIPFAKRYLIDKGLVPMEGGEELKLLAFNIATFYHEGDEFAEGEILMISYADESGAKVITWKKIDLPYVEVVSTEREAIKRFLQVLREKDPDVLLTYNGDNFDFAYIKKRCEKLGLKFTIGRDGSEPKIQRMGDRFAVEVKGRIHLDLAPVVRHTIRLPTYTLEAVYEAVFGKKKEKVYAEEIAEAWKSEEGLKRVAQYSMEDARATYELGREFFPMEVELAKLIGQSVWDVSRSSTGNLVEWYLLRVAYERNELAPNKPGGEEYQRRMRSSYIGGYVKEPEKGLWESIAYLDFRSSAGSIIVTHNVSPDTLEKECKNYDVAPEVGYRFCKDFKGFIPSILEDLIETRQKVKRKMKATIDPIEKKMLDYRQRALKILANSYYGYQGYPKARWYSKECAESVTAWGRHYIETTIKEAEKFGFKVLYADTDGFFATIPNEKPETIKSKAKKFLKHINEKLPGMLELEYEGFYLRGFFVTKKRYALIDEDGHITTRGLEVVRRDWSEIAKETQAKVLEVILREGSIEKAAGIVKKVVEDLANYRVPVEKLIIHEQITRELKRYKATGPHVAIAKRLQARGIKVKPGTIISYVVLKGSKKISDRVILFDEYDSSRHKYDPDYYIHNQVLPAVLRILEAFGYKEKDLEYQRMKQTGLGAWLKMGKK

SEQ ID NO: 1497 - protein, 773 aa, unidentified
  REGION 1..773: note = Description of Unknown: Synthetic polypeptide
MILDTDYITENGKPVIRIFKKEKGEFKIEYDRNFEPYIYALLEDDESIEDIKKITGERHGKKVRIIRVEKVKKNFLGEPIEVWKLVFEHPQDYPAIRDAIRSHPAVREIFEYDIPFAKRYLIDKGLVPMEGGEELKLLAFAIATFYHEGDEFAEGEILMISYADESGAKVITWKKIDLPYVEVVSTEREAIKRFLQVLREKDPDVLLTYNGDNFDFAYIKKRCEKLGLKFTIGRDGSEPKIQRMGDRFAVEVKGRIHLDLAPVVRHTIRLPTYTLEAVYEAVFGKKKEKVYAEEIAEAWKSEEGLKRVAQYSMEDARATYELGREFFPMEVELAKLIGQSVWDVSRSSTGNLVEWYLLRVAYERNELAPNKPGGEEYQRRMRSSYIGGYVKEPEKGLWESIAYLDFRSSAGSIIVTHNVSPDTLEKGCKNYDVAPIVGYRFCKDFKGFIPSILEDLIETRQKVKRKMKATIDPIEKKMLDYRQRALKILANSYYGYQGYPKARWYSKECAESVTAWGRHYIETTIKEAEKFGFKVLYADTDGFFATIPNEKPETIKSKAKKFLKHINEKLPGMLELEYEGFYLRGFFVTKKKYALIDEDGHITTRGLEVVRRDWSEIAKETQAKVLEVILREGSIEKAAGIVKKVVEDLANYRVPVEKLIIHEQITRELKRYKATGPHVAIAKRLQARGIKVKPGTIISYVVLKGSKKISDRVILFDEYDSSRHKYDPDYYIHNQVLPAVLRILEAFGYKEKDLEYQRMKQTGLGAWLKMGKK

SEQ ID NO: 1498 - protein, 773 aa, unidentified
  REGION 1..773: note = Description of Unknown: Synthetic polypeptide
MILDTDYITENGKPVIRIFKKEKGEFKIEYDRNFEPYIYALLEDDESIEDIKKITGERHGKKVRIIRVEKVKKNFLGEPIEVWKLVFEHPQDYPAIRDAIRSHPAVREIFEYDIPFAKRYLIDKGLVPMEGGEELKLLAFAIATFYHEGDEFAEGEILMISYADESGAKVITWKKIDLPYVEVVSTEREAIKRFLQVLREKDPDVLLTYNGDNFDFAYIKKRCEKLGLKFTIGRDGSEPKIQRMGDRFAVEVKGRIHLDLAPVVRHTIRLPTYTLEAVYEAVFGKKKEKVYAEEIAEAWKSEEGLKRVAQYSMEDARATYELGREFFPMEVELAKLIGQSVWDVSRSSTGNLVEWYLLRVAYERNELAPNKPGGEEYQRRMRSSYIGGYVKEPEKGLWESIAYLDFRSSAGSIIVTHNVSPDTLEKECKNYDVAPIVGYRFCKDFKGFIPSILEDLIETRQKVKRKMKATIDPIEKKMLDYRQRALKILANSYYGYQGYPKARWYSKECAESVTAWGRHYIETTIKEAEKFGFKVLYADTDGFFATIPNEKPETIKSKAKKFLKHINEKLPGMLELEYEGFYLRGFFVTKKKYALIDEDGHITTRGLEVVRRDWSEIAKETQAKVLEVILREGSIEKAAGIVKKVVEDLANYRVPVEKLIIHEQITRELKDYKATGPHVAIAKRLQARGIKVKPGTIISYVVLKGSKKISDRVILFDEYDSSRHKYDPDYYIHNQVLPAVLRILEAFGYKEKDLEYQRMKQTGLGAWLKMGKK

SEQ ID NO: 1499 - protein, 773 aa, unidentified
  REGION 1..773: note = Description of Unknown: Synthetic polypeptide
MILDTDYITENGKPVIRIFKKEKGEFKIEYDRNFEPYIYALLEDDESIEDIKKITGERHGKKVRIIRVEKVKKKFLGEPIEVWKLVFEHPQDYPAIRDAIRSHPAVREIFEYDIPFAKRYLIDKGLVPMEGGEELKLLAFAIATFYAEGDEFAEGEILMISYADESGAKVITWKKIDLPYVEVVSTEREAIKRFLQVLREKDPDVLLTYNGDNFDFAYIKKRCEKLGLKFTIGRDGSEPKIQRMGDRFAVEVKGRIHLDLAPVVRHTIRLPTYTLEAVYEAVFGKKKEKVYAEEIAEAWKSEEGLKRVAQYSMEDARATYELGREFFPMEVELAKLIGQSVWDVSRSSTGNLVEWYLLRVAYERNELAPNKPGGEEYQRRMRSSYIGGYVKEPEKGLWESIAYLDFRSSAGSIIVTHNVSPDTLEKECKNYDVAPIVGYRFCKDFKGFIPSILEDLIETRQKVKRKMKATIDPIEKKMLDYRQRALKILANSYYGYQGYPKARWYSKECAESVTAWGRHYIETTIKEAEKFGFKVLYADTDGFFATIPNEKPETIKSKAKKFLKHINEKLPGMLELEYEGFYLRGFFVTKKKYALIDEDGHITTRGLEVVRRDWSEIAKETQAKVLEVILREGSIEKAAGIVKKVVEDLANYRVPVEKLIIHEQITRELKRYKATGPHVAIAKRLQARGIKVKPGTIISYVVLKGSKKISDRVILFDEYDSSRHKYDPDYYIHNQVLPAVLRILEAFGYKEKDLEYQRMKQTGLGAWLKMGKK

SEQ ID NO: 1500 - protein, 773 aa, unidentified
  REGION 1..773: note = Description of Unknown: Synthetic polypeptide
MILDTDYITENGKPVIRIFKKEKGEFKIEYDRNFEPYIYALLEDDESIEDIKKITGERHGKKVRIIRVEKVKKKFLGEPIEVWKLVFEHPQDYPAIRDAIRSHPAVREIFEYDIPFAKRYLIDKGLVPMEGGEELKLLAFAIATFYHEGDEFAEGEILMISYADESGAKVITWKKIDLPYVEVVSTEREAIKRFLQVLREKDPDVLLTYNGDNFDFAYLLKRCEKLGLKFTIGRDGSEPKIQRMGDRFAVEVKGRIHLDLAPVVRHTIRLPTYTLEAVYEAVFGKKKEKVYAEEIAEAWKSEEGLKRVAQYSMEDARATYELGREFFPMEVELAKLIGQSVWDVSRSSTGNLVEWYLLRVAYERNELAPNKPGGEEYQRRMRSSYIGGYVKEPEKGLWESIAYLDFRSSAGSIIVTHNVSPDTLEKECKNYDVAPIVGYRFCKDFKGFIPSILEDLIETRQKVKRKMKATIDPIEKKMLDYRQRALKILANSYYGYQGYPKARWYSKECAESVTAWGRHYIETTIKEAEKFGFKVLYADTDGFFATIPNEKPETIKSKAKKFLKHINEKLPGMLELEYEGFYLRGFFVTKKKYALIDEDGHITTRGLEVVRRDWSEIAKETQAKVLEVILREGSIEKAAGIVKKVVEDLANYRVPVEKLIIHEQITRELKRYKATGPHVAIAKRLQARGIKVKPGTIISYVVLKGSKKISDRVILFDEYDSSRHKYDPDYYIHNQVLPAVLRILEAFGYKEKDLEYQRMKQTGLGAWLKMGKK

SEQ ID NO: 1501 - protein, 773 aa, unidentified
  REGION 1..773: note = Description of Unknown: Synthetic polypeptide
MILDTDYITENGKPVIRIFKKEKGEFKIEYDRNFEPYIYALLEDDESIEDIKKITGERHGKKVRIIRVEKVKKKFLGEPIEVWKLVFEHPQDYPAIRDAIRSHPAVREIFEYDIPFAKRYLIDKGLVPMEGGEELKLLAFAIATFYHEGDEFAEGEILMISYADESGAKVITWKKIDLPYVEVVSTEREAIKRFLQVLREKDPDVLLTYNGDNFDFAYIKKRCEKLGLKFTIGRDGSEPKIQRMGDRFAVEVKGRIHLDLAPVVRHTIRLPTYTLEAVYEAVFGKKKEKVYAEEIAEAWKSEEGLKRVAQYSMEDARATYELGREFFPMEVELAKLIGQSVWDVSRSSTGNLVEWYLLRVAYERNELAPNKPGGEEYQRRMRSSYIGGYVKEPEKGLWDNIAYLDFRSSAGSIIVTHNVSPDTLEKECKNYDVAPIVGYRFCKDFKGFIPSILEDLIETRQKVKRKMKATIDPIEKKMLDYRQRALKILANSYYGYQGYPKARWYSKECAESVTAWGRHYIETTIKEAEKFGFKVLYADTDGFFATIPNEKPETIKSKAKKFLKHINEKLPGMLELEYEGFYLRGFFVTKKKYALIDEDGHITTRGLEVVRRDWSEIAKETQAKVLEVILREGSIEKAAGIVKKVVEDLANYRVPVEKLIIHEQITRELKRYKATGPHVAIAKRLQARGIKVKPGTIISYVVLKGSKKISDRVILFDEYDSSRHKYDPDYYIHNQVLPAVLRILEAFGYKEKDLEYQRMKQTGLGAWLKMGKK

SEQ ID NO: 1502 - protein, 773 aa, unidentified
  REGION 1..773: note = Description of Unknown: Synthetic polypeptide
MILDTDYITENGKPVIRIFKKEKGEFKIEYDRNFEPYIYALLEDDESIEDIKKITGERHGKKVRIIRVEKVKKNFLGEPIEVWKLVFEHPQDYPAIRDAIRSHPAVREIFEYDIPFAKRYLIDKGLVPMEGGEELKLLAFAIATFYHEGDEFAEGEILMISYADESGAKVITWKKIDLPYVEVVSTEREAIKRFLQVLREKDPDVLLTYNGDNFDFAYIKKRCEKLGLKFTIGRDGSEPKIQRMGDRFAVEVKGRIHLDLFPVVRHTIRLPTYTLEAVYEAVFGKKKEKVYAEEIAEAWKSEEGLKRVAQYSMEDARATYELGREFFPMEVELAKLIGQSVWDVSRSSTGNLVEWYLLRVAYERNELAPNKPGGEEYQRRMRSSYIGGYVKEPEKGLWESIAYLDFRSSAGSIIVTHNVSPDTLEKECKNYDVAPIVGYRFCKDFKGFIPSILEDLIETRQKVKRKMKATIDPIEKKMLDYRQRALKILANSYYGYQGYPKARWYSKECAESVTAWGRHYIETTIKEAEKFGFKVLYADTDGFFATIPNEKPETIKSKAKKFLKHINEKLPGMLELEYEGFYLRGFFVTKKKYALIDEDGHITTRGLEVVRRDWSEIAKETQAKVLEVILREGSIEKAAGIVKKVVEDLANYRVPVEKLIIHEQITRELKRYKATGPHVAIAKRLQARGIKVKPGTIISYVVLKGSKKISDRVILFDEYDSSRHKYDPDYYIHNQVLPAVLRILEAFGYKEKDLEYQRMKQTGLGAWLKMGKK

SEQ ID NO: 1503 - protein, 773 aa, unidentified
  REGION 1..773: note = Description of Unknown: Synthetic polypeptide
MILDTDYITENGKPVIRIFKKEKGEFKIEYDRNFEPYIYALLEDDESIEDIKKITGERHGKKVRIIRVEKVKKKFLGEPIEVWKLVFEHPQDYPAIRDAIRSHPAVREIFEYDIPFAKRYLIDKGLVPMEGGEELKLLAFNIATFYHEGDEFAEGEILMISYADESGAKVITWKKIDLPYVEVVSTEREAIKRFLQVLREKDPDVLLTYNGDNFDFAYIKKRCEKLGLKFTIGRDGSEPKIQRMGDRFAVEVKGRIHLDLAPVVRHTIRLPTYTLEAVYEAVFGKKKEKVYAEEIAEAWKSEEGLKRVAQYSMEDARATYELGREFFPMEVELAKLIGQSVWDVSRSSTGNLVEWYLLRVAYERNELAPNKPGGEEYQRRMRSSYIGGYVKEPEKGLWESIAYLDFRSSAGSIIVTHNVSPDTLEKECKNYDVAPEVGHRFCKDFKGFIPSILEDLIETRQKVKRKMKATIDPIEKKMLDYRQRALKILANSYYGYQGYPKARWYSKECAESVTAWGRHYIETTIKEAEKFGFKVLYADTDGFFATIPNEKPETIKSKAKKFLKHINEKLPGMLELEYEGFYLRGFFVTKKRYALIDEDGHITTRGLEVVRRDWSEIAKETQAKVLEVILREGSIEKAAGIVKKVVEDLANYRVPVEKLIIHEQITRELKRYKATGPHVAIAKRLQARGIKVKPGTIISYVVLKGSKKISDRVILFDEYDSSRHKYDPDYYIHNQVLPAVLRILEAFGYKEKDLEYQRMKQTGLGAWLKMGKK

SEQ ID NO: 1504 - protein, 773 aa, unidentified
  REGION 1..773: note = Description of Unknown: Synthetic polypeptide
MILDTDYITENGKPVIRIFKKEKGEFKIEYDRNFEPYIYALLEDDESIEDIKKITGERHGKKVRIIRVEKVKKNFLGEPIEVWKLVFEHPQDYPAIRDAIRSHPAVREIFEYDIPFAKRYLIDKGLVPMEGGEELKLLAFAIATFYHEGDEFAEGEILMISYADESGAKVITWKKIDLPYVEVVSTEREAIKRFLQVLREKDPDVLLTYNGDNFDFAYIKKRCEKLGLKFTIGRDGSEPKIQRMGDRFAVEVKGRIHLDLAPVVRHTIRLPTYTLEAVYEAVFGKKKEKVYAEEIAEAWKSEEGLKRVAQYSMEDARATYELGREFFPMEVELAKLIGQSVWDVSRSSTGNLVEWYLLRVAYERNELAPNKPGGEEYQRRMRSSYIGGYVKEPEKGLWESIAYLDFRSSAGSIIVTHNVSPDTLEKECKNYDVAPIVGYRFCKDFKGFIPSILEDLIETRQKVKRKMKATIDPIEKKMLDYRQRALKILANSYYGYQGYPKARWYSKECAESVTAWGRHYIETTIKEAEKFGFKVLYADTDGFFATIPNEKPETIKSKAKKFLKHINEKLPGMLELEYEGFYLRGFFVTKKKYALIDEDGHITTRGLEVVRRDWSEIAKETQAKVLEVILREGSIEKAAGIVKKVVEDLANYRVPVEKLIIHEQITRELKRYKATGPHVAIAKRLQARGIKVKPGTIISYVVLKGSKKISDRVILFDEYDSSRHKYDPDYYIENQVLPAVLRILEAFGYKEKDLEYQRMKQTGLGAWLKMGKK

SEQ ID NO: 1505 - protein, 773 aa, unidentified
  REGION 1..773: note = Description of Unknown: Synthetic polypeptide
MILDTDYITENGKPVIRIFKKEKGEFKIEYDRNFEPYIYALLEDDESIEDIKKITGERHGKKVRIIRVEKVKKNFLGEPIEVWKLVFEHPQDYPAIRDAIRSHPAVREIFEYDIPFAKRYLIDKGLVPMEGGEELKLLAFAIATFYHEGDEFAEGEILMISYADESGAKVITWKKIDLPYVEVVSTEREAIKRFLQVLREKDPDVLLTYNGDNFDFAYIKKRCEKLGLKFTIGRDGSEPKIQRMGDRFAVEVKGRIHLDLAPVVRHTIRLPTYTLEAVYEAVFGKKKEKVYAEEIAEAWKSEEGLKRVAQYSMEDARATYELGREFFPMEVELAKLIGQSVWDVSRSSTGNLVEWYLLRVAYERNELAPNKPDGEEYQRRMRSSYIGGYVKEPEKGLWESIAYLDFRSSAGSIIVTHNVSPDTLEKECKNYDVAPIVGYRFCKDFKGFIPSILEDLIETRQKVKRKMKATIDPIEKKMLDYRQRALKILANSYYGYQGYPKARWYSKECAESVTAWGRHYIETTIKEAEKFGFKVLYADTDGFFATIPNEKPETIKSKAKKFLKHINEKLPGMLELEYEGFYLRGFFVTKKKYALIDEDGHITTRGLEVVRRDWSEIAKETQAKVLEVILREGSIEKAAGIVKKVVEDLANYRVPVEKLIIHEQITRELKRYKATGPHVAIAKRLQARGIKVKPGTIISYVVLKGSKKISDRVILFDEYDSSRHKYDPDYYIHNQVLPAVLRILEAFGYKEKDLEYQRMKQTGLGAWLKMGKK

SEQ ID NO: 1506 - protein, 773 aa, unidentified
  REGION 1..773: note = Description of Unknown: Synthetic polypeptide
MILDTDYITENGKPVIRIFKKEKGEFKIEYDRNFEPYIYALLEDDESIEDIKKITGERHGKKVRIIRVEKVKKNFLGEPIEVWKLVFEHPQDYPAIRDKIRSHPAVREIFEYDIPFAKRYLIDKGLVPMEGGEELKLLAFAIATFYHEGDEFAEGEILMISYADESGAKVITWKKIDLPYVEVVSTEREAIKRFLQVLREKDPDVLLTYNGDNFDFAYIKKRCEKLGLKFTIGRDGSEPKIQRMGDRFAVEVKGRIHLDLAPVVRHTIRLPTYTLEAVYEAVFGKKKEKVYAEEIAEAWKSEEGLKRVAQYSMEDARATYELGREFFPMEVELAKLIGQSVWDVSRSSTGNLVEWYLLRVAYERNELAPNKPGGEEYQRRMRSSYIGGYVKEPEKGLWESIAYLDFRSSAGSIIVTHNVSPDTLEKECKNYDVAPIVGYRFCKDFKGFIPSILEDLIETRQKVKRKMKATIDPIEKKMLDYRQRALKILANSYYGYQGYPKARWYSKECAESVTAWGRHYIETTIKEAEKFGFKVLYADTDGFFATIPNEKPETIKSKAKKFLKHINEKLPGMLELEYEGFYLRGFFVTKKKYALIDEDGHITTRGLEVVRRDWSEIAKETQAKVLEVILREGSIEKAAGIVKKVVEDLANYRVPVEKLIIHEQITRELKRYKATGPHVAIAKRLQARGIKVKPGTIISYVVLKGSKKISDRVILFDEYDSSRHKYDPDYYIHNQVLPAVLRILEAFGYKEKDLEYQRMKQTGLGAWLKMGKK

SEQ ID NO: 1507 - protein, 773 aa, unidentified
  REGION 1..773: note = Description of Unknown: Synthetic polypeptide
MILDTDYITENGKPVIRIFKKEKGEFKIEYDRNFEPYIYALLEDDESIEDIKKITGERHGKKVRIIRVEKVKKKFLGEPIEVWKLVFEHPQDYPAIRDAIRSHPAVREIFEYDIPFAKRYLIDKGLVPMEGGEELKLLAFAIATFYHEGDEFAEGEILMISYADESGAKVITWKKIDLPYVEVVSTEREAIKRFLQVLREKDPDVLLTYNGDNFDFAYIKKRCEKLGLKFTIGRDGSEPKIQRMGDRFAVEVKGRIHLDLAPVVRHTIRLPTYTLEAVYEAVFGKKKEKVYAEEIAEAWKSEEGLKRVAQYSMEDARATYELGREFFPMEVELAKLIGQSVWDVSRSSTGNLVEWYLLRVAYERNELAPNKPGGEEYQRRMRSSYIGGYVKEPEKGLWESIAYLDFRSSAGSIIVTHNVSPDTLEKECKNYDVAPIVGYRFCKDFKGFIPSILEDLIETRQKVKRKMKATIDPIEKKMLDYRQRALKILANSYYGYQGYPKARWYSKECAESVTAWGRHYIETTIKEAEKFGFKVLYADTDGFFATIPNEKPETIKSKAKKFLKHINEKLPGMLELEYEGFYLRGFFVTKKKYALIDEDGHITTRGFEVVRRDWSEIAKETQAKVLEVILREGSIEKAAGIVKKVVEDLANYRVPVEKLIIHEQITRELKRYKATGPHVAIAKRLQARGIKVKPGTIISYVVLKGSKKISDRVILFDEYDSSRHKYDPDYYIHNQVLPAVLRILEAFGYKEKDLEYQRMKQTGLGAWLKMGKK

SEQ ID NO: 1508 - protein, 773 aa, unidentified
  REGION 1..773: note = Description of Unknown: Synthetic polypeptide
MILDTDYITENGKPVIRIFKKEKGEFKIEYDRNFEPYIYALLEDDESIEDIKKITGERHGKKVRIIRVEKVKKKFLGEPIEVWKLVFEHPQDYPAIRDAIRSHPAVREIFEYDIPFAKRYLIDKGLVPMEGGEELKLLAFAIATFYHEGDEFAEGEILMISYADESGAKVITWKKIDLPYVEVVSTEREAIKRFLQVLREKDPDVLLTYNGDNFDFAYIKKRCEKLGLKFTIGRDGSEPKIQRMGDRFAVEVKGRIHLDLAPVVRHTIRLPTYTLEAVYEAVFGKKKEKVYAEEIAEAWKSEEGLKRVAQYSMEDARATYELGREFFPMEVELAKLIGQSVWDVSRSSTGNLVEWYLLRVAYERNELAPNKPGGEEYQRRMRSSYIGGYVKEPEKGLWESIAYLDFRSSAGSIIVTHNVSPDTLEKECKNYDVAPIVGYRFCKDFKGFIPSILEDLIETRQKVKRKMKATIDPIEKKMLDYRQRALKILANSYYGYQGYPKARWYSKECAESVTAWGRHYIETTIKEAEKFGFKVLYADTDGFFATIPNEKPETIKSKAKKFLKHINEKLPGMLELEYEGFYLRGFFVTKKKYALIDEDGHITTRGLEVKRRDWSEIAKETQAKVLEVILREGSIEKAAGIVKKVVEDLANYRVPVEKLIIHEQITRELKRYKATGPHVAIAKRLQARGIKVKPGTIISYVVLKGSKKISDRVILFDEYDSSRHKYDPDYYIHNQVLPAVLRILEAFGYKEKDLEYQRMKQTGLGAWLKMGKK

SEQ ID NO: 1509 - protein, 773 aa, unidentified
  REGION 1..773: note = Description of Unknown: Synthetic polypeptide
MILDTDYITENGKPVIRIFKKEKGEFKIEYDRNFEPYIYALLEDDESIEDIKKITGERHGKKVRIIRVEKVKKNFLGEPIEVWKLVFEHPQDYPAIRDAIRSHPAVREIFEYDIPFAKRYLIDKGLVPMEGGEELKLLAFNIATFYHEGDEFAEGEILMISYADESGAKVITWKKIDLPYVEVVSTEREAIKRFLQVLREKDPDVLLTYNGDNFDFAYIKKRCEKLGLKFTIGRDGSEPKIQRMGDRFAVEVKGRIHLDLAPVVRHTIRLPTYTLEAVYEAVFGKKKEKVYAEEIAEAWKSEEGLKRVAQYSMEDARATYELGREFFPMEVELAKLIGQSVWDVSRSSTGNLVEWYLLRVAYERNELAPNKPGGEEYQRRMRSSYIGGYVKEPEKGLWESIAYLDFRSSAGSIIVTHNVSPDTLEKECKNYDVAPEVGYRFCKDFKGFIPSILEDLIETRQKVKRKMKATIDPIEKKMLDYRQRALKILANSYYGYQGYPKARWYSKECAESVTAWGRHYIETTIKEAEKFGFKVLYADTDGLYATIPNEKPETIKSKAKKFLKHINEKLPGMLELEYEGFYLRGFFVTKKRYALIDEDGHITTRGLEVVRRDWSEIAKETQAKVLEVILREGSIEKAAGIVKKVVEDLANYRVPVEKLIIHEQITRELKRYKATGPHVAIAKRLQARGIKVKPGTIISYVVLKGSKKISDRVILFDEYDSSRHKYDPDYYIHNQVLPAVLRILEAFGYKEKDLEYQRMKQTGLGAWLKMGKK

SEQ ID NO: 1510 - protein, 773 aa, unidentified
  REGION 1..773: note = Description of Unknown: Synthetic polypeptide
MILDTDYITENGKPVIRIFKKEKGEFKIEYDRNFEPYIYALLEDDESIEDIKKITGERHGKKVRIIRVEKVKKKFLGEPIEVWKLVFEHPQDYPAIRDAIRSHPAVREIFEYDIPFAKRYLIDKGLVPMEGGEELKLLAFAIATFYHEGDEFAEGEILMISYADESGAKVITWKKIDLPYVEVVSTEREAIKRFLQVLREKDPDVLLTYNGDNFDFAYIKKRCEKLGLKFTIGRDGSEPKIQRMGDRFAVEVKGRIHLDLAPVVRHTIRLPTYTLEAVYEAVFGKKKEKVYAEEIAEAWKSEEGLKRVAQYSMEDARATYELGREFFPMEVELAKLIGQSVWDVSRSSTGNLVEWYLLRVAYERNELAPNKPGGEEYQRRMRSSYIGGYVKEPEKGLWESIARLDFRSSAGSIIVTHNVSPDTLEKECKNYDVAPIVGYRFCKDFKGFIPSILEDLIETRQKVKRKMKATIDPIEKKMLDYRQRALKILANSYYGYQGYPKARWYSKECAESVTAWGRHYIETTIKEAEKFGFKVLYADTDGFFATIPNEKPETIKSKAKKFLKHINEKLPGMLELEYEGFYLRGFFVTKKKYALIDEDGHITTRGLEVVRRDWSEIAKETQAKVLEVILREGSIEKAAGIVKKVVEDLANYRVPVEKLIIHEQITRELKRYKATGPHVAIAKRLQARGIKVKPGTIISYVVLKGSKKISDRVILFDEYDSSRHKYDPDYYIHNQVLPAVLRILEAFGYKEKDLEYQRMKQTGLGAWLKMGKK

SEQ ID NO: 1511 - protein, 773 aa, unidentified
  REGION 1..773: note = Description of Unknown: Synthetic polypeptide
MILDTDYITENGKPVIRIFKKEKGEFKIEYDRNFEPYIYALLEDDESIEDIKKITGERHGKKVRIIRVEKVKKNFLGEPIEVWKLVFEHPQDYPAIRDAIRSHPAVREIFEYDIPFAKRYLIDKGLVPMEGGEELKLLAFAIATFYHEGDEFAEGEILMISYADESGAKVITWKKIDLPYVEVVSTEREAIKRFLQVLREKDPDVLLTYNGDNFDFAYIKKRCEKLGLKFTIGRDGSEPKIQRMGDRFAVEVKGRIHLDLAPVVRHTIRLPTYTLEAVYEAVFGKKKEKVYAEEIAEAWKSEEGLKRVAQYSMEDARATYELGREFFPMEVELAKLIGQSVWDVSRSSTGNLVEWYLLRKAYERNELAPNKPGGEEYQRRMRSSYIGGYVKEPEKGLWESIAYLDFRSSAGSIIVTHNVSPDTLEKECKNYDVAPIVGYRFCKDFKGFIPSILEDLIETRQKVKRKMKATIDPIEKKMLDYRQRALKILANSYYGYQGYPKARWYSKECAESVTAWGRHYIETTIKEAEKFGFKVLYADTDGFFATIPNEKPETIKSKAKKFLKHINEKLPGMLELEYEGFYLRGFFVTKKKYALIDEDGHITTRGLEVVRRDWSEIAKETQAKVLEVILREGSIEKAAGIVKKVVEDLANYRVPVEKLIIHEQITRELKRYKATGPHVAIAKRLQARGIKVKPGTIISYVVLKGSKKISDRVILFDEYDSSRHKYDPDYYIHNQVLPAVLRILEAFGYKEKDLEYQRMKQTGLGAWLKMGKK

SEQ ID NO: 1512 - protein, 773 aa, unidentified
  REGION 1..773: note = Description of Unknown: Synthetic polypeptide
MILDTDYITENGKPVIRIFKKEKGEFKIEYDRNFEPYIYALLEDDESIEDIKKITGERHGKKVRIIRVEKVKKKFLGEPIEVWKLVFEHPQDYPAIRDAIRSHPAVREIFEYDIPFAKRYLIDKGLVPMEGGEELKLLAFAIATFYHEGDEFAEGEILMISYADESGAKVITWKKIDLPYVEVVSTEREAIKRFLQVLREKDPDVLLTYNGDNFDFAYIKKRCEKLGLKFTIGRDGSEPKIQRMGDRFAVEVKGRIHLDLAPVVRHTIRLPTYTLEAVYEAVFGKKKEKVYAEEIAEAWKSEEGLKRVAQYSMEDARATYELGREFFPMEVELAKLIGQSVWDVSRSSTGNLVEWYLLRVAYERNELAPNKPGGEEYQRRMRSSYIGGYVKEPEKGLWESIAYLDFRSSAGSIIVTHNVSPDTLEKECKNYDVAPIVGHRFCKDFKGFIPSILEDLIETRQKVKRKMKATIDPIEKKMLDYRQRALKILANSYYGYQGYPKARWYSKECAESVTAWGRHYIETTIKEAEKFGFKVLYADTDGFFATIPNEKPETIKSKAKKFLKHINEKLPGMLELEYEGFYLRGFFVTKKKYALIDEDGHITTRGLEVVRRDWSEIAKETQAKVLEVILREGSIEKAAGIVKKVVEDLANYRVPVEKLIIHEQITRELKRYKATGPHVAIAKRLQARGIKVKPGTIISYVVLKGSKKISDRVILFDEYDSSRHKYDPDYYIHNQVLPAVLRILEAFGYKEKDLEYQRMKQTGLGAWLKMGKK

SEQ ID NO: 1513 - protein, 773 aa, unidentified
  REGION 1..773: note = Description of Unknown: Synthetic polypeptide
MILDTDYITENGKPVIRIFKKEKGEFKIEYDRNFEPYIYALLEDDESIEDIKKITGERHGKKVRIIRVEKVKKKFLGEPIEVWKLVFEHPQDYPAIRDAIRSHPAVREIFEYDIPFAKRYLIDKGLVPMEGGEELKLLAFAIATFYHEGDEFAEGEILMISYADESGAKVITWKKIDLPYVEVVSTEREAIKRFLQVLREKDPDVLLTYNGDNFDFAYIKKRCEKLGLKFTIGRDGSEPKIQRMGDRFAVEVKGRIHLDLAPVVRHTIRLPTYTLEAVYEAVFGKKKEKVYAEEIAEAWKSEEGLKRVAQYSMEDARATYELGREFFPMEVELAKLIGQSVWDVSRSSTGNLVEWYLLRVAYERNELAPNKPGGEEYQRRMRSSYIGGYVKEPEKGLWESIAYLDFASSAGSIIVTHNVSPDTLEKECKNYDVAPIVGYRFCKDFKGFIPSILEDLIETRQKVKRKMKATIDPIEKKMLDYRQRALKILANSYYGYQGYPKARWYSKECAESVTAWGRHYIETTIKEAEKFGFKVLYADTDGFFATIPNEKPETIKSKAKKFLKHINEKLPGMLELEYEGFYLRGFFVTKKKYALIDEDGHITTRGLEVVRRDWSEIAKETQAKVLEVILREGSIEKAAGIVKKVVEDLANYRVPVEKLIIHEQITRELKRYKATGPHVAIAKRLQARGIKVKPGTIISYVVLKGSKKISDRVILFDEYDSSRHKYDPDYYIHNQVLPAVLRILEAFGYKEKDLEYQRMKQTGLGAWLKMGKK

SEQ ID NO: 1514 - protein, 773 aa, unidentified
  REGION 1..773: note = Description of Unknown: Synthetic polypeptide
MILDTDYITENGKPVIRIFKKEKGEFKIEYDRNFEPYIYALLEDDESIEDIKKITGERHGKKVRIIRVEKVKKNFLGEPIEVWKLVFEHPQDYPAIRDAIRSHPAVREIFEYDIPFAKRYLIDKGLVPMEGGEELKLLAFAIATFYHEGDEFAEGEILMISYADESGAKVITWKKIDLPYVEVVSTEREAIKRFLRVLREKDPDVLLTYNGDNFDFAYIKKRCEKLGLKFTIGRDGSEPKIQRMGDRFAVEVKGRIHLDLAPVVRHTIRLPTYTLEAVYEAVFGKKKEKVYAEEIAEAWKSEEGLKRVAQYSMEDARATYELGREFFPMEVELAKLIGQSVWDVSRSSTGNLVEWYLLRVAYERNELAPNKPGGEEYQRRMRSSYIGGYVKEPEKGLWESIAYLDFRSSAGSIIVTHNVSPDTLEKECKNYDVAPIVGYRFCKDFKGFIPSILEDLIETRQKVKRKMKATIDPIEKKMLDYRQRALKILANSYYGYQGYPKARWYSKECAESVTAWGRHYIETTIKEAEKFGFKVLYADTDGFFATIPNEKPETIKSKAKKFLKHINEKLPGMLELEYEGFYLRGFFVTKKKYALIDEDGHITTRGLEVVRRDWSEIAKETQAKVLEVILREGSIEKAAGIVKKVVEDLANYRVPVEKLIIHEQITRELKRYKATGPHVAIAKRLQARGIKVKPGTIISYVVLKGSKKISDRVILFDEYDSSRHKYDPDYYIHNQVLPAVLRILEAFGYKEKDLEYQRMKQTGLGAWLKMGKK

SEQ ID NO: 1515 - protein, 773 aa, unidentified
  REGION 1..773: note = Description of Unknown: Synthetic polypeptide
MILDTDYITENGKPVIRIFKKEKGEFKIEYDRNFEPYIYALLEDDESIEDIKKITGERHGKKVRIIRVEKVKKKFLGEPIEVWKLVFEHPQDVPAIRDAIRSHPAVREIFEYDIPFAKRYLIDKGLVPMEGGEELKLLAFDIATFYHEGDEFAEGEILMISYADESGAKVITWKKIDLPYVEVVSTEREAIKRFLQVLREKDPDVLLTYNGDNFDFAYIKKRCEKLGLKFTIGRDGSEPKIQRMGDRFAVEVKGRIHLDLYPVVRHTIRLPTYTLEAVYEAVFGKKKEKVYAEEIAEAWKSEEGLKRVAQYSMEDARATYELGREFFPMEVELAKLIGQSVWDVSRSSTGNLVEWYLLRVAYERNELAPNKPGGEEYQRRMRSSYIGGYVKEPEKGLWESIAYLDFRSLYPSIIVTHNVSPDTLEKECKNYDVAPIVGYRFCKDFKGFIPSILEDLIETRQKVKRKMKATIDPIEKKMLDYRQRALKILANSYYGYQGYPKARWYSKECAESVTAWGRHYIETTIKEAEKFGFKVLYADTDGFFATIPNEKPETIKSKAKKFLKHINEKLPGMLELEYEGFYLRGFFVTKKKYALIDEDGHITTRGLEVVRRDWSEIAKETQAKVLEVILREGSIEKAAGIVKKVVEDLANYRVPVEKLIIHEQITRELKDYKATGPHVAIAKRLQARGIKVKPGTIISYVVLKGSKKISDRVILFDEYDSSRHKYDPDYYIHNQVLPAVLRILEAFGYKEKDLEYQRMKQTGLGAWLKMGKK

SEQ ID NO: 1516 - protein, 773 aa, unidentified
  REGION 1..773: note = Description of Unknown: Synthetic polypeptide
MILDTDYITENGKPVIRIFKKEKGEFKIEYDRNFEPYIYALLEDDESIEDIKKITGERHGKKVRIIRVEKVKKKFLGEPIEVWKLVFEHPQDVPAIRDAIRSHPAVREIFEYDIPFAKRYLIDKGLVPMEGGEELKLLAFDIETFYHEGDEFAEGEILMISYADESGAKVITWKKIDLPYVEVVSTEREAIKRFLQVLREKDPDVLLTYNGDNFDFAYIKKRCEKLGLKFTIGRDGSEPKIQRMGDRFAVEVKGRIHLDLYPVVRHTIRLPTYTLEAVYEAVFGKKKEKVYAEEIAEAWKSEEGLKRVAQYSMEDARATYELGREFFPMEVELAKLIGQSVWDVSRSSTGNLVEWYLLRVAYERNELAPNKPGGEEYQRRMRSSYIGGYVKEPEKGLWESIAYLDFRSSYPSIIVTHNVSPDTLEKECKNYDVAPIVGYRFCKDFKGFIPSILEDLIETRQKVKRKMKATIDPIEKKMLDYRQRALKILANSYYGYQGYPKARWYSKECAESVTAWGRHYIETTIKEAEKFGFKVLYADTDGFFATIPNEKPETIKSKAKKFLKHINEKLPGMLELEYEGFYLRGFFVTKKKYALIDEDGHITTRGLEVVRRDWSEIAKETQAKVLEVILREGSIEKAAGIVKKVVEDLANYRVPVEKLIIHEQITRELKDYKATGPHVAIAKRLQARGIKVKPGTIISYVVLKGSKKISDRVILFDEYDSSRHKYDPDYYIHNQVLPAVLRILEAFGYKEKDLEYQRMKQTGLGAWLKMGKK

SEQ ID NO: 1517 - protein, 773 aa, unidentified
  REGION 1..773: note = Description of Unknown: Synthetic polypeptide
MILDTDYITENGKPVIRIFKKEKGEFKIEYDRNFEPYIYALLEDDESIEDIKKITGERHGKKVRIIRVEKVKKKFLGEPIEVWKLVFEHPQDYPAIRDAIRSHPAVREIFEYDIPFAKRYLIDKGLVPMEGGEELKLLAFAIATFYHEGDEFAEGEILMISYADESGAKVITWKKIDLPYVEVVSTEREAIKRFLQVLREKDPDVLLTYNGDNFDFAYIKKRCEKLGLKFTIGRDGSEPKIQRMGDRFAVEVKGRIHLDLAPVVRHTIRLPTYTLEAVYEAVFGKKKEKVYAEEIAEAWKSEEGLKRVAQYSMEDARATYELGREFFPMEVELAKLIGQSVWDVSRSSTGNLVEWYLLRVAYERNELAPNKPGGEEYQRRMRSSYIGGYVKEPEKGLWESIAYLDFRSSAGSIIVTHNVSPDTLEKECKNYDVAPIVGYRFCKDFKGFIPSILEDLIETRQKVKRKMKATQDPIEKKMLDYRQRALKILANSYYGYQGYPKARWYSKECAESVTAWGRHYIETTIKEAEKFGFKVLYADTDGFFATIPNEKPETIKSKAKKFLKHINEKLPGMLELEYEGFYLRGFFVTKKKYALIDEDGHITTRGLEVVRRDWSEIAKETQAKVLEVILREGSIEKAAGIVKKVVEDLANYRVPVEKLIIHEQITRELKRYKATGPHVAIAKRLQARGIKVKPGTIISYVVLKGSKKISDRVILFDEYDSSRHKYDPDYYIHNQVLPAVLRILEAFGYKEKDLEYQRMKQTGLGAWLKMGKK

SEQ ID NO: 1518 - protein, 773 aa, unidentified
  REGION 1..773: note = Description of Unknown: Synthetic polypeptide
MILDTDFITENGKPVIRIFKKEKGEFKIEYDRNFEPYIYALLEDDESIEDIKKITGERHGKKVRIIRVEKVKKKFLGEPIEVWKLVFEHPQDYPAIRDAIRSHPAVREIFEYDIPFAKRYLIDKGLVPMEGGEELKLLAFNIATFYHEGDEFAEGEILMISYADESGAKVITWKKIDLPYVEVVSTEREAIKRFLQVLREKDPDVLLTYNGDNFDFAYIKKRCEKLGLKFTIGRDGSEPKIQRMGDRFAVEVKGRIHLDLAPVVRHTIRLPTYTLEAVYEAVFGKKKEKVYAEEIAEAWKSEEGLKRVAQYSMEDARATYELGREFFPMEVELAKLIGQSVWDVSRSSTGNLVEWYLLRVAYERNELAPNKPGGEEYQRRMRSSYIGGYVKEPEKGLWESIAYLDFRSSAGSIIVTHNVSPDTLEKECKNYDVAPEVGYRFCKDFKGFIPSILEDLIETRQKVKRKMKATIDPIEKKMLDYRQRALKILANSYYGYQGYPKARWYSKECAESVTAWGRHYIETTIKEAEKFGFKVLYADTDGFFATIPNEKPETIKSKAKKFLKHINEKLPGMLELEYEGFYLRGFFVTKKKYALIDEDGHITTRGLEVVRRDWSEIAKETQAKVLEVILREGSIEKAAGIVKKVVEDLANYRVPVEKLIIHEQITRELKRYKATGPHVAIAKRLQARGIKVKPGTIISYVVLKGSKKISDRVILFDEYDSSRHKYDPDYYIHNQVLPAVLRILEAFGYKEKDLEYQRMKQTGLGAWLKMGKK

SEQ ID NO: 1519 - protein, 773 aa, unidentified
  REGION 1..773: note = Description of Unknown: Synthetic polypeptide
MILDTDYITENGKPVIRIFKKEKGEFKIEYDRNFEPYIYALLEDDESIEDIKKITGERHGKKVRIIRVEKVKKKFLGEPIEVWKLVFEHPQDYPAIRDAIRSHPAVREIFEYDIPFAKRYLIDKGLVPMEGGEELKLLAFAIATFYHDGDEFAEGEILMISYADESGAKVITWKKIDLPYVEVVSTEREAIKRFLQVLREKDPDVLLTYNGDNFDFAYIKKRCEKLGLKFTIGRDGSEPKIQRMGDRFAVEVKGRIHLDLAPVVRHTIRLPTYTLEAVYEAVFGKKKEKVYAEEIAEAWKSEEGLKRVAQYSMEDARATYELGREFFPMEVELAKLIGQSVWDVSRSSTGNLVEWYLLRVAYERNELAPNKPGGEEYQRRMRSSYIGGYVKEPEKGLWESIAYLDFRSSAGSIIVTHNVSPDTLEKECKNYDVAPIVGYRFCKDFKGFIPSILEDLIETRQKVKRKMKATIDPIEKKMLDYRQRALKILANSYYGYQGYPKARWYSKECAESVTAWGRHYIETTIKEAEKFGFKVLYADTDGFFATIPNEKPETIKSKAKKFLKHINEKLPGMLELEYEGFYLRGFFVTKKKYALIDEDGHITTRGLEVVRRDWSEIAKETQAKVLEVILREGSIEKAAGIVKKVVEDLANYRVPVEKLIIHEQITRELKRYKATGPHVAIAKRLQARGIKVKPGTIISYVVLKGSKKISDRVILFDEYDSSRHKYDPDYYIHNQVLPAVLRILEAFGYKEKDLEYQRMKQTGLGAWLKMGKK

SEQ ID NO: 1520 - protein, 773 aa, unidentified
  REGION 1..773: note = Description of Unknown: Synthetic polypeptide
MILDTDYITENGKPVIRIFKKEKGEFKIEYDRNFEPYIYALLEDDESIEDIKKITGERHGKKVRIIRVEKVKKNFLGEPIEVWKLVFEHPQDYPAIRDAIRSHPAVREIFEYDIPFAKRYLIDKGLVPMEGGEELKLLAFAIATFYHEGDEFAEGEILMISYADESGAKVITWKKIDLPYVEVVSTEREAIKRFLQVLREKDPDVLLTYNGDNFDFAYIKKRCEKLGLKFTIGRDGSEPKIQRMGDRFAVEVKGRIHLDLAPVVRHTIRLPTYTLEAVYEAVFGKKKEKVYAEEIAEAWKSGEGLKRVAQYSMEDARATYELGREFFPMEVELAKLIGQSVWDVSRSSTGNLVEWYLLRVAYERNELAPNKPGGEEYQRRMRSSYIGGYVKEPEKGLWESIAYLDFRSSAGSIIVTHNVSPDTLEKECKNYDVAPIVGYRFCKDFKGFIPSILEDLIETRQKVKRKMKATIDPIEKKMLDYRQRALKILANSYYGYQGYPKARWYSKECAESVTAWGRHYIETTIKEAEKFGFKVLYADTDGFFATIPNEKPETIKSKAKKFLKHINEKLPGMLELEYEGFYLRGFFVTKKKYALIDEDGHITTRGLEVVRRDWSEIAKETQAKVLEVILREGSIEKAAGIVKKVVEDLANYRVPVEKLIIHEQITRELKRYKATGPHVAIAKRLQARGIKVKPGTIISYVVLKGSKKISDRVILFDEYDSSRHKYDPDYYIHNQVLPAVLRILEAFGYKEKDLEYQRMKQTGLGAWLKMGKK

SEQ ID NO: 1521 - protein, 773 aa, unidentified
  REGION 1..773: note = Description of Unknown: Synthetic polypeptide
MILDTDYITENGKPVIRIFKKEKGEFKIEYDRNFEPYIYALLEDDESIEDIKKITGERHGKKVRIIRVEKVKKNFLGEPIEVWKLVFEHPQDYPAIRDAIRSHPAVREIFEYDIPFAKRYLIDKGLVPMEGGEELKLLAFNIATFYHEGDEFAEGEILMISYADESGAKVITWKKIDLPYVEVVSTEREAIKRFLQVLREKDPDVLLTYNGDNFPFAYIKKRCEKLGLKFTIGRDGSEPKIQRMGDRFAVEVKGRIHLDLAPVVRHTIRLPTYTLEAVYEAVFGKKKEKVYAEEIAEAWKSEEGLKRVAQYSMEDARATYELGREFFPMEVELAKLIGQSVWDVSRSSTGNLVEWYLLRVAYERNELAPNKPGGEEYQRRMRSSYIGGYVKEPEKGLWESIAYLDFRSSAGSIIVTHNVSPDTLEKECKNYDVAPEVGYRFCKDFKGFIPSILEDLIETRQKVKRKMKATIDPIEKKMLDYRQRALKILANSYYGYQGYPKARWYSKECAESVTAWGRHYIETTIKEAEKFGFKVLYADTDGFFATIPNEKPETIKSKAKKFLKHINEKLPGMLELEYEGFYLRGFFVTKKRYALIDEDGHITTRGLEVVRRDWSEIAKETQAKVLEVILREGSIEKAAGIVKKVVEDLANYRVPVEKLIIHEQITRELKRYKATGPHVAIAKRLQARGIKVKPGTIISYVVLKGSKKISDRVILFDEYDSSRHKYDPDYYIHNQVLPAVLRILEAFGYKEKDLEYQRMKQTGLGAWLKMGKK

SEQ ID NO: 1522 - protein, 773 aa, unidentified
  REGION 1..773: note = Description of Unknown: Synthetic polypeptide
MILDTDYITENGKPVIRIFKKEKGEFKIEYDRNFEPYIYALLEDDESIEDIKKITGERHGKKVRIIRVEKVKKNFLGEPIEVWKLVFEHPQDYPAIRDAIRSHPAVREIFEYDIPFAKRYLIDKGLVPMEGGEELKLLAFNIATFYHEGDEFAEGEILMISYADESGAKVITWKKIDLPYVEVVSTEREAIKRFLQVLREKDPDVLLTYNGDNFDFAYIKKRCEKLGLKFTIGRDGSEPKIQRMGDRFAVEVKGRIHLDLAPVVRHTIRLPTYTLEAVYEAVFGKKKEKVYAEEIAEAWKSEEGLKRVAQYSMEDARATYELGREFFPMEVELAKLIGQSVWDVSRSSTGNLVEWYLLRVAYERNELAPNKPGGEEYQRRMRSSYIGGYVKEPEKGLWESIAYLDFRSSAGSIIVTHNVSPDTLEKECKNYDVAPIVGYRFCKDFKGFIPSILEDLIETRQKVKRKMKATIDPIEKKMLDYRQRALKILANSYYGYQGYPKARWYSKECAESVTAWGRHYIETTIKEAEKFGFKVLYADTDGFFATIPNEKPETIKSKAKKFLKHINEKLPGMLELEYEGFYLRGFFVTKKRYALIDEDGHITTRGLEVVRRDWSEIAKETQAKVLEVILREGSIEKAAGIVKKVVEDLANYRVPVEKLIIHEQITRELKRYKATGPHVAIAKRLQARGIKVKPGTIISYVVLKGSKKISDRVILFDEYDSSRHKYDPDYYIHNQVLPAVLRILEAFGYKEKDLEYQRMKQTGLGAWLKMGKK

SEQ ID NO: 1523 - protein, 773 aa, unidentified
  REGION 1..773: note = Description of Unknown: Synthetic polypeptide
MILDTDYITENGKPVIRIFKKEKGEFKIEYDRNFEPYIYALLEDDESIEDIKKITGERHGKKVRIIRVEKVKKKFLGEPIEVWKLVFEHPQDVPAIRDAIRSHPAVREIFEYDIPFAKRYLIDKGLVPMEGGEELKLLAFDIETFYHEGDEFAEGEILMISYADESGAKVITWKKIDLPYVEVVSTEREAIKRFLQVLREKDPDVLLTYNGDNFDFAYIKKRCEKLGLKFTIGRDGSEPKIQRMGDRFAVEVKGRIHLDLAPVVRHTIRLPTYTLEAVYEAVFGKKKEKVYAEEIAEAWKSEEGLKRVAQYSMEDARATYELGREFFPMEVELAKLIGQSVWDVSRSSTGNLVEWYLLRVAYERNELAPNKPGGEEYQRRMRSSYIGGYVKEPEKGLWESIAYLDFRSLYPSIIVTHNVSPDTLEKECKNYDVAPIVGYRFCKDFKGFIPSILEDLIETRQKVKRKMKATIDPIEKKMLDYRQRALKILANSYYGYQGYPKARWYSKECAESVTAWGRHYIETTIKEAEKFGFKVLYADTDGFFATIPNEKPETIKSKAKKFLKHINEKLPGMLELEYEGFYLRGFFVTKKKYALIDEDGHITTRGLEVVRRDWSEIAKETQAKVLEVILREGSIEKAAGIVKKVVEDLANYRVPVEKLIIHEQITRELKDYKATGPHVAIAKRLQARGIKVKPGTIISYVVLKGSKKISDRVILFDEYDSSRHKYDPDYYIHNQVLPAVLRILEAFGYKEKDLEYQRMKQTGLGAWLKMGKK

SEQ ID NO: 1524 - protein, 773 aa, unidentified
  REGION 1..773: note = Description of Unknown: Synthetic polypeptide
MILDTDYITENGKPVIRIFKKEKGEFKIEYDRNFEPYIYALLEDDESIEDIKKITGERHGKKVRIIRVEKVKKNFLGEPIEVWKLVFEHPQDYPAIRDAIRSHPAVREIFEYDIPFAKRYLIDKGLVPMEGGEELKLLAFNIATFYHEGDEFAEGEILMISYADESGAKVITWKKIDLPYVEVVSTEREAIKRFLQVLREKDPDVLLTYNGDNFDFAYIKKRCEKLGLKFTIGRDGSEPKIQRMGDRFAVEVKGRIHLDLAPVVRHTIRLPTYTLEAVYEAVFGKKKEKVYAEEIAEAWKSEEGLKRVAQYSMEDARATYELGREFFPMEVELAKLIGQSVWDVSRSSTGNLVEWYLLRVAYERNELAPNKPGGEEYQRRMRSSYIGGYVKEPEKGLWESIAYLDFRSSAGSIIVTHNVSPDTLEKECKNYDVAPQVGYRFCKDFKGFIPSILEDLIETRQKVKRKMKATIDPIEKKMLDYRQRALKILANSYYGYQGYPKARWYSKECAESVTAWGRHYIETTIKEAEKFGFKVLYADTDGFFATIPNEKPETIKSKAKKFLKHINEKLPGMLELEYEGFYLRGFFVTKKKYALIDEDGHITTRGLEVVRRDWSEIAKETQAKVLEVILREGSIEKAAGIVKKVVEDLANYRVPVEKLIIHEQITRELKRYKATGPHVAIAKRLQARGIKVKPGTIISYVVLKGSKKISDRVILFDEYDSSRHKYDPDYYIHNQVLPAVLRILEAFGYKEKDLEYQRMKQTGLGAWLKMGKK

SEQ ID NO: 1525 - protein, 773 aa, unidentified
  REGION 1..773: note = Description of Unknown: Synthetic polypeptide
MILDTDYITENGKPVIRIFKKEKGEFKIEYDRNFEPYIYALLEDDESIEDIKKITGERHGKKVRIIRVEKVKKNFLGEPIEVWKLVFEHPQDYPAIRDAIRSHPAVREIFEYDIPFAKRYLIDKGLVPMEGGEELKLLAFNIATFYHEGDEFAEGEILMISYADESGAKVITWKKIDLPYVEVVSTEREAIKRFLQVLREKDPDVLLTYNGDNFDFAYIKKRCEKLGLKFTIGRDGSEPKIQRMGDRFAVEVKGRIHLDLAPVVRHTIRLPTYTLEAVYEAVFGKKKEKVYAEEIAEAWKSEEGLKRVAQYSMEDARATYELGREFFPMEVELAKLIGQSVWDVSRSSTGNLVEWYLLRVAYERNELAPNKPGGEEYQRRMRSSYIGGYVKEPEKGLWESIAYLDFRSSAGSIIVTHNVSPDTLEKECKNYDVAPIVGYRFCKDFKGFIPSILEDLIETRQKVKRKMKATIDPIEKKMLDYRQRALKILANSYYGYQGYPKARWYSKECAESVTAWGRHYIETTIKEAEKFGFKVLYADTDGFFATIPNEKPETIKSKAKKFLKHINEKLPGMLELEYEGFYLRGFFVTKKKYALIDEDGHITTRGLEIVRRDWSEIAKETQAKVLEVILREGSIEKAAGIVKKVVEDLANYRVPVEKLIIHEQITRELKRYKATGPHVAIAKRLQARGIKVKPGTIISYVVLKGSKKISDRVILFDEYDSSRHKYDPDYYIHNQVLPAVLRILEAFGYKEKDLEYQRMKQTGLGAWLKMGKK

SEQ ID NO: 1526 - protein, 773 aa, unidentified
  REGION 1..773: note = Description of Unknown: Synthetic polypeptide
MILDTDYITENGKPVIRIFKKEKGEFKIEYDRNFEPYIYALLEDDESIEDIKKITGERHGKKVRIIRVEKVKKKFLGEPIEVWKLVFEHPQDYPAIRDAIRSHPAVREIFEYDIPFAKRYLIDKGLVPMEGGEELKLLAFAIATFYHEGDEFAEGEILMISYADESGAKVITWKKIDLPYVEVVSTEREAIKRFLQVLREKDPDVLLTYNGDNFDFAYIKKRCEKLGLKFTIGRDGSEPKIQRMGDRFAVEVKGRIHLDLAPVVRHTIRLPTYTLEAVYEAVFGKKKEKVYAEEIAEAWKSEEGLKRVAQYSMEDARATYELGREFFPMEVELAKLIGQSVWDVSRSSTGNLVEWYLLRVAYERNELAPNKPDEREYERRLRESYEGGYVKEPEKGLWESIAYLDFRSSAGSIIVTHNVSPDTLEKECKNYDVAPIVGYRFCKDFKGFIPSILEDLIETRQKVKRKMKATIDPIEKKMLDYRQRALKILANSYYGYQGYPKARWYSKECAESVTAWGRHYIETTIKEAEKFGFKVLYADTDGFFATIPNEKPETIKSKAKKFLKHINEKLPGMLELEYEGFYLRGFFVTKKKYALIDEDGHITTRGLEVVRRDWSEIAKETQAKVLEVILREGSIEKAAGIVKKVVEDLANYRVPVEKLIIHEQITRELKRYKATGPHVAIAKRLQARGIKVKPGTIISYVVLKGSKKISDRVILFDEYDSSRHKYDPDYYIHNQVLPAVLRILEAFGYKEKDLEYQRMKQTGLGAWLKMGKK

SEQ ID NO: 1527 - protein, 773 aa, unidentified
  REGION 1..773: note = Description of Unknown: Synthetic polypeptide
MILDTDYITENGKPVIRIFKKEKGEFKIEYDRNFEPYIYALLEDDESIEDIKKITGERHGKKVRIIRVEKVKKNFLGEPIEVWKLVFEHPQDYPAIRDAIRSHPAVREIFEYDIPFAKRYLIDKGLVPMEGGEELKLLAFAIATFYHEGDEFAEGEILMISYADESGAKVITWKKIDLPYVEVVSTEREAIKRFLQVLREKDPDVLLTYNGDNFDFAYIKKRCEKLGLKFTIGRDGSEPKIQRMGDRFAVEVKGRIHLDLAPVVRHTIRLPTYTLEAVYEAVFGKKKEKVYAEEIAEAWKSEEGLKRVAQYSMEDARATYELGREFFPMEVELAKLIGQSVWDVSRSSTGNLVEWYLLRVAYERNELAPNKPGGEEYQRRMRSSYIGGYVKEPEKGLWESIAYLDFRSSAGSIIVTHNVSPDTLEKECKNYDVAPIVGYRFCKDFKGFIPSILEDLIETRQKVKRKMKATIDPIEKKMLDYRQRALKILANSYYGYQGYPKARWYSKECAESVTAWGRHYIETTIKEAEKFGFKVLYADTDGFFATIPNEKPETIKSKAKKFLKHINEKLPGMLELEYEGFYLRGFFVTKKKYALIDEDGHITTRGLEVVRRDWSEIAKETQAKVLEVILREGSIEKAAGIVKKVVEDLANYRVPVEKLIIHEQITRELKRYKATGPHVAIAKRLQARGIKVKPGTIISYVVLKGSKKISDRVILFDEYDSSRHKYDPDYYIHNQVLPAVERILEAFGYKEKDLEYQRMKQTGLGAWLKMGKK

SEQ ID NO: 1528 - protein, 773 aa, unidentified
  REGION 1..773: note = Description of Unknown: Synthetic polypeptide
MILDTDYITENGKPVIRIFKKEKGEFKIEYDRNFEPYIYALLEDDESIEDIKKITGERHGKKVRIIRVEKVKKNFLGEPIEVWKLVFEHPQDYPAIRDAIRSHPAVREIFEYDIPFAKRYLIDKGLVPMEGGEELKLLAFNIATFYHEGDEFAEGEILMISYADESGAKVITWKKIDLPYVEVVSTEREAIKRFLQVLREKDPDVLLTYNGDNFDFAYIKKRCEKLGLKFTIGRDGSEPKIQRMGDRFAVEVKGRIHLDLAPVVRHTIRLPTYTLEAVYEAVFGKKKEKVYAEEIAEAWKSEEGLKRVAQYSMEDARATYELGREFFPMEVELAKLIGQSVWDVSRSSTGNLVEWYLLRVAYERNELAPNKPGGEEYQRRMRSSYIGGYVKEPEKGLWESIAYLDFRSSAGSIIVTHNVSPDTLEKECKNYDVAPEVGHRFCKDFKGFIPSILEDLIETRQKVKRKMKATIDPIEKKMLDYRQRALKILANSYYGYQGYPKARWYSKECAESVTAWGRHYIETTIKEAEKFGFKVLYADTDGFFATIPNEKPETIKSKAKKFLKHINEKLPGMLELEYEGFYLRGFFVTKKRYALIDEDGHITTRGLEVVRRDWSEIAKETQAKVLEVILREGSIEKAAGIVKKVVEDLANYRVPVEKLIIHEQITRELKRYKATGPHVAIAKRLQARGIKVKPGTIISYVVLKGSKKISDRVILFDEYDSSRHKYDPDYYIHNQVLPAVLRILEAFGYKEKDLEYQRMKQTGLGAWLKMGKK

SEQ ID NO: 1529 - protein, 773 aa, unidentified
  REGION 1..773: note = Description of Unknown: Synthetic polypeptide
MILDTDYITENGKPVIRIFKKEKGEFKIEYDRNFEPYIYALLEDDESIEDIKKITGERHGKKVRIIRVEKVKKKFLGEPIEVWKLVFEHPQDVPAIRDAIRSHPAVREIFEYDIPFAKRYLIDKGLVPMEGGEELKLLAFAIATFYHEGDEFAEGEILMISYADESGAKVITWKKIDLPYVEVVSTEREAIKRFLQVLREKDPDVLLTYNGDNFDFAYIKKRCEKLGLKFTIGRDGSEPKIQRMGDRFAVEVKGRIHLDLYPVVRHTIRLPTYTLEAVYEAVFGKKKEKVYAEEIAEAWKSEEGLKRVAQYSMEDARATYELGREFFPMEVELAKLIGQSVWDVSRSSTGNLVEWYLLRVAYERNELAPNKPGGEEYQRRMRSSYIGGYVKEPEKGLWESIAYLDFRSLYPSIIVTHNVSPDTLEKECKNYDVAPIVGYRFCKDFKGFIPSILEDLIETRQKVKRKMKATIDPIEKKMLDYRQRALKILANSYYGYQGYPKARWYSKECAESVTAWGRHYIETTIKEAEKFGFKVLYADTDGFFATIPNEKPETIKSKAKKFLKHINEKLPGMLELEYEGFYLRGFFVTKKKYALIDEDGHITTRGLEVVRRDWSEIAKETQAKVLEVILREGSIEKAAGIVKKVVEDLANYRVPVEKLIIHEQITRELKDYKATGPHVAIAKRLQARGIKVKPGTIISYVVLKGSKKISDRVILFDEYDSSRHKYDPDYYIHNQVLPAVLRILEAFGYKEKDLEYQRMKQTGLGAWLKMGKK

SEQ ID NO: 1530 - protein, 773 aa, unidentified
  REGION 1..773: note = Description of Unknown: Synthetic polypeptide
MILDTDYITENGKPVIRIFKKEKGEFKIEYDRNFEPYIYALLEDDESIEDIKKITGERHGKKVRIIRVEKVKKKFLGEPIEVWKLVFEHPQDYPAIRDAIRSHPAVREIFEYDIPFAKRYLIDKGLVPMEGGEELKLLAFAIATFYHEGDEFAEGEILMISYADESGAKVITWKKIDLPYVEVVSTEREAIKRFLQVLREKDPDVLLTYNGDNFDFAYIKKRCEKLGLKFTIGRDGSEPKIQRMGDRFAVEVKGRIHLDLAPVVRHTIRLPTYTLEAVYEAVFGKKKEKVYAEEIAEAWKSEEGLKRVAQYSMEDARATYELGREFFPMEVELAKLIGQSVWDVSRSSTGNLVEWFLLRVAYERNELAPNKPGGEEYQRRMRSSYIGGYVKEPEKGLWESIAYLDFRSSAGSIIVTHNVSPDTLEKECKNYDVAPIVGYRFCKDFKGFIPSLLEDLIETRQKVKRKMKATIDPIEKKMLDYRQRALKILANSFYGYQGYPKARWYSKECAESVTAWGRHYIETTIKEAEKFGFKVLYADTDGFFATIPNEKPETIKSKAKKFLKHINEKLPGMLELEYEGFYLRGFFVTKKKYALIDEDGHITTRGLEVVRRDWSEIAKETQAKVLEVILREGSIEKAAGIVKKVVEDLANYRVPVEKLIIHEQITRELKRYKATGPHVAIAKRLQARGIKVKPGTIISYVVLKGSKKISDRVILFDEYDSSRHKYDPDYYIHNQVLPAVLRILEAFGYKEKDLEYQRMKQTGLGAWLKMGKK

SEQ ID NO: 1531 - protein, 773 aa, unidentified
  REGION 1..773: note = Description of Unknown: Synthetic polypeptide
MILDTDYITENGKPVIRIFKKEKGEFKIEYDRNFEPYIYALLEDDESIEDIKKITGERHGKKVRIIRVEKVKKKFLGEPIEVWKLVFEHPQDYPAIRDAIRSHPAVREIFEYDIPFAKRYLIDKGLVPMEGGEELKLLAFAIATFYHEGDEFAEGEILMISYADESGAKVITWKKIDLPYVEVVSTEREAIKRFLQVLREKDPDVLLTYNGDNFDFAYIKKRCEKLGLKFTIGRDGSEPKIQRMGDRFAVEVKGRIHLDLAPVVRHTIRLPTYTLEAVYEAVFGKKKEKVYAEEIAEAWKSEEGLKRVAQYSMEDARATYELGREFFPMEVELAKLIGQSVWDVSRSSTGNLVEWYLLRVAYERNELAPNKPGGEEYQRRMRSSYIGGYVKEPEKGLWESIAHLDFRSSAGSIIVTHNVSPDTLEKECKNYDVAPIVGYRFCKDFKGFIPSILEDLIETRQKVKRKMKATIDPIEKKMLDYRQRALKILANSYYGYQGYPKARWYSKECAESVTAWGRHYIETTIKEAEKFGFKVLYADTDGFFATIPNEKPETIKSKAKKFLKHINEKLPGMLELEYEGFYLRGFFVTKKKYALIDEDGHITTRGLEVVRRDWSEIAKETQAKVLEVILREGSIEKAAGIVKKVVEDLANYRVPVEKLIIHEQITRELKRYKATGPHVAIAKRLQARGIKVKPGTIISYVVLKGSKKISDRVILFDEYDSSRHKYDPDYYIHNQVLPAVLRILEAFGYKEKDLEYQRMKQTGLGAWLKMGKK

SEQ ID NO: 1532 - protein, 773 aa, unidentified
  REGION 1..773: note = Description of Unknown: Synthetic polypeptide
MILDTDYITENGKPVIRIFKKEKGEFKIEYDRNFEPYIYALLEDDESIEDIKKITGERHGKKVRIIRVEKVKKKFLGEPIEVWKLVFEHPQDYPAIRDAIRSHPAVREIFEYDIPFAKRYLIDKGLVPMEGGEELKLLAFAIATFYHEGDEFAEGEILMISYADESGAKVITWKKIDLPYVEVVSTEREAIKRFLQVLREKDPDVLLTYNGDNFDFAYIKKRCEKLGLKFTIGRDGSEPKIQRMGDRFAVEVKGRIHLDLAPVVRHTIRLPTYTLEAVYEAVFGKKKEKVYAEEIAEAWKSEEGLKRVAQYSMEDARATYELGREFFPMEVELAKLIGQSVWDVSRSSTGNLVEWFLLRVAYERNELAPNKPGGEEYQRRMRSSYIGGYVKEPEKGLWESIAYLDFRSSAGSIIVTHNVSPDTLEKECKNYDVAPIVGYRFCKDFKGFIPSILEDLIETRQKVKRKMKATIDPIEKKMLDYRQRALKILANSYYGYQGYPKARWYSKECAESVTAWGRHYIETTIKEAEKFGFKVLYADTDGFFATIPNEKPETIKSKAKKFLKHINEKLPGMLELEYEGFYLRGFFVTKKKYALIDEDGHITTRGLEVVRRDWSEIAKETQAKVLEVILREGSIEKAAGIVKKVVEDLANYRVPVEKLIIHEQITRELKRYKATGPHVAIAKRLQARGIKVKPGTIISYVVLKGSKKISDRVILFDEYDSSRHKYDPDYYIHNQVLPAVLRILEAFGYKEKDLEYQRMKQTGLGAWLKMGKK

SEQ ID NO: 1533 - protein, 773 aa, unidentified; identical to SEQ ID NO: 952
  REGION 1..773: note = Description of Unknown: Synthetic polypeptide

SEQ ID NO: 1534 - protein, 773 aa, unidentified
  REGION 1..773: note = Description of Unknown: Synthetic polypeptide
MILDTDYITENGKPVIRIFKKEKGEFKIEYDRNFEPYIYALLEDDESIEDIKKITGERHGKKVRIIRVEKVKKKFLGEPIEVWKLVFEHPQDYPAIRDAIRSHPAVREIFEYDIPFAKRYLIDKGLVPMEGGEELKLLAFAIATFYHEGDEFAEGEILMISYADESGAKVITWKKIDLPYVEVVSTEREAIKRFLQVLREKDPDVLLTYNGDNFNFAYIKKRCEKLGLKFTIGRDGSEPKIQRMGDRFAVEVKGRIHLDLAPVVRHTIRLPTYTLEAVYEAVFGKKKEKVYAEEIAEAWKSEEGLKRVAQYSMEDARATYELGREFFPMEVELAKLIGQSVWDVSRSSTGNLVEWYLLRVAYERNELAPNKPGGEEYQRRMRSSYIGGYVKEPEKGLWESIAYLDFRSSAGSIIVTHNVSPDTLEKECKNYDVAPIVGYRFCKDFKGFIPSILEDLIETRQKVKRKMKATIDPIEKKMLDYRQRALKILANSYYGYQGYPKARWYSKECAESVTAWGRHYIETTIKEAEKFGFKVLYADTDGFFATIPNEKPETIKSKAKKFLKHINEKLPGMLELEYEGFYLRGFFVTKKKYALIDEDGHITTRGLEVVRRDWSEIAKETQAKVLEVILREGSIEKAAGIVKKVVEDLANYRVPVEKLIIHEQITRELKRYKATGPHVAIAKRLQARGIKVKPGTIISYVVLKGSKKISDRVILFDEYDSSRHKYDPDYYIHNQVLPAVLRILEAFGYKEKDLEYQRMKQTGLGAWLKMGKK

SEQ ID NO: 1535 - protein, 773 aa, unidentified
  REGION 1..773: note = Description of Unknown: Synthetic polypeptide
MILDTDYITENGKPVIRIFKKEKGEFKIEYDRNFEPYIYALLEDDESIEDIKKITGERHGKKVRIIRVEKVKKKFLGEPIEVWKLVFEHPQDYPAIRDAIRSHPAVREIFEYDIPFAKRYLIDKGLVPMEGGEELKLLAFAIATFYNEGDEFAEGEILMISYADESGAKVITWKKIDLPYVEVVSTEREAIKRFLQVLREKDPDVLLTYNGDNFDFAYIKKRCEKLGLKFTIGRDGSEPKIQRMGDRFAVEVKGRIHLDLAPVVRHTIRLPTYTLEAVYEAVFGKKKEKVYAEEIAEAWKSEEGLKRVAQYSMEDARATYELGREFFPMEVELAKLIGQSVWDVSRSSTGNLVEWYLLRVAYERNELAPNKPGGEEYQRRMRSSYIGGYVKEPEKGLWESIAYLDFRSSAGSIIVTHNVSPDTLEKECKNYDVAPIVGYRFCKDFKGFIPSILEDLIETRQKVKRKMKATIDPIEKKMLDYRQRALKILANSYYGYQGYPKARWYSKECAESVTAWGRHYIETTIKEAEKFGFKVLYADTDGFFATIPNEKPETIKSKAKKFLKHINEKLPGMLELEYEGFYLRGFFVTKKKYALIDEDGHITTRGLEVVRRDWSEIAKETQAKVLEVILREGSIEKAAGIVKKVVEDLANYRVPVEKLIIHEQITRELKRYKATGPHVAIAKRLQARGIKVKPGTIISYVVLKGSKKISDRVILFDEYDSSRHKYDPDYYIHNQVLPAVLRILEAFGYKEKDLEYQRMKQTGLGAWLKMGKK

SEQ ID NO: 1536 - protein, 773 aa, unidentified
  REGION 1..773: note = Description of Unknown: Synthetic polypeptide
MILDTDYITENGKPVIRIFKKEKGEFKIEYDRNFEPYIYALLEDDESIEDIKKITGERHGKKVRIIRVEKVKKNFLGEPIEVWKLVFEHPQDYPAIRDAIRSHPAVREIFEYDIPFAKRYLIDKGLVPMEGGEELKLLAFNIATFYHEGDEFAEGEILMISYADESGAKVITWKKIDLPYVEVVSTEREAIKRFLQVLREKDPDVLLTYNGDNFDFAYIKKRCEKLGLKFTIGRDGSEPKIQRMGDRFAVEVKGRIHLDLAPVVRHTIRLPTYTLEAVYEAVFGKKKEKVYAEEIAEAWKSEEGLKRVAQYSMEDARATYELGREFFPMEVELAKLIGQSVWDVSRSSTGNLVEWYLLRVAYERNELAPNKPGGEEYQRRMRSSYIGGYVKEPEKGLWESIAYLDFRSSAGSIIVTHNVSPDTLEKECKNYDVAPIVGYRFCKDFKGFIPSILEDLIETRQKVKRKMKATIDPLEKKMLDYRQRALKILANSYYGYQGYPKARWYSKECAESVTAWGRHYIETTIKEAEKFGFKVLYADTDGFFATIPNEKPETIKSKAKKFLKHINEKLPGMLELEYEGFYLRGFFVTKKKYALIDEDGHITTRGLEVVRRDWSEIAKETQAKVLEVILREGSIEKAAGIVKKVVEDLANYRVPVEKLIIHEQITRELKRYKATGPHVAIAKRLQARGIKVKPGTIISYVVLKGSKKISDRVILFDEYDSSRHKYDPDYYIHNQVLPAVLRILEAFGYKEKDLEYQRMKQTGLGAWLKMGKK

SEQ ID NO: 1537 - protein, 773 aa, unidentified
  REGION 1..773: note = Description of Unknown: Synthetic polypeptide
MILDTDYITENGKPVIRIFKKEKGEFKIEYDRNFEPYIYALLEDDESIEDIKKITGERHGKKVRIIRVEKVKKKFLGEPIEVWKLVFEHPQDYPAIRDAIRSHPAVREIFEYDIPFAKRYLIDKGLVPMEGGEELKLLAFAIATFYHEGDEFAEGEILMISYADESGAKVITWKKIDLPYVEVVSTEREAIKRFLQVLREKDPDVLLTYNGDNFDFAYIKKRCEKLGLKFTIGRDGSEPKIQRMGDRFAVEVKGRIHLDLAPVVRHTIRLPTYTLEAVYEAVFGKKKEKVYAEEIAEAWKSEEGLKRVAQYSMEDARATYELGREFFPMEVELAKLIGQSVWDVSRSSTGNLVEWYLLRVAYERNELAPNKPGGEEYQRRMRSSYIGGYVKEPEKGLWESIAYLDFRSSAGSIIVTHNVSPDTLEKECKNYDVAPIVGYRFCKDFKGFIPSILEDLIETRQKVKRKMKASIDPIEKKMLDYRQRALKILANSYYGYQGYPKARWYSKECAESVTAWGRHYIETTIKEAEKFGFKVLYADTDGFFATIPNEKPETIKSKAKKFLKHINEKLPGMLELEYEGFYLRGFFVTKKKYALIDEDGHITTRGLEVVRRDWSEIAKETQAKVLEVILREGSIEKAAGIVKKVVEDLANYRVPVEKLIIHEQITRELKRYKATGPHVAIAKRLQARGIKVKPGTIISYVVLKGSKKISDRVILFDEYDSSRHKYDPDYYIHNQVLPAVLRILEAFGYKEKDLEYQRMKQTGLGAWLKMGKK

SEQ ID NO: 1538 - protein, 773 aa, unidentified
  REGION 1..773: note = Description of Unknown: Synthetic polypeptide
MILDTDYITENGKPVIRIFKKEKGEFKIEYDRNFEPYIYALLEDDESIEDIKKITGERHGKKVRIIRVEKVKKNFLGEPIEVWKLVFEHPQDYPAIRDAIRSHPAVREIFEYDIPFAKRYLIDKGLVPMEGGEELKLLAFAIATFYHEGDEFAEGEILMISYADESGAKVITWKKIDLPYVEVVSTEREAIKRFLQVLREKDPDVLLTYNGDNFDFAYIKKRCEKLGLKFTIGRDGSEPKIQRMGDRFAVEVKGRIHLDLAPVVRHTIRLPTYTLEAVYEAVFGKKKEKVYAEEIAEAWKSEEGLKRVAQYSMEDARATYELGREFFPMEVELAKLIGQSVWDVSRSSTGNLVEWYLLRVAYERNELAPNKPGGEEYQRRMRSSYIGGYVKEPEKGLWESIAYLDFRSSAGSIIVTHNVSPDTLEKECKNYDVAPIVGYRFCKDFKGFIPSILEDLIETRQKVKRKMKATIDPIEKKMLDYRQRALKILANSYYGYQGYPKARWYSKECAESVTAWGRHYIETTIKEAEKFGFKVLYADTDGFFATIPNEKPETIKSKAKKFLKYINEKLPGMLELEYEGFYLRGFFVTKKKYALIDEDGHITTRGLEVVRRDWSEIAKETQAKVLEVILREGSIEKAAGIVKKVVEDLANYRVPVEKLIIHEQITRELKRYKATGPHVAIAKRLQARGIKVKPGTIISYVVLKGSKKISDRVILFDEYDSSRHKYDPDYYIHNQVLPAVLRILEAFGYKEKDLEYQRMKQTGLGAWLKMGKK

SEQ ID NO: 1539 - protein, 773 aa, unidentified
  REGION 1..773: note = Description of Unknown: Synthetic polypeptide
MILDTDYITENGKPVIRIFKKEKGEFKIEYDRNFEPYIYALLEDDESIEDIKKITGERHGKKVRIIRVEKVKKKFLGEPIEVWKLVFEHPQDYPAIRDAIRSHPAVREIFEYDIPFAKRYLIDKGLVPMEGGEELKLLAFAIATFYHEGDEFAEGEILMISYADESGAKVITWKKIDLPYVEVVSTEREAIKRFLQVLREKDPDVLLTYNGDNFDFAYIKKRCEKLGLKFTIGRDGSEPKIQRMGDRFAVEVKGRIHLDLAPVVRHTIRLPTYTLEAVYEAVFGKKKEKVYAEEIAEAWKSEEGLKRVAQYSMEDARATYELGREFFPMEVELAKLIGQSVWDVSRSSTGNLVEWYLLRVAYERNELAPNKPGGEEYQRRMRSSYIGGYVKEPEKGLWESIAYLDFRSSAGSIIVTHNVSPDTLEKECKNYDVAPIVGYRFCKDFKGFIPSILEDLIETRQKVKRKMKATIDPIEKKMLDYRQRALKILANSYYGYQGYPKARWYSKECAESVTAWGRHYIETTIKEAEKFGFKVLYADTDGFFATIPNEKPETIKSKAKKFLKHINEKLPGMLELEYEGFYLRGFFVTKKKYALIDEDGHITTRGLEIVRRDWSEIAKETQAKVLEVILREGSIEKAAGIVKKVVEDLANYRVPVEKLIIHEQITRELKRYKATGPHVAIAKRLQARGIKVKPGTIISYVVLKGSKKISDRVILFDEYDSSRHKYDPDYYIHNQVLPAVLRILEAFGYKEKDLEYQRMKQTGLGAWLKMGKK

SEQ ID NO: 1540 - protein, 773 aa, unidentified
  REGION 1..773: note = Description of Unknown: Synthetic polypeptide
MILDTDYITENGKPVIRIFKKEKGEFKIEYDRNFEPYIYALLEDDESIEDIKKITGERHGKKVRIIRVEKVKKKFLGEPIEVWKLVFEHPQDYPAIRDAIRSHPAVREIFEYDIPFAKRYLIDKGLVPMEGGEELKLLAFAIATFYHEGDEFAEGEILMISYADESGAKVITWKKIDLPYVEVVSTEREAIKRFLQVLREKDPDVLLTYNGDNFDFAYIKKRCEKLGLKFTIGRDGSEPKIQRMGDRFAVEVKGRIHLDLAPVVRHTIRLPTYTLEAVYEAVFGKKKEKVYAEEIAEAWKSEEGLKRVAQYSMEDARATYELGREFFPMEVELAKLIGQSVWDVSRSSTGNLVEWYLLRVAYERNELAPNKPGGEEYQRRMRSSAIGGYVKEPEKGLWESIAYLDFRSSAGSIIVTHNVSPDTLEKECKNYDVAPIVGYRFCKDFKGFIPSILEDLIETRQKVKRKMKATIDPIEKKMLDYRQRALKILANSYYGYQGYPKARWYSKECAESVTAWGRHYIETTIKEAEKFGFKVLYADTDGFFATIPNEKPETIKSKAKKFLKHINEKLPGMLELEYEGFYLRGFFVTKKKYALIDEDGHITTRGLEVVRRDWSEIAKETQAKVLEVILREGSIEKAAGIVKKVVEDLANYRVPVEKLIIHEQITRELKRYKATGPHVAIAKRLQARGIKVKPGTIISYVVLKGSKKISDRVILFDEYDSSRHKYDPDYYIHNQVLPAVLRILEAFGYKEKDLEYQRMKQTGLGAWLKMGKK

SEQ ID NO: 1541 - protein, 773 aa, unidentified
  REGION 1..773: note = Description of Unknown: Synthetic polypeptide
MILDTDYITENGKPVIRIFKKEKGEFKIEYDRNFEPYIYALLEDDESIEDIKKITGERHGKKVRIIRVEKVKKKFLGEPIEVWKLVFEHPQDYPAIRDAIRSHPAVREIFEYDIPFAKRYLIDKGLVPMEGGEELKLLAFAIATFYHEGDEFAEGEILMISYADESGAKVITWKKIDLPYVEVVSTEREAIKRFLQVLREKDPDVLLTYNGDNFDFAYIKKRCEKLGLKFTIGRDGSEPKIQRMGDRFAVEVKGRIHLDLAPVVRHTIRLPTYTLEAVYEAVFGKKKEKVYAEEIAEAWKSEEGLKRVAQYSMEDARATYELGREFFPMEVELAKLIGQSVWDVSRSSTGNLVEWYLLRVAYERNELAPNKPGGEEYQRRMRSSYIGGYVKEPEKGLWESIAYLDFLSSAGSIIVTHNVSPDTLEKECKNYDVAPIVGYRFCKDFKGFIPSILEDLIETRQKVKRKMKATIDPIEKKMLDYRQRALKILANSYYGYQGYPKARWYSKECAESVTAWGRHYIETTIKEAEKFGFKVLYADTDGFFATIPNEKPETIKSKAKKFLKHINEKLPGMLELEYEGFYLRGFFVTKKKYALIDEDGHITTRGLEVVRRDWSEIAKETQAKVLEVILREGSIEKAAGIVKKVVEDLANYRVPVEKLIIHEQITRELKRYKATGPHVAIAKRLQARGIKVKPGTIISYVVLKGSKKISDRVILFDEYDSSRHKYDPDYYIHNQVLPAVLRILEAFGYKEKDLEYQRMKQTGLGAWLKMGKK

SEQ ID NO: 1542 - protein, 773 aa, unidentified
  REGION 1..773: note = Description of Unknown: Synthetic polypeptide
MILDTDYITENGKPVIRIFKKEKGEFKIEYDRNFEPYIYALLEDDESIEDIKKITGERHGKKVRIIRVEKVKKNFLGEPIEVWKLVFEHPQDYPAIRDAIRSHPAVREIFEYDIPFAKRYLIDKGLVPMEGGEELKLLAFAIATFYHEGDEFAEGEILMISYADESGAKVITWKKIDLPYVEVVSTEREAIKRFLQVLREKDPDVLLTYNGDNFDFAYIKKRCEKLGLKFTIGRDGSEPKIQRMGDRFAVEVKGRIHLDLAPVVRHTIRLPTYTLEAVYEAVFGKKKEKVYAEEIAEAWKSEEGLKRVAQYSMEDARATYELGREFFPMEVELAKLIGQSVWDVSRSSTGNLVEWYLLRVAYERNELAPNKPGGEEYQRRMRSSYIGGYVKEPEKGLWESIAYLDFRSSYGSIIVTHNVSPDTLEKECKNYDVAPIVGYRFCKDFKGFIPSILEDLIETRQKVKRKMKATIDPIEKKMLDYRQRALKILANSYYGYQGYPKARWYSKECAESVTAWGRHYIETTIKEAEKFGFKVLYADTDGFFATIPNEKPETIKSKAKKFLKHINEKLPGMLELEYEGFYLRGFFVTKKKYALIDEDGHITTRGLEVVRRDWSEIAKETQAKVLEVILREGSIEKAAGIVKKVVEDLANYRVPVEKLIIHEQITRELKRYKATGPHVAIAKRLQARGIKVKPGTIISYVVLKGSKKISDRVILFDEYDSSRHKYDPDYYIHNQVLPAVLRILEAFGYKEKDLEYQRMKQTGLGAWLKMGKK

SEQ ID NO: 1543 - protein, 773 aa, unidentified
  REGION 1..773: note = Description of Unknown: Synthetic polypeptide
MILDTDYITENGKPVIRIFKKEKGEFKIEYDRNFEPYIYALLEDDESIEDIKKITGERHGKKVRIIRVEKVKKKFLGEPIEVWKLVFEHPQDYPAIRDAIRSHPAVREIFEYDIPFAKRYLIDKGLVPMEGGEELKLLAFAIATFYHEGDEFAEGEILMISYADESGAKVITWKKIDLPYVEVVSTEREAIKRFLQVLREKDPDVLLTYNGDNFDFAYIKKRCEKLGLKFTIGRDGSEPKIQRMGDRFAVEVKGRIHLDLAPVVRRTIRLPTYTLEAVYEAVFGKKKEKVYAEEIAEAWKSEEGLKRVAQYSMEDARATYELGREFFPMEVELAKLIGQSVWDVSRSSTGNLVEWYLLRVAYERNELAPNKPGGEEYQRRMRSSYIGGYVKEPEKGLWESIAYLDFRSSAGSIIVTHNVSPDTLEKECKNYDVAPIVGYRFCKDFKGFIPSILEDLIETRQKVKRKMKATIDPIEKKMLDYRQRALKILANSYYGYQGYPKARWYSKECAESVTAWGRHYIETTIKEAEKFGFKVLYADTDGFFATIPNEKPETIKSKAKKFLKHINEKLPGMLELEYEGFYLRGFFVTKKKYALIDEDGHITTRGLEVVRRDWSEIAKETQAKVLEVILREGSIEKAAGIVKKVVEDLANYRVPVEKLIIHEQITRELKRYKATGPHVAIAKRLQARGIKVKPGTIISYVVLKGSKKISDRVILFDEYDSSRHKYDPDYYIHNQVLPAVLRILEAFGYKEKDLEYQRMKQTGLGAWLKMGKK

SEQ ID NO: 1544 - protein, 773 aa, unidentified
  REGION 1..773: note = Description of Unknown: Synthetic polypeptide
MILDTDYITENGKPVIRIFKKEKGEFKIEYDRNFEPYIYALLEDDSSIEDIKKITGERHGKKVRIIRVEKVKKNFLGEPIEVWKLVFEHPQDYPAIRDAIRSHPAVREIFEYDIPFAKRYLIDKGLVPMEGGEELKLLAFAIATFYHEGDEFAEGEILMISYADESGAKVITWKKIDLPYVEVVSTEREAIKRFLQVLREKDPDVLLTYNGDNFDFAYIKKRCEKLGLKFTIGRDGSEPKIQRMGDRFAVEVKGRIHLDLAPVVRHTIRLPTYTLEAVYEAVFGKKKEKVYAEEIAEAWKSEEGLKRVAQYSMEDARATYELGREFFPMEVELAKLIGQSVWDVSRSSTGNLVEWYLLRVAYERNELAPNKPGGEEYQRRMRSSYIGGYVKEPEKGLWESIAYLDFRSSAGSIIVTHNVSPDTLEKECKNYDVAPIVGYRFCKDFKGFIPSILEDLIETRQKVKRKMKATIDPIEKKMLDYRQRALKILANSYYGYQGYPKARWYSKECAESVTAWGRHYIETTIKEAEKFGFKVLYADTDGFFATIPNEKPETIKSKAKKFLKHINEKLPGMLELEYEGFYLRGFFVTKKKYALIDEDGHITTRGLEVVRRDWSEIAKETQAKVLEVILREGSIEKAAGIVKKVVEDLANYRVPVEKLIIHEQITRELKRYKATGPHVAIAKRLQARGIKVKPGTIISYVVLKGSKKISDRVILFDEYDSSRHKYDPDYYIHNQVLPAVLRILEAFGYKEKDLEYQRMKQTGLGAWLKMGKK

SEQ ID NO: 1545 - protein, 773 aa, unidentified
  REGION 1..773: note = Description of Unknown: Synthetic polypeptide
MILDTDYITENGKPVIRIFKKEKGEFKIEYDRNFEPYIYALLEDDESIEDIKKITGERHGKKVRIIRVEKVKKNFLGEPIEVWKLVFEHPQDYPAIRDAIRSHPAVREIFEYDIPFAKRYLIDKGLVPMEGGEELKLLAFAIATFYHEGDEFAEGEILMISYADESGAKVITWKKIDLPYVEVVSTEREAIKRFLQVLREKDPDVLLTYNGDNFDFAYIKKRCEKLGLKFTIGRDGSEPKIQRMGDRFAVEVKGRIHLDLAPVVRHTIRLPTYTLEAVYEAVFGKKKEKVYAEEIAEAWKSEEGLKRVAQYSMEDARATYELGREFFPMEVELAKLIGQSVWDVSRSSTGNLVEWYLLRVAYERNELAPNKPGGEEYQRRMRSSYIGGYVKEPEKGLWESIAYLDFRSSAPSIIVTHNVSPDTLEKECKNYDVAPIVGYRFCKDFKGFIPSILEDLIETRQKVKRKMKATIDPIEKKMLDYRQRALKILANSYYGYQGYPKARWYSKECAESVTAWGRHYIETTIKEAEKFGFKVLYADTDGFFATIPNEKPETIKSKAKKFLKHINEKLPGMLELEYEGFYLRGFFVTKKKYALIDEDGHITTRGLEVVRRDWSEIAKETQAKVLEVILREGSIEKAAGIVKKVVEDLANYRVPVEKLIIHEQITRELKRYKATGPHVAIAKRLQARGIKVKPGTIISYVVLKGSKKISDRVILFDEYDSSRHKYDPDYYIHNQVLPAVLRILEAFGYKEKDLEYQRMKQTGLGAWLKMGKK

SEQ ID NO: 1546 - protein, 773 aa, unidentified
  REGION 1..773: note = Description of Unknown: Synthetic polypeptide
MILDTDYITENGKPVIRIFKKEKGEFKIEYDRNFEPYIYALLEDDESIEDIKKITGERHGKKVRIIRVEKVKKKFLGEPIEVWKLVFEHPQDYPAIRDAIRSHPAVREIFEYDIPFAKRYLIDKGLVPMEGGEELKLLAFAIATFYHEGDEFAEGEILMISYADESGAKVITWKKIDLPYVEVVSTEREAIKRFLQVLREKDPDVLLTYNGDNFDFAYIKKRCEKLGLKFTIGRDGSEPKIQRMGDRFAVEVKGRIHLDLAPVVRHTIRLPTYTLEAVYEAVFGKKKEKVYAEEIAEAWKSEEGLKRVAQYSMEDARATYELGREFFPMEVELAKLIGQSVWDVSRSSTGNLVEWYLLRVAYERNELAPNKPGGEEYQRRMRSSYIGGYVKEPEKGLWESIAYLDFRSSAGSIIVTHNVSPDTLEKECKNYDVAPIVGYRFCKDFKGFIPSILEDLIETRQKVKRKMKATIDPIEKKMLDYRQRALKILANSYYGYQGYPKARWYSKECAESVTAWGRHYIETTIKEAEKFGFKVLYADTDGFFATIPNEKPETIKSKAKKFLKHINEKLPGMLELEYEGFYLRGFFVTKKKYALIDEDGHITTEGLEVVRRDWSEIAKETQAKVLEVILREGSIEKAAGIVKKVVEDLANYRVPVEKLIIHEQITRELKRYKATGPHVAIAKRLQARGIKVKPGTIISYVVLKGSKKISDRVILFDEYDSSRHKYDPDYYIHNQVLPAVLRILEAFGYKEKDLEYQRMKQTGLGAWLKMGKK

SEQ ID NO: 1547 - protein, 773 aa, unidentified
  REGION 1..773: note = Description of Unknown: Synthetic polypeptide
MILDTDYITENGKPVIRIFKKEKGEFKIEYDRNFEPYIYALLEDDESIEDIKKITGERHGKKVRIIRVEKVKKKFLGEPIEVWKLVFEHPQDYPAIRDAIRSHPAVREIFEYDIPFAKRYLIDKGLVPMEGGEELKLLAFAIATFYHEGDEFAEGEILMISYADESGAKVITWKKIDLPYVEVVSTEREAIKRFLQVLREKDPDVLLTYNGDNFDFAYIKKRCEKLGLNFTIGRDGSEPKIQRMGDRFAVEVKGRIHLDLAPVVRHTIRLPTYTLEAVYEAVFGKKKEKVYAEEIAEAWKSEEGLKRVAQYSMEDARATYELGREFFPMEVELAKLIGQSVWDVSRSSTGNLVEWYLLRVAYERNELAPNKPGGEEYQRRMRSSYIGGYVKEPEKGLWESIAYLDFRSSAGSIIVTHNVSPDTLEKECKNYDVAPIVGYRFCKDFKGFIPSILEDLIETRQKVKRKMKATIDPIEKKMLDYRQRALKILANSYYGYQGYPKARWYSKECAESVTAWGRHYIETTIKEAEKFGFKVLYADTDGFFATIPNEKPETIKSKAKKFLKHINEKLPGMLELEYEGFYLRGFFVTKKKYALIDEDGHITTRGLEVVRRDWSEIAKETQAKVLEVILREGSIEKAAGIVKKVVEDLANYRVPVEKLIIHEQITRELKRYKATGPHVAIAKRLQARGIKVKPGTIISYVVLKGSKKISDRVILFDEYDSSRHKYDPDYYIHNQVLPAVLRILEAFGYKEKDLEYQRMKQTGLGAWLKMGKK

SEQ ID NO: 1548 - protein, 773 aa, unidentified
  REGION 1..773: note = Description of Unknown: Synthetic polypeptide
MILDTDYITENGKPVIRIFKKEKGEFKIEYDRNFEPYIYALLEDDESIEDIKKITGERHGKKVRIIRVEKVKKNFLGEPIEVWKLVFEHPQDYPAIRDAIRSHPAVREIFEYDIPFAKRYLIDKGLVPMEGGEELKLLAFAIATFYHEGDEFAEGEILMISYADESGAKVITWKKIDLPYVEVVSTEREAIKRFLQVLREKDPDVLLTYNGDNFDFAYIKKRCEKLGLKFTIGRDGSEPKIQRMGDRFAVEVKGRIHLDLAPVVRHTIRLPTYTLEAVYEAVFGKKKEKVYAEEIAEAWKSEEGLKRVAQYSMEDARATYELGREFFPMEVQLAKLIGQSVWDVSRSSTGNLVEWYLLRVAYERNELAPNKPGGEEYQRRMRSSYIGGYVKEPEKGLWESIAYLDFRSSAGSIIVTHNVSPDTLEKECKNYDVAPIVGYRFCKDFKGFIPSILEDLIETRQKVKRKMKATIDPIEKKMLDYRQRALKILANSYYGYQGYPKARWYSKECAESVTAWGRHYIETTIKEAEKFGFKVLYADTDGFFATIPNEKPETIKSKAKKFLKHINEKLPGMLELEYEGFYLRGFFVTKKKYALIDEDGHITTRGLEVVRRDWSEIAKETQAKVLEVILREGSIEKAAGIVKKVVEDLANYRVPVEKLIIHEQITRELKRYKATGPHVAIAKRLQARGIKVKPGTIISYVVLKGSKKISDRVILFDEYDSSRHKYDPDYYIHNQVLPAVLRILEAFGYKEKDLEYQRMKQTGLGAWLKMGKK

SEQ ID NO: 1549 - protein, 773 aa, unidentified
  REGION 1..773: note = Description of Unknown: Synthetic polypeptide
MILDTDYITENGKPVIRIFKKEKGEFKIEYDRNFEPYIYALLEDDESIEDIKKITGERHGKKVRIIRVEKVKKKFLGEPIEVWKLVFEHPQDYPAIRDAIRSHPAVREIFEYDIPFAKRYLIDKGLVPMEGGEELKLLAFAIATFYHEGDEFAEGEILMISYADESGAKVITWKKIDLPYVEVVSTEREAIKRFLQVLREKDPDVLLTYNGDNFKFAYIKKRCEKLGLKFTIGRDGSEPKIQRMGDRFAVEVKGRIHLDLAPVVRHTIRLPTYTLEAVYEAVFGKKKEKVYAEEIAEAWKSEEGLKRVAQYSMEDARATYELGREFFPMEVELAKLIGQSVWDVSRSSTGNLVEWYLLRVAYERNELAPNKPGGEEYQRRMRSSYIGGYVKEPEKGLWESIAYLDFRSSAGSIIVTHNVSPDTLEKECKNYDVAPIVGYRFCKDFKGFIPSILEDLIETRQKVKRKMKATIDPIEKKMLDYRQRALKILANSYYGYQGYPKARWYSKECAESVTAWGRHYIETTIKEAEKFGFKVLYADTDGFFATIPNEKPETIKSKAKKFLKHINEKLPGMLELEYEGFYLRGFFVTKKKYALIDEDGHITTRGLEVVRRDWSEIAKETQAKVLEVILREGSIEKAAGIVKKVVEDLANYRVPVEKLIIHEQITRELKRYKATGPHVAIAKRLQARGIKVKPGTIISYVVLKGSKKISDRVILFDEYDSSRHKYDPDYYIHNQVLPAVLRILEAFGYKEKDLEYQRMKQTGLGAWLKMGKK

SEQ ID NO: 1550 - protein, 773 aa, unidentified
  REGION 1..773: note = Description of Unknown: Synthetic polypeptide
MILDTDYITENGKPVIRIFKKEKGEFKIEYDRNFEPYIYALLEDDESIEDIKKITGERHGKKVRIIRVEKVKKKFLGEPIEVWKLVFEHPQDYPAIRDAIRSHPAVREIFEYDIPFAKRYLIDKGLVPMEGGEELKLLAFAIATFYHEGDEFAEGEILMISYADESGAKVITWKKIDLPYVEVVSTEREAIKRFLQVLREKDPDVLLTYNGDNFDFAYIKKRCEKLGLKFTIGRDGSEPKIQRMGDRFAVEVKGRIHLDLAPVVRHTIRLPTYTLEAVYEAVFGKKKEKVYAEEIAEAWKSEEGLKRVAQYSMEDARATYELGREFFPMEVELAKLIGQSVWDVSRSSTGNLVEWYLLRVAYERNELAPNKPGGEEYQRRMRSSYIGGYVKEPEKGLWESIAYLDFRSSAGSIIVTHNVSPDTLEKECKNYDVAPIVGYRFCKDFKGFIPSILEDLIETRQKVKRKMKATIDPIEKKMLDYRQRALKILANSYYGYQGYPKARWYSKECAESVTAWGRHYIETTIKEAEKFGFKVLYADTDGFFATIPNEKPETIKSKAKKFLKHINEKLPGMLELEYEGFYLRGFFVTKKKYALIDEDGHITTRGLEVVRRDWSEIAKETQAKVLEVILDEGSIEKAAGIVKKVVEDLANYRVPVEKLIIHEQITRELKRYKATGPHVAIAKRLQARGIKVKPGTIISYVVLKGSKKISDRVILFDEYDSSRHKYDPDYYIHNQVLPAVLRILEAFGYKEKDLEYQRMKQTGLGAWLKMGKK

SEQ ID NO: 1551 - protein, 773 aa, unidentified
  REGION 1..773: note = Description of Unknown: Synthetic polypeptide
MILDTDYITENGKPVIRIFKKEKGEFKIEYDRNFEPYIYALLEDDESIEDIKKITGERHGKKVRIIRVEKVKKKFLGEPIEVWKLVFEHPQDYPAIRDAIRSHPAVREIFEYDIPFAKRYLIDKGLVPMEGGEELKLLAFAIATFYHEGDEFAEGEILMISYADESGAKVITWKKIDLPYVEVVSTEREAIKRFLQVLREKDPDVLLTYNGDNFDFAYIKKRCEKLGLKFTIGRDGSEPKIQRMGDRFAVEVKGRIHLDLAPVVRHTIRLPTYTLEAVYEAVFGKKKEKVYAEEIAEAWKSEEGLKRVAQYSMEDARATYELGREFFPMEVELAKLIGQSVWDVSRSSTGNLVEWYLLRVAYERNELAPNKPGGEEYQRRMRSSPIGGYVKEPEKGLWESIAYLDFRSSAGSIIVTHNVSPDTLEKECKNYDVAPIVGYRFCKDFKGFIPSILEDLIETRQKVKRKMKATIDPIEKKMLDYRQRALKILANSYYGYQGYPKARWYSKECAESVTAWGRHYIETTIKEAEKFGFKVLYADTDGFFATIPNEKPETIKSKAKKFLKHINEKLPGMLELEYEGFYLRGFFVTKKKYALIDEDGHITTRGLEVVRRDWSEIAKETQAKVLEVILREGSIEKAAGIVKKVVEDLANYRVPVEKLIIHEQITRELKRYKATGPHVAIAKRLQARGIKVKPGTIISYVVLKGSKKISDRVILFDEYDSSRHKYDPDYYIHNQVLPAVLRILEAFGYKEKDLEYQRMKQTGLGAWLKMGKK

SEQ ID NO: 1552 - protein, 773 aa, unidentified
  REGION 1..773: note = Description of Unknown: Synthetic polypeptide
MILDTDYITENGKPVIRIFKKEKGEFKIEYDRNFEPYIYALLEDDESIEDIKKITGERHGKKVRIIRVEKVKKKFLGEPIEVWKLVFEHPQDYPAIRDAIRSHPAVREIFEYDIPFAKRYLIDKGLVPMEGGEELKLLAFNIATFYHEGDEFAEGEILMISYADESGAKVITWKKIDLPYVEVVSTEREAIKRFLQVLREKDPDVLLTYNGDNFPFAYIKKRCEKLGLKFTIGRDGSEPKIQRMGDRFAVEVKGRIHLDLAPVVRHTIRLPTYTLEAVYEAVFGKKKEKVYAEEIAEAWKSEEGLKRVAQYSMEDARATYELGREFFPMEVELAKLIGQSVWDVSRSSTGNLVEWYLLRVAYERNELAPNKPGGEEYQRRMRSSYIGGYVKEPEKGLWESIAYLDFRSSAGSIIVTHNVSPDTLEKECKNYDVAPEVGYRFCKDFKGFIPSILEDLIETRQKVKRKMKATIDPIEKKMLDYRQRALKILANSYYGYQGYPKARWYSKECAESVTAWGRHYIETTIKEAEKFGFKVLYADTDGFFATIPNEKPETIKSKAKKFLKHINEKLPGMLELEYEGFYLRGFFVTKKRYALIDEDGHITTRGLEVVRRDWSEIAKETQAKVLEVILREGSIEKAAGIVKKVVEDLANYRVPVEKLIIHEQITRELKRYKATGPHVAIAKRLQARGIKVKPGTIISYVVLKGSKKISDRVILFDEYDSSRHKYDPDYYIHNQVLPAVLRILEAFGYKEKDLEYQRMKQTGLGAWLKMGKK

SEQ ID NO: 1553 - protein, 773 aa, unidentified
  REGION 1..773: note = Description of Unknown: Synthetic polypeptide
MILDTDYITENGKPVIRIFKKEKGEFKIEYDRNFEPYIYALLEDDESIEDIKKITGERHGKKVRIIRVEKVKKKFLGEPIEVWKLVFEHPQDYPAIRDAIRSHPAVREIFEYDIPFAKRYLIDKGLVPMEGGEELKLLAFNIATFYHEGDEFAEGEILMISYADESGAKVITWKKIDLPYVEVVSTEREAIKRFLQVLREKDPDVLLTYNGDNFDFAYIKKRCEKLGLKFTIGRDGSEPKIQRMGDRFAVEVKGRIHLDLAPVVRHTIRLPTYTLEAVYEAVFGKKKEKVYAEEIAEAWKSEEGLKRVAQYSMEDARATYELGREFFPMEVELAKLIGQSVWDVSRSSTGNLVEWYLLRVAYERNELAPNKPGGEEYQRRMRSSYIGGYVKEPEKGLWESIAYLDFRSSAGSIIVTHNVSPDTLEKECKNYDVAPQVGYRFCKDFKGFIPSILEDLIETRQKVKRKMKATIDPIEKKMLDYRQRALKILANSYYGYQGYPKARWYSKECAESVTAWGRHYIETTIKEAEKFGFKVLYADTDGFFATIPNEKPETIKSKAKKFLKHINEKLPGMLELEYEGFYLRGFFVTKKKYALIDEDGHITTRGLEVVRRDWSEIAKETQAKVLEVILREGSIEKAAGIVKKVVEDLANYRVPVEKLIIHEQITRELKRYKATGPHVAIAKRLQARGIKVKPGTIISYVVLKGSKKISDRVILFDEYDSSRHKYDPDYYIHNQVLPAVLRILEAFGYKEKDLEYQRMKQTGLGAWLKMGKK

SEQ ID NO: 1554 - protein, 773 aa, unidentified
  REGION 1..773: note = Description of Unknown: Synthetic polypeptide
MILDTDYITENGKPVIRIFKKEKGEFKIEYDRNFEPYIYALLEDDESIEDIKKITGERHGKKVRIIRVEKVKKKFLGEPIEVWKLVFEHPQDYPAIRDAIRSHPAVREIFEYDIPFAKRYLIDKGLVPMEGGEELKLLAFAIATFYHEGDEFAEGEILMISYADESGAKVITWKKIDLPYVEVVSTEREAIKRFLQVLREKDPDVLLTYNGDNFDFAYIKKRCEKLGLHFTIGRDGSEPKIQRMGDRFAVEVKGRIHLDLAPVVRHTIRLPTYTLEAVYEAVFGKKKEKVYAEEIAEAWKSEEGLKRVAQYSMEDARATYELGREFFPMEVELAKLIGQSVWDVSRSSTGNLVEWYLLRVAYERNELAPNKPGGEEYQRRMRSSYIGGYVKEPEKGLWESIAYLDFRSSAGSIIVTHNVSPDTLEKECKNYDVAPIVGYRFCKDFKGFIPSILEDLIETRQKVKRKMKATIDPIEKKMLDYRQRALKILANSYYGYQGYPKARWYSKECAESVTAWGRHYIETTIKEAEKFGFKVLYADTDGFFATIPNEKPETIKSKAKKFLKHINEKLPGMLELEYEGFYLRGFFVTKKKYALIDEDGHITTRGLEVVRRDWSEIAKETQAKVLEVILREGSIEKAAGIVKKVVEDLANYRVPVEKLIIHEQITRELKRYKATGPHVAIAKRLQARGIKVKPGTIISYVVLKGSKKISDRVILFDEYDSSRHKYDPDYYIHNQVLPAVLRILEAFGYKEKDLEYQRMKQTGLGAWLKMGKK

SEQ ID NO: 1555 - protein, 773 aa, unidentified
  REGION 1..773: note = Description of Unknown: Synthetic polypeptide
MILDTDYITENGKPVIRIFKKEKGEFKIEYDRNFEPYIYALLEDDESIEDIKKITGERHGKKVRIIRVEKVKKKFLGEPIEVWKLVFEHPQDYPAIRDAIRSHPAVREIFEYDIPFAKRYLIDKGLVPMEGGEELKLLAFAIATFYHSGDEFAEGEILMISYADESGAKVITWKKIDLPYVEVVSTEREAIKRFLQVLREKDPDVLLTYNGDNFDFAYIKKRCEKLGLKFTIGRDGSEPKIQRMGDRFAVEVKGRIHLDLAPVVRHTIRLPTYTLEAVYEAVFGKKKEKVYAEEIAEAWKSEEGLKRVAQYSMEDARATYELGREFFPMEVELAKLIGQSVWDVSRSSTGNLVEWYLLRVAYERNELAPNKPGGEEYQRRMRSSYIGGYVKEPEKGLWESIAYLDFRSSAGSIIVTHNVSPDTLEKECKNYDVAPIVGYRFCKDFKGFIPSILEDLIETRQKVKRKMKATIDPIEKKMLDYRQRALKILANSYYGYQGYPKARWYSKECAESVTAWGRHYIETTIKEAEKFGFKVLYADTDGFFATIPNEKPETIKSKAKKFLKHINEKLPGMLELEYEGFYLRGFFVTKKKYALIDEDGHITTRGLEVVRRDWSEIAKETQAKVLEVILREGSIEKAAGIVKKVVEDLANYRVPVEKLIIHEQITRELKRYKATGPHVAIAKRLQARGIKVKPGTIISYVVLKGSKKISDRVILFDEYDSSRHKYDPDYYIHNQVLPAVLRILEAFGYKEKDLEYQRMKQTGLGAWLKMGKK

SEQ ID NO: 1556 - protein, 773 aa, unidentified
  REGION 1..773: note = Description of Unknown: Synthetic polypeptide
MILDTDYITENGKPVIRIFKKEKGEFKIEYDRNFEPYIYALLEDDESIEDIKKITGERHGKKVRIIRVEKVKKKFLGEPIEVWKLVFEHPQDYPAIRDAIRSHPAVREIFEYDIPFAKRYLIDKGLVPMEGGEELKLLAFAIATFYHEGDEFAEGEILMISYADESGAKVITWKKIDLPYVEVVSTEREAIKRFLQVLREKDPDVLLTYNGDNFDFAYIKKRCEKLGLKFTIGRDGSEPKIQRMGDRFAVEVKGRIHLDLAPVVRHTIRLPTYTLEAVYEAVFGKKKEKVYAEEIAEAWKSEEGLKRVAQYSMEDARATYELGREFFPMEVELAKLIGQSVWDVSRSSTGNLVEWYLLRVAYERNELAPNKPGGEEYQRRMRSSYIGGYVKEPEKGLWESIAYLDFRSSAGSIIVTHNVSPDTLEKECKNYDVAPIVGYRFCKDFKGFIPSILEDLIETRQKVKRKMKATIDPIEKKMLDYRQRALKILANSYYGYQGYPKARWYSKECAESVTAWGRHYIETTIKEAEKFGFKVLYAIIDGFFATIPNEKPETIKSKAKKFLKHINEKLPGMLELEYEGFYLRGFFVTKKKYALIDEDGHITTRGLEVVRRDWSEIAKETQAKVLEVILREGSIEKAAGIVKKVVEDLANYRVPVEKLIIHEQITRELKRYKATGPHVAIAKRLQARGIKVKPGTIISYVVLKGSKKISDRVILFDEYDSSRHKYDPDYYIHNQVLPAVLRILEAFGYKEKDLEYQRMKQTGLGAWLKMGKK

SEQ ID NO: 1557 - protein, 773 aa, unidentified
  REGION 1..773: note = Description of Unknown: Synthetic polypeptide
MILDTDYITENGKPVIRIFKKEKGEFKIEYDRNFEPYIYALLEDDESIEDIKKITGERHGKKVRIIRVEKVKKNFLGEPIEVWKLVFEHPQDVPAIRDAIRSHPAVREIFEYDIPFAKRYLIDKGLVPMEGGEELKLLAFDIETFYHEGDEFAEGEILMISYADESGAKVITWKKIDLPYVEVVSTEREAIKRFLQVLREKDPDVLLTYNGDNFDFAYIKKRCEKLGLKFTIGRDGSEPKIQRMGDRFAVEVKGRIHLDLYPVVRHTIRLPTYTLEAVYEAVFGKKKEKVYAEEIAEAWKSEEGLKRVAQYSMEDARATYELGREFFPMEVELAKLIGQSVWDVSRSSTGNLVEWYLLRVAYERNELAPNKPGGEEYQRRMRSSYIGGYVKEPEKGLWESIAYLDFRSLYPSIIVTHNVSPDTLEKECKNYDVAPIVGYRFCKDFKGFIPSILEDLIETRQKVKRKMKATIDPIEKKMLDYRQRALKILANSYYGYQGYPKARWYSKECAESVTAWGRHYIETTIKEAEKFGFKVLYADTDGFFATIPNEKPETIKSKAKKFLKHINEKLPGMLELEYEGFYLRGFFVTKKKYALIDEDGHITTRGLEVVRRDWSEIAKETQAKVLEVILREGSIEKAAGIVKKVVEDLANYRVPVEKLIIHEQITRELKDYKATGPHVAIAKRLQARGIKVKPGTIISYVVLKGSKKISDRVILFDEYDSSRHKYDPDYYIHNQVLPAVLRILEAFGYKEKDLEYQRMKQTGLGAWLKMGKK

SEQ ID NO: 1558 - protein, 773 aa, unidentified
  REGION 1..773: note = Description of Unknown: Synthetic polypeptide
MILDTDYITENGKPVIRIFKKEKGEFKIEYDRNFEPYIYALLEDDESIEDIKKITGERHGKKVRIIRVEKVKKNFLGEPIEVWKLVFEHPQDYPAIRDAIRSHPAVREIFEYDIPFAKRYLIDKGLVPMEGGEELKLLAFNIATFYHEGDEFAEGEILMISYADESGAKVITWKKIDLPYVEVVSTEREAIKRFLQVLREKDPDVLLTYNGDNFDFAYIKKRCEKLGLKFTIGRDGSEPKIQRMGDRFAVEVKGRIHLDLAPVVRHTIRLPTYTLEAVYEAVFGKKKEKVYAEEIAEAWKSEEGLKRVAQYSMEDARATYELGREFFPMEVELAKLIGQSVWDVSRSSTGNLVEWYLLRVAYERNELAPNKPGGEEYQRRMRSSYIGGYVKEPEKGLWESIAYLDFRSSAGSIIVTHNVSPDTLEKECKNYDVAPIVGYRFCKDFKGFIPSILEDLIETRQKVKRKMKATIDPIEKKMLDYRQRALKILANSYYGYQGYPKARWYSKECAESVTAWGRHYIETTIKEAEKFGFKVLYADTDGLYATIPNEKPETIKSKAKKFLKHINEKLPGMLELEYEGFYLRGFFVTKKKYALIDEDGHITTRGLEVVRRDWSEIAKETQAKVLEVILREGSIEKAAGIVKKVVEDLANYRVPVEKLIIHEQITRELKRYKATGPHVAIAKRLQARGIKVKPGTIISYVVLKGSKKISDRVILFDEYDSSRHKYDPDYYIHNQVLPAVLRILEAFGYKEKDLEYQRMKQTGLGAWLKMGKK

SEQ ID NO: 1559 - protein, 773 aa, unidentified
  REGION 1..773: note = Description of Unknown: Synthetic polypeptide
MILDTDYITENGKPVIRIFKKEKGEFKIEYDRNFEPYIYALLEDDESIEDIKKITGERHGKKVRIIRVEKVKKKFLGEPIEVWKLVFEHPQDYPAIRDAIRSHPAVREIFEYDIPFAKRYLIDKGLVPMEGGEELKLLAFAIATFYHEGDEFAEGEILMISYADESGAKVITWKKIDLPYVEVVSTEREAIKRFLQVLREKDPDVLLTYNGDNFDFAYIKKRCRKLGLKFTIGRDGSEPKIQRMGDRFAVEVKGRIHLDLAPVVRHTIRLPTYTLEAVYEAVFGKKKEKVYAEEIAEAWKSEEGLKRVAQYSMEDARATYELGREFFPMEVELAKLIGQSVWDVSRSSTGNLVEWYLLRVAYERNELAPNKPGGEEYQRRMRSSYIGGYVKEPEKGLWESIAYLDFRSSAGSIIVTHNVSPDTLEKECKNYDVAPIVGYRFCKDFKGFIPSILEDLIETRQKVKRKMKATIDPIEKKMLDYRQRALKILANSYYGYQGYPKARWYSKECAESVTAWGRHYIETTIKEAEKFGFKVLYADTDGFFATIPNEKPETIKSKAKKFLKHINEKLPGMLELEYEGFYLRGFFVTKKKYALIDEDGHITTRGLEVVRRDWSEIAKETQAKVLEVILREGSIEKAAGIVKKVVEDLANYRVPVEKLIIHEQITRELKRYKATGPHVAIAKRLQARGIKVKPGTIISYVVLKGSKKISDRVILFDEYDSSRHKYDPDYYIHNQVLPAVLRILEAFGYKEKDLEYQRMKQTGLGAWLKMGKK

SEQ ID NO: 1560 - protein, 773 aa, unidentified
  REGION 1..773: note = Description of Unknown: Synthetic polypeptide
MILDTDYITENGKPVIRIFKKEKGEFKIEYDRNFEPYIYALLEDDESIEDIKKITGERHGKKVRIIRVEKVKKNFLGEPIEVWKLVFEHPQDYPAIRDAIRSHPAVREIFEYDIPFAKRYLIDKGLVPMEGGEELKLLAFNIATFYHEGDEFAEGEILMISYADESGAKVITWKKIDLPYVEVVSTEREAIKRFLQVLREKDPDVLLTYNGDNFDFAYIKKRCEKLGLKFTIGRDGSEPKIQRMGDRFAVEVKGRIHLDLAPVVRHTIRLPTYTLEAVYEAVFGKKKEKVYAEEIAEAWKSEEGLKRVAQYSMEDARATYELGREFFPMEVELAKLIGQSVWDVSRSSTGNLVEWYLLRVAYERNELAPNKPGGEEYQRRMRSSYIGGYVKEPEKGLWESIAYLDFRSSAGSIIVTHNVSPDTLEKECKNYDVAPDVGYRFCKDFKGFIPSILEDLIETRQKVKRKMKATIDPIEKKMLDYRQRALKILANSYYGYQGYPKARWYSKECAESVTAWGRHYIETTIKEAEKFGFKVLYADTDGFFATIPNEKPETIKSKAKKFLKHINEKLPGMLELEYEGFYLRGFFVTKKKYALIDEDGHITTRGLEVVRRDWSEIAKETQAKVLEVILREGSIEKAAGIVKKVVEDLANYRVPVEKLIIHEQITRELKRYKATGPHVAIAKRLQARGIKVKPGTIISYVVLKGSKKISDRVILFDEYDSSRHKYDPDYYIHNQVLPAVLRILEAFGYKEKDLEYQRMKQTGLGAWLKMGKK

SEQ ID NO: 1561 - protein, 773 aa, unidentified
  REGION 1..773: note = Description of Unknown: Synthetic polypeptide
MILDTDYITENGKPVIRIFKKEKGEFKIEYDRNFEPYIYALLEDDESIEDIKKITGERHGKKVRIIRVEKVKKKFLGEPIEVWKLVFEHPQDYPAIRDAIRSHPAVREIFEYDIPFAKRYLIDKGLVPMEGGEELKLLAFAIATFYHEGDEFAEGEILMISYADESGAKVITWKKIDLPYVEVVSTEREAIKRFLQVLREKDPDVLLTYNGDNFDFAYIKKRCEKLGLKFTIGRDGSEPKIQRMGDRFAVEVKGRIHLDLAPVVRHTIRLPTYTLEAVYEAVFGKKKEKVYAEEIAEAWKSEEGLKRVAQYSMEDARATYELGREFFPMEVELAKLIGQSVWDVSRSSTGNLVEWYLLRVAYERNELAPNKPGGEEYQRRMRSSYIGGYVKEPEKGLWESIAYLDFRSSAGSIIVTHNVSPDTLEKECKNYDVAPIVGYRFCKDFKGFIPSILEDLIETRQKVKRKMKAAIDPIEKKMLDYRQRALKILANSYYGYQGYPKARWYSKECAESVTAWGRHYIETTIKEAEKFGFKVLYADTDGFFATIPNEKPETIKSKAKKFLKHINEKLPGMLELEYEGFYLRGFFVTKKKYALIDEDGHITTRGLEVVRRDWSEIAKETQAKVLEVILREGSIEKAAGIVKKVVEDLANYRVPVEKLIIHEQITRELKRYKATGPHVAIAKRLQARGIKVKPGTIISYVVLKGSKKISDRVILFDEYDSSRHKYDPDYYIHNQVLPAVLRILEAFGYKEKDLEYQRMKQTGLGAWLKMGKK

SEQ ID NO: 1562 - protein, 773 aa, unidentified
  REGION 1..773: note = Description of Unknown: Synthetic polypeptide
MILDTDYITENGKPVIRIFKKEKGEFKIEYDRNFEPYIYALLEDDESIEDIKKITGERHGKKVRIIRVEKVKKNFLGEPIEVWKLVFEHPQDYPAIRDAIRSHPAVREIFEYDIPFAKRYLIDKGLVPMEGGEELKLLAFAIATFYHEGDEFAEGEILMISYADESGAKVITWKKIDLPYVEVVSTEREAIKRFLQVLREKDPDVLLTYNGDNFDFAYIKKRCEKLGLKFTIGRDGSEPKIQRMGDRFAVEVKGRIHLDLAPVVRHTIRLPTYTLEAVYEAVFGKKKEKVYAEEIAEAWKSEEGLKRVAQYSMEDARATYELGREFFPMEVELAKLIGQSVWDVSRSSTGNLVEWYLLRVAYERNELAPNKPGGEEYQRRMRSSYIGGYVKEPEKGLWESIAYLDFRSSAGSIIVTHNVSPDTLEKECKNYDVAPIVGYRFCKDFKGFIPSILEDLIETRQKVKRKMKATIDPIEKKMLDYRQRALKILANSYYGYQGYPKARWYSKECAESVTAWGRHYIETTIKEAEKFGFKVLYADTDGFFATIPNEKPETIKSKAKEFLKHINEKLPGMLELEYEGFYLRGFFVTKKKYALIDEDGHITTRGLEVVRRDWSEIAKETQAKVLEVILREGSIEKAAGIVKKVVEDLANYRVPVEKLIIHEQITRELKRYKATGPHVAIAKRLQARGIKVKPGTIISYVVLKGSKKISDRVILFDEYDSSRHKYDPDYYIHNQVLPAVLRILEAFGYKEKDLEYQRMKQTGLGAWLKMGKK

SEQ ID NO: 1563 - protein, 773 aa, unidentified
  REGION 1..773: note = Description of Unknown: Synthetic polypeptide
MILDTDYITENGKPVIRIFKKEKGEFKIEYDRNFEPYIYALLEDDESIEDIKKITGERHGKKVRIIRVEKVKKKFLGEPIEVWKLVFEHPQDYPAIRDAIRSHPAVREIFEYDIPFAKRYLIDKGLVPMEGGEELKLLAFAIATFYHEGDEFAEGEILMISYADESGAKVITWKKIDLPYVEVVSTEREAIKRFLQVLREKDPDVLLTYNGDNFDFAYIMKRCEKLGLKFTIGRDGSEPKIQRMGDRFAVEVKGRIHLDLAPVVRHTIRLPTYTLEAVYEAVFGKKKEKVYAEEIAEAWKSEEGLKRVAQYSMEDARATYELGREFFPMEVELAKLIGQSVWDVSRSSTGNLVEWYLLRVAYERNELAPNKPGGEEYQRRMRSSYIGGYVKEPEKGLWESIAYLDFRSSAGSIIVTHNVSPDTLEKECKNYDVAPIVGYRFCKDFKGFIPSILEDLIETRQKVKRKMKATIDPIEKKMLDYRQRALKILANSYYGYQGYPKARWYSKECAESVTAWGRHYIETTIKEAEKFGFKVLYADTDGFFATIPNEKPETIKSKAKKFLKHINEKLPGMLELEYEGFYLRGFFVTKKKYALIDEDGHITTRGLEVVRRDWSEIAKETQAKVLEVILREGSIEKAAGIVKKVVEDLANYRVPVEKLIIHEQITRELKRYKATGPHVAIAKRLQARGIKVKPGTIISYVVLKGSKKISDRVILFDEYDSSRHKYDPDYYIHNQVLPAVLRILEAFGYKEKDLEYQRMKQTGLGAWLKMGKK

SEQ ID NO: 1564 - protein, 773 aa, unidentified; identical to SEQ ID NO: 1479
  REGION 1..773: note = Description of Unknown: Synthetic polypeptide

SEQ ID NO: 1565 - protein, 773 aa, unidentified
  REGION 1..773: note = Description of Unknown: Synthetic polypeptide
MILDTDYITENGKPVIRIFKKEKGEFKIEYDRNFEPYIYALLEDDESIEDIKKITGERHGKKVRIIRVEKVKKNFLGEPIEVWKLVFEHPQDYPAIRDAIRSHPAVREIFEYDIPFAKRYLIDKGLVPMEGGEELKLLAFAIATFYHEGDEFAEGEILMISYADESGAKVITWKKIDLPYVEVVSTEREAIKRFLQVLREKDPDVLLTYNGDNFDFAYIKKRCEKLGLKFTIGRDGSEPKIQRMGDRFAVEVKGRIHLDLAPVVRHTIRLPTYTLEAVYEAVFGKKKEKVYAEEIAEAWKSEEGLKRVAQYSMEDARATYELGREFFPMEVELAKLIGQSVWDVSRSSTGNLVEWYLLRVAYERNELAPNKPGGEEYQRRMRSSYIGGYVKEPEKGLWESIAYLDFRSSAGSIIVTHNVSPDTLEKECKNYDVAPIVGYRFCKDFKGFIPSILEDLIETRQKVKRKMKATIDPIEKKMLDYRQRALKILANSYYGYQGYPKARWYSKECAESVTAWGRHYIETTIKEAEKFGFKVLYADTDGFFATIPNEKPETIKSKAKKFLKHINEKLPGMLELEYEGFYLRGFFVTKKKYALIDEDGHITTRGLEVVRRDWSEIAKETQAKVLEVILREGSIEKAARIVKKVVEDLANYRVPVEKLIIHEQITRELKRYKATGPHVAIAKRLQARGIKVKPGTIISYVVLKGSKKISDRVILFDEYDSSRHKYDPDYYIHNQVLPAVLRILEAFGYKEKDLEYQRMKQTGLGAWLKMGKK

SEQ ID NO: 1566 - protein, 773 aa, unidentified
  REGION 1..773: note = Description of Unknown: Synthetic polypeptide
MILDTDYITENGKPVIRIFKKEKGEFKIEYDRNFEPYIYALLEDDESIEDIKKITGERHGKKVRIIRVEKVKKKFLGEPIEVWKLVFEHPQDYPAIRDAIRSHPAVREIFEYDIPFAKRYLIDKGLVPMEGGEELKLLAFAIATFYHEGDEFAEGEILMISYADESGAKVITWKKIDLPYVEVVSTEREAIKRFLQVLREKDPDVLLTYNGDNFDFAYIKKRCEKLGLKFTIGRDGSEPKIQRMGDRFAVEVKGRIHLDLAPVVRHTIRLPTYTLEAVYEAVFGKKKEKVYAEEIAEAWKSEEGLKRVAQYSMEDARATYELGREFFPMEVELAKLIGQSVWDVSRSSTGNLVEWYLLRVAYERNELAPNKPGGEEYQRRMRSSYIGGYVKEPEKGLWESIAYLDFRSSAGSIIVTHNVSPDTLEKECKNYDVAPIVGYRFCKDFKGFIPSILEDLIETRQKVKRKMKATIDPIEKKMLDYRQRALKILANSYYGYQGYPKARWYSKECAESVTAWGRHYIETTIKEAEKFGFKVLYADTDGFFATIPNEKPETIKSKAKKFLKHINEKLPGMLELEYEGFYLRGFFVTKKKYALIDEDGHITTRGLEVVRRDWSEIAKETQARVLEVILREGSIEKAAGIVKKVVEDLANYRVPVEKLIIHEQITRELKRYKATGPHVAIAKRLQARGIKVKPGTIISYVVLKGSKKISDRVILFDEYDSSRHKYDPDYYIHNQVLPAVLRILEAFGYKEKDLEYQRMKQTGLGAWLKMGKK

SEQ ID NO: 1567 - protein, 773 aa, unidentified
  REGION 1..773: note = Description of Unknown: Synthetic polypeptide
MILDTDYITENGKPVIRIFKKEKGEFKIEYDRNFEPYIYALLEDDESIEDIKKITGERHGKKVRIIRVEKVKKKFLGEPIEVWKLVFEHPQDYPAIRDAIRSHPAVREIFEYDIPFAKRYLIDKGLVPMEGGEELKLLAFAIATFYHEGDEFAEGEILMISYADESGAKVITWKKIDLPYVEVVSTEREAIKRFLQVLREKDPDVLLTYNGDNFDFAYIKKRCEKLGLKFTIGRDGSEPKIQRMGDRFAVEVKGRIHLDLAPVVRHTIRLPTYTLEAVYEAVFGKKKEKVYAEEIAEAWKSEEGLKRVAQYSMEDARATYELGREFFPMEVELAKLIGQSVWDVSRSSTGNLVEWYLLRVAYERNELAPNKPGGEEYQRRMRSSYIGGYVKEPEKGLWESIAYLDFRSSAGSIIVTHNVSPDTLEKECKNYDVAPIVGYRFCKDFKGFIPSLLEDLIETRQKVKRKMKATIDPIEKKMLDYRQRALKILANSFYGYQGYPKARWYSKECAESVTAWGRHYIETTIKEAEKFGFKVLYADTDGFFATIPNEKPETIKSKAKKFLKHINEKLPGMLELEYEGFYLRGFFVTKKKYALIDEDGHITTRGLEVVRRDWSEIAKETQAKVLEVILREGSIEKAAGIVKKVVEDLANYRVPVEKLIIHEQITRELKRYKATGPHVAIAKRLQARGIKVKPGTIISYVVLKGSKKISDRVILFDEYDSSRHKYDPDYYIHNQVLPAVLRILEAFGYKEKDLEYQRMKQTGLGAWLKMGKK

SEQ ID NO: 1568 - protein, 773 aa, unidentified; identical to SEQ ID NO: 565
  REGION 1..773: note = Description of Unknown: Synthetic polypeptide

SEQ ID NO: 1569 - protein, 773 aa, unidentified
  REGION 1..773: note = Description of Unknown: Synthetic polypeptide
MILDTDYITENGKPVIRIFKKEKGEFKIEYDRNFEPYIYALLEDDESIEDIKKITGERHGKKVRIIRVEKVKKNFLGEPIEVWKLVFEHPQDYPAIRDAIRSHPAVREIFEYDIPFAKRYLIDKGLVPMEGGEELKLLAFNIATFYHEGDEFAEGEILMISYADESGAKVITWKKIDLPYVEVVSTEREAIKRFLQVLREKDPDVLLTYNGDNFDFAYIKKRCEKLGLKFTIGRDGSEPKIQRMGDRFAVEVKGRIHLDLAPVVRHTIRLPTYTLEAVYEAVFGKKKEKVYAEEIAEAWKSEEGLKRVAQYSMEDARATYELGREFFPLEVELAKLIGQSVWDVSRSSTGNLVEWYLLRVAYERNELAPNKPGGEEYQRRMRSSYIGGYVKEPEKGLWESIAYLDFRSSAGSIIVTHNVSPDTLEKECKNYDVAPEVGYRFCKDFKGFIPSILEDLIETRQKVKRKMKATIDPIEKKMLDYRQRALKILANSYYGYQGYPKARWYSKECAESVTAWGRHYIETTIKEAEKFGFKVLYADTDGFFATIPNEKPETIKSKAKKFLKHINEKLPGMLELEYEGFYLRGFFVTKKRYALIDEDGHITTRGLEVVRRDWSEIAKETQAKVLEVILREGSIEKAAGIVKKVVEDLANYRVPVEKLIIHEQITRELKRYKATGPHVAIAKRLQARGIKVKPGTIISYVVLKGSKKISDRVILFDEYDSSRHKYDPDYYIHNQVLPAVLRILEAFGYKEKDLEYQRMKQTGLGAWLKMGKK

SEQ ID NO: 1570 - protein, 773 aa, unidentified
  REGION 1..773: note = Description of Unknown: Synthetic polypeptide
MILDTDYITENGKPVIRIFKKEKGEFKIEYDRNFEPYIYALLEDDESIEDIKKITGERHGKKVRIIRVEKVKKKFLGEPIEVWKLVFEHPQDYPAIRDAIRSHPAVREIFEYDIPFAKRYLIDKGLVPMEGGEELKLLAFAIATFYHEGDEFAEGEILMISYADESGAKVITWKKIDLPYVEVVSTEREAIKRFLQVLREKDPDVLLTYNGDNFDFAYIKKRCEKLGLKFTIGRDGSEPKIQRMGDRFAVEVKGRIHLDLAPVVRHTIRLPTYTLEAVYEAVFGKKKEKVYAEEIAEAWKSEEGLKRVAQYSMEDARATYELGREFFPMEVELAKLIGQSVWDVSRSSTGNLVEWYLLRVAYERNELAPNKPGGEEYQRRMRSSYIGGYVKEPEKGLWESIAYLDFRSSAGSIIVTHNVSPDTLEKECKNYDVAPIVGYRFCKDFKGFIPSILEDLIETRQKVKRKMKATIDPIEKKMLDYRQRALKILANSYYGYQGYPKARWYSKECAESVTAWGRHYIETTIKEAEKFGFKVLYADTDGLFATIPNEKPETIKSKAKKFLKHINEKLPGMLELEYEGFYLRGFFVTKKKYALIDEDGHITTRGLEVVRRDWSEIAKETQAKVLEVILREGSIEKAAGIVKKVVEDLANYRVPVEKLIIHEQITRELKRYKATGPHVAIAKRLQARGIKVKPGTIISYVVLKGSKKISDRVILFDEYDSSRHKYDPDYYIHNQVLPAVLRILEAFGYKEKDLEYQRMKQTGLGAWLKMGKK

SEQ ID NO: 1571 - protein, 773 aa, unidentified
  REGION 1..773: note = Description of Unknown: Synthetic polypeptide
MILDTDYITENGKPVIRIFKKEKGEFKIEYDRNFEPYIYALLEDDESIEDIKKITGERHGKKVRIIRVEKVKKNFLGEPIEVWKLVFEHPQDYPAIRDAIRSHPAVREIFEYDIPFAKRYLIDKGLVPMEGGEELKLLAFAIATFYHEGDEFAEGEILMISYADESGAKVITWKKIDLPYVEVVSTEREAIKRFLQVLREKDPDVLLTYNGDNFDFAYIKKRCEKLGLKFTIGRDGSEPKIQRMGDRFAVEVKGRIHLDLAPVVRHTIRLPTYTLEAVYEAVFGKKKEKVYAEEIAEAWKSEEGLKRVAQYSMEDARATYELGREFFPMEVELAKLIGQSVWDVSRSSTGNLVEWYLLRVAYERNELAPNKPGGEEYQRRMRSSYIGGYVKEPEKGLWESIAYLDFRSSAGSIIVTHNVSPDTLEKECKNYDVAPIVGYRFCKDFKGFIPSILEDLIETRQKVKRKMKATIDPIEKKMLDYRQRALKILANSYYGYQGYPKARWYSKECAESVTAWGRHYIETTIKEAEKFGFKVLYADTDGFFATIPNEKPETIKSKAKKFLKHINEKLPGMLELEYEGFYLRGFFVTKKKYALIDEDGHITTRGLEVVRRDWSEIAKETQAKVLEVILREGSIEKAAGIVKKVVEDLANYRVPVEKLIIHEQITRELKRYKATGPHVAIAKRLQARGIKVKPGTIISYVVLKGSKKISDRVILFDEFDSSRHKYDPDYYIHNQVLPAVLRILEAFGYKEKDLEYQRMKQTGLGAWLKMGKK

SEQ ID NO: 1572 - protein, 773 aa, unidentified
  REGION 1..773: note = Description of Unknown: Synthetic polypeptide
MILDTDYITENGKPVIRIFKKEKGEFKIEYDRNFEPYIYALLEDDESIEDIKKITGERHGKKVRIIRVEKVKKKFLGEPIEVWKLVFEHPQDYPAIRDAIRSHPAVREIFEYDIPFAKRYLIDKGLVPMEGGEELKLLAFAIATFYHEGDEFAEGEILMISYADESGAKVITWKKIDLPYVEVVSTEREAIKRFLQVLREKDPDVLLTYNGDNFDFAYIKKRCEKLGLKFTIGRDGSEPKIQRMGDRFAVEVKGRIHLDLAPVVRHTIRLPTYTLEAVYEAVFGKKKEKVYAEEIAEAWKSEEGLKRVAQYSMEDARATYELGREFFPMEVELAKLIGQSVWDVSRSSTGNLVEWYLLRVAYERNELAPNKPGGEEYQRRMRSSYIGGYVKEPEKGLWESIAYLDFRSSAGSIIVTHNVSPDTLEKECKNYDVAPIVGYRFCKDFKGFIPSILEDLIETRQKVKRKMKATIDPIEKKMLDYRQRALKILANSYYGYQGYPKARWYSKECAESVTAWGRHYIETTIKEAEKFGFKVLYADTDGFYATIPNEKPETIKSKAKKFLKHINEKLPGMLELEYEGFYLRGFFVTKKKYALIDEDGHITTRGLEVVRRDWSEIAKETQAKVLEVILREGSIEKAAGIVKKVVEDLANYRVPVEKLIIHEQITRELKRYKATGPHVAIAKRLQARGIKVKPGTIISYVVLKGSKKISDRVILFDEYDSSRHKYDPDYYIHNQVLPAVLRILEAFGYKEKDLEYQRMKQTGLGAWLKMGKK

SEQ ID NO: 1573 - protein, 773 aa, unidentified
  REGION 1..773: note = Description of Unknown: Synthetic polypeptide
MILDTDYITNNGKPVIRIFKKEKGEFKIEYDRNFEPYIYALLEDDESIEDIKKITGERHGKKVRIIRVEKVKKKFLGEPIEVWKLVFEHPQDYPAIRDAIRSHPAVREIFEYDIPFAKRYLIDKGLVPMEGGEELKLLAFAIATFYHEGDEFAEGEILMISYADESGAKVITWKKIDLPYVEVVSTEREAIKRFLQVLREKDPDVLLTYNGDNFDFAYIKKRCEKLGLKFTIGRDGSEPKIQRMGDRFAVEVKGRIHLDLAPVVRHTIRLPTYTLEAVYEAVFGKKKEKVYAEEIAEAWKSEEGLKRVAQYSMEDARATYELGREFFPMEVELAKLIGQSVWDVSRSSTGNLVEWYLLRVAYERNELAPNKPGGEEYQRRMRSSYIGGYVKEPEKGLWESIAYLDFRSSAGSIIVTHNVSPDTLEKECKNYDVAPIVGYRFCKDFKGFIPSILEDLIETRQKVKRKMKATIDPIEKKMLDYRQRALKILANSYYGYQGYPKARWYSKECAESVTAWGRHYIETTIKEAEKFGFKVLYADTDGFFATIPNEKPETIKSKAKKFLKHINEKLPGMLELEYEGFYLRGFFVTKKKYALIDEDGHITTRGLEVVRRDWSEIAKETQAKVLEVILREGSIEKAAGIVKKVVEDLANYRVPVEKLIIHEQITRELKRYKATGPHVAIAKRLQARGIKVKPGTIISYVVLKGSKKISDRVILFDEYDSSRHKYDPDYYIHNQVLPAVLRILEAFGYKEKDLEYQRMKQTGLGAWLKMGKK

SEQ ID NO: 1574 - protein, 773 aa, unidentified
  REGION 1..773: note = Description of Unknown: Synthetic polypeptide
MILDTDYITENGKPVIRIFKKEKGEFKIEYDRNFEPYIYALLEDDESIEDIKKITGERHGKKVRIIRVEKVKKNFLGEPIEVWKLVFEHPQDYPAIRDAIRSHPAVREIFEYDIPFAKRYLIDKGLVPMEGGEELKLLAFAIATFYHEGDEFAEGEILMISYADESGAKVITWKKIDLPYVEVVSTEREAIKRFLQVLREKDPDVLLTYNGDNFDFAYIKKRCEKLGLKFTIGRDGSEPKIQRMGDRFAVEVKGRIHLDLAPVVRHTIRLPTYTLEAVYEAVFGKKKEKVYAEEIAEAWKSEEGLKRVAQYSMEDARATYELGREFFPMEVELAKLIGQSVWDVSRSSTGNLVEWYLLRVAYERNELAPNKPGGEEYQRRMRSSYIGGYVKEPEKGLWESIAYLDFRSSAGSIIVTHNVSPDTLEKECKNYDVAPIVGYRFCKDFKGFIPSILEDLIETRQKVKRKMKATIDPIEKKMLDYRQRALKILANSYYGYQGYPKARWYSKECAESVTAWGRHYIETTIKEAEKFGFKVLYADTDGFFATIPNAKPETIKSKAKKFLKHINEKLPGMLELEYEGFYLRGFFVTKKKYALIDEDGHITTRGLEVVRRDWSEIAKETQAKVLEVILREGSIEKAAGIVKKVVEDLANYRVPVEKLIIHEQITRELKRYKATGPHVAIAKRLQARGIKVKPGTIISYVVLKGSKKISDRVILFDEYDSSRHKYDPDYYIHNQVLPAVLRILEAFGYKEKDLEYQRMKQTGLGAWLKMGKK

SEQ ID NO: 1575 - protein, 773 aa, unidentified
  REGION 1..773: note = Description of Unknown: Synthetic polypeptide
MILDTDYITENGKPVIRIFKKEKGEFKIEYDRNFEPYIYALLEDDESIEDIKKITGERHGKKVRIIRVEKVKKKFLGEPIEVWKLVFEHPQDYPAIRDAIRSHPAVREIFEYDIPFAKRYLIDKGLVPMEGGEELKLLAFAIATFYHEGDEFAEGEILMISYADESGAKVITWKKIDLPYVEVVSTEREAIKRFLQVLREKDPDVLLTYNGDNFDFAYIKKRCEKLGLKFTIGRDGSEPKIQRMGDRFAVEVKGRIHLDLAPVVRHTIRLPTYTLEAVYEAVFGKKKEKVYAEEIAEAWKSEEGLKRVAQYSMEDARATYELGREFFPMEVELAKLIGQSVWDVSRSSTGNLVEWYLLRVAYERNELAPNKPGGEEYQRRMRSSYIGGYVKEPEKGLWESIAYLDFRSSAGSIIVTHNVSPDTLEKECKNYDVAPIVGYRFCKDFKGFIPSILEDLIETRQKVKRKMKATIDPVEKKMLDYRQRALKILANSYYGYQGYPKARWYSKECAESVTAWGRHYIETTIKEAEKFGFKVLYADTDGFFATIPNEKPETIKSKAKKFLKHINEKLPGMLELEYEGFYLRGFFVTKKKYALIDEDGHITTRGLEVVRRDWSEIAKETQAKVLEVILREGSIEKAAGIVKKVVEDLANYRVPVEKLIIHEQITRELKRYKATGPHVAIAKRLQARGIKVKPGTIISYVVLKGSKKISDRVILFDEYDSSRHKYDPDYYIHNQVLPAVLRILEAFGYKEKDLEYQRMKQTGLGAWLKMGKK

SEQ ID NO: 1576 - protein, 773 aa, unidentified
  REGION 1..773: note = Description of Unknown: Synthetic polypeptide
MILDTDYITENGKPVIRIFKKEKGEFKIEYDRNFEPYIYALLEDDESIEDIKKITGERHGKKVRIIRVEKVKKNFLGEPIEVWKLVFEHPQDVPAIRDAIRSHPAVREIFEYDIPFAKRYLIDKGLVPMEGGEELKLLAFAIATFYHEGDEFAEGEILMISYADESGAKVITWKKIDLPYVEVVSTEREAIKRFLQVLREKDPDVLLTYNGDNFDFAYIKKRCEKLGLKFTIGRDGSEPKIQRMGDRFAVEVKGRIHLDLAPVVRHTIRLPTYTLEAVYEAVFGKKKEKVYAEEIAEAWKSEEGLKRVAQYSMEDARATYELGREFFPMEVELAKLIGQSVWDVSRSSTGNLVEWYLLRVAYERNELAPNKPGGEEYQRRMRSSYIGGYVKEPEKGLWESIAYLDFRSSAGSIIVTHNVSPDTLEKECKNYDVAPIVGYRFCKDFKGFIPSILEDLIETRQKVKRKMKATIDPIEKKMLDYRQRALKILANSYYGYQGYPKARWYSKECAESVTAWGRHYIETTIKEAEKFGFKVLYADTDGFFATIPNEKPETIKSKAKKFLKHINEKLPGMLELEYEGFYLRGFFVTKKKYALIDEDGHITTRGLEVVRRDWSEIAKETQAKVLEVILREGSIEKAAGIVKKVVEDLANYRVPVEKLIIHEQITRELKRYKATGPHVAIAKRLQARGIKVKPGTIISYVVLKGSKKISDRVILFDEYDSSRHKYDPDYYIHNQVLPAVLRILEAFGYKEKDLEYQRMKQTGLGAWLKMGKK

SEQ ID NO: 1577 - protein, 773 aa, unidentified
  REGION 1..773: note = Description of Unknown: Synthetic polypeptide
MILDTDYITENGKPVIRIFKKEKGEFKIEYDRNFEPYIYALLEDDESIEDIKKITGERHGKKVRIIRVEKVKKNFLGEPIEVWKLVFEHPQDYPAIRDAIRSHPAVREIFEYDIPFAKRYLIDKGLVPMEGGEELKLLAFAIATFYHEGDEFAEGEILMISYADESGAKVITWKKIDLPYVEVVSTEREAIKRFLQVLREKDPDVLLTYNGDNFDFAYIKKRCEKLGLKFTIGRDGSEPKIQRMGDRFAVEVKGRIHLDLAPVVRHTIRLPTYTLEAVYEAVFGKKKEKVYAEEIAEAWKSEEGLKRVAQYSMEDARATYELGREFFPMEVELAKLIGQSVWDVSRSSTGNLVEWYLLRVAYERNELAPNKPGGEEYQRRMRSSYIGGYVKEPEKGLWESIAYLDFRSSAGSIIVTHNVSPDTLEKECKNYDVAPIVGYRFCKDFKGFIPSILEDLIETRQKVKRKMKATIDPIEKKMLDYRQRALKILANSYYGYQGYPKARWYSKECAESVTAWGRHYIETTIKEAEKFGFKVLYADTDGFFATIPNEKPETIKSKAKKFLKHINEKLPGMLELEYEGFYLRGFFVTKKKYALIDEDGKITTRGLEVVRRDWSEIAKETQAKVLEVILREGSIEKAAGIVKKVVEDLANYRVPVEKLIIHEQITRELKRYKATGPHVAIAKRLQARGIKVKPGTIISYVVLKGSKKISDRVILFDEYDSSRHKYDPDYYIHNQVLPAVLRILEAFGYKEKDLEYQRMKQTGLGAWLKMGKK

SEQ ID NO: 1578 - protein, 773 aa, unidentified
  REGION 1..773: note = Description of Unknown: Synthetic polypeptide
MILDTDYITENGKPVIRIFKKEKGEFKIEYDRNFEPYIYALLEDDESIEDIKKITGERHGKKVRIIRVEKVKKKFLGEPIEVWKLVFEHPQDYPAIRDAIRSHPAVREIFEYDIPFAKRYLIDKGLVPMEGGEELKLLAFAIATFYHEGDEFAEGEILMISYADESGAKVITWKKIDLPYVEVVSTEREAIKRFLQVLREKDPDVLLTYNGDNFDFAYIRKRCEKLGLKFTIGRDGSEPKIQRMGDRFAVEVKGRIHLDLAPVVRHTIRLPTYTLEAVYEAVFGKKKEKVYAEEIAEAWKSEEGLKRVAQYSMEDARATYELGREFFPMEVELAKLIGQSVWDVSRSSTGNLVEWYLLRVAYERNELAPNKPGGEEYQRRMRSSYIGGYVKEPEKGLWESIAYLDFRSSAGSIIVTHNVSPDTLEKECKNYDVAPIVGYRFCKDFKGFIPSILEDLIETRQKVKRKMKATIDPIEKKMLDYRQRALKILANSYYGYQGYPKARWYSKECAESVTAWGRHYIETTIKEAEKFGFKVLYADTDGFFATIPNEKPETIKSKAKKFLKHINEKLPGMLELEYEGFYLRGFFVTKKKYALIDEDGHITTRGLEVVRRDWSEIAKETQAKVLEVILREGSIEKAAGIVKKVVEDLANYRVPVEKLIIHEQITRELKRYKATGPHVAIAKRLQARGIKVKPGTIISYVVLKGSKKISDRVILFDEYDSSRHKYDPDYYIHNQVLPAVLRILEAFGYKEKDLEYQRMKQTGLGAWLKMGKK

SEQ ID NO: 1579 - protein, 773 aa, unidentified
  REGION 1..773: note = Description of Unknown: Synthetic polypeptide
MILDTDYITENGKPVIRIFKKEKGEFKIEYDRNFEPYIYALLEDDESIEDIKKITGERHGKKVRIIRVEKVKKKFLGEPIEVWKLVFEHPQDYPAIRDAIRSHPAVREIFEYDIPFAKRYLIDKGLVPMEGGEELKLLAFAIATFYHEGDEFAEGEILMISYADESGAKVITWKKIDLPYVEVVSTEREAIKRFLQVLREKDPDVLLTYNGDNFDFAYIKKRCEKLGLKFTIGRDGSEPKIQRMGDRFAVEVKGRIHLDLAPVVRHTIRLPTYTLEAVYEAVFGKKKEKVYAEEIAEAWKSEEGLKRVAQYSMEDARATYELGREFFPMEVELAKLIGQSVWDVSRSSTGNLVEWYLLRVAYERNELAPNKPGGEEYQRRMRSSYIGGYVKEPEKGLWESIAYLDFRSSAGSIIVTHNVSPDTLEKECKNYDVAPIVGYRFCKDFKGFIPSILEDLIETRQKVKRKMKATIDPIEKKMLDYRQRALKILANSYYGYQGYPKARWYSKECAESVTAWGRHYIETTIKEAEKFGFKVLYADTDGFFATIPNEKPETIKSKAKKFLKHINEKLPGMLELEYEGFYLAGFFVTKKKYALIDEDGHITTRGLEVVRRDWSEIAKETQAKVLEVILREGSIEKAAGIVKKVVEDLANYRVPVEKLIIHEQITRELKRYKATGPHVAIAKRLQARGIKVKPGTIISYVVLKGSKKISDRVILFDEYDSSRHKYDPDYYIHNQVLPAVLRILEAFGYKEKDLEYQRMKQTGLGAWLKMGKK

SEQ ID NO: 1580 - protein, 773 aa, unidentified
  REGION 1..773: note = Description of Unknown: Synthetic polypeptide
MILDTDYITENGKPVIRIFKKEKGEFKIEYDRNFEPYIYALLEDDESIEDIKKITGERHGKKVRIIRVEKVKKNFLGEPIEVWKLVFEHPQDYPAIRDAIRSHPAVREIFEYDIPFAKRYLIDKGLVPMEGGEELKLLAFAIATFYHEGDEFAEGEILMISYADESGAKVITWKKIDLPYVEVVSTEREAIKRFLQVLREKDPDVLLTYNGDNFDFAYIKKRCEKLGLKFTIGRDGSEPKIQRMGDRFAVEVKGRIHLDLAPVVRHTIRLPTYTLEAVYEAVFGKKKEKVYAEEIAEAWKSEEGLKRVAQYSMEDAKATYELGREFFPMEVELAKLIGQSVWDVSRSSTGNLVEWYLLRVAYERNELAPNKPGGEEYQRRMRSSYIGGYVKEPEKGLWESIAYLDFRSSAGSIIVTHNVSPDTLEKECKNYDVAPIVGYRFCKDFKGFIPSILEDLIETRQKVKRKMKATIDPIEKKMLDYRQRALKILANSYYGYQGYPKARWYSKECAESVTAWGRHYIETTIKEAEKFGFKVLYADTDGFFATIPNEKPETIKSKAKKFLKHINEKLPGMLELEYEGFYLRGFFVTKKKYALIDEDGHITTRGLEVVRRDWSEIAKETQAKVLEVILREGSIEKAAGIVKKVVEDLANYRVPVEKLIIHEQITRELKRYKATGPHVAIAKRLQARGIKVKPGTIISYVVLKGSKKISDRVILFDEYDSSRHKYDPDYYIHNQVLPAVLRILEAFGYKEKDLEYQRMKQTGLGAWLKMGKK

SEQ ID NO: 1581 - protein, 773 aa, unidentified
  REGION 1..773: note = Description of Unknown: Synthetic polypeptide
MILDTDYITENGKPVIRIFKKEKGEFKIEYDRNFEPYIYALLEDDESIEDIKKITGERHGKKVRIIRVEKVKKNFLGEPIEVWKLVFEHPQDYPAIRDAIRSHPAVREIFEYDIPFAKRYLIDKGLVPMEGGEELKLLAFNIATFYHEGDEFAEGEILMISYADESGAKVITWKKIDLPYVEVVSTEREAIKRFLQVLREKDPDVLLTYNGDNFDFAYIKKRCEKLGLKFTIGRDGSEPKIQRMGDRFAVEVKGRIHLDLAPVVRHTIRLPTYTLEAVYEAVFGKKKEKVYAEEIAEAWKSEEGLKRVAQYSMEDARATYELGREFFPMEVELAKLIGQSVWDVSRSSTGNLVEWYLLRVAYERNELAPNKPGGEEYQRRMRSSYIGGYVKEPEKGLWESIAYLDFRSSAGSIIVTHNVSPDTLEKECKNYDVAPEVGYRFCKDFKGFIPSILEDLIETRQKVKRKMKATIDPIEKKMLDYRQRALKILANSYYGYQGYPKARWYSKECAESVTAWGRHYIETTIKEAEKFGFKVLYADTDGFFATIPNEKPETIKSKAKKFLKHINEKLPGMLELEYEGFYLRGFFVTKKRYALIDEDGHITTRGLEVVRRDWSEIAKETQAKVLEVILREGSIEKAAGIVKKVVEDLANYRVPVEKLIIHEQITRELKRYKATGPHVAIAKRLQARGIKVKPGTIISYVVLKGSKKISDRVILFDEYDSSRHKYDPDYYIHNQVLPAVLRILEAFGYKEKDLEYQRMKQTGLGAWLKMGKK

SEQ ID NO: 1582 - protein, 773 aa, unidentified
  REGION 1..773: note = Description of Unknown: Synthetic polypeptide
MILDTDYITENGKPVIRIFKKEKGEFKIEYDRNFEPYIYALLEDDESIEDIKKITGERHGKKVRIIRVEKVKKNFLGEPIEVWKLVFEHPQDYPAIRDAIRSHPAVREIFEYDIPFAKRYLIDKGLVPMEGGEELKLLAFAIATFYHEGDEFAEGEILMISYADESGAKVITWKKIDLPYVEVVSTEREAIKRFLQVLREKDPDVLLTYNGDNFDFAYIKKRCEKLGLKFTIGRDGSEPKIQRMGDRFAVEVKGRIHLDLAPVVRHTIRLPTYTLEAVYEAVFGKKKEKVYAEEIAEAWKSEEGLKRVAQYSMEDARATYELGREFFPMEVELAKLIGQSVWDVSRSSTGNLVEWYLLRVAYERNELAPNKPGGEEYQRRMRSSYIGGYVKEPEKGLWESIAYLDFRSSAGSIIVTHNVSPDTLNKECKNYDVAPIVGYRFCKDFKGFIPSILEDLIETRQKVKRKMKATIDPIEKKMLDYRQRALKILANSYYGYQGYPKARWYSKECAESVTAWGRHYIETTIKEAEKFGFKVLYADTDGFFATIPNEKPETIKSKAKKFLKHINEKLPGMLELEYEGFYLRGFFVTKKKYALIDEDGHITTRGLEVVRRDWSEIAKETQAKVLEVILREGSIEKAAGIVKKVVEDLANYRVPVEKLIIHEQITRELKRYKATGPHVAIAKRLQARGIKVKPGTIISYVVLKGSKKISDRVILFDEYDSSRHKYDPDYYIHNQVLPAVLRILEAFGYKEKDLEYQRMKQTGLGAWLKMGKK

SEQ ID NO: 1583 - protein, 773 aa, unidentified
  REGION 1..773: note = Description of Unknown: Synthetic polypeptide
MILDTDYITENGKPVIRIFKKEKGEFKIEYDRNFEPYIYALLEDDESIEDIKKITGERHGKKVRIIRVEKVKKKFLGEPIEVWKLVFEHPQDYPAIRDAIRSHPAVREIFEYDIPFAKRYLIDKGLVPMEGGEELKLLAFAIATFYHEGDEFAEGEILMISYADESGAKVITWKKIDLPYVEVVSTEREAIKRFLQVLREKDPDVLLTYNGDNFDFAYIKKRCEKLGLKFTIGRDGSEPKIQRMGDRFAVEVKGRIHLDLAPVVRHTIRLPTYTLEAVYEAVFGKKKEKVYAEEIAEAWKSEEGLKRVAQYSMEDARATYELGREFFPMEVELAKLIGQSVWDVSRSSTGNLVEWYLLRVAYERNELAPNKPGGEEYQRRMRSSYIGGYVKEPEKGLWESIAYLDFRSSAGSIIVTHNVSPDTLEKECKNYDVAPIVGYRFCKDFKGFIPSILEDLIETRQKVKRKMKATIDPIEKKMLDYRQRALKILANSYYGYQGYPKARWYSKECALSVTAWGRHYIETTIKEAEKFGFKVLYADTDGFFATIPNEKPETIKSKAKKFLKHINEKLPGMLELEYEGFYLRGFFVTKKKYALIDEDGHITTRGLEVVRRDWSEIAKETQAKVLEVILREGSIEKAAGIVKKVVEDLANYRVPVEKLIIHEQITRELKRYKATGPHVAIAKRLQARGIKVKPGTIISYVVLKGSKKISDRVILFDEYDSSRHKYDPDYYIHNQVLPAVLRILEAFGYKEKDLEYQRMKQTGLGAWLKMGKK

SEQ ID NO: 1584 - protein, 773 aa, unidentified
  REGION 1..773: note = Description of Unknown: Synthetic polypeptide
MILDTDYITENGKPVIRIFKKEKGEFKIEYDRNFEPYIYALLEDDESIEDIKKITGERHGKKVRIIRVEKVKKKFLGEPIEVWKLVFEHPQDYPAIRDAIRSHPAVREIFEYDIPFAKRYLIDKGLVPMEGGEELKLLAFAIATFYHEGDEFAEGEILMISYADESGAKVITWKKIDLPYVEVVSTEREAIKRFLQVLREKDPDVLLTYNGDNFDFAYIKKRCEKLGLKFTIGRDGSEPKIQRMGDRFAVEVKGRIHLDLAPVVRHTIRLPTYTLEAVYEAVFGKKKEKVYAEEIAEAWKSEEGLKRVAQYSMEDARATYELGREFFPMEVELAKLIGQSVWDVSRSSTGNLVEWYLLRVAYERNELAPNKPGGEEYQRRMRSSYIGGYVKEPEKGLWESIAYLDFRSSAGSIIVTHNVSPDTLEKECKNYDVAPIVGYRFCKDFKGFIPSILEDLIETRQKVKRKMKATIDPIEKKMLDYRQRALKILANSYYGYQGYPKARWYSKECAESVTAWGRHYIETTIKEAEKFGFKVLYADTDGFFATIPNEKPETIKSKAKKFLKHINEKLPGMLELEYEGFYLRGFFVTKKKYALIDEDGHITTRGLELKRRDWSEIAKETQAKVLEVILREGSIEKAAGIVKKVVEDLANYRVPVEKLIIHEQITRELKRYKATGPHVAIAKRLQARGIKVKPGTIISYVVLKGSKKISDRVILFDEYDSSRHKYDPDYYIHNQVLPAVLRILEAFGYKEKDLEYQRMKQTGLGAWLKMGKK

SEQ ID NO: 1585 - protein, 773 aa, unidentified
  REGION 1..773: note = Description of Unknown: Synthetic polypeptide
MILDTDYITENGKPVIRIFKKEKGEFKIEYDRNFEPYIYALLEDDESIEDIKKITGERHGKKVRIIRVEKVKKNFLGEPIEVWKLVFEHPQDYPAIRDAIRSHPAVREIFEYDIPFAKRYLIDKGLVPMEGGEELKLLAFAIATFYHEGDEFAEGEILMISYADESGAKVITWKKIDLPYVEVVSTEREAIKRFLQVLREKDPDVLLTYNGDNFDFAYIKKRCEKLGLKFTIGRDGSEPKIQRMGDRFAVEVKGRIHLDLAPVVRHTINLPTYTLEAVYEAVFGKKKEKVYAEEIAEAWKSEEGLKRVAQYSMEDARATYELGREFFPMEVELAKLIGQSVWDVSRSSTGNLVEWYLLRVAYERNELAPNKPGGEEYQRRMRSSYIGGYVKEPEKGLWESIAYLDFRSSAGSIIVTHNVSPDTLEKECKNYDVAPIVGYRFCKDFKGFIPSILEDLIETRQKVKRKMKATIDPIEKKMLDYRQRALKILANSYYGYQGYPKARWYSKECAESVTAWGRHYIETTIKEAEKFGFKVLYADTDGFFATIPNEKPETIKSKAKKFLKHINEKLPGMLELEYEGFYLRGFFVTKKKYALIDEDGHITTRGLEVVRRDWSEIAKETQAKVLEVILREGSIEKAAGIVKKVVEDLANYRVPVEKLIIHEQITRELKRYKATGPHVAIAKRLQARGIKVKPGTIISYVVLKGSKKISDRVILFDEYDSSRHKYDPDYYIHNQVLPAVLRILEAFGYKEKDLEYQRMKQTGLGAWLKMGKK

SEQ ID NO: 1586 - protein, 773 aa, unidentified
  REGION 1..773: note = Description of Unknown: Synthetic polypeptide
MILDTDYITENGKPVIRIFKKEKGEFKIEYDRNFEPYIYALLEDDESIEDIKKITGERHGKKVRIIRVEKVKKKFLGEPIEVWKLVFEHPQDYPAIRDAIRSHPAVREIFEYDIPFAKRYLIDKGLVPMEGGEELKLLAFAIATFYHEGDEFAEGEILMISYADESGAKVITWKKIDLPYVEVVSTEREAIKRFLQVLREKDPDVLLTYNGDNFRFAYIKKRCEKLGLKFTIGRDGSEPKIQRMGDRFAVEVKGRIHLDLAPVVRHTIRLPTYTLEAVYEAVFGKKKEKVYAEEIAEAWKSEEGLKRVAQYSMEDARATYELGREFFPMEVELAKLIGQSVWDVSRSSTGNLVEWYLLRVAYERNELAPNKPGGEEYQRRMRSSYIGGYVKEPEKGLWESIAYLDFRSSAGSIIVTHNVSPDTLEKECKNYDVAPIVGYRFCKDFKGFIPSILEDLIETRQKVKRKMKATIDPIEKKMLDYRQRALKILANSYYGYQGYPKARWYSKECAESVTAWGRHYIETTIKEAEKFGFKVLYADTDGFFATIPNEKPETIKSKAKKFLKHINEKLPGMLELEYEGFYLRGFFVTKKKYALIDEDGHITTRGLEVVRRDWSEIAKETQAKVLEVILREGSIEKAAGIVKKVVEDLANYRVPVEKLIIHEQITRELKRYKATGPHVAIAKRLQARGIKVKPGTIISYVVLKGSKKISDRVILFDEYDSSRHKYDPDYYIHNQVLPAVLRILEAFGYKEKDLEYQRMKQTGLGAWLKMGKK

SEQ ID NO: 1587 - protein, 773 aa, unidentified
  REGION 1..773: note = Description of Unknown: Synthetic polypeptide
MILDTDYITENGKPVIRIFKKEKGEFKIEYDRNFEPYIYALLEDDESIEDIKKITGERHGKKVRIIRVEKVKKKFLGEPIEVWKLVFEHPQDYPAIRDAIRSHPAVREIFEYDIPFAKRYLIDKGLVPMEGGEELKLLAFAIATFYHEGDEFAEGEILMISYADESGAKVITWKKIDLPYVEVVSTEREAIKRFLQVLREKDPDVLLTYNGDNFDFAYIKKRCEKLGLKFTIGRDGSEPKIQRMGDRFAVEVKGRIHLDLAPVVRHTIRLPTYTLEAVYEAVFGKKKEKVYAEEIAEAWKSEEGLKRVAQYSMEDARATYELGREFFPMEVELAKLIGQSVWDVSRSSTGNLVEWYLLRVAYERNELAPNKPGGEEYQRRMRSSYIGGYVKEPEKGLWESIAYLDFVSSAGSIIVTHNVSPDTLEKECKNYDVAPIVGYRFCKDFKGFIPSILEDLIETRQKVKRKMKATIDPIEKKMLDYRQRALKILANSYYGYQGYPKARWYSKECAESVTAWGRHYIETTIKEAEKFGFKVLYADTDGFFATIPNEKPETIKSKAKKFLKHINEKLPGMLELEYEGFYLRGFFVTKKKYALIDEDGHITTRGLEVVRRDWSEIAKETQAKVLEVILREGSIEKAAGIVKKVVEDLANYRVPVEKLIIHEQITRELKRYKATGPHVAIAKRLQARGIKVKPGTIISYVVLKGSKKISDRVILFDEYDSSRHKYDPDYYIHNQVLPAVLRILEAFGYKEKDLEYQRMKQTGLGAWLKMGKK

SEQ ID NO: 1588 - protein, 773 aa, unidentified
  REGION 1..773: note = Description of Unknown: Synthetic polypeptide
MILDTDYITENGKPVIRIFKKEKGEFKIEYDRNFEPYIYALLEDDESIEDIKKITGERHGKKVRIIRVEKVKKNFLGEPIEVWKLVFEHPQDYPAIRDAIRSHPAVREIFEYDIPFAKRYLIDKGLVPMEGGEELKLLAFAIATFYHEGDEFAEGEILMISYADESGAKVITWKKIDLPYVEVVSTEREAIKRFLQVLREKDPDVLLTYNGDNFDFAYIKKRCEKLGLKFTIGRDGSEPKIQRMGDRFAVEVKGRIHLDLAPVVRHTIRLPTYTLEAVYEAVFGKKKEKVYAEEIAEAWKSEEGLKRVAQYSMEDARATYELGREFFPMEVELAKLIGQSVWDVSRSSTGNLVEWYLLRVAYERNELAPNKPGGEEYQRRMRSSYIGGYVKEPEKGLWESIAYLDFRSLAGSIIVTHNVSPDTLEKECKNYDVAPIVGYRFCKDFKGFIPSILEDLIETRQKVKRKMKATIDPIEKKMLDYRQRALKILANSYYGYQGYPKARWYSKECAESVTAWGRHYIETTIKEAEKFGFKVLYADTDGFFATIPNEKPETIKSKAKKFLKHINEKLPGMLELEYEGFYLRGFFVTKKKYALIDEDGHITTRGLEVVRRDWSEIAKETQAKVLEVILREGSIEKAAGIVKKVVEDLANYRVPVEKLIIHEQITRELKRYKATGPHVAIAKRLQARGIKVKPGTIISYVVLKGSKKISDRVILFDEYDSSRHKYDPDYYIHNQVLPAVLRILEAFGYKEKDLEYQRMKQTGLGAWLKMGKK

SEQ ID NO: 1589 - protein, 773 aa, unidentified
  REGION 1..773: note = Description of Unknown: Synthetic polypeptide
MILDTDYITENGKPVIRIFKKEKGEFKIEYDRNFEPYIYALLEDDESIEDIKKITGERHGKKVRIIRVEKVKKKFLGEPIEVWKLVFEHPQDYPAIRDAIRSHPAVREIFEYDIPFAKRYLIDKGLVPMEGGEELKLLAFAIATFYHEGDEFAEGEILMISYADESGAKVITWKKIDLPYVEVVSTEREAIKRFLQVLREKDPDVLLTYNGDNFDFAYIKKRCEKLGLKFTIGRDGSEPKIQRMGDRFAVEVKGRIHLDLAPVVRHTIRLPTYTLEAVYEAVFGKKKEKVYAEEIAEAWKSEEGLKRVAQYSMEDARATYELGREFFPMEVELAKLIGQSVWDVSRSSTGNLVEWYLLRVAYERNELAPNKPGGEEYQRRMRSSYIGGYVKEPEKGLWESIAYLDFRSSAGSIIVTHNVSPDTLEKECKNYDVAPIVGYRFCKDFKGFIPSILEDLIETRQKVKRKMKATIDPIEKKMLDYRQRALKILANSYYGYQGYPKARWYSKECAESVTAWGRHYIETTIKEAEKFGFKVLYADTDGLYATIPNEKPETIKSKAKKFLKHINEKLPGMLELEYEGFYLRGFFVTKKKYALIDEDGHITTRGLEVVRRDWSEIAKETQAKVLEVILREGSIEKAAGIVKKVVEDLANYRVPVEKLIIHEQITRELKRYKATGPHVAIAKRLQARGIKVKPGTIISYVVLKGSKKISDRVILFDEYDSSRHKYDPDYYIHNQVLPAVLRILEAFGYKEKDLEYQRMKQTGLGAWLKMGKK

SEQ ID NO: 1590 - protein, 773 aa, unidentified
  REGION 1..773: note = Description of Unknown: Synthetic polypeptide
MILDTDYITENGKPVIRIFKKEKGEFKIEYDRNFEPYIYALLEDDESIEDIKKITGERHGKKVRIIRVEKVKKKFLGEPIEVWKLVFEHPQDYPAIRDAIRSHPAVREIFEYDIPFAKRYLIDKGLVPMEGGEELKLLAFNIATFYHEGDEFAEGEILMISYADESGAKVITWKKIDLPYVEVVSTEREAIKRFLQVLREKDPDVLLTYNGDNFDFAYIKKRCEKLGLKFTIGRDGSEPKIQRMGDRFAVEVKGRIHLDLAPVVRHTIRLPTYTLEAVYEAVFGKKKEKVYAEEIAEAWKSEEGLKRVAQYSMEDARATYELGREFFPMEVELAKLIGQSVWDVSRSSTGNLVEWYLLRVAYERNELAPNKPGGEEYQRRMRSSYIGGYVKEPEKGLWESIAYLDFRSSAGSIIVTHNVSPDTLEKECKNYDVAPDVGYRFCKDFKGFIPSILEDLIETRQKVKRKMKATIDPIEKKMLDYRQRALKILANSYYGYQGYPKARWYSKECAESVTAWGRHYIETTIKEAEKFGFKVLYADTDGFFATIPNEKPETIKSKAKKFLKHINEKLPGMLELEYEGFYLRGFFVTKKKYALIDEDGHITTRGLEVVRRDWSEIAKETQAKVLEVILREGSIEKAAGIVKKVVEDLANYRVPVEKLIIHEQITRELKRYKATGPHVAIAKRLQARGIKVKPGTIISYVVLKGSKKISDRVILFDEYDSSRHKYDPDYYIHNQVLPAVLRILEAFGYKEKDLEYQRMKQTGLGAWLKMGKK

SEQ ID NO: 1591 - protein, 773 aa, unidentified
  REGION 1..773: note = Description of Unknown: Synthetic polypeptide
MILDTDYITENGKPVIRIFKKEKGEFKIEYDRNFEPYIYALLEDDESIEDIKKITGERHGKKVRIIRVEKVKKNFLGEPIEVWKLVFEHPQDYPAIRDAIRSHPAVREIFEYDIPFAKRYLIDKGLVPMEGGEELKLLAFAIATFYHEGDEFAEGEILMISYADESGAKVITWKKIDLPYVEVVSTEREAIKRFLQVLREKDPDVLLTYNGDNFDFAYIKKRCEKLGLKFTIGRDGSEPKIQRMGDRFAVEVKGRIHLDLAPVVRHTIRLPTYTLEAVYEAVFGKKKEKVYAEEIAEAWKSEEGLKRVAQYSMEDARATYELGREFFPMEVELAKLIGQSVWDVSRSSTGNLVEWYLLRVAYERNELAPNKPGGEEYQRRMRSSYIGGYVKEPEKGLWESIAYLDFRSSAGSIIVTHNVSPDTLEKECKNYDVAPQVGYRFCKDFKGFIPSILEDLIETRQKVKRKMKATIDPIEKKMLDYRQRALKILANSYYGYQGYPKARWYSKECAESVTAWGRHYIETTIKEAEKFGFKVLYADTDGFFATIPNEKPETIKSKAKKFLKHINEKLPGMLELEYEGFYLRGFFVTKKKYALIDEDGHITTRGLEVVRRDWSEIAKETQAKVLEVILREGSIEKAAGIVKKVVEDLANYRVPVEKLIIHEQITRELKRYKATGPHVAIAKRLQARGIKVKPGTIISYVVLKGSKKISDRVILFDEYDSSRHKYDPDYYIHNQVLPAVLRILEAFGYKEKDLEYQRMKQTGLGAWLKMGKK

SEQ ID NO: 1592 - protein, 773 aa, unidentified
  REGION 1..773: note = Description of Unknown: Synthetic polypeptide
MILDTDYITENGKPVIRIFKKEKGEFKIEYDRNFEPYIYALLEDDESIEDIKKITGERHGKKVRIIRVEKVKKKFLGEPIEVWKLVFEHPQDYPAIRDAIRSHPAVREIFEYDIPFAKRYLIDKGLVPMEGGEELKLLAFAIATFYHEGDEFAEGEILMISYADESGAKVITWKKIDLPYVEVVSTEREAIKRFLQVLREKDPDVLLTYNGDNFDFAYIKKRCEKLGLKFTIGRDGSEPKIQRMGDRFAVEVKGRIHLDLAPVVRHTIRLPTYTLEAVYEAVFGKKKEKVYAEEIAEAWKSEEGLKRVAQYSMEDARATYELGREFFPMEVELAKLIGQSVWDVSRSSTGNLVEWYLLRVAYERNELAPNKPGGEEYQRRMRSSYIGGYVKEPEKGLWENIAYLDFRSSAGSIIVTHNVSPDTLEKECKNYDVAPIVGYRFCKDFKGFIPSILEDLIETRQKVKRKMKATIDPIEKKMLDYRQRALKILANSYYGYQGYPKARWYSKECAESVTAWGRHYIETTIKEAEKFGFKVLYADTDGFFATIPNEKPETIKSKAKKFLKHINEKLPGMLELEYEGFYLRGFFVTKKKYALIDEDGHITTRGLEVVRRDWSEIAKETQAKVLEVILREGSIEKAAGIVKKVVEDLANYRVPVEKLIIHEQITRELKRYKATGPHVAIAKRLQARGIKVKPGTIISYVVLKGSKKISDRVILFDEYDSSRHKYDPDYYIHNQVLPAVLRILEAFGYKEKDLEYQRMKQTGLGAWLKMGKK

SEQ ID NO: 1593 - protein, 773 aa, unidentified
  REGION 1..773: note = Description of Unknown: Synthetic polypeptide
MILDTDYITENGKPVIRIFKKEKGEFKIEYDRNFEPYIYALLEDDESIEDIKKITGERHGKKVRIIRVEKVKKKFLGEPIEVWKLVFEHPQDVPAIRDAIRSHPAVREIFEYDIPFAKRYLIDKGLVPMEGGEELKLLAFDIETFYHEGDEFAEGEILMISYADESGAKVITWKKIDLPYVEVVSTEREAIKRFLQVLREKDPDVLLTYNGDNFDFAYIKKRCEKLGLKFTIGRDGSEPKIQRMGDRFAVEVKGRIHLDLYPVVRHTIRLPTYTLEAVYEAVFGKKKEKVYAEEIAEAWKSEEGLKRVAQYSMEDARATYELGREFFPMEVELAKLIGQSVWDVSRSSTGNLVEWYLLRVAYERNELAPNKPGGEEYQRRMRSSYIGGYVKEPEKGLWESIAYLDFRSLAPSIIVTHNVSPDTLEKECKNYDVAPIVGYRFCKDFKGFIPSILEDLIETRQKVKRKMKATIDPIEKKMLDYRQRALKILANSYYGYQGYPKARWYSKECAESVTAWGRHYIETTIKEAEKFGFKVLYADTDGFFATIPNEKPETIKSKAKKFLKHINEKLPGMLELEYEGFYLRGFFVTKKKYALIDEDGHITTRGLEVVRRDWSEIAKETQAKVLEVILREGSIEKAAGIVKKVVEDLANYRVPVEKLIIHEQITRELKDYKATGPHVAIAKRLQARGIKVKPGTIISYVVLKGSKKISDRVILFDEYDSSRHKYDPDYYIHNQVLPAVLRILEAFGYKEKDLEYQRMKQTGLGAWLKMGKK

SEQ ID NO: 1594 - protein, 773 aa, unidentified
  REGION 1..773: note = Description of Unknown: Synthetic polypeptide
MILDTDYITENGKPVIRIFKKEKGEFKIEYDRNFEPYIYALLEDDESIEDIKKITGERHGKKVRIIRVEKVKKKFLGEPIEVWKLVFEHPQDYPAIRDAIRSHPAVREIFEYDIPFAKRYLIDKGLVPMEGGEELKLLAFAIATFYHEGDEFAEGEILMISYADESGAKVITWKKIDLPYVEVVSTEREAIKRFLQVLREKDPDVLLTYNGDNFDFAYIKKRCEKLGLKFTIGRDGSEPKIQRMGDRFAVEVKGRIHLDLAPVVRHTIRLPTYTLEAVYEAVFGKKKEKVYAEEIAEAWKSEEGLKRVAQYSMEDARATYELGREFFPMEVELAKLIGQSVWDVSRSSTGNLVEWYLLRVAYERNELAPNKPGGEEYQRRMRSSHIGGYVKEPEKGLWESIAYLDFRSSAGSIIVTHNVSPDTLEKECKNYDVAPIVGYRFCKDFKGFIPSILEDLIETRQKVKRKMKATIDPIEKKMLDYRQRALKILANSYYGYQGYPKARWYSKECAESVTAWGRHYIETTIKEAEKFGFKVLYADTDGFFATIPNEKPETIKSKAKKFLKHINEKLPGMLELEYEGFYLRGFFVTKKKYALIDEDGHITTRGLEVVRRDWSEIAKETQAKVLEVILREGSIEKAAGIVKKVVEDLANYRVPVEKLIIHEQITRELKRYKATGPHVAIAKRLQARGIKVKPGTIISYVVLKGSKKISDRVILFDEYDSSRHKYDPDYYIHNQVLPAVLRILEAFGYKEKDLEYQRMKQTGLGAWLKMGKK

SEQ ID NO: 1595 - protein, 773 aa, unidentified
  REGION 1..773: note = Description of Unknown: Synthetic polypeptide
MILDTDYITENGKPVIRIFKKEKGEFKIEYDRNFEPYIYALLEDDESIEDIKKITGERHGKKVRIIRVEKVKKKFLGEPIEVWKLVFEHPQDYPAIRDAIRSHPAVREIFEYDIPFAKRYLIDKGLVPMEGGEELKLLAFAIATFYHEGDEFAEGEILMISYADESGAKVITWKKIDLPYVEVVSTEREAIKRFLQVLREKDPDVLLTYNGDNFDFAYIKKRCEKLGLKFTIGRDGSEPKIQRMGDRFAVEVKGRIHLDLAPVVRHTIRLPTYTLEAVYEAVFGKKKEKVYAEEIAEAWKSEEGLKRVAQYSMEDARATYELGREFFPMEVELAKLIGQSVWDVSRSSTGNLVEWYLLRVAYERNELAPNKPGGEEYQRRMRSSYIGGYVKEPEKGLWESIAYLDFRSSAGSIIVTHNVSPDTLEKECKNYDVAPIVGYRFCKDFKGFIPSILEDLIETRQKVKRKMKATIDPIEKKMLDYRQRALKILANSYYGYQGYPKARWYSKECAESVTAWGRHYIETTIKEAEKFGFKVLYADTDGLHATIPNEKPETIKSKAKKFLKHINEKLPGMLELEYEGFYLRGFFVTKKKYALIDEDGHITTRGLEVVRRDWSEIAKETQAKVLEVILREGSIEKAAGIVKKVVEDLANYRVPVEKLIIHEQITRELKRYKATGPHVAIAKRLQARGIKVKPGTIISYVVLKGSKKISDRVILFDEYDSSRHKYDPDYYIHNQVLPAVLRILEAFGYKEKDLEYQRMKQTGLGAWLKMGKK

SEQ ID NO: 1596 - protein, 773 aa, unidentified
  REGION 1..773: note = Description of Unknown: Synthetic polypeptide
MILDTDYITENGKPVIRIFKKEKGEFKIEYDRNFEPYIYALLEDDESIEDIKKITGERHGKKVRIIRVEKVKKKFLGEPIEVWKLVFEHPQDYPAIRDAIRSHPAVREIFEYDIPFAKRYLIDKGLVPMEGGEELKLLAFAIATFYHEGDEFAEGEILMISYADESGAKVITWKKIDLPYVEVVSTEREAIKRFLQVLREKDPDVLLTYNGDNFDFAYIKKRCEKLGLKFTIGRDGSEPKIQRMGDRFAVEVKGRIHLDLAPVVRHTIRLPTYTLEAVYEAVFGKKKEKVYAEEIAEAWKSEEGLKRVAQYSMEDARATYELGREFFPMEVELAKLIGQSVWDVSRSSTGNLVEWYLLRVAYERNELAPNKPGGEEYQRRMRSSYIGGYVKEPEKGLWESIAYLDFRSSAGSIIVTHNVSPDTLEKECKNYDVAPIVGYRFCKDFKGFIPSILEDLIETRQKVKRKMKATIDPIEKKMLDYRQRALKILANSYYGYQGYPKARWYSDECAESVTAWGRHYIETTIKEAEKFGFKVLYADTDGFFATIPNEKPETIKSKAKKFLKHINEKLPGMLELEYEGFYLRGFFVTKKKYALIDEDGHITTRGLEVVRRDWSEIAKETQAKVLEVILREGSIEKAAGIVKKVVEDLANYRVPVEKLIIHEQITRELKRYKATGPHVAIAKRLQARGIKVKPGTIISYVVLKGSKKISDRVILFDEYDSSRHKYDPDYYIHNQVLPAVLRILEAFGYKEKDLEYQRMKQTGLGAWLKMGKK

SEQ ID NO: 1597 - protein, 773 aa, unidentified
  REGION 1..773: note = Description of Unknown: Synthetic polypeptide
MILDTDYITENGKPVIRIFKKEKGEFKIEYDRNFEPYIYALLEDDESIEDIKKITGERHGKKVRIIRVEKVKKNFLGEPIEVWKLVFEHPQDYPAIRDAIRSHPAVREIFEYDIPFAKRYLIDKGLVPMEGGEELKLLAFAIATFYHEGDEFAEGEILMISYADESGAKVITWKKIDLPYVEVVSTEREAIKRFLQVLREKDPDVLLTYNGDNFDFAYIKKRCEKLGLKFTIGRDGSEPKIQRMGDRFAVEVKGRIHLDLAPVVRHTIRLPTYTLEAVYEAVFGKKKEKVYAEEIAEAWESEEGLKRVAQYSMEDARATYELGREFFPMEVELAKLIGQSVWDVSRSSTGNLVEWYLLRVAYERNELAPNKPGGEEYQRRMRSSYIGGYVKEPEKGLWESIAYLDFRSSAGSIIVTHNVSPDTLEKECKNYDVAPIVGYRFCKDFKGFIPSILEDLIETRQKVKRKMKATIDPIEKKMLDYRQRALKILANSYYGYQGYPKARWYSKECAESVTAWGRHYIETTIKEAEKFGFKVLYADTDGFFATIPNEKPETIKSKAKKFLKHINEKLPGMLELEYEGFYLRGFFVTKKKYALIDEDGHITTRGLEVVRRDWSEIAKETQAKVLEVILREGSIEKAAGIVKKVVEDLANYRVPVEKLIIHEQITRELKRYKATGPHVAIAKRLQARGIKVKPGTIISYVVLKGSKKISDRVILFDEYDSSRHKYDPDYYIHNQVLPAVLRILEAFGYKEKDLEYQRMKQTGLGAWLKMGKK

SEQ ID NO: 1598 - protein, 773 aa, unidentified
  REGION 1..773: note = Description of Unknown: Synthetic polypeptide
MILDTDYITENGKPVIRIFKKEKGEFKIEYDRNFEPYIYALLEDDESIEDIKKITGERHGKKVRIIRVEKVKKKFLGEPIEVWKLVFEHPQDYPAIRDAIRSHPAVREIFEYDIPFAKRYLIDKGLVPMEGGEELKLLAFAIATFYHEGDEFAEGEILMISYADESGAKVITWKKIDLPYVEVVSTEREAIKRFLQVLREKDPDVLLTYNGDNFDFAYIKKRCEKLGLKFTIGRDGSEPKIQRMGDRFAVEVKGRIHLDLAPVVRHTIRLPTYTLEAVYEAVFGKKKEKVYAEEIAEAWKSEEGLKRVAQYSMEDARATYELGREFFPMEVELAKLIGQSVWDVSRSSTGNLVEWYLLRVAYERNELAPNKPGGEEYQRRMRSSYIGGYVKEPEKGLWESIASLDFRSSAGSIIVTHNVSPDTLEKECKNYDVAPIVGYRFCKDFKGFIPSILEDLIETRQKVKRKMKATIDPIEKKMLDYRQRALKILANSYYGYQGYPKARWYSKECAESVTAWGRHYIETTIKEAEKFGFKVLYADTDGFFATIPNEKPETIKSKAKKFLKHINEKLPGMLELEYEGFYLRGFFVTKKKYALIDEDGHITTRGLEVVRRDWSEIAKETQAKVLEVILREGSIEKAAGIVKKVVEDLANYRVPVEKLIIHEQITRELKRYKATGPHVAIAKRLQARGIKVKPGTIISYVVLKGSKKISDRVILFDEYDSSRHKYDPDYYIHNQVLPAVLRILEAFGYKEKDLEYQRMKQTGLGAWLKMGKK

SEQ ID NO: 1599 - protein, 773 aa, unidentified
  REGION 1..773: note = Description of Unknown: Synthetic polypeptide
MILDTDYITENGKPVIRIFKKEKGEFKIEYDRNFEPYIYALLEDDESIEDIKKITGERHGKKVRIIRVEKVKKNFLGEPIEVWKLVFEHPQDYPAIRDAIRSHPAVREIFEYDIPFAKRYLIDKGLVPMEGGEELKLLAFNIATFYHEGDEFAEGEILMISYADESGAKVITWKKIDLPYVEVVSTEREAIKRFLQVLREKDPDVLLTYNGDNFDFAYIKKRCEKLGLKFTIGRDGSEPKIQRMGDRFAVEVKGRIHLDLAPVVRHTIRLPTYTLEAVYEAVFGKKKEKVYAEEIAEAWKSEEGLKRVAQYSMEDARATYELGREFFPMEVELAKLIGQSVWDVSRSSTGNLVEWYLLRVAYERNELAPNKPGGEEYQRRMRSSYIGGYVKEPEKGLWESIAYLDFRSSAGSIIVTHNVSPDTLEKECKNYDVAPIVGHRFCKDFKGFIPSILEDLIETRQKVKRKMKATIDPIEKKMLDYRQRALKILANSYYGYQGYPKARWYSKECAESVTAWGRHYIETTIKEAEKFGFKVLYADTDGFFATIPNEKPETIKSKAKKFLKHINEKLPGMLELEYEGFYLRGFFVTKKKYALIDEDGHITTRGLEVVRRDWSEIAKETQAKVLEVILREGSIEKAAGIVKKVVEDLANYRVPVEKLIIHEQITRELKRYKATGPHVAIAKRLQARGIKVKPGTIISYVVLKGSKKISDRVILFDEYDSSRHKYDPDYYIHNQVLPAVLRILEAFGYKEKDLEYQRMKQTGLGAWLKMGKK

SEQ ID NO: 1600 - protein, 773 aa, unidentified
  REGION 1..773: note = Description of Unknown: Synthetic polypeptide
MILDTDYITENGKPVIRIFKKEKGEFKIEYDRNFEPYIYALLEDDESIEDIKKITGERHGKKVRIIRVEKVKKKFLGEPIEVWKLVFEHPQDYPAIRDAIRSHPAVREIFEYDIPFAKRYLIDKGLVPMEGGEELKLLAFAIATFYHEGDEFAEGEILMISYADESGAKVITWKKIDLPYVEVVSTEREAIKRFLQVLREKDPDVLLTYNGDNFDFAYIKKRCEKLGLKFTIGRDGSEPKIQRMGDRFAVEVKGRIHLDLAPVVRHTIRLPTYTLEAVYEAVFGKKKEKVYAEEIAEAWKSEEGLKRVAQYSMEDARATYELGREFFPMEVELAKLIGQSVWDVSRSSTGNLVEWYLLRVAYERNELAPNKPGGEEYQRRMRSSYIGGYVKEPEKGLWESIAYLDFISSAGSIIVTHNVSPDTLEKECKNYDVAPIVGYRFCKDFKGFIPSILEDLIETRQKVKRKMKATIDPIEKKMLDYRQRALKILANSYYGYQGYPKARWYSKECAESVTAWGRHYIETTIKEAEKFGFKVLYADTDGFFATIPNEKPETIKSKAKKFLKHINEKLPGMLELEYEGFYLRGFFVTKKKYALIDEDGHITTRGLEVVRRDWSEIAKETQAKVLEVILREGSIEKAAGIVKKVVEDLANYRVPVEKLIIHEQITRELKRYKATGPHVAIAKRLQARGIKVKPGTIISYVVLKGSKKISDRVILFDEYDSSRHKYDPDYYIHNQVLPAVLRILEAFGYKEKDLEYQRMKQTGLGAWLKMGKK

SEQ ID NO: 1601 - protein, 773 aa, unidentified
  REGION 1..773: note = Description of Unknown: Synthetic polypeptide
MILDTDYITENGKPVIRIFKKEKGEFKIEYDRNFEPYIYALLEDDESIEDIKKITGERHGKKVRIIRVEKVKKKFLGEPIEVWKLVFEHPQDYPAIRDAIRSHPAVREIFEYDIPFAKRYLIDKGLVPMEGGEELKLLAFAIATFYHEGDEFAEGEILMISYADESGAKVITWKKIDLPYVEVVSTEREAIKRFLQVLREKDPDVLLTYNGDNFDFAYIKKRCEKLGLKFTIGRDGSEPKIQRMGDRFAVEVKGRIHLDLAPVVRHTIRLPTYTLEAVYEAVFGKKKEKVYAEEIAEAWKSEEGLKRVAQYSMEDARATYELGREFFPMEVELAKLIGQSVWDVSRSSTGNLVEWYLLRVAYERNELAPNKPGGEEYQRRMRSSYIGGYVKEPEKGLWESIAYLDFRSSAGSIIVTHNVSPDTLEKECKNYDVAPEVGYRFCKDFKGFIPSILEDLIETRQKVKRKMKATIDPIEKKMLDYRQRALKILANSYYGYQGYPKARWYSKECAESVTAWGRHYIETTIKEAEKFGFKVLYADTDGFFATIPNEKPETIKSKAKKFLKHINEKLPGMLELEYEGFYLRGFFVTKKRYALIDEDGHITTRGLEVVRRDWSEIAKETQAKVLEVILREGSIEKAAGIVKKVVEDLANYRVPVEKLIIHEQITRELKRYKATGPHVAIAKRLQARGIKVKPGTIISYVVLKGSKKISDRVILFDEYDSSRHKYDPDYYIHNQVLPAVLRILEAFGYKEKDLEYQRMKQTGLGAWLKMGKK

SEQ ID NO: 1602 - protein, 773 aa, unidentified
  REGION 1..773: note = Description of Unknown: Synthetic polypeptide
MILDTDYITENGKPVIRIFKKEKGEFKIEYDRNFEPYIYALLEDDESIEDIKKITGERHGKKVRIIRVEKVKKNFLGEPIEVWKLVFEHPQDYPAIRDAIRSHPAVREIFEYDIPFAKRYLIDKGLVPMEGGEELKLLAFAIATFYHEGDEFAEGEILMISYADESGAKVITWKKIDLPYVEVVSTEREAIKRFLQVLREKDPDVLLTYNGDNFDFAYIKKRCEKLGLKFTIGRDGSEPKIQRMGDRFAVEVKGRIHLDLAPVVRHTIRLPTYTLEAVYEAVFGKKKEKVYAEEIAEAWKSEEGLKRVAQYSMEDARATYELGREFFPMEVELAKLIGQSVWDVSRSSTGNLVEWYLLRVAYERNELAPNKPGGEEYQRRMRSSYIGGYVKEPEKGLWESIAYLDFRSSAGSIIVTHNVSPDTLEKECKNYDVAPIVGYRFCKDFKGFIPSILEDLIETRQKVKRKMKATIDPIEKKMLDYRQRALKILANSYYGYQGYPKARWYSKECAESVTAWGRHYIETTIKEAEKFGFKVLYADTDGFFATIPNEKPETIKSKAKKFLKHINEKLPGMLELEYEGFYLRGFFVTKKKYALIDEDGHITTRGLEVVRRDWSEIAKETQAKVLEVILREGSIEKAAGIVKKVVEDLANYRVPVEKLIIHEQITRELKRYKATGPHVAIAKRLQARGIKVKPGTIISYVVLKGSKKISDRVILFDEYDSSRHKYDPDYYIHNQVLPAVLRILEAFGYKKKDLEYQRMKQTGLGAWLKMGKK

SEQ ID NO: 1603 - protein, 773 aa, unidentified
  REGION 1..773: note = Description of Unknown: Synthetic polypeptide
MILDTDYITENGKPVIRIFKKEKGEFKIEYDRNFEPYIYALLEDDESIEDIKKITGERHGKKVRIIRVEKVKKKFLGEPIEVWKLVFEHPQDYPAIRDAIRSHPAVREIFEYDIPFAKRYLIDKGLVPMEGGEELKLLAFAIATFYHEGDEFAEGEILMISYADESGAKVITWKKIDLPYVEVVSTEREAIKRFLQVLREKDPDVLLTYNGDNFDFAYIKKRCEKLGLKFTIGRDGSEPKIQRMGDRFAVEVKGRIHLDLAPVVRHTIRLPTYTLEAVYEAVFGKKKEKVYAEEIAEAWKSEEGLKRVAQYSMEDARATYELGREFFPMEVELAKLIGQSVWDVSRSSTGNLVEWYLLRVAYERNELAPNKPDEEEYKRRLRTTYLGGYVKEPEKGLWESIAYLDFRSSAGSIIVTHNVSPDTLEKECKNYDVAPIVGYRFCKDFKGFIPSILEDLIETRQKVKRKMKATIDPIEKKMLDYRQRALKILANSYYGYQGYPKARWYSKECAESVTAWGRHYIETTIKEAEKFGFKVLYADTDGFFATIPNEKPETIKSKAKKFLKHINEKLPGMLELEYEGFYLRGFFVTKKKYALIDEDGHITTRGLEVVRRDWSEIAKETQAKVLEVILREGSIEKAAGIVKKVVEDLANYRVPVEKLIIHEQITRELKRYKATGPHVAIAKRLQARGIKVKPGTIISYVVLKGSKKISDRVILFDEYDSSRHKYDPDYYIHNQVLPAVLRILEAFGYKEKDLEYQRMKQTGLGAWLKMGKK

SEQ ID NO: 1604 - protein, 773 aa, unidentified
  REGION 1..773: note = Description of Unknown: Synthetic polypeptide
MILDTDYITENGKPVIRIFKKEKGEFKIEYDRNFEPYIYALLEDDESIEDIKKITGERHGKKVRIIRVEKVKKKFLGEPIEVWKLVFEHPQDYPAIRDAIRSHPAVREIFEYDIPFAKRYLIDKGLVPMEGGEELKLLAFAIATFYHEGDEFAEGEILMISYADESGAKVITWKKIDLPYVEVVSTEREAIKRFLQVLREKDPDVLLTYNGDNFDFAYIKKRCEKLGLKFTIGRDGSEPKIQRMGDRFAVEVKGRIHLDLAPVVRHTIRLPTYTLEAVYEAVFGKKKEKVYAEEIAEAWKSEEGLKRVAQYSMEDARATYELGREFFPMEVELAKLIGQSVWDVSRSSTGNLVEWYLLRVAYERNELAPNKPGGEEYQRRMRSSDIGGYVKEPEKGLWESIAYLDFRSSAGSIIVTHNVSPDTLEKECKNYDVAPIVGYRFCKDFKGFIPSILEDLIETRQKVKRKMKATIDPIEKKMLDYRQRALKILANSYYGYQGYPKARWYSKECAESVTAWGRHYIETTIKEAEKFGFKVLYADTDGFFATIPNEKPETIKSKAKKFLKHINEKLPGMLELEYEGFYLRGFFVTKKKYALIDEDGHITTRGLEVVRRDWSEIAKETQAKVLEVILREGSIEKAAGIVKKVVEDLANYRVPVEKLIIHEQITRELKRYKATGPHVAIAKRLQARGIKVKPGTIISYVVLKGSKKISDRVILFDEYDSSRHKYDPDYYIHNQVLPAVLRILEAFGYKEKDLEYQRMKQTGLGAWLKMGKK

SEQ ID NO: 1605 - protein, 773 aa, unidentified
  REGION 1..773: note = Description of Unknown: Synthetic polypeptide
MILDTDYITENGKPVIRIFKKEKGEFKIEYDRNFEPYIYALLEDDESIEDIKKITGERHGKKVRIIRVEKVKKKFLGEPIEVWKLVFEHPQDYPAIRDAIRSHPAVREIFEYDIPFAKRYLIDKGLVPMEGGEELKLLAFAIATFYHEGDEFAEGEILMISYADESGAKVITWKKIDLPYVEVVSTEREAIKRFLQVLREKDPDVLLTYNGDNFDFAYIKKRCEKLGLKFTIGRDGSEPKIQRMGDRFAVEVKGRIHLDLAPVVRHTIRLPTYTLEAVYEAVFGKKKEKVYAEEIAEAWKSEEGLKRVAQYSMEDARATYELGREFFPMEVELAKLIGQSVWDVSRSSTGNLVEWYLLRVAYERNELAPNKPGGEEYQRRMRSSYIGGYVKEPEKGLWESIAFLDFRSSAGSIIVTHNVSPDTLEKECKNYDVAPIVGYRFCKDFKGFIPSILEDLIETRQKVKRKMKATIDPIEKKMLDYRQRALKILANSYYGYQGYPKARWYSKECAESVTAWGRHYIETTIKEAEKFGFKVLYADTDGFFATIPNEKPETIKSKAKKFLKHINEKLPGMLELEYEGFYLRGFFVTKKKYALIDEDGHITTRGLEVVRRDWSEIAKETQAKVLEVILREGSIEKAAGIVKKVVEDLANYRVPVEKLIIHEQITRELKRYKATGPHVAIAKRLQARGIKVKPGTIISYVVLKGSKKISDRVILFDEYDSSRHKYDPDYYIHNQVLPAVLRILEAFGYKEKDLEYQRMKQTGLGAWLKMGKK

SEQ ID NO: 1606 - protein, 773 aa, unidentified
  REGION 1..773: note = Description of Unknown: Synthetic polypeptide
MILDTDYITENGKPVIRIFKKEKGEFKIEYDRNFEPYIYALLEDDESIEDIKKITGERHGKKVRIIRVEKVKKKFLGEPIEVWKLVFEHPQDYPAIRDAIRSHPAVREIFEYDIPFAKRYLIDKGLVPMEGGEELKLLAFAIATFYHEGDEFAEGEILMISYADESGAKVITWKKIDLPYVEVVSTEREAIKRFLQVLREKDPDVLLTYNGDNFDFAYIKKRCEKLGLKFTIGRDGSEPKIQRMGDRFAVEVKGRIHLDLAPVVRRTIYLPTYTLEAVYEAVFGKKKEKVYAEEIAEAWKSEEGLKRVAQYSMEDARATYELGREFFPMEVELAKLIGQSVWDVSRSSTGNLVEWYLLRVAYERNELAPNKPGGEEYQRRMRSSYIGGYVKEPEKGLWESIAYLDFRSSAGSIIVTHNVSPDTLEKECKNYDVAPIVGYRFCKDFKGFIPSILEDLIETRQKVKRKMKATIDPIEKKMLDYRQRALKILANSYYGYQGYPKARWYSKECAESVTAWGRHYIETTIKEAEKFGFKVLYADTDGFFATIPNEKPETIKSKAKKFLKHINEKLPGMLELEYEGFYLRGFFVTKKKYALIDEDGHITTRGLEVVRRDWSEIAKETQAKVLEVILREGSIEKAAGIVKKVVEDLANYRVPVEKLIIHEQITRELKRYKATGPHVAIAKRLQARGIKVKPGTIISYVVLKGSKKISDRVILFDEYDSSRHKYDPDYYIHNQVLPAVLRILEAFGYKEKDLEYQRMKQTGLGAWLKMGKK

SEQ ID NO: 1607 - protein, 774 aa, unidentified
  REGION 1..774: note = Description of Unknown: Synthetic polypeptide
MILDTDYITENGKPVIRIFKKEKGEFKIEYDRNFEPYIYALLEDDESIEDIKKITGERHGKKVRIIRVEKVKKKFLGEPIEVWKLVFEHPQDYPAIRDAIRSHPAVREIFEYDIPFAKRYLIDKGLVPMEGGEELKLLAFAIATFYHEGDEFAEGEILMISYADESGAKVITWKKIDLPYVEVVSTEREAIKRFLQVLREKDPDVLLTYNGDNFDFAYIKKRCEKLGLKFTIGRDGSEPKIQRMGDRFAVEVKGRIHLDLAPVVRHTIRLPTYTLEAVYEAVFGKKKEKVYAEEIAEAWKSEEGLKRVAQYSMEDARATYELGREFFPMEVELAKLIGQSVWDVSRSSTGNLVEWYLLRVAYERNELAPNKPGGEEYQRRMRSSYIGGYVKEPEKGLWESIAYLDFRSSAGSIIVTHNVSPDTLEKENCKNYDVAPIVGYRFCKDFKGFIPSILEDLIETRQKVKRKMKATIDPIEKKMLDYRQRALKILANSYYGYQGYPKARWYSKECAESVTAWGRHYIETTIKEAEKFGFKVLYADTDGFFATIPNEKPETIKSKAKKFLKHINEKLPGMLELEYEGFYLRGFFVTKKKYALIDEDGHITTRGLEVVRRDWSEIAKETQAKVLEVILREGSIEKAAGIVKKVVEDLANYRVPVEKLIIHEQITRELKRYKATGPHVAIAKRLQARGIKVKPGTIISYVVLKGSKKISDRVILFDEYDSSRHKYDPDYYIHNQVLPAVLRILEAFGYKEKDLEYQRMKQTGLGAWLKMGKK

SEQ ID NO: 1608 - protein, 773 aa, unidentified
  REGION 1..773: note = Description of Unknown: Synthetic polypeptide
MILDTDYITENGKPVIRIFKKEKGEFKIEYDRNFEPYIYALLEDDESIEDIKKITGERHGKKVRIIRVEKVKKKFLGEPIEVWKLVFEHPQDYPAIRDAIRSHPAVREIFEYDIPFAKRYLIDKGLVPMEGGEELKLLAFAIATFYHEGDEFAEGEILMISYADESGAKVITWKKIDLPYVEVVSTEREAIKRFLQVLREKDPDVLLTYNGDNFDFAYIKKRCEKLGLKFTIGRDGSEPKIQRMGDRFAVEVKGRIHLDLAPVVRHTIRLPTYTLEAVYEAVFGKKKEKVYAEEIAEAWKSEEGLKRVAQYSMEDARATYELGREFFPMEVELAKLIGQSVWDVSRSSTGNLVEWYLLRVAYERNELAPNKPGGEEYQRRMRSSKIGGYVKEPEKGLWESIAYLDFRSSAGSIIVTHNVSPDTLEKECKNYDVAPIVGYRFCKDFKGFIPSILEDLIETRQKVKRKMKATIDPIEKKMLDYRQRALKILANSYYGYQGYPKARWYSKECAESVTAWGRHYIETTIKEAEKFGFKVLYADTDGFFATIPNEKPETIKSKAKKFLKHINEKLPGMLELEYEGFYLRGFFVTKKKYALIDEDGHITTRGLEVVRRDWSEIAKETQAKVLEVILREGSIEKAAGIVKKVVEDLANYRVPVEKLIIHEQITRELKRYKATGPHVAIAKRLQARGIKVKPGTIISYVVLKGSKKISDRVILFDEYDSSRHKYDPDYYIHNQVLPAVLRILEAFGYKEKDLEYQRMKQTGLGAWLKMGKK

SEQ ID NO: 1609 - protein, 773 aa, unidentified
  REGION 1..773: note = Description of Unknown: Synthetic polypeptide
MILDTDYITENGKPVIRIFKKEKGEFKIEYDRNFEPYIYALLEDDESIEDIKKITGERHGKKVRIIRVEKVKKKFLGEPIEVWKLVFEHPQDYPAIRDAIRSHPAVREIFEYDIPFAKRYLIDKGLVPMEGGEELKLLAFAIATFYHRGDEFAEGEILMISYADESGAKVITWKKIDLPYVEVVSTEREAIKRFLQVLREKDPDVLLTYNGDNFDFAYIKKRCEKLGLKFTIGRDGSEPKIQRMGDRFAVEVKGRIHLDLAPVVRHTIRLPTYTLEAVYEAVFGKKKEKVYAEEIAEAWKSEEGLKRVAQYSMEDARATYELGREFFPMEVELAKLIGQSVWDVSRSSTGNLVEWYLLRVAYERNELAPNKPGGEEYQRRMRSSYIGGYVKEPEKGLWESIAYLDFRSSAGSIIVTHNVSPDTLEKECKNYDVAPIVGYRFCKDFKGFIPSILEDLIETRQKVKRKMKATIDPIEKKMLDYRQRALKILANSYYGYQGYPKARWYSKECAESVTAWGRHYIETTIKEAEKFGFKVLYADTDGFFATIPNEKPETIKSKAKKFLKHINEKLPGMLELEYEGFYLRGFFVTKKKYALIDEDGHITTRGLEVVRRDWSEIAKETQAKVLEVILREGSIEKAAGIVKKVVEDLANYRVPVEKLIIHEQITRELKRYKATGPHVAIAKRLQARGIKVKPGTIISYVVLKGSKKISDRVILFDEYDSSRHKYDPDYYIHNQVLPAVLRILEAFGYKEKDLEYQRMKQTGLGAWLKMGKK

SEQ ID NO: 1610 - protein, 773 aa, unidentified
  REGION 1..773: note = Description of Unknown: Synthetic polypeptide
MILDTDYITENGKPVIRIFKKEKGEFKIEYDRNFEPYIYALLEDDESIEDIKKITGERHGKKVRIIRVEKVKKKFLGEPIEVWKLVFEHPQDYPAIRDAIRSHPAVREIFEYDIPFAKRYLIDKGLVPMEGGEELKLLAFAIATFYKEGDEFAEGEILMISYADESGAKVITWKKIDLPYVEVVSTEREAIKRFLQVLREKDPDVLLTYNGDNFDFAYIKKRCEKLGLKFTIGRDGSEPKIQRMGDRFAVEVKGRIHLDLAPVVRHTIRLPTYTLEAVYEAVFGKKKEKVYAEEIAEAWKSEEGLKRVAQYSMEDARATYELGREFFPMEVELAKLIGQSVWDVSRSSTGNLVEWYLLRVAYERNELAPNKPGGEEYQRRMRSSYIGGYVKEPEKGLWESIAYLDFRSSAGSIIVTHNVSPDTLEKECKNYDVAPIVGYRFCKDFKGFIPSILEDLIETRQKVKRKMKATIDPIEKKMLDYRQRALKILANSYYGYQGYPKARWYSKECAESVTAWGRHYIETTIKEAEKFGFKVLYADTDGFFATIPNEKPETIKSKAKKFLKHINEKLPGMLELEYEGFYLRGFFVTKKKYALIDEDGHITTRGLEVVRRDWSEIAKETQAKVLEVILREGSIEKAAGIVKKVVEDLANYRVPVEKLIIHEQITRELKRYKATGPHVAIAKRLQARGIKVKPGTIISYVVLKGSKKISDRVILFDEYDSSRHKYDPDYYIHNQVLPAVLRILEAFGYKEKDLEYQRMKQTGLGAWLKMGKK

SEQ ID NO: 1611 - protein, 773 aa, unidentified
  REGION 1..773: note = Description of Unknown: Synthetic polypeptide
MILDTDYITENGKPVIRIFKKEKGEFKIEYDRNFEPYIYALLEDDESIEDIKKITGERHGKKVRIIRVEKVKKKFLGEPIEVWKLVFEHPQDYPAIRDAIRSHPAVREIFEYDIPFAKRYLIDKGLVPMEGGEELKLLAFAIATFYHEGDEFAEGEILMISYADESGAKVITWKKIDLPYVEVVSTEREAIKRFLQVLREKDPDVLLTYNGDNFDFAYIKKRCEKLGLKFTIGRDGSEPKIQRMGDRFAVEVKGRIHLDLAPVVRHTIRLPTYTLEAVYEAVFGKKKEKVYAEEIAEAWKSEEGLKRVAQYSMEDARATYELGREFFPMEVELAKLIGQSVWDVSRSSTGNLVEWYLLRVAYERNELAPNKPGGEEYQRRMRSSMIGGYVKEPEKGLWESIAYLDFRSSAGSIIVTHNVSPDTLEKECKNYDVAPIVGYRFCKDFKGFIPSILEDLIETRQKVKRKMKATIDPIEKKMLDYRQRALKILANSYYGYQGYPKARWYSKECAESVTAWGRHYIETTIKEAEKFGFKVLYADTDGFFATIPNEKPETIKSKAKKFLKHINEKLPGMLELEYEGFYLRGFFVTKKKYALIDEDGHITTRGLEVVRRDWSEIAKETQAKVLEVILREGSIEKAAGIVKKVVEDLANYRVPVEKLIIHEQITRELKRYKATGPHVAIAKRLQARGIKVKPGTIISYVVLKGSKKISDRVILFDEYDSSRHKYDPDYYIHNQVLPAVLRILEAFGYKEKDLEYQRMKQTGLGAWLKMGKK

SEQ ID NO: 1612 - protein, 773 aa, unidentified
  REGION 1..773: note = Description of Unknown: Synthetic polypeptide
MILDTDYITENGKPVIRIFKKEKGEFKIEYDRNFEPYIYALLEDDESIEDIKKITGERHGKKVRIIRVEKVKKNFLGEPIEVWKLVFEHPQDYPAIRDAIRSHPAVREIFEYDIPFAKRYLIDKGLVPMEGGEELKLLAFAIATFYHEGDEFAEGEILMISYADESGAKVITWKKIDLPYVEVVSTEREAIKRFLQVLREKDPDVLLTYNGDNFDFAYIKKRCEKLGLKFTIGRDGSEPKIQRMGDRFAVEVKGRIHLDLAPVVRHTIRLPTYTLEAVYEAVFGKKKEKVYAEEIAEAWKSEEGLKRVAQYSMEDARATYELGREFFPMEVELAKLIGQSVWDVSRSSTGNLVEWYLLRVAYERNELAPNKPGGEEYQRRMRSSYIGGYVKEPEKGLWENIAYLDFRSSAGSIIVTHNVSPDTLEKECKNYDVAPIVGYRFCKDFKGFIPSILEDLIETRQKVKRKMKATIDPIEKKMLDYRQRALKILANSYYGYQGYPKARWYSKECAESVTAWGRHYIETTIKEAEKFGFKVLYADTDGFFATIPNEKPETIKSKAKKFLKHINEKLPGMLELEYEGFYLRGFFVTKKKYALIDEDGHITTRGLEVVRRDWSEIAKETQAKVLEVILREGSIEKAAGIVKKVVEDLANYRVPVEKLIIHEQITRELKRYKATGPHVAIAKRLQARGIKVKPGTIISYVVLKGSKKISDRVILFDEYDSSRHKYDPDYYIHNQVLPAVLRILEAFGYKEKDLEYQRMKQTGLGAWLKMGKK

SEQ ID NO: 1613 - protein, 773 aa, unidentified
  REGION 1..773: note = Description of Unknown: Synthetic polypeptide
MILDTDYITENGKPVIRIFKKEKGEFKIEYDRNFEPYIYALLEDDESIEDIKKITGERHGTKVRIIRVEKVKKNFLGEPIEVWKLVFEHPQDYPAIRDAIRSHPAVREIFEYDIPFAKRYLIDKGLVPMEGGEELKLLAFAIATFYHEGDEFAEGEILMISYADESGAKVITWKKIDLPYVEVVSTEREAIKRFLQVLREKDPDVLLTYNGDNFDFAYIKKRCEKLGLKFTIGRDGSEPKIQRMGDRFAVEVKGRIHLDLAPVVRHTIRLPTYTLEAVYEAVFGKKKEKVYAEEIAEAWKSEEGLKRVAQYSMEDARATYELGREFFPMEVELAKLIGQSVWDVSRSSTGNLVEWYLLRVAYERNELAPNKPGGEEYQRRMRSSYIGGYVKEPEKGLWESIAYLDFRSSAGSIIVTHNVSPDTLEKECKNYDVAPIVGYRFCKDFKGFIPSILEDLIETRQKVKRKMKATIDPIEKKMLDYRQRALKILANSYYGYQGYPKARWYSKECAESVTAWGRHYIETTIKEAEKFGFKVLYADTDGFFATIPNEKPETIKSKAKKFLKHINEKLPGMLELEYEGFYLRGFFVTKKKYALIDEDGHITTRGLEVVRRDWSEIAKETQAKVLEVILREGSIEKAAGIVKKVVEDLANYRVPVEKLIIHEQITRELKRYKATGPHVAIAKRLQARGIKVKPGTIISYVVLKGSKKISDRVILFDEYDSSRHKYDPDYYIHNQVLPAVLRILEAFGYKEKDLEYQRMKQTGLGAWLKMGKK

SEQ ID NO: 1614 - protein, 773 aa, unidentified
  REGION 1..773: note = Description of Unknown: Synthetic polypeptide
MILDTDYITENGKPVIRIFKKEKGEFKIEYDRNFEPYIYALLEDDESIEDIKKITGERHGKKVRIIRVEKVKKKFLGEPIEVWKLVFEHPQDYPAIRDAIRSHPAVREIFEYDIPFAKRYLIDKGLVPMEGGEELKLLAFAIATFYHEGDEFAEGEILMISYADESGAKVITWKKIDLPYVEVVSTEREAIKRFLQVLREKDPDVLLTYNGDNFDFAYIKKRCEKLGLKFTIGRDGSEPKIQRMGDRFAVEVKGRIHLDLAPVVRHTIRLPTYTLEAVYEAVFGKKKEKVYAEEIAEAWKSEEGLKRVAQYSMEDARATYELGREFFPMEVELAKLIGQSVWDVSRSSTGNLVEWYLLRVAYERNELAPNKPGGEEYQRRMRSSYIGGYVKEPEKGLWESIAYLDFRSSAGSIIVTHNVSPDTLEKECKNYDVAPIVGYRFCKDFKGFIPSILEDLIETRQKVKRKMKATIDPIEKKMLDYRQRALKILANSYYGYQGYPKARWYSKECAESVTAWGRHYIETTIKEAEKFGFKVLYADTDGFFATIPNEKPETIKSKAKKFLKHINEKLPGMLELEYEGFYLRGFFVTKKKRALIDEDGHITTRGLEVVRRDWSEIAKETQAKVLEVILREGSIEKAAGIVKKVVEDLANYRVPVEKLIIHEQITRELKRYKATGPHVAIAKRLQARGIKVKPGTIISYVVLKGSKKISDRVILFDEYDSSRHKYDPDYYIHNQVLPAVLRILEAFGYKEKDLEYQRMKQTGLGAWLKMGKK

SEQ ID NO: 1615 - protein, 773 aa, unidentified
  REGION 1..773: note = Description of Unknown: Synthetic polypeptide
MILDTDYITENGKPVIRIFKKEAGEFKIEYDRNFEPYIYALLEDDESIEDIKKITGERHGKKVRIIRVEKVKKNFLGEPIEVWKLVFEHPQDYPAIRDAIRSHPAVREIFEYDIPFAKRYLIDKGLVPMEGGEELKLLAFNIATFYHEGDEFAEGEILMISYADESGAKVITWKKIDLPYVEVVSTEREAIKRFLQVLREKDPDVLLTYNGDNFDFAYIKKRCEKLGLKFTIGRDGSEPKIQRMGDRFAVEVKGRIHLDLAPVVRHTIRLPTYTLEAVYEAVFGKKKEKVYAEEIAEAWKSEEGLKRVAQYSMEDARATYELGREFFPMEVELAKLIGQSVWDVSRSSTGNLVEWYLLRVAYERNELAPNKPGGEEYQRRMRSSYIGGYVKEPEKGLWESIAYLDFRSSAGSIIVTHNVSPDTLEKECKNYDVAPIVGYRFCKDFKGFIPSILEDLIETRQKVKRKMKATIDPIEKKMLDYRQRALKILANSYYGYQGYPKARWYSKECAESVTAWGRHYIETTIKEAEKFGFKVLYADTDGFFATIPNEKPETIKSKAKKFLKHINEKLPGMLELEYEGFYLRGFFVTKKKYALIDEDGHITTRGLEVVRRDWSEIAKETQAKVLEVILREGSIEKAAGIVKKVVEDLANYRVPVEKLIIHEQITRELKRYKATGPHVAIAKRLQARGIKVKPGTIISYVVLKGSKKISDRVILFDEYDSSRHKYDPDYYIHNQVLPAVLRILEAFGYKEKDLEYQRMKQTGLGAWLKMGKK

SEQ ID NO: 1616 - protein, 773 aa, unidentified
  REGION 1..773: note = Description of Unknown: Synthetic polypeptide
MILDTDYITENGKPVIRIFKKEKGEFKIEYDRNFEPYIYALLEDDESIEDIKKITGERHGKKVRIIRVEKVKKKFLGEPIEVWKLVFEHPQDYPAIRDAIRSHPAVREIFEYDIPFAKRYLIDKGLVPMEGGEELKLLAFAIATFYHEGDEFAEGEILMISYADESGAKVITWKKIDLPYVEVVSTEREAIKRFLQVLREKDPDVLLTYNGDNFDFAYIKKRCEKLGLKFTIGRDGSEPKIQRMGDRFAVEVKGRIHLDLAPVVRHTIRLPTYTLEAVYEAVFGKKKEKVYAEEIAEAWKSEEGLKRVAQYSMEDARATYELGREFFPMEVELAKLIGQSVWDVSRSSTGNLVEWYLLRVAYERNELAPNKPGGEEYQRRMRSSYIGGYVKEPEKGLWESIAYLDFRSSAGSIIVTHNVSPDTLEKECKNYDVAPIVGYRFCKDFKGFIPSILEDLIETRQKVKRKMKATIDPIEKKMLDYRQRALKILANSYYGYQGYPKARWYSKECAESVTAWGRHYIETTIKEAEKFGFKVLYADTDGFFATIPNEKPETIKSKAKKFLKHINEKLPGMLELEYEGFYLRGFFVTKKKYALIDEDGHITTRGFELVRRDWSEIAKETQAKVLEVILREGSIEKAAGIVKKVVEDLANYRVPVEKLIIHEQITRELKRYKATGPHVAIAKRLQARGIKVKPGTIISYVVLKGSKKISDRVILFDEYDSSRHKYDPDYYIHNQVLPAVLRILEAFGYKEKDLEYQRMKQTGLGAWLKMGKK

SEQ ID NO: 1617 - protein, 773 aa, unidentified
  REGION 1..773: note = Description of Unknown: Synthetic polypeptide
MILDTDYITENGKPVIRIFKKEKGEFKIEYDRNFEPYIYALLEDDESIEDIKKITGERHGKKVRIIRVEKVKKKFLGEPIEVWKLVFEHPQDYPAIRDAIRSHPAVREIFEYDIPFAKRYLIDKGLVPMEGGEELKLLAFAIATFYHEGDEFAEGEILMISYADESGAKVITWKKIDLPYVEVVSTEREAIKRFLQVLREKDPDVLLTYNGDNFDFAYIKKRCEKLGLKFTIGRDGSEPKIQRMGDRFAVEVKGRIHLDLAPVVRHTIRLPTYTLEAVYEAVFGKKKEKVYAEEIAEAWKSEEGLKRVAQYSMEDARATYELGREFFPMEVELAKLIGQSVWDVSRSSTGNLVEWYLLRVAYERNELAPNKPGGEEYQRRMRSSYIGGYVKEPEKGLWESIAYLDFRSSAGSIIVTHNVSPDTLEKECKNYDVAPIVGYRFCKDFKGFIPSILEDLIETRQKVKRKMKATIDPIEKKMLDYRQRALKILANSYYGYQGYPKARWYSKECAESVTAWGRHYIETTIKEAEKFGFKVLYADTDGFFATIPNEKPETIKSKAKKFLKHINEKLPGMLELEYEGFYLRGFFVTKKKYALIDEDGHITTKGLEVVRRDWSEIAKETQAKVLEVILREGSIEKAAGIVKKVVEDLANYRVPVEKLIIHEQITRELKRYKATGPHVAIAKRLQARGIKVKPGTIISYVVLKGSKKISDRVILFDEYDSSRHKYDPDYYIHNQVLPAVLRILEAFGYKEKDLEYQRMKQTGLGAWLKMGKK

SEQ ID NO: 1618 - protein, 773 aa, unidentified
  REGION 1..773: note = Description of Unknown: Synthetic polypeptide
MILDTDYITENGKPVIRIFKKEKGEFKIEYDRNFEPYIYALLEDDESIEDIKKITGERHGKKVRIIRVEKVKKKFLGEPIEVWKLVFEHPQDYPAIRDAIRSHPAVREIFEYDIPFAKRYLIDKGLVPMEGGEELKLLAFAIATFYHEGDEFAEGEILMISYADESGAKVITWKKIDLPYVEVVSTEREAIKRFLQVLREKDPDVLLTYNGDNFDFAYIKKRCEKLGLKFTIGRDGSEPKIQRMGDRFAVEVKGRIHLDLAPVVRHTIRLPTYTLEAVYEAVFGKKKEKVYAEEIAEAWKSEEGLKRVAQYSMEDARATYELGREFFPMEVELAKLIGQSVWDVSRSSTGNLVEWYLLRVAYERNELAPNKPGGEEYQRRMRSSYIGGYVKEPEKGLWESIAYLDFRSSAGSIIVTHNVSPDTLEKECKNYDVAPIVGYRFCKDFKGFIPSILEDLIETRQKVKRKMKATIDPIEKKMLDYRQRALKILANSYYGYQGYPKARWYSKECAESVTAWGRHYIETTIKEAEKFGFKVLYADTDGFFATIPNEKPETIKSKAKKFLKHINEKLPGMLELEYEGFYLRGFFVTKKKKALIDEDGHITTRGLEVVRRDWSEIAKETQAKVLEVILREGSIEKAAGIVKKVVEDLANYRVPVEKLIIHEQITRELKRYKATGPHVAIAKRLQARGIKVKPGTIISYVVLKGSKKISDRVILFDEYDSSRHKYDPDYYIHNQVLPAVLRILEAFGYKEKDLEYQRMKQTGLGAWLKMGKK

SEQ ID NO: 1619 - protein, 773 aa, unidentified
  REGION 1..773: note = Description of Unknown: Synthetic polypeptide
MILDTDYITENGKPVIRIFKKEKGEFKIEYDRNFEPYIYALLEDDESIEDIKKITGERHGKKVRIIRVEKVKKKFLGEPIEVWKLVFEHPQDYPAIRDAIRSHPAVREIFEYDIPFAKRYLIDKGLVPMEGGEELKLLAFAIATFYHEGDEFAEGEILMISYADESGAKVITWKKIDLPYVEVVSTEREAIKRFLQVLREKDPDVLLTYNGDNFDFAYIKKRCEKLGLKFTIGRDGSEPKIQRMGDRFAVEVKGRIHLDLAPVVRHTIRLPTYTLEAVYEAVFGKKKEKVYAEEIAEAWKSEEGLKRVAQYSMEDARATYELGREFFPMEVELAKLIGQSVWDVSRSSTGNLVEWYLLRVAYERNELAPNKPGGEEYQRRMRSSYIGGYVKEPEKGLWESIAYLDFRSSAGSIIVTHNVSPDTLEKECKNYDVAPIVGYRFCKDFKGFIPSILEDLIETRQKVKRKMKATIDPIEKKMLDYRQRALKILANSYYGYQGYPKARWYSKECAESVTAWGRHYIETTIKEAEKFGFKVLYADTDGFFATIPNEKPETIKSKAKKFLKHINEKLPGMLELEYEGFYLRGFFVTKKKYALIDEDGHITTNGLEVVRRDWSEIAKETQAKVLEVILREGSIEKAAGIVKKVVEDLANYRVPVEKLIIHEQITRELKRYKATGPHVAIAKRLQARGIKVKPGTIISYVVLKGSKKISDRVILFDEYDSSRHKYDPDYYIHNQVLPAVLRILEAFGYKEKDLEYQRMKQTGLGAWLKMGKK

SEQ ID NO: 1620 - protein, 840 aa, unidentified
  REGION 1..840: note = Description of Unknown: Synthetic polypeptide
GRTQPSYTMAVNRELEKLERIIERLHSPILSLLLERVKEKVRYTQSASYDELVDPYNLVYFALIWALAEECEKMEEMILDTDYITENGKPVIRIFKKEKGEFKIEYDRNFEPYIYALLEDDESIEDIKKITGERHGKKVRIIRVEKVKKKFLGEPIEVWKLVFEHPQDYPAIRDAIRSHPAVREIFEYDIPFAKRYLIDKGLVPMEGGEELKLLAFAIATFYHEGDEFAEGEILMISYADESGAKVITWKKIDLPYVEVVSTEREAIKRFLQVLREKDPDVLLTYNGDNFDFAYIKKRCEKLGLKFTIGRDGSEPKIQRMGDRFAVEVKGRIHLDLAPVVRHTIRLPTYTLEAVYEAVFGKKKEKVYAEEIAEAWKSEEGLKRVAQYSMEDARATYELGREFFPMEVELAKLIGQSVWDVSRSSTGNLVEWYLLRVAYERNELAPNKPGGEEYQRRMRSSYIGGYVKEPEKGLWESIAYLDFRSSAGSIIVTHNVSPDTLEKECKNYDVAPIVGYRFCKDFKGFIPSILEDLIETRQKVKRKMKATIDPIEKKMLDYRQRALKILANSYYGYQGYPKARWYSKECAESVTAWGRHYIETTIKEAEKFGFKVLYADTDGFFATIPNEKPETIKSKAKKFLKHINEKLPGMLELEYEGFYLRGFFVTKKKYALIDEDGHITTRGLEVVRRDWSEIAKETQAKVLEVILREGSIEKAAGIVKKVVEDLANYRVPVEKLIIHEQITRELKRYKATGPHVAIAKRLQARGIKVKPGTIISYVVLKGSKKISDRVILFDEYDSSRHKYDPDYYIHNQVLPAVLRILEAFGYKEKDLEYQRMKQTGL

SEQ ID NO: 1621 - protein, 773 aa, unidentified; identical to SEQ ID NO: 1078
  REGION 1..773: note = Description of Unknown: Synthetic polypeptide

SEQ ID NO: 1622 - protein, 773 aa, unidentified
  REGION 1..773: note = Description of Unknown: Synthetic polypeptide
MILDTDYITENGKPVIRIFKKEKGEFKIEYDRNFEPYIYALLEDDESIEDIKKITGERHGKKVRIIRVEKVKKKFLGEPIEVWKLVFEHPQDYPAIRDAIRSHPAVREIFEYDIPFAKRYLIDKGLVPMEGGEELKLLAFNIATFYHEGDEFAEGEILMISYADESGAKVITWKKIDLPYVEVVSTEREAIKRFLQVLREKDPDVLLTYNGDNFDFAYIKKRCEKLGLKFTIGRDGSEPKIQRMGDRFAVEVKGRIHLDLAPVVRHTIRLPTYTLEAVYEAVFGKKKEKVYAEEIAEAWKSEEGLKRVAQYSMEDARATYELGREFFPMEVELAKLIGQSVWDVSRSSTGNLVEWYLLRVAYERNELAPNKPGGEEYQRRMRSSYIGGYVKEPEKGLWESIAYLDFRSSAGSIIVTHNVSPDTLEKECKNYDVAPEVGYRFCKDFKGFIPSILEDLIETRQKVKRKMKATIDPIEKKMLDYRQRALKILANSYYGYQGYPKARWYSKECAESVTAWGRHYIETTIKEAEKFGFKVLYADTDGLYATIPNEKPETIKSKAKKFLKHINEKLPGMLELEYEGFYLRGFFVTKKRYALIDEDGHITTRGLEVVRRDWSEIAKETQAKVLEVILREGSIEKAAGIVKKVVEDLANYRVPVEKLIIHEQITRELKRYKATGPHVAIAKRLQARGIKVKPGTIISYVVLKGSKKISDRVILFDEYDSSRHKYDPDYYIHNQVLPAVLRILEAFGYKEKDLEYQRMKQTGLGAWLKMGKK

SEQ ID NO: 1623 - protein, 773 aa, unidentified
  REGION 1..773: note = Description of Unknown: Synthetic polypeptide
MILDTDYITENGKPVIRIFKKEKGEFKIEYDRNFEPYIYALLEDDESIEDIKKITGERHGKKVRIIRVEKVKKNFLGEPIEVWKLVFEHPQDYPAIRDAIRSHPAVREIFEYDIPFAKRYLIDKGLVPMEGGEELKLLAFAIATFYHEGDEFAEGEILMISYADESGAKVITWKKIDLPYVEVVSTEREAIKRFLQVLREKDPDVLLTYNGDNFDFAYIKKRCEKLGLKFTIGRDGSEPKIQRMGDRFAVEVKGRIHLDLAPVVRHTIRLPTYTLEAVYEAVFGKKKEKVYAEEIAEAWKSEEGLKRVAQYSMEDARATYELGREFFPMEVELAKLIGQSVWDVSRSSTGNLVEWYLLRVAYERNELAPNKPGGEEYERRMRSSYIGGYVKEPEKGLWESIAYLDFRSSAGSIIVTHNVSPDTLEKECKNYDVAPIVGYRFCKDFKGFIPSILEDLIETRQKVKRKMKATIDPIEKKMLDYRQRALKILANSYYGYQGYPKARWYSKECAESVTAWGRHYIETTIKEAEKFGFKVLYADTDGFFATIPNEKPETIKSKAKKFLKHINEKLPGMLELEYEGFYLRGFFVTKKKYALIDEDGHITTRGLEVVRRDWSEIAKETQAKVLEVILREGSIEKAAGIVKKVVEDLANYRVPVEKLIIHEQITRELKRYKATGPHVAIAKRLQARGIKVKPGTIISYVVLKGSKKISDRVILFDEYDSSRHKYDPDYYIHNQVLPAVLRILEAFGYKEKDLEYQRMKQTGLGAWLKMGKK

SEQ ID NO: 1624 - protein, 773 aa, unidentified
  REGION 1..773: note = Description of Unknown: Synthetic polypeptide
MILDTDYITENGKPVIRIFKKEKGEFKIEYDRNFEPYIYALLEDDESIEDIKKITGERHGKKVRIIRVEKVKKKFLGEPIEVWKLVFEHPQDYPAIRDAIRSHPAVREIFEYDIPFAKRYLIDKGLVPMEGGEELKLLAFNIATFYHEGDEFAEGEILMISYADESGAKVITWKKIDLPYVEVVSTEREAIKRFLQVLREKDPDVLLTYNGDNFPFAYIKKRCEKLGLKFTIGRDGSEPKIQRMGDRFAVEVKGRIHLDLAPVVRHTIRLPTYTLEAVYEAVFGKKKEKVYAEEIAEAWKSEEGLKRVAQYSMEDARATYELGREFFPMEVELAKLIGQSVWDVSRSSTGNLVEWYLLRVAYERNELAPNKPGGEEYQRRMRSSYIGGYVKEPEKGLWESIAYLDFRSSAGSIIVTHNVSPDTLEKECKNYDVAPEVGYRFCKDFKGFIPSILEDLIETRQKVKRKMKATIDPIEKKMLDYRQRALKILANSYYGYQGYPKARWYSKECAESVTAWGRHYIETTIKEAEKFGFKVLYADTDGFFATIPNEKPETIKSKAKKFLKHINEKLPGMLELEYEGFYLRGFFVTKKKYALIDEDGHITTRGLEVVRRDWSEIAKETQAKVLEVILREGSIEKAAGIVKKVVEDLANYRVPVEKLIIHEQITRELKRYKATGPHVAIAKRLQARGIKVKPGTIISYVVLKGSKKISDRVILFDEYDSSRHKYDPDYYIHNQVLPAVLRILEAFGYKEKDLEYQRMKQTGLGAWLKMGKK

SEQ ID NO: 1625 - protein, 773 aa, unidentified
  REGION 1..773: note = Description of Unknown: Synthetic polypeptide
MILDTDYITENGKPVIRIFKKEKGEFKIEYDRNFEPYIYALLEDDESIEDIKKITGERHGKKVRIIRVEKVKKKFLGEPIEVWKLVFEHPQDYPAIRDAIRSHPAVREIFEYDIPFAKRYLIDKGLVPMEGGEELKLLAFAIATFYHEGDEFAEGEILMISYADESGAKVITWKKIDLPYVEVVSTEREAIKRFLQVLREKDPDVLLTYNGDNFDFAYIKKRCEKLGLKFTIGRDGSEPKIQRMGDRFAVEVKGRIHLDLAPVVRHTIRLPTYTLEAVYEAVFGKKKEKVYAEEIAEAWKSEEGLKRVAQYSMEDARATYELGREFFPMEVELAKLIGQSVWDVSRSSTGNLVEWYLLRVAYERNELAPNKPGGEEYQRRMRSSYIGGYVKEPEKGLWESIAYLDFRSSAGSIIVTHNVSPDTLEKECKNADVAPIVGYRFCKDFKGFIPSILEDLIETRQKVKRKMKATIDPIEKKMLDYRQRALKILANSYYGYQGYPKARWYSKECAESVTAWGRHYIETTIKEAEKFGFKVLYADTDGFFATIPNEKPETIKSKAKKFLKHINEKLPGMLELEYEGFYLRGFFVTKKKYALIDEDGHITTRGLEVVRRDWSEIAKETQAKVLEVILREGSIEKAAGIVKKVVEDLANYRVPVEKLIIHEQITRELKRYKATGPHVAIAKRLQARGIKVKPGTIISYVVLKGSKKISDRVILFDEYDSSRHKYDPDYYIHNQVLPAVLRILEAFGYKEKDLEYQRMKQTGLGAWLKMGKK

SEQ ID NO: 1626 - protein, 773 aa, unidentified
  REGION 1..773: note = Description of Unknown: Synthetic polypeptide
MILDTDYITENGKPVIRIFKKEKGEFKIEYDRNFEPYIYALLEDDESIEDIKKITGERHGKKVRIIRVEKVKKKFLGEPIEVWKLVFEHPQDYPAIRDAIRSHPAVREIFEYDIPFAKRYLIDKGLVPMEGGEELKLLAFAIATFYHEGDEFAEGEILMISYADESGAKVITWKKIDLPYVEVVSTEREAIKRFLQVLREKDPDVLLTYNGDNFDFAYIKKRCEKLGLKFTIGRDGSEPKIQRMGDRFAVEVKGRIHLDLAPVVRHTIRLPTYTLEAVYEAVFGKKKEKVYAEEIAEAWKSEEGLKRVAQYSMEDARATYELGREFFPMEVELAKLIGQSVWDVSRSSTGNLVEWYLLRVAYERNELAPNKPGGEEYQRRMRSSYIGGYVKEPEKGLWESIAYLDFRSSAGSIIVTHNVSPDTLEKECKNYDVAPIVGYRFCKDFKGFIPSILEDLIETRQKVKRKMKATIDPIEKKMLDYRQRALKILANSYYGYQGYPKARWYSKECAESVTAWGRHYIETTIKEAEKFGFKVLYADTDGFFATIPNEKPETIKSKAKKFLKHINEKLPGMLELEYEGFYLRGFFVTKKKYALIDEDGHITTRGLEVVRRDWSEIAKETQAKVLEVILRHGSIEKAAGIVKKVVEDLANYRVPVEKLIIHEQITRELKRYKATGPHVAIAKRLQARGIKVKPGTIISYVVLKGSKKISDRVILFDEYDSSRHKYDPDYYIHNQVLPAVLRILEAFGYKEKDLEYQRMKQTGLGAWLKMGKK

SEQ ID NO: 1627 - protein, 773 aa, unidentified
  REGION 1..773: note = Description of Unknown: Synthetic polypeptide
MILDTDYITENGKPVIRIFKKEAGEFKIEYDRNFEPYIYALLEDDESIEDIKKITGERHGKKVRIIRVEKVKKNFLGEPIEVWKLVFEHPQDYPAIRDAIRSHPAVREIFEYDIPFAKRYLIDKGLVPMEGGEELKLLAFAIATFYHEGDEFAEGEILMISYADESGAKVITWKKIDLPYVEVVSTEREAIKRFLQVLREKDPDVLLTYNGDNFDFAYIKKRCEKLGLKFTIGRDGSEPKIQRMGDRFAVEVKGRIHLDLAPVVRHTIRLPTYTLEAVYEAVFGKKKEKVYAEEIAEAWKSEEGLKRVAQYSMEDARATYELGREFFPMEVELAKLIGQSVWDVSRSSTGNLVEWYLLRVAYERNELAPNKPGGEEYQRRMRSSYIGGYVKEPEKGLWESIAYLDFRSSAGSIIVTHNVSPDTLEKECKNYDVAPIVGYRFCKDFKGFIPSILEDLIETRQKVKRKMKATIDPIEKKMLDYRQRALKILANSYYGYQGYPKARWYSKECAESVTAWGRHYIETTIKEAEKFGFKVLYADTDGFFATIPNEKPETIKSKAKKFLKHINEKLPGMLELEYEGFYLRGFFVTKKKYALIDEDGHITTRGLEVVRRDWSEIAKETQAKVLEVILREGSIEKAAGIVKKVVEDLANYRVPVEKLIIHEQITRELKRYKATGPHVAIAKRLQARGIKVKPGTIISYVVLKGSKKISDRVILFDEYDSSRHKYDPDYYIHNQVLPAVLRILEAFGYKEKDLEYQRMKQTGLGAWLKMGKK

SEQ ID NO: 1628 - protein, 773 aa, unidentified
  REGION 1..773: note = Description of Unknown: Synthetic polypeptide
MILDTDYITENGKPVIRIFKKEKGEFKIEYDRNFEPYIYALLEDDESIEDIKKITGERHGKKVRIIRVEKVKKNFLGEPIEVWKLVFEHPQDYPAIRDAIRSHPAVREIFEYDIPFAKRYLIDKGLVPMEGGEELKLLAFAIATFYHEGDEFAEGEILMISYADESGAKVITWKKIDLPYVEVVSTEREAIKRFLQVLREKDPDVLLTYNGDNFDFAYIKKRCEKLGLKFTIGRDGSEPKIQRMGDRFAVEVKGRIHLDLAPVVRHTIRLPTYTLEAVYEAVFGKKKEKVYAEEIAEAWKSEEGLKRVAQYSMEDARATYELGREFFPMEVELAKLIGQSVWDVSRSSTGNLVEWYLLRVAYERNELAPNKPGGEEYQRRMRSSYIGGYVKEPEKGLWESIAYLDFRSSAGSIIVTHNVSPDTLEKECKNYDVAPIVGYRFCKDFKGFIPSILEDLIETRQKVKRKMKATIDPIEKKMLDYRQRALKILANSYYGYQGYPKARWYSKECAESVTAWGRHYIETTIKEAEKFGFKVLYADTDGFFATIPNEKPETIKSKAKKFLKHINEKLPGMLELEYEGFYLRGFFVTKKKYALIDEDGHITTRGLEVVRRDWSEIAKETQAKVLEVILREGSIEKAAGIVKKVVEDLANYRVPVEKLIIHEQITRELKRYKATGPHVAIAKRLQARGIKVKPGTIISYVVLKGSKKISDRVILFDEYDPSRHKYDPDYYIHNQVLPAVLRILEAFGYKEKDLEYQRMKQTGLGAWLKMGKK

SEQ ID NO: 1629 - protein, 773 aa, unidentified
  REGION 1..773: note = Description of Unknown: Synthetic polypeptide
MILDTDYITENGKPVIRIFKKEKGEFKIEYDRNFEPYIYALLEDDESIEDIKKITGERHGKKVRIIRVEKVKKKFLGEPIEVWKLVFEHPQDYPAIRDAIRSHPAVREIFEYDIPFAKRYLIDKGLVPMEGGEELKLLAFAIATFYHEGDEFAEGEILMISYADESGAKVITWKKIDLPYVEVVSTEREAIKRFLQVLREKDPDVLLTYNGDNFDFAYIKKRCEKLGLKFTIGRDGSEPKIQRMGDRFAVEVKGRIHLDLAPVVRHTIRLPTYTLEAVYEAVFGKKKEKVYAEEIAEAWKSEEGLKRVAQYSMEDARATYELGREFFPMEVELAKLIGQSVWDVSRSSTGNLVEWYLLRVAYERNELAPNKPGGEEYQRRMRSSYIGGYVKEPEKGLWESIAYLDFRSSAGSIIVTHNVSPDTLEKECKNDDVAPIVGYRFCKDFKGFIPSILEDLIETRQKVKRKMKATIDPIEKKMLDYRQRALKILANSYYGYQGYPKARWYSKECAESVTAWGRHYIETTIKEAEKFGFKVLYADTDGFFATIPNEKPETIKSKAKKFLKHINEKLPGMLELEYEGFYLRGFFVTKKKYALIDEDGHITTRGLEVVRRDWSEIAKETQAKVLEVILREGSIEKAAGIVKKVVEDLANYRVPVEKLIIHEQITRELKRYKATGPHVAIAKRLQARGIKVKPGTIISYVVLKGSKKISDRVILFDEYDSSRHKYDPDYYIHNQVLPAVLRILEAFGYKEKDLEYQRMKQTGLGAWLKMGKK

SEQ ID NO: 1630 - protein, 773 aa, unidentified
  REGION 1..773: note = Description of Unknown: Synthetic polypeptide
MILDTDYITENGKPVIRIFKKEKGEFKIEYDRNFEPYIYALLEDDESIEDIKKITGERHGKKVRIIRVEKVKKNFLGEPIEVWKLVFEHPQDYPAIRDAIREHPAVREIFEYDIPFAKRYLIDKGLVPMEGGEELKLLAFAIATFYHEGDEFAEGEILMISYADESGAKVITWKKIDLPYVEVVSTEREAIKRFLQVLREKDPDVLLTYNGDNFDFAYIKKRCEKLGLKFTIGRDGSEPKIQRMGDRFAVEVKGRIHLDLAPVVRHTIRLPTYTLEAVYEAVFGKKKEKVYAEEIAEAWKSEEGLKRVAQYSMEDARATYELGREFFPMEVELAKLIGQSVWDVSRSSTGNLVEWYLLRVAYERNELAPNKPGGEEYQRRMRSSYIGGYVKEPEKGLWESIAYLDFRSSAGSIIVTHNVSPDTLEKECKNYDVAPIVGYRFCKDFKGFIPSILEDLIETRQKVKRKMKATIDPIEKKMLDYRQRALKILANSYYGYQGYPKARWYSKECAESVTAWGRHYIETTIKEAEKFGFKVLYADTDGFFATIPNEKPETIKSKAKKFLKHINEKLPGMLELEYEGFYLRGFFVTKKKYALIDEDGHITTRGLEVVRRDWSEIAKETQAKVLEVILREGSIEKAAGIVKKVVEDLANYRVPVEKLIIHEQITRELKRYKATGPHVAIAKRLQARGIKVKPGTIISYVVLKGSKKISDRVILFDEYDSSRHKYDPDYYIHNQVLPAVLRILEAFGYKEKDLEYQRMKQTGLGAWLKMGKK

SEQ ID NO: 1631 - protein, 773 aa, unidentified
  REGION 1..773: note = Description of Unknown: Synthetic polypeptide
MILDTDYITENGKPVIRIFKKEKGEFKIEYDRNFEPYIYALLEDDESIEDIKKITGERHGKKVRIIRVEKVKKNFLGEPIEVWKLVFEHPQDYPAIRDAIRSHPAVREIFEYDIPFAKRYLIDKGLVPMEGGEELKLLAFDIATFYHEGDEFAEGEILMISYADESGAKVITWKKIDLPYVEVVSTEREAIKRFLQVLREKDPDVLLTYNGDNFDFAYIKKRCEKLGLKFTIGRDGSEPKIQRMGDRFAVEVKGRIHLDLAPVVRHTIRLPTYTLEAVYEAVFGKKKEKVYAEEIAEAWKSEEGLKRVAQYSMEDARATYELGREFFPMEVELAKLIGQSVWDVSRSSTGNLVEWYLLRVAYERNELAPNKPGGEEYQRRMRSSYIGGYVKEPEKGLWESIAYLDFRSSAGSIIVTHNVSPDTLEKECKNYDVAPIVGYRFCKDFKGFIPSILEDLIETRQKVKRKMKATIDPIEKKMLDYRQRALKILANSYYGYQGYPKARWYSKECAESVTAWGRHYIETTIKEAEKFGFKVLYADTDGFFATIPNEKPETIKSKAKKFLKHINEKLPGMLELEYEGFYLRGFFVTKKKYALIDEDGHITTRGLEVVRRDWSEIAKETQAKVLEVILREGSIEKAAGIVKKVVEDLANYRVPVEKLIIHEQITRELKRYKATGPHVAIAKRLQARGIKVKPGTIISYVVLKGSKKISDRVILFDEYDSSRHKYDPDYYIHNQVLPAVLRILEAFGYKEKDLEYQRMKQTGLGAWLKMGKK

SEQ ID NO: 1632 - protein, 773 aa, unidentified
  REGION 1..773: note = Description of Unknown: Synthetic polypeptide
MILDTDYITENGKPVIRIFKKEKGEFKIEYDRNFEPYIYALLEDDESIEDIKKITGERHGKKVRIIRVEKVKKKFLGEPIEVWKLVFEHPQDYPAIRDAIRSHPAVREIFEYDIPFAKRYLIDKGLVPMEGGEELKLLAFAIATFYHEGDEFAEGEILMISYADESGAKVITWKKIDLPYVEVVSTEREAIKRFLQVLREKDPDVLLTYNGDNFDFAYIKKRCEKLGLKFTIGRDGSEPKIQRMGDRFAVEVKGRIHLDLAPVVRHTIRLPTYTLEAVYEAVFGKKKEKVYAEEIAEAWKSEEGLKRVAQYSMEDARATYELGREFFPMEVELAKLIGQSVWDVSRSSTGNLVEWYLLRVAYERNELAPNKPSEEEYQRRLRESYTGGYVKEPEKGLWESIAYLDFRSSAGSIIVTHNVSPDTLEKECKNYDVAPIVGYRFCKDFKGFIPSILEDLIETRQKVKRKMKATIDPIEKKMLDYRQRALKILANSYYGYQGYPKARWYSKECAESVTAWGRHYIETTIKEAEKFGFKVLYADTDGFFATIPNEKPETIKSKAKKFLKHINEKLPGMLELEYEGFYLRGFFVTKKKYALIDEDGHITTRGLEVVRRDWSEIAKETQAKVLEVILREGSIEKAAGIVKKVVEDLANYRVPVEKLIIHEQITRELKRYKATGPHVAIAKRLQARGIKVKPGTIISYVVLKGSKKISDRVILFDEYDSSRHKYDPDYYIHNQVLPAVLRILEAFGYKEKDLEYQRMKQTGLGAWLKMGKK

SEQ ID NO: 1633 - protein, 773 aa, unidentified
  REGION 1..773: note = Description of Unknown: Synthetic polypeptide
MILDTDYITENGKPVIRIFKKEKGEFKIEYDRNFEPYIYALLEDDESIEDIKKITGERHGKKVRIIRVEKVKKKFLGEPIEVWKLVFEHPQDYPAIRDAIRSHPAVREIFEYDIPFAKRYLIDKGLVPMEGGEELKLLAFAIATFYHEGDEFAEGEILMISYADESGAKVITWKKIDLPYVEVVSTEREAIKRFLQVLREKDPDVLLTYNGDNFDFAYIKKRCEKLGLKFTIGRDGSEPKIQRMGDRFAVEVKGRIHLDLAPVVRHTIRLPTYTLEAVYEAVFGKKKEKVYAEEIAEAWKSEEGLKRVAQYSMEDARATYELGREFFPMEVELAKLIGQSVWDVSRSSTGNLVEWYLLRVAYERNELAPNKPGGEEYQRRMRSSYIGGYVKEPEKGLWESIAKLDFRSSAGSIIVTHNVSPDTLEKECKNYDVAPIVGYRFCKDFKGFIPSILEDLIETRQKVKRKMKATIDPIEKKMLDYRQRALKILANSYYGYQGYPKARWYSKECAESVTAWGRHYIETTIKEAEKFGFKVLYADTDGFFATIPNEKPETIKSKAKKFLKHINEKLPGMLELEYEGFYLRGFFVTKKKYALIDEDGHITTRGLEVVRRDWSEIAKETQAKVLEVILREGSIEKAAGIVKKVVEDLANYRVPVEKLIIHEQITRELKRYKATGPHVAIAKRLQARGIKVKPGTIISYVVLKGSKKISDRVILFDEYDSSRHKYDPDYYIHNQVLPAVLRILEAFGYKEKDLEYQRMKQTGLGAWLKMGKK

SEQ ID NO: 1634 - protein, 773 aa, unidentified
  REGION 1..773: note = Description of Unknown: Synthetic polypeptide
MILDTDYITENGKPVIRIFKKEKGEFKIEYDRNFEPYIYALLEDDESIEDIKKITGERHGKKVRIIRVEKVKKNFLGEPIEVWKLVFEHPQDYPAIRDAIRSHPAVREIFEYDIPFAKRYLIDKGLVPMEGGEELKLLAFAIATFYHEGDEFAEGEILMISYADESGAKVITWKKIDLPYVEVVSTEREAIKRFLQVLREKDPDVLLTYNGDNFDFAYIKKRCEKLGLKFTIGRDGSEPKIQRMGDRFAVEVKGRIHLDLAPVVRRTIRLPTYTLEAVYEAVFGKKKEKVYAEEIAEAWKSEEGLKRVAQYSMEDARATYELGREFFPMEVELAKLIGQSVWDVSRSSTGNLVEWYLLRVAYERNELAPNKPGGEEYQRRMRSSYIGGYVKEPEKGLWESIAYLDFRSSAGSIIVTHNVSPDTLEKECKNYDVAPIVGYRFCKDFKGFIPSILEDLIETRQKVKRKMKATIDPIEKKMLDYRQRALKILANSYYGYQGYPKARWYSKECAESVTAWGRHYIETTIKEAEKFGFKVLYADTDGFFATIPNEKPETIKSKAKKFLKHINEKLPGMLELEYEGFYLRGFFVTKKKYALIDEDGHITTRGLEVVRRDWSEIAKETQAKVLEVILREGSIEKAAGIVKKVVEDLANYRVPVEKLIIHEQITRELKRYKATGPHVAIAKRLQARGIKVKPGTIISYVVLKGSKKISDRVILFDEYDSSRHKYDPDYYIHNQVLPAVLRILEAFGYKEKDLEYQRMKQTGLGAWLKMGKK

SEQ ID NO: 1635 - protein, 773 aa, unidentified
  REGION 1..773: note = Description of Unknown: Synthetic polypeptide
MILDTDYITEDGKPVIRIFKKEKGEFKIEYDRNFEPYIYALLEDDESIEDIKKITGERHGKKVRIIRVEKVKKNFLGEPIEVWKLVFEHPQDYPAIRDAIRSHPAVREIFEYDIPFAKRYLIDKGLVPMEGGEELKLLAFAIATFYHEGDEFAEGEILMISYADESGAKVITWKKIDLPYVEVVSTEREAIKRFLQVLREKDPDVLLTYNGDNFDFAYIKKRCEKLGLKFTIGRDGSEPKIQRMGDRFAVEVKGRIHLDLAPVVRHTIRLPTYTLEAVYEAVFGKKKEKVYAEEIAEAWKSEEGLKRVAQYSMEDARATYELGREFFPMEVELAKLIGQSVWDVSRSSTGNLVEWYLLRVAYERNELAPNKPGGEEYQRRMRSSYIGGYVKEPEKGLWESIAYLDFRSSAGSIIVTHNVSPDTLEKECKNYDVAPIVGYRFCKDFKGFIPSILEDLIETRQKVKRKMKATIDPIEKKMLDYRQRALKILANSYYGYQGYPKARWYSKECAESVTAWGRHYIETTIKEAEKFGFKVLYADTDGFFATIPNEKPETIKSKAKKFLKHINEKLPGMLELEYEGFYLRGFFVTKKKYALIDEDGHITTRGLEVVRRDWSEIAKETQAKVLEVILREGSIEKAAGIVKKVVEDLANYRVPVEKLIIHEQITRELKRYKATGPHVAIAKRLQARGIKVKPGTIISYVVLKGSKKISDRVILFDEYDSSRHKYDPDYYIHNQVLPAVLRILEAFGYKEKDLEYQRMKQTGLGAWLKMGKK

SEQ ID NO: 1636 - protein, 773 aa, unidentified
  REGION 1..773: note = Description of Unknown: Synthetic polypeptide
MILDTDYITENGKPVIRIFKKEKGEFKIEYDRNFEPYIYALLEDDESIEDIKKITGERHGKKVRIIRVEKVKKNFLGEPIEVWKLVFEHPQDYPAIRDAIRSHPAVREIFEYDIPFAKRYLIDKGLVPMEGGEELKLLAFAIATFYHEGDEFAEGEILMISYADESGAKVITWKKIDLPYVEVVSTEREAIKRFLQVLREKDPDVLLTYNGDNFDFAYIKKRCEKLGLKFTIGRDGSEPKIQRMGDRFAVEVKGRIHLDLAPVVRHTIRLPTYTLEAVYEAVFGKKKEKVYAEEIAEAWKSEEGLKRVAQYSMEDARATYELGREFFPMEVELAKLIGQSVWDVSRSSTGNLVEWYLLRVAYERNELAPNKPGGEEYQRRMRSSYIGGYVKEPEKGLWESIAYLDFRSSAGSIIVTHNVSPDTLEKECKNYDVAPIVGYRFCKDFKGFIPSILEDLIETRQKVKRKMKATIDPIEKKMLDYRQRALKILANSYYGYQGYPKARWYSKECAESVTAWGRHYIETTIKEAEKFGFKVLYADTDGFFATIPNEKPETIKSKAKKFLKHINEKLPGMLELEYEGFYLRGFFVTKKKYALIDEDGHITTRGLEVVRRDWSEIAKETQAKVLEVILKEGSIEKAAGIVKKVVEDLANYRVPVEKLIIHEQITRELKRYKATGPHVAIAKRLQARGIKVKPGTIISYVVLKGSKKISDRVILFDEYDSSRHKYDPDYYIHNQVLPAVLRILEAFGYKEKDLEYQRMKQTGLGAWLKMGKK

SEQ ID NO: 1637 - protein, 773 aa, unidentified
  REGION 1..773: note = Description of Unknown: Synthetic polypeptide
MILDTDYITENGKPVIRIFKKEKGEFKIEYDRNFEPYIYALLEDDESIEDIKKITGERHGKKVRIIRVEKVKKNFLGEPIEVWKLVFEHPQDYPAIRDAIRSHPAVREIFEYDIPFAKRYLIDKGLVPMEGGEELKLLAFAIATFYHEGDEFAEGEILMISYADESGAKVITWKKIDLPYVEVVSTEREAIKRFLQVLREKDPDVLLTYNGDNFDFAYIKKRCEKLGLKFTIGRDGSEPKIQRMGDRFAVEVKGRIHLDLAPVVRHTIRLPTYTLEAVYEAVFGKKKEKVYAEEIAEAWKSEEGLKRVAQYSMEDARATYELGREFFPMEVELAKLIGQSVWDVSRSSTGNLVEWYLLRVAYERNELAPNKPGGEEYQRRMRSSYIGGYVKEPEKGLWESIAYLDFRSSAGSIIVTHNVSPDTLEKECKNYDVAPIVGYRFCKDFKGFIPSILEDLIETRQDVKRKMKATIDPIEKKMLDYRQRALKILANSYYGYQGYPKARWYSKECAESVTAWGRHYIETTIKEAEKFGFKVLYADTDGFFATIPNEKPETIKSKAKKFLKHINEKLPGMLELEYEGFYLRGFFVTKKKYALIDEDGHITTRGLEVVRRDWSEIAKETQAKVLEVILREGSIEKAAGIVKKVVEDLANYRVPVEKLIIHEQITRELKRYKATGPHVAIAKRLQARGIKVKPGTIISYVVLKGSKKISDRVILFDEYDSSRHKYDPDYYIHNQVLPAVLRILEAFGYKEKDLEYQRMKQTGLGAWLKMGKK

SEQ ID NO: 1638 - protein, 773 aa, unidentified
  REGION 1..773: note = Description of Unknown: Synthetic polypeptide
MILDTDYITENGKPVIRIFKKEKGEFKIEYDRNFEPYIYALLEDDEAIEDIKKITGERHGKKVRIIRVEKVKKNFLGEPIEVWKLVFEHPQDYPAIRDAIRSHPAVREIFEYDIPFAKRYLIDKGLVPMEGGEELKLLAFAIATFYHEGDEFAEGEILMISYADESGAKVITWKKIDLPYVEVVSTEREAIKRFLQVLREKDPDVLLTYNGDNFDFAYIKKRCEKLGLKFTIGRDGSEPKIQRMGDRFAVEVKGRIHLDLAPVVRHTIRLPTYTLEAVYEAVFGKKKEKVYAEEIAEAWKSEEGLKRVAQYSMEDARATYELGREFFPMEVELAKLIGQSVWDVSRSSTGNLVEWYLLRVAYERNELAPNKPGGEEYQRRMRSSYIGGYVKEPEKGLWESIAYLDFRSSAGSIIVTHNVSPDTLEKECKNYDVAPIVGYRFCKDFKGFIPSILEDLIETRQKVKRKMKATIDPIEKKMLDYRQRALKILANSYYGYQGYPKARWYSKECAESVTAWGRHYIETTIKEAEKFGFKVLYADTDGFFATIPNEKPETIKSKAKKFLKHINEKLPGMLELEYEGFYLRGFFVTKKKYALIDEDGHITTRGLEVVRRDWSEIAKETQAKVLEVILREGSIEKAAGIVKKVVEDLANYRVPVEKLIIHEQITRELKRYKATGPHVAIAKRLQARGIKVKPGTIISYVVLKGSKKISDRVILFDEYDSSRHKYDPDYYIHNQVLPAVLRILEAFGYKEKDLEYQRMKQTGLGAWLKMGKK

SEQ ID NO: 1639 - protein, 773 aa, unidentified
  REGION 1..773: note = Description of Unknown: Synthetic polypeptide
MILDTDYITENGKPVIRIFKKEKGEFKIEYDRNFEPYIYALLEDDESIEDIKKITGERHGKKVRIIRVEKVKKNFLGEPIEVWKLVFEHPQDYPAIRDAIRSHPAVREIFEYDIPFAKRYLIDKGLVPMEGGEELKLLAFAIATFYHEGDEFAEGEILMISYADESGAKVITWKKIDLPYVEVVSTEREAIKRFLQVLREKDPDVLLTYNGDNFDFAYIKKRCEKLGLKFTIGRDGSEPKIQRMGDRFAVEVKGRIHLDLAPVVRHTIRLPTYTLEAVYEAVFGKKKEKVYAEEIAEAWKSEEGLKRVAQYSMEDARATYELGREFFPMEVELAKLIGQSVWDVSRSSTGNLVEWYLLRVAYERNELAPNKPGGEEYQRRMRSSYIGGYVKEPEKGLWESIAYLDFRSSAGSIIVTHNVSPDTLEKECKNYDVAPEVGYRFCKDFKGFIPSILEDLIETRQKVKRKMKATIDPIEKKMLDYRQRALKILANSYYGYQGYPKARWYSKECAESVTAWGRHYIETTIKEAEKFGFKVLYADTDGFFATIPNEKPETIKSKAKKFLKHINEKLPGMLELEYEGFYLRGFFVTKKRYALIDEDGHITTRGLEVVRRDWSEIAKETQAKVLEVILREGSIEKAAGIVKKVVEDLANYRVPVEKLIIHEQITRELKRYKATGPHVAIAKRLQARGIKVKPGTIISYVVLKGSKKISDRVILFDEYDSSRHKYDPDYYIHNQVLPAVLRILEAFGYKEKDLEYQRMKQTGLGAWLKMGKK

SEQ ID NO: 1640 - protein, 773 aa, unidentified
  REGION 1..773: note = Description of Unknown: Synthetic polypeptide
MILDTDYITENGKPVIRIFKKEKGEFKIEYDRNFEPYIYALLEDDESIEDIKKITGERHGKKVRIIRVEKVKKNFLGEPIEVWKLVFEHPQDYPAIRDAIRSHPAVREIFEYDIPFAKRYLIDKGLVPMEGGEELKLLAFAIATFYHEGDEFAEGEILMISYADESGAKVITWKKIDLPYVEVVSTEREAIKRFLQVLREKDPDVLLTYNGDNFDFAYIKKRCEKLGLKFTIGRDGSEPKIQRMGDRFAVEVKGRIHLDLAPVVRHTIRLPTYTLEAVYEAVFGKKKEKVYAEEIAEAWKSEEGLKRVAQYSMEDARATYELGREFFPMEVELAKLIGQSVWDVSRSSTGNLVEWYLLRVAYERNELAPNKPGGEEYQRRMRSSYIGGYVKEPEKGLWESIAYLDFRSSAGSIIVTHNVSPDTLEKECKNYDVAPIVGYRFCKDFKGFIPSILEDLIETRQKVKRKMKATIDPIEKKMLDYRQRALKILANSYYGYQGYPKARWYSKECAESVTAWGRHYIETTIKEAEKFGFKVLYADTDGFFATIPNEKPETIKKKAKKFLKHINEKLPGMLELEYEGFYLRGFFVTKKKYALIDEDGHITTRGLEVVRRDWSEIAKETQAKVLEVILREGSIEKAAGIVKKVVEDLANYRVPVEKLIIHEQITRELKRYKATGPHVAIAKRLQARGIKVKPGTIISYVVLKGSKKISDRVILFDEYDSSRHKYDPDYYIHNQVLPAVLRILEAFGYKEKDLEYQRMKQTGLGAWLKMGKK

SEQ ID NO: 1641 - protein, 773 aa, unidentified
  REGION 1..773: note = Description of Unknown: Synthetic polypeptide
MILDTDYITENGKPVIRIFKKEKGEFKIEYDRNFEPYIYALLEDDESIEDIKKITGERHGKKVRIIRVEKVKKKFLGEPIEVWKLVFEHPQDYPAIRDAIRSHPAVREIFEYDIPFAKRYLIDKGLVPMEGGEELKLLAFNIATFYHEGDEFAEGEILMISYADESGAKVITWKKIDLPYVEVVSTEREAIKRFLQVLREKDPDVLLTYNGDNFDFAYIKKRCEKLGLKFTIGRDGSEPKIQRMGDRFAVEVKGRIHLDLAPVVRHTIRLPTYTLEAVYEAVFGKKKEKVYAEEIAEAWKSEEGLKRVAQYSMEDARATYELGREFFPMEVELAKLIGQSVWDVSRSSTGNLVEWYLLRVAYERNELAPNKPGGEEYQRRMRSSYIGGYVKEPEKGLWESIAYLDFRSSAGSIIVTHNVSPDTLEKECKNYDVAPEVGYRFCKDFKGFIPSILEDLIETRQKVKRKMKATIDPIEKKMLDYRQRALKILANSYYGYQGYPKARWYSKECAESVTAWGRHYIETTIKEAEKFGFKVLYADTDGFFATIPNEKPETIKSKAKKFLKHINEKLPGMLELEYEGFYLRGFFVTKKKYALIDEDGHITTRGLEIVRRDWSEIAKETQAKVLEVILREGSIEKAAGIVKKVVEDLANYRVPVEKLIIHEQITRELKRYKATGPHVAIAKRLQARGIKVKPGTIISYVVLKGSKKISDRVILFDEYDSSRHKYDPDYYIHNQVLPAVLRILEAFGYKEKDLEYQRMKQTGLGAWLKMGKK

SEQ ID NO: 1642 - protein, 773 aa, unidentified
  REGION 1..773: note = Description of Unknown: Synthetic polypeptide
MILDTDYITENGKPVIRIFKKEKGEFKIEYDRNFEPYIYALLEDDESIEDIKKITGERHGKKVRIIRVEKVKKNFLGEPIEVWKLVFEHPQDYPAIRDAIRSHPAVREIFEYDIPFAKRYLIDKGLVPMEGGEELKLLAFAIATFYHEGDEFAEGEILMISYADESGAKVITWKKIDLPYVEVVSTEREAIKRFLQVLREKDPDVLLTYNGDNFDFAYIKKRCEKLGLKFTIGRDGSEPKIQRMGDRFAVEVKGRIHLDLAPVVRHTIRLPTYTLEAVYEAVFGKKKEKVYAEEIAEAWKSEEGLKRVAQYSMEDARATYELGREFFPMEVELAKLIGQSVWDVSRSSTGNLVEWYLLRVAYERNELAPNKPGGEEYQRRMRSSYIGGYVKEPEKGLWESIAYLDFRSSAGSIIVTHNVSPDTLEKECKNYDVAPIVGYRFCKDFKGFIPSILEDLIETRQKVKRKMKATIDPIEKKMLDYRQRALKILANSYYGYQGYPKARWYSKECAESVTAWGRHYIETTIKEAEKFGFKVLYADTDGFFATIPNEKPETIKSKAKKFLKHINEKLPGMLELEYEGFYLRGFFVTKKKYALIDEDGHITTRGLEVVRRDWSEIAKETQAKVLEVILREGSIEKAAGIVKEVVEDLANYRVPVEKLIIHEQITRELKRYKATGPHVAIAKRLQARGIKVKPGTIISYVVLKGSKKISDRVILFDEYDSSRHKYDPDYYIHNQVLPAVLRILEAFGYKEKDLEYQRMKQTGLGAWLKMGKK

SEQ ID NO: 1643 - protein, 773 aa, unidentified
  REGION 1..773: note = Description of Unknown: Synthetic polypeptide
MILDTDYITENGKPVIRIFKKEKGEFKIEYDRNFEPYIYALLEDDESIEDIKKITGERHGKKVRIIRVEKVKKKFLGEPIEVWKLVFEHPQDYPAIRDAIRSHPAVREIFEYDIPFAKRYLIDKGLVPMEGGEELKLLAFAIATFYHEGDEFAEGEILMISYADESGAKVITWKKIDLPYVEVVSTEREAIKRFLQVLREKDPDVLLTYNGDNFDFAYIKKRCEKLGLKFTIGRDGSEPKIQRMGDRFAVEVKGRIHLDLAPVVRHTIRLPTYTLEAVYEAVFGKKKEKVYAEEIAEAWKSEEGLKRVAQYSMEDARATYELGREFFPMEVELAKLIGQSVWDVSRSSTGNLVEWYLLRVAYERNELAPNKPGGEEYQRRMRSSYIGGYVKEPEKGLWESIAYLDFRSSAGSIIVTHNVSPDTLEKECKNYDVAPIVGYRFCKDFKGFIPSILEDLIETRQKVKRKMKATIDPIEKKMLDYRQRALKILANSYYGYQGYAKARWYSKECAESVTAWGRHYIETTIKEAEKFGFKVLYADTDGFFATIPNEKPETIKSKAKKFLKHINEKLPGMLELEYEGFYLRGFFVTKKKYALIDEDGHITTRGLEVVRRDWSEIAKETQAKVLEVILREGSIEKAAGIVKKVVEDLANYRVPVEKLIIHEQITRELKRYKATGPHVAIAKRLQARGIKVKPGTIISYVVLKGSKKISDRVILFDEYDSSRHKYDPDYYIHNQVLPAVLRILEAFGYKEKDLEYQRMKQTGLGAWLKMGKK

SEQ ID NO: 1644 - protein, 773 aa, unidentified
  REGION 1..773: note = Description of Unknown: Synthetic polypeptide
MILDTDYITENGKPVIRIFKKEKGEFKIEYDRNFEPYIYALLEDDESIEDIKKITGERHGKKVRIIRVEKVKKKFLGEPIEVWKLVFEHPQDYPAIRDAIRSHPAVREIFEYDIPFAKRYLIDKGLVPMEGGEELKLLAFNIATFYHEGDEFAEGEILMISYADESGAKVITWKKIDLPYVEVVSTEREAIKRFLQVLREKDPDVLLTYNGDNFDFAYIKKRCEKLGLKFTIGRDGSEPKIQRMGDRFAVEVKGRIHLDLAPVVRHTIRLPTYTLEAVYEAVFGKKKEKVYAEEIAEAWKSEEGLKRVAQYSMEDARATYELGREFFPMEVELAKLIGQSVWDVSRSSTGNLVEWYLLRVAYERNELAPNKPGGEEYQRRMRSSYIGGYVKEPEKGLWESIAYLDFRSSAGSIIVTHNVSPDTLEKECKNYDVAPEVGHRFCKDFKGFIPSILEDLIETRQKVKRKMKATIDPIEKKMLDYRQRALKILANSYYGYQGYPKARWYSKECAESVTAWGRHYIETTIKEAEKFGFKVLYADTDGFFATIPNEKPETIKSKAKKFLKHINEKLPGMLELEYEGFYLRGFFVTKKKYALIDEDGHITTRGLEVVRRDWSEIAKETQAKVLEVILREGSIEKAAGIVKKVVEDLANYRVPVEKLIIHEQITRELKRYKATGPHVAIAKRLQARGIKVKPGTIISYVVLKGSKKISDRVILFDEYDSSRHKYDPDYYIHNQVLPAVLRILEAFGYKEKDLEYQRMKQTGLGAWLKMGKK

SEQ ID NO: 1645 - protein, 773 aa, unidentified
  REGION 1..773: note = Description of Unknown: Synthetic polypeptide
MILDTDYITENGKPVIRIFKKEKGEFKIEYDRNFEPYIYALLEDDESIEDIKKITGERHGKKVRIIRVEKVKKNFLGEPIEVWKLVFEHPQDYPAIRDAIRSHPAVREIFEYDIPFAKRYLIDKGLVPMEGGEELKLLAFNIATFYHEGDEFAEGEILMISYADESGAKVITWKKIDLPYVEVVSTEREAIKRFLQVLREKDPDVLLTYNGDNFDFAYIKKRCEKLGLKFTIGRDGSEPKIQRMGDRFAVEVKGRIHLDLAPVVRHTIRLPTYTLEAVYEAVFGKKKEKVYAEEIAEAWKSEEGLKRVAQYSMEDARATYELGREFFPMEVELAKLIGQSVWDVSRSSTGNLVEWYLLRVAYERNELAPNKPGGEEYQRRMRSSYIGGYVKEPEKGLWESIAYLDFRSSAGSIIVTHNVSPDTLEKECKNYDVAPIVGYRFCKDFKGFIPSILEDLIETRQKVKRKMKATIDPIEKKMLDYRQRALKILANSYYGYQGYPKARWYSKECAESVTAWGRHYIETTIKEAEKFGFKVLYADTDGFFATIPNEKPETIKSKAKKFLKHINEKLPGMLELEYEGFYLRGFFVTKKKYALIDEDGHITTRGLEVVRRDWSEIAKETQAKVLEVILREGSIDKAAGIVKKVVEDLANYRVPVEKLIIHEQITRELKRYKATGPHVAIAKRLQARGIKVKPGTIISYVVLKGSKKISDRVILFDEYDSSRHKYDPDYYIHNQVLPAVLRILEAFGYKEKDLEYQRMKQTGLGAWLKMGKK

SEQ ID NO: 1646 - protein, 773 aa, unidentified
  REGION 1..773: note = Description of Unknown: Synthetic polypeptide
MILDTDYITENGKPVIRIFKKEKGEFKIEYDRNFEPYIYALLEDDESIEDIKKITGERHGKKVRIIRVEKVKKKFLGEPIEVWKLVFEHPQDYPAIRDAIRSHPAVREIFEYDIPFAKRYLIDKGLVPMEGGEELKLLAFAIATFYHEGDEFAEGEILMISYADESGAKVITWKKIDLPYVEVVSTEREAIKRFLQVLREKDPDVLLTYNGDNFDFAYIKKRCEKLGLKFTIGRDGSEPKIQRMGDRFAVEVKGRIHLDLAPVVRHTIRLPTYTLEAVYEAVFGKKKEKVYAEEIAEAWKSEEGLKRVAQYSMEDARATYELGREFFPMEVELAKLIGQSVWDVSRSSTGNLVEWYLLRVAYERNELAPNKPGGEEYQRRMRSSYIGGYVKEPEKGLWESIAYLDFRSSAGSIIVTHNVSPDTLEKECKNYDVAPIVGYRFCKDFKGFIPSILEDLIETRQKVKRKMKATIDPIEKKMLDYRQRALKILANSYYGYQGYPKARWYSKECAESVTAWGRHYIETTIKEAEKFGFKVLYADTDGFFATIPNEKPETIKSKAKKFLKHINEKLPGMLELEYEGFYLRGFFVTKKKNALIDEDGHITTRGLEVVRRDWSEIAKETQAKVLEVILREGSIEKAAGIVKKVVEDLANYRVPVEKLIIHEQITRELKRYKATGPHVAIAKRLQARGIKVKPGTIISYVVLKGSKKISDRVILFDEYDSSRHKYDPDYYIHNQVLPAVLRILEAFGYKEKDLEYQRMKQTGLGAWLKMGKK

SEQ ID NO: 1647 - protein, 773 aa, unidentified
  REGION 1..773: note = Description of Unknown: Synthetic polypeptide
MILDTDYITENGKPVIRIFKKEKGEFKIEYDRNFEPYIYALLEDDESIEDIKKITGERHGKKVRIIRVEKVKKKFLGEPIEVWKLVFEHPQDYPAIRDAIRSHPAVREIFEYDIPFAKRYLIDKGLVPMEGGEELKLLAFAIATFYHEGDEFAEGEILMISYADESGAKVITWKKIDLPYVEVVSTEREAIKRFLQVLREKDPDVLLTYNGDNFDFAYIKKRCEKLGLKFTIGRDGSEPKIQRMGDRFAVEVKGRIHLDLAPVVRHTIRLPTYTLEAVYEAVFGKKKEKVYAEEIAEAWKSEEGLKRVAQYSMEDARATYELGREFFPMEVELAKLIGQSVWDVSRSSTGNLVEWYLLRVAYERNELAPNKPGGEEYQRRMRSSYIGGYVKEPEKGLWESIAYLDFRSSAGSIIVTHNVSPDTLEKECKNYDVAPIVGYRFCKDFKGFIPSILEDLIETRQKVKRKMKATIDPIEKKMLDYRQRALKILANSYYGYQGYPKARWYSKECAESVTAWGRHYIETTIKEAEKFGFKVLYADTDGFHATIPNEKPETIKSKAKKFLKHINEKLPGMLELEYEGFYLRGFFVTKKKYALIDEDGHITTRGLEVVRRDWSEIAKETQAKVLEVILREGSIEKAAGIVKKVVEDLANYRVPVEKLIIHEQITRELKRYKATGPHVAIAKRLQARGIKVKPGTIISYVVLKGSKKISDRVILFDEYDSSRHKYDPDYYIHNQVLPAVLRILEAFGYKEKDLEYQRMKQTGLGAWLKMGKK

SEQ ID NO: 1648 - protein, 773 aa, unidentified
  REGION 1..773: note = Description of Unknown: Synthetic polypeptide
MILDTDYITENGKPVIRIFKKEKGEFKIEYDRNFEPYIYALLEDDESIEDIKKITGERHGKKVRIIRVEKVKKKFLGEPIEVWKLVFEHPQDYPAIRDAIRSHPAVREIFEYDIPFAKRYLIDKGLVPMEGGEELKLLAFAIATFYHEGDEFAEGEILMISYADESGAKVITWKKIDLPYVEVVSTEREAIKRFLQVLREKDPDVLLTYNGDNFDFAYIKKRCEKLGLKFTIGRDGSEPKIQRMGDRFAVEVKGRIHLDLAPVVRHTIRLPTYTLEAVYEAVFGKKKEKVYAEEIAEAWKSEEGLKRVAQYSMEDARATYELGREFFPMEVELAKLIGQSVWDVSRSSTGNLVEWYLLRVAYERNELAPNKPGGEEYQRRMRSSYIGGYVKEPEKGLWESIAYLDFRSSAGSIIVTHNVSPDTLEKECKNYDVAPIVGYRFCKDFKGFIPSILEDLIETRQKVKRKMKATIDPIEKKMLDYRQRALKILANSYYGYQGYPKARWYSKECAQSVTAWGRHYIETTIKEAEKFGFKVLYADTDGFFATIPNEKPETIKSKAKKFLKHINEKLPGMLELEYEGFYLRGFFVTKKKYALIDEDGHITTRGLEVVRRDWSEIAKETQAKVLEVILREGSIEKAAGIVKKVVEDLANYRVPVEKLIIHEQITRELKRYKATGPHVAIAKRLQARGIKVKPGTIISYVVLKGSKKISDRVILFDEYDSSRHKYDPDYYIHNQVLPAVLRILEAFGYKEKDLEYQRMKQTGLGAWLKMGKK

SEQ ID NO: 1649 - protein, 773 aa, unidentified
  REGION 1..773: note = Description of Unknown: Synthetic polypeptide
MILDTDYITENGKPVIRIFKKEKGEFKIEYDRNFEPYIYALLEDDESIEDIKKITGERHGKKVRIIRVEKVKKKFLGEPIEVWKLVFEHPQDYPAIRDAIRSHPAVREIFEYDIPFAKRYLIDKGLVPMEGGEELKLLAFNIATFYHEGDEFAEGEILMISYADESGAKVITWKKIDLPYVEVVSTEREAIKRFLQVLREKDPDVLLTYNGDNFDFAYIKKRCEKLGLKFTIGRDGSEPKIQRMGDRFAVEVKGRIHLDLAPVVRHTIRLPTYTLEAVYEAVFGKKKEKVYAEEIAEAWKSEEGLKRVAQYSMEDARATYELGREFFPMEVELAKLIGQSVWDVSRSSTGNLVEWYLLRVAYERNELAPNKPGGEEYQRRMRSSYIGGYVKEPEKGLWESIAYLDFRSSAGSIIVTHNVSPDTLEKECKNYDVAPEVGYRFCKDFKGFIPSILEDLIETRQKVKRKMKATIDPIEKKMLDYRQRALKILANSYYGYQGYPKARWYSKECAESVTAWGRHYIETTIKEAEKFGFKVLYADTDGFFATIPNEKPETIKSKAKKFLKHINEKLPGMLELEYEGFYLRGFFVTKKRYALIDEDGHITTRGLEVVRRDWSEIAKETQAKVLEVILREGSIEKAAGIVKKVVEDLANYRVPVEKLIIHEQITRELKRYKATGPHVAIAKRLQARGIKVKPGTIISYVVLKGSKKISDRVILFDEYDSSRHKYDPDYYIHNQVLPAVLRILEAFGYKEKDLEYQRMKQTGLGAWLKMGKK

SEQ ID NO: 1650 - protein, 773 aa, unidentified
  REGION 1..773: note = Description of Unknown: Synthetic polypeptide
MILDTDYITENGKPVIRIFKKEKGEFKIEYDRNFEPYIYALLEDDESIEDIKKITGERHGKKVRIIRVEKVKKNFLGEPIEVWKLVFEHPQDYPAIRDAIRSHPAVREIFEYDIPFAKRYLIDKGLVPMEGGEELKLLAFAIATFYHEGDEFAEGEILMISYADESGAKVITWKKIDLPYVEVVSTEREAIKRFLQVLREKDPDVLLTYNGDNFDFAYIKKRCEKLGLKFTIGRDGSEPKIQRMGDRFAVEVKGRIHLDLAPVVRHTIRLPTYTLEAVYEAVFGKKKEKVYAEEIAEAWKSEEGLKRVAQYSMEDARATYELGREFFPMEVELAKLIGQSVWDVSRSSTGNLVEWYLLRVAYERNELAPNKPGGEEYQRRMRSSYIGGYVKEPEKGLWESIAYLDFRSSAGSIIVTHNVSPDTLEKECKNYDVAPIVGYRFCKDFKGFIPSILEDLIETRQKVKRKMKATIDPIEKKMLDYRQRALKILANSYYGYQGYPKARWYSKECAESVTAWGRHYIETTIKEAEKFGFKVLYADTDGFFATIPGEKPETIKSKAKKFLKHINEKLPGMLELEYEGFYLRGFFVTKKKYALIDEDGHITTRGLEVVRRDWSEIAKETQAKVLEVILREGSIEKAAGIVKKVVEDLANYRVPVEKLIIHEQITRELKRYKATGPHVAIAKRLQARGIKVKPGTIISYVVLKGSKKISDRVILFDEYDSSRHKYDPDYYIHNQVLPAVLRILEAFGYKEKDLEYQRMKQTGLGAWLKMGKK

SEQ ID NO: 1651 - protein, 773 aa, unidentified
  REGION 1..773: note = Description of Unknown: Synthetic polypeptide
MILDTDYITENGKPVIRIFKKEKGEFKIEYDRNFEPYIYALLEDDESIEDIKKITGERHGKKVRIIRVEKVKKNFLGEPIEVWKLVFEHPQDYPAIRDAIRSHPAVREIFEYDIPFAKRYLIDKGLVPMEGGEELKLLAFAIATFYHEGDEFAEGEILMISYADESGAKVITWKKIDLPYVEVVSTEREAIKRFLQVLREKDPDVLLTYNGDNFDFAYIKKRCEKLGLKFTIGRDGSEPKIQRMGDRFAVEVKGRIHLDLAPVVRHTIRLPTYTLEAVYEAVFGKKKEKVYAEEIAEAWKSEEGLKRVARYSMEDARATYELGREFFPMEVELAKLIGQSVWDVSRSSTGNLVEWYLLRVAYERNELAPNKPGGEEYQRRMRSSYIGGYVKEPEKGLWESIAYLDFRSSAGSIIVTHNVSPDTLEKECKNYDVAPIVGYRFCKDFKGFIPSILEDLIETRQKVKRKMKATIDPIEKKMLDYRQRALKILANSYYGYQGYPKARWYSKECAESVTAWGRHYIETTIKEAEKFGFKVLYADTDGFFATIPNEKPETIKSKAKKFLKHINEKLPGMLELEYEGFYLRGFFVTKKKYALIDEDGHITTRGLEVVRRDWSEIAKETQAKVLEVILREGSIEKAAGIVKKVVEDLANYRVPVEKLIIHEQITRELKRYKATGPHVAIAKRLQARGIKVKPGTIISYVVLKGSKKISDRVILFDEYDSSRHKYDPDYYIHNQVLPAVLRILEAFGYKEKDLEYQRMKQTGLGAWLKMGKK

SEQ ID NO: 1652 - protein, 773 aa, unidentified
  REGION 1..773: note = Description of Unknown: Synthetic polypeptide
MILDTDYITENGKPVIRIFKKEKGEFKIEYDRNFEPYIYALLEDDESIEDIKKITGERHGKKVRIIRVEKVKKKFLGEPIEVWKLVFEHPQDYPAIRDAIRSHPAVREIFEYDIPFAKRYLIDKGLVPMEGGEELKLLAFAIATFYHEGDEFAEGEILMISYADESGAKVITWKKIDLPYVEVVSTEREAIKRFLQVLREKDPDVLLTYNGDNFDFAYIKKRCEKLGLKFTIGRDGSEPKIQRMGDRFAVEVKGRIHLDLAPVVRHTIRLPTYTLEAVYEAVFGKKKEKVYAEEIAEAWKSEEGLKRVAQYSMEDARATYELGREFFPMEVELAKLIGQSVWDVSRSSTGNLVEWYLLRVAYERNELAPNKPGGEEYQRRMRSSYIGGYVKEPEKGLWESIAYLDFRSSAGSIIVTHNVSPDTLEKECKNYDVAPIVGYRFCKDFKGFIPSILEDLIETRQKVKRKMKATIDPIEKKMLDYRQRALKILANSFYGYQGYPKARWYSKECAESVTAWGRHYIETTIKEAEKFGFKVLYADTDGFFATIPNEKPETIKSKAKKFLKHINEKLPGMLELEYEGFYLRGFFVTKKKYALIDEDGHITTRGLEVVRRDWSEIAKETQAKVLEVILREGSIEKAAGIVKKVVEDLANYRVPVEKLIIHEQITRELKRYKATGPHVAIAKRLQARGIKVKPGTIISYVVLKGSKKISDRVILFDEYDSSRHKYDPDYYIHNQVLPAVLRILEAFGYKEKDLEYQRMKQTGLGAWLKMGKK

SEQ ID NO: 1653 - protein, 773 aa, unidentified
  REGION 1..773: note = Description of Unknown: Synthetic polypeptide
MILDTDYITENGKPVIRIFKKEKGEFKIEYDRNFEPYIYALLEDDESIEDIKKITGERHGKKVRIIRVEKVKKNFLGEPIEVWKLVFEHPQDYPAIRDAIRSHPAVREIFEYDIPFAKRYLIDKGLVPMEGGEELKLLAFAIATFYHEGDEFAEGEILMISYADESGAKVITWKKIDLPYVEVVSTEREAIKRFLQVLREKDPDVLLTYNGDNFDFAYIKKRCEKLGLKFTIGRDGSEPKIQRMGDRFAVEVKGRIHLDLAPVVRHTIRLPTYTLEAVYEAVFGQKKEKVYAEEIAEAWKSEEGLKRVAQYSMEDARATYELGREFFPMEVELAKLIGQSVWDVSRSSTGNLVEWYLLRVAYERNELAPNKPGGEEYQRRMRSSYIGGYVKEPEKGLWESIAYLDFRSSAGSIIVTHNVSPDTLEKECKNYDVAPIVGYRFCKDFKGFIPSILEDLIETRQKVKRKMKATIDPIEKKMLDYRQRALKILANSYYGYQGYPKARWYSKECAESVTAWGRHYIETTIKEAEKFGFKVLYADTDGFFATIPNEKPETIKSKAKKFLKHINEKLPGMLELEYEGFYLRGFFVTKKKYALIDEDGHITTRGLEVVRRDWSEIAKETQAKVLEVILREGSIEKAAGIVKKVVEDLANYRVPVEKLIIHEQITRELKRYKATGPHVAIAKRLQARGIKVKPGTIISYVVLKGSKKISDRVILFDEYDSSRHKYDPDYYIHNQVLPAVLRILEAFGYKEKDLEYQRMKQTGLGAWLKMGKK

SEQ ID NO: 1654 - protein, 773 aa, unidentified
  REGION 1..773: note = Description of Unknown: Synthetic polypeptide
MILDTDYITENGKPVIRIFKKEKGEFKIEYDRNFEPYIYALLEDDESIEDIKKITGERHGKKVRIIRVEKVKKKFLGEPIEVWKLVFEHPQDYPAIRDAIRSHPAVREIFEYDIPFAKRYLIDKGLVPMEGGEELKLLAFAIATFYHEGDEFAEGEILMISYADESGAKVITWKKIDLPYVEVVSTEREAIKRFLQVLREKDPDVLLTYNGDNFDFAYIKKRCEKLGLKFTIGRDGSEPKIQRMGDRFAVEVKGRIHLDLAPVVRHTIRLPTYTLEAVYEAVFGKKKEKVYAEEIAEAWKSEEGLKRVAQYSMEDARATYELGREFFPMEVELAKLIGQSVWDVSRSSTGNLVEWYLLRVAYERNELAPNKPGGEEYQRRMRSSFIGGYVKEPEKGLWESIAYLDFRSSAGSIIVTHNVSPDTLEKECKNYDVAPIVGYRFCKDFKGFIPSILEDLIETRQKVKRKMKATIDPIEKKMLDYRQRALKILANSYYGYQGYPKARWYSKECAESVTAWGRHYIETTIKEAEKFGFKVLYADTDGFFATIPNEKPETIKSKAKKFLKHINEKLPGMLELEYEGFYLRGFFVTKKKYALIDEDGHITTRGLEVVRRDWSEIAKETQAKVLEVILREGSIEKAAGIVKKVVEDLANYRVPVEKLIIHEQITRELKRYKATGPHVAIAKRLQARGIKVKPGTIISYVVLKGSKKISDRVILFDEYDSSRHKYDPDYYIHNQVLPAVLRILEAFGYKEKDLEYQRMKQTGLGAWLKMGKK

SEQ ID NO: 1655 - protein, 773 aa, unidentified
  REGION 1..773: note = Description of Unknown: Synthetic polypeptide
MILDTDYITENGKPVIRIFKKEKGEFKIEYDRNFEPYIYALLEDDESIEDIKKITGERHGKKVRIIRVEKVKKNFLGEPIEVWKLVFEHPQDYPAIRDAIRSHPAVREIFEYDIPFAKRYLIDKGLVPMEGGEELKLLAFAIATFYHEGDEFAEGEILMISYADESGAKVITWKKIDLPYVEVVSTEREAIKRFLQVLREKDPDVLLTYNGDNFDFAYIKKRCEKLGLKFTIGRDGSEPKIQRMGDRFAVEVKGRIHLDLAPVVRHTIRLPTYTLEAVYEAVFGKKKEKVYAEEIAEAWKSEEGLKRVAQYSMEDARATYELGREFFPMEVELAKLIGQSVWDVSRSSTGNLVEWYLLRVAYERNELAPNKPGGEEYQRRMRSSYIGGYVKEPEKGLWESIAYLDFRSSAGSIIVTHNVSPDTLEKECKNYDVAPIVGYRFCKDFKGFIPSILEDLIETRQKVKRKMKATIDPIEKKMLDYRQRALKILANSYYGYQGYPKARWYSKECAESVTAWGRHYIETTIKEAEKFGFKVLYADTDGFFATIPNEKPETIKSKAKKFLKHINEKLPGMLELEYEGFYLRGFFVTKKRYALIDEDGHITTRGLEVVRRDWSEIAKETQAKVLEVILREGSIEKAAGIVKKVVEDLANYRVPVEKLIIHEQITRELKRYKATGPHVAIAKRLQARGIKVKPGTIISYVVLKGSKKISDRVILFDEYDSSRHKYDPDYYIHNQVLPAVLRILEAFGYKEKDLEYQRMKQTGLGAWLKMGKK

SEQ ID NO: 1656 - protein, 773 aa, unidentified
  REGION 1..773: note = Description of Unknown: Synthetic polypeptide
MILDTDYITENGKPVIRIFKKEKGEFKIEYDRNFEPYIYALLEDDESIEDIKKITGERHGKKVRIIRVEKVKKKFLGEPIEVWKLVFEHPQDYPAIRDAIRSHPAVREIFEYDIPFAKRYLIDKGLVPMEGGEELKLLAFAIATFYHEGDEFAEGEILMISYADESGAKVITWKKIDLPYVEVVSTEREAIKRFLQVLREKDPDVLLTYNGDNFDFAYIKKRCEELGLKFTIGRDGSEPKIQRMGDRFAVEVKGRIHLDLAPVVRHTIRLPTYTLEAVYEAVFGKKKEKVYAEEIAEAWKSEEGLKRVAQYSMEDARATYELGREFFPMEVELAKLIGQSVWDVSRSSTGNLVEWYLLRVAYERNELAPNKPGGEEYQRRMRSSYIGGYVKEPEKGLWESIAYLDFRSSAGSIIVTHNVSPDTLEKECKNYDVAPIVGYRFCKDFKGFIPSILEDLIETRQKVKRKMKATIDPIEKKMLDYRQRALKILANSYYGYQGYPKARWYSKECAESVTAWGRHYIETTIKEAEKFGFKVLYADTDGFFATIPNEKPETIKSKAKKFLKHINEKLPGMLELEYEGFYLRGFFVTKKKYALIDEDGHITTRGLEVVRRDWSEIAKETQAKVLEVILREGSIEKAAGIVKKVVEDLANYRVPVEKLIIHEQITRELKRYKATGPHVAIAKRLQARGIKVKPGTIISYVVLKGSKKISDRVILFDEYDSSRHKYDPDYYIHNQVLPAVLRILEAFGYKEKDLEYQRMKQTGLGAWLKMGKK

SEQ ID NO: 1657 - protein, 773 aa, unidentified
  REGION 1..773: note = Description of Unknown: Synthetic polypeptide
MILDTDYITENGKPVIRIFKKEKGEFKIEYDRNFEPYIYALLEDDESIEDIKKITGERHGKKVRIIRVEKVKKKFLGEPIEVWKLVFEHPQDYPAIRDAIRSHPAVREIFEYDIPFAKRYLIDKGLVPMEGGEELKLLAFAIATFYHEGDEFAEGEILMISYADESGAKVITWKKIDLPYVEVVSTEREAIKRFLQVLREKDPDVLLTYNGDNFDFAYIKKRCEKLGLKFTIGRDGSEPKIQRMGDRFAVEVKGRIHLDLAPVVRHTIRLPTYTLEAVYEAVFGKKKEKVYAEEIAEAWKSEEGLKRVAQYSMEDARATYELGREFFPMEVELAKLIGQSVWDVSRSSTGNLVEWYLLRVAYERNELAPNKPGGEEYQRRMRSSYIGGYVKEPEKGLWESIAWLDFRSSAGSIIVTHNVSPDTLEKECKNYDVAPIVGYRFCKDFKGFIPSILEDLIETRQKVKRKMKATIDPIEKKMLDYRQRALKILANSYYGYQGYPKARWYSKECAESVTAWGRHYIETTIKEAEKFGFKVLYADTDGFFATIPNEKPETIKSKAKKFLKHINEKLPGMLELEYEGFYLRGFFVTKKKYALIDEDGHITTRGLEVVRRDWSEIAKETQAKVLEVILREGSIEKAAGIVKKVVEDLANYRVPVEKLIIHEQITRELKRYKATGPHVAIAKRLQARGIKVKPGTIISYVVLKGSKKISDRVILFDEYDSSRHKYDPDYYIHNQVLPAVLRILEAFGYKEKDLEYQRMKQTGLGAWLKMGKK

SEQ ID NO: 1658 - protein, 773 aa, unidentified
  REGION 1..773: note = Description of Unknown: Synthetic polypeptide
MILDTDYITENGKPVIRIFKKEKGEFKIEYDRNFEPYIYALLEDDESIEDIKKITGERHGKKVRIIRVEKVKKKFLGEPIEVWKLVFEHPQDYPAIRDAIRSHPAVREIFEYDIPFAKRYLIDKGLVPMEGGEELKLLAFAIATFYHEGDEFAEGEILMISYADESGAKVITWKKIDLPYVEVVSTEREAIKRFLQVLREKDPDVLLTYNGDNFDFAYIKKRCEKLGLKFTIGRDGSEPKIQRMGDRFAVEVKGRIHLDLAPVVRHTIRLPTYTLEAVYEAVFGKKKEKVYAEEIAEAWKSEEGLKRVAQYSMEDARATYELGREFFPMEVELAKLIGQSVWDVSRSSTGNLVEWYLLRVAYERNELAPNKPGGEEYQRRMRSSYIGGYVKEPEKGLWESIAYLDFRSSAGSIIVTHNVSPDTLEKECKNYDVAPIVGYRFCKDFKGFIPSILEDLIETRQKVKRKMKATIDPIEKKMLDYRQRALKILANSYYGYQGYPKARWYSKECAESVTAWGRHYIETTIKEAEKFGFKVLYADTDGFFATIPNEKPETIKSKAKKFLKHINEKLPGMLELEYEGFYLRGFFVTKKKHALIDEDGHITTRGLEVVRRDWSEIAKETQAKVLEVILREGSIEKAAGIVKKVVEDLANYRVPVEKLIIHEQITRELKRYKATGPHVAIAKRLQARGIKVKPGTIISYVVLKGSKKISDRVILFDEYDSSRHKYDPDYYIHNQVLPAVLRILEAFGYKEKDLEYQRMKQTGLGAWLKMGKK

SEQ ID NO: 1659 - protein, 773 aa, unidentified
  REGION 1..773: note = Description of Unknown: Synthetic polypeptide
MILDTDYITENGKPVIRIFKKEKGEFKIEYDRNFEPYIYALLEDDESIEDIKKITGERHGKKVRIIRVEKVKKKFLGEPIEVWKLVFEHPQDYPAIRDAIRSHPAVREIFEYDIPFAKRYLIDKGLVPMEGGEELKLLAFAIATFYHEGDEFAEGEILMISYADESGAKVITWKKIDLPYVEVVSTEREAIKRFLQVLREKDPDVLLTYNGDNFDFAYIKKRCEKLGLKFTIGRDGSEPKIQRMGDRFAVEVKGRIHLDLAPVVRHTIRLPTYTLEAVYEAVFGKKKEKVYAEEIAEAWKSEEGLKRVAQYSMEDARATYELGREFFPMEVELAKLIGQSVWDVSRSSTGNLVEWYLLRVAYERNELAPNKPGGEEYQRRMRSSYIGGYVKEPEKGLWESIAYLDFRSSAGSIIVTHNVSPDTLEKECKNYDVAPIVGYRFCKDFKGFIPSILEDLIETRQKVKRKMKATIDPIEKKMLDYRQRALKILANSYYGYQGYPKARWYSKECAESVTAWGRHYIETTIKEAEKFGFKVLYADTDGFFATIPNEKPETIKSKAKKFLKHINEKLPGMLELEYEGFYLRGFFVTKKKEALIDEDGHITTRGLEVVRRDWSEIAKETQAKVLEVILREGSIEKAAGIVKKVVEDLANYRVPVEKLIIHEQITRELKRYKATGPHVAIAKRLQARGIKVKPGTIISYVVLKGSKKISDRVILFDEYDSSRHKYDPDYYIHNQVLPAVLRILEAFGYKEKDLEYQRMKQTGLGAWLKMGKK

SEQ ID NO: 1660 - protein, 773 aa, unidentified
  REGION 1..773: note = Description of Unknown: Synthetic polypeptide
MILDTDYITENGKPVIRIFKKEKGEFKIEYDRNFEPYIYALLEDDESIEDIKKITGERHGKKVRIIRVEKVKKKFLGEPIEVWKLVFEHPQDYPAIRDAIRSHPAVREIFEYDIPFAKRYLIDKGLVPMEGGEELKLLAFAIATFYHEGDEFAEGEILMISYADESGAKVITWKKIDLPYVEVVSTEREAIKRFLQVLREKDPDVLLTYNGDNFDFAYIKKRCEKLGLKFTIGRDGSEPKIQRMGDRFAVEVKGRIHLDLAPVVRHTIRLPTYTLEAVYEAVFGKKKEKVYAEEIAEAWKSEEGLKRVAQYSMEDARATYELGREFFPMEVELAKLIGQSVWDVSRSSTGNLVEWYLLRVAYERNELAPNKPGGEEYQRRMRSSYIGGYVKEPEKGLWESIAYLDFRSSAGSIIVTHNVSPDTLEKECKNYDVAPIVGYRFCKDFPGFIPSILEDLIETRQKVKRKMKATIDPIEKKMLDYRQRALKILANSYYGYQGYPKARWYSKECAESVTAWGRHYIETTIKEAEKFGFKVLYADTDGFFATIPNEKPETIKSKAKKFLKHINEKLPGMLELEYEGFYLRGFFVTKKKYALIDEDGHITTRGLEVVRRDWSEIAKETQAKVLEVILREGSIEKAAGIVKKVVEDLANYRVPVEKLIIHEQITRELKRYKATGPHVAIAKRLQARGIKVKPGTIISYVVLKGSKKISDRVILFDEYDSSRHKYDPDYYIHNQVLPAVLRILEAFGYKEKDLEYQRMKQTGLGAWLKMGKK

SEQ ID NO: 1661 - protein, 773 aa, unidentified
  REGION 1..773: note = Description of Unknown: Synthetic polypeptide
MILDTDYITENGKPVIRIFKKEKGEFKIEYDRNFEPYIYALLKDDESIEDIKKITGERHGKKVRIIRVEKVKKNFLGEPIEVWKLVFEHPQDYPAIRDAIRSHPAVREIFEYDIPFAKRYLIDKGLVPMEGGEELKLLAFAIATFYHEGDEFAEGEILMISYADESGAKVITWKKIDLPYVEVVSTEREAIKRFLQVLREKDPDVLLTYNGDNFDFAYIKKRCEKLGLKFTIGRDGSEPKIQRMGDRFAVEVKGRIHLDLAPVVRHTIRLPTYTLEAVYEAVFGKKKEKVYAEEIAEAWKSEEGLKRVAQYSMEDARATYELGREFFPMEVELAKLIGQSVWDVSRSSTGNLVEWYLLRVAYERNELAPNKPGGEEYQRRMRSSYIGGYVKEPEKGLWESIAYLDFRSSAGSIIVTHNVSPDTLEKECKNYDVAPIVGYRFCKDFKGFIPSILEDLIETRQKVKRKMKATIDPIEKKMLDYRQRALKILANSYYGYQGYPKARWYSKECAESVTAWGRHYIETTIKEAEKFGFKVLYADTDGFFATIPNEKPETIKSKAKKFLKHINEKLPGMLELEYEGFYLRGFFVTKKKYALIDEDGHITTRGLEVVRRDWSEIAKETQAKVLEVILREGSIEKAAGIVKKVVEDLANYRVPVEKLIIHEQITRELKRYKATGPHVAIAKRLQARGIKVKPGTIISYVVLKGSKKISDRVILFDEYDSSRHKYDPDYYIHNQVLPAVLRILEAFGYKEKDLEYQRMKQTGLGAWLKMGKK

SEQ ID NO: 1662 - protein, 773 aa, unidentified
  REGION 1..773: note = Description of Unknown: Synthetic polypeptide
MILDTDYITENGKPVIRIFKKEKGEFKIEYDRNFEPYIYALLEDDESIEDIKKITGERHGKKVRIIRVEKVKKNFLGEPIEVWKLVFEHPQDYPAIRDAIRSHPAVREIFEYDIPFAKRYLIDKGLVPMEGGEELKLLAFAIATFYHEGDEFAEGEILMISYADESGAKVITWKKIDLPYVEVVSTEREAIKRFLQVLREKDPDVLLTYNGDNFDFAYIKKRCEKLGLKFTIGRDGSEPKIQRMGDRFAVEVKGRIHLDLAPVVRHTIRLPTYTLEAVYEAVFGKKKEKVYAEEIAEAWKSEEGLKRVAQYSMEDARATYELGREFFPMEVELAKLIGQSVWDVSRSSTGNLVEWYLLRVAYERNELAPNKPGGEEYKRRMRSSYIGGYVKEPEKGLWESIAYLDFRSSAGSIIVTHNVSPDTLEKECKNYDVAPIVGYRFCKDFKGFIPSILEDLIETRQKVKRKMKATIDPIEKKMLDYRQRALKILANSYYGYQGYPKARWYSKECAESVTAWGRHYIETTIKEAEKFGFKVLYADTDGFFATIPNEKPETIKSKAKKFLKHINEKLPGMLELEYEGFYLRGFFVTKKKYALIDEDGHITTRGLEVVRRDWSEIAKETQAKVLEVILREGSIEKAAGIVKKVVEDLANYRVPVEKLIIHEQITRELKRYKATGPHVAIAKRLQARGIKVKPGTIISYVVLKGSKKISDRVILFDEYDSSRHKYDPDYYIHNQVLPAVLRILEAFGYKEKDLEYQRMKQTGLGAWLKMGKK

SEQ ID NO: 1663 - protein, 773 aa, unidentified
  REGION 1..773: note = Description of Unknown: Synthetic polypeptide
MILDTDYITENGKPVIRIFKKEKGEFKIEYDRNFEPYIYALLEDDESIEDIKKITGERHGKKVRIIRVEKVKKKFLGEPIEVWKLVFEHPQDYPAIRDAIRSHPAVREIFEYDIPFAKRYLIDKGLVPMEGGEELKLLAFAIATFYHEGDEFAEGEILMISYADESGAKVITWKKIDLPYVEVVSTEREAIKRFLQVLREKDPDVLLTYNGDNFDFAYIKKRCEKLGLKFTIGRDGSEPKIQRMGDRFAVEVKGRIHLDLAPVVRHTIRLPTYTLEAVYEAVFGKKKEKVYAEEIAEAWKSEEGLKRVAQYSMEDARATYELGREFFPMEVELAKLIGQSVWDVSRSSTGNLVEWYLLRVAYERNELAPNKPGGEEYQRRMRSSYIGGYVKEPEKGLWESIAYLDFRSSAGSIIVTHNVSPDTLEKECKNYDVAPIVGYRFCKDFKGFIPSILEDLIETRQKVKRKMKATIDPIEKKMLDYRQRALKILANSYYGYQGYPKARWYSKECAESVTAWGRHYIETTIKEAEKFGFKVLYADTDGFFATIPNEKPETIKSKAKKFLKHINEKLPGMLELEYEGFYLRGFFVTKKKAALIDEDGHITTRGLEVVRRDWSEIAKETQAKVLEVILREGSIEKAAGIVKKVVEDLANYRVPVEKLIIHEQITRELKRYKATGPHVAIAKRLQARGIKVKPGTIISYVVLKGSKKISDRVILFDEYDSSRHKYDPDYYIHNQVLPAVLRILEAFGYKEKDLEYQRMKQTGLGAWLKMGKK

SEQ ID NO: 1664 - protein, 773 aa, unidentified
  REGION 1..773: note = Description of Unknown: Synthetic polypeptide
MILDTDYITENGKPVIRIFKKEKGEFKIEYDRNFEPYIYALLEDDESIEDIKKITGERHGKKVRIIRVEKVKKKFLGEPIEVWKLVFEHPQDYPAIRDAIRSHPAVREIFEYDIPFAKRYLIDKGLVPMEGGEELKLLAFAIATFYHEGDEFAEGEILMISYADESGAKVITWKKIDLPYVEVVSTEREAIKRFLQVLREKDPDVLLTYNGDNFDFAYIKKRCEKLGLKFTIGRDGSEPKIQRMGDRFAVEVKGRIHLDLAPVVRHTIRLPTYTLEAVYEAVFGKKKEKVYAEEIAEAWKSEEGLKRVAQYSMEDARATYELGREFFPMEVELAKLIGQSVWDVSRSSTGNLVEWYLLRVAYERNELAPNKPGGEEYQRRMRSSYIGGYVKEPEKGLWESIAYLDFRSSAGSIIVTHNVSPDTLEKECKNYDVAPIVGYRFCKDFKGFIPSILEDLIETRQKVKRKMKATIDPIEKKMLDYRQRALKILANSYYGYQGYPKARWYSKECAESVTAWGRHYIETTIKEAEKFGFKVLYADTDGFFATIPNEKPETIKSKAKKFLKHINEKLPGMLELEYEGFYLRGFFVTKKKFALIDEDGHITTRGLEVVRRDWSEIAKETQAKVLEVILREGSIEKAAGIVKKVVEDLANYRVPVEKLIIHEQITRELKRYKATGPHVAIAKRLQARGIKVKPGTIISYVVLKGSKKISDRVILFDEYDSSRHKYDPDYYIHNQVLPAVLRILEAFGYKEKDLEYQRMKQTGLGAWLKMGKK

SEQ ID NO: 1665 - protein, 773 aa, unidentified
  REGION 1..773: note = Description of Unknown: Synthetic polypeptide
MILDTDYITENGKPVIRIFKKEKGEFKIEYDRNFEPYIYALLEDDESIEDIKKITGERHGKKVRIIRVEKVKKKFLGEPIEVWKLVFEHPQDYPAIRDAIRSHPAVREIFEYDIPFAKRYLIDKGLVPMEGGEELKLLAFAIATFYHEGDEFAEGEILMISYADESGAKVITWKKIDLPYVEVVSTEREAIKRFLQVLREKDPDVLLTYNGDNFDFAYIKKRCEKLGLKFTIGRDGSEPKIQRMGDRFAVEVKGRIHLDLAPVVRHTIRLPTYTLEAVYEAVFGKKKEKVYAEEIAEAWKSEEGLKRVAQYSMEDARATYELGREFFPMEVELAKLIGQSVWDVSRSSTGNLVEWYLLRVAYERNELAPNKPGGEEYQRRMRSSYIGGYVKEPEKGLWESIAYLDFRSSAGSIIVTHNVSPDTLEKECKNYDVAPIVGYRFCKDFKGFIPSILEDLIETRQKVKRKMKATIDPIEKKMLDYRQRAIKILANSYYGYQGYPKARWYSKECAESVTAWGRHYIETTIKEAEKFGFKVLYADTDGFFATIPNEKPETIKSKAKKFLKHINEKLPGMLELEYEGFYLRGFFVTKKKYALIDEDGHITTRGLEVVRRDWSEIAKETQAKVLEVILREGSIEKAAGIVKKVVEDLANYRVPVEKLIIHEQITRELKRYKATGPHVAIAKRLQARGIKVKPGTIISYVVLKGSKKISDRVILFDEYDSSRHKYDPDYYIHNQVLPAVLRILEAFGYKEKDLEYQRMKQTGLGAWLKMGKK

SEQ ID NO: 1666 - protein, 773 aa, unidentified
  REGION 1..773: note = Description of Unknown: Synthetic polypeptide
MILDTDYITENGKPVIRIFKKEKGEFKIEYDRNFEPYIYALLEDDESIEDIKKITGERHGKKVRIIRVEKVKKKFLGEPIEVWKLVFEHPQDYPAIRDAIRSHPAVREIFEYDIPFAKRYLIDKGLVPMEGGEELKLLAFAIATFYHEGDEFAEGEILMISYADESGAKVITWKKIDLPYVEVVSTEREAIKRFLQVLREKDPDVLLTYNGDNFDFAYIKKRCEKLGLKFTIGRDGSEPKIQRMGDRFAVEVKGRIHLDLAPVVRHTINLPTYTLEAVYEAVFGKKKEKVYAEEIAEAWKSEEGLKRVAQYSMEDARATYELGREFFPMEVELAKLIGQSVWDVSRSSTGNLVEWYLLRVAYERNELAPNKPGGEEYQRRMRSSYIGGYVKEPEKGLWESIAYLDFRSSAGSIIVTHNVSPDTLEKECKNYDVAPIVGYRFCKDFKGFIPSILEDLIETRQKVKRKMKATIDPIEKKMLDYRQRALKILANSYYGYQGYPKARWYSKECAESVTAWGRHYIETTIKEAEKFGFKVLYADTDGFFATIPNEKPETIKSKAKKFLKHINEKLPGMLELEYEGFYLRGFFVTKKKYALIDEDGHITTRGLEVVRRDWSEIAKETQAKVLEVILREGSIEKAAGIVKKVVEDLANYRVPVEKLIIHEQITRELKRYKATGPHVAIAKRLQARGIKVKPGTIISYVVLKGSKKISDRVILFDEYDSSRHKYDPDYYIHNQVLPAVLRILEAFGYKEKDLEYQRMKQTGLGAWLKMGKK

SEQ ID NO: 1667 - protein, 773 aa, unidentified
  REGION 1..773: note = Description of Unknown: Synthetic polypeptide
MILDTDYITENGKPVIRIFKKEKGEFKIEYDRNFEPYIYALLEDDESIEDIKKITGERHGKKVRIIRVEKVKKNFLGEPIEVWKLVFEHPQDYPAIRDAIRSHPAVREIFEYDIPFAKRYLIDKGLVPMEGGEELKLLAFAIATFYHEGDEFAEGEILMISYADESGAKVITWKKIDLPYVEVVSTEREAIKRFLQVLREKDPDVLLTYNGDNFDFAYIKKRCEKLGLKFTIGRDGSEPKIQRMGDRFAVEVKGRIHLDLAPVVRHTIRLPTYTLEAVYEAVFGKKKEKVYAEEIAEAWKSEEGLKRVAQYSMEDARATYELGREFFPMEVELAKLIGQSVWDVSRSSTGNLVEWYLLRVAYERNELAPNKPGGEEYQRRMRSSYIGGYVKEPEKGLWESIAYLDFRSSAGSIIVTHNVSPDTLEKECKNYDVAPIVGYRFCKDFKGFIPSILEDLIETRQKVKRKMKATIDPIEKKMLDYRQRALKILANSYYGYQGYPKARWYSKECAESVTAWGRHYIETTIKEAEKFGFKVLYADTDGFFATIPNEKPETIKSKAKKFLKHINEKLPGMLELEYEGFYLRGFFVTKKKYALIDEDGHITTRGLEVVRRDWSEIAKETQAKVLEVILREGSIEKAAGIVKKVVEDLANYRVPVEKLIIHEQITRELKRYKATGPHVAIAKRLQARGIKVKPGTIISYVVLKGSKKISDRVILFDEYDSSRHKYDPDYYIHNQVLPAVLRILEAFGYKEKDLRYQRMKQTGLGAWLKMGKK

SEQ ID NO: 1668 - protein, 773 aa, unidentified
  REGION 1..773: note = Description of Unknown: Synthetic polypeptide
MILDTDYITENGKPVIRIFKKEKGEFKIEYDRNFEPYIYALLEDDESIEDIKKITGERHGKKVRIIRVEKVKKKFLGEPIEVWKLVFEHPQDYPAIRDAIRSHPAVREIFEYDIPFAKRYLIDKGLVPMEGGEELKLLAFAIATFYHEGDEFAEGEILMISYADESGAKVITWKKIDLPYVEVVSTEREAIKRFLQVLREKDPDVLLTYNGDNFDFAYIKKRCEKLGLKFTIGRDGSEPKIQRMGDRFAVEVKGRIHLDLAPVVRHTIRLPTYTLEAVYEAVFGKKKEKVYAEEIAEAWKSEEGLKRVAQYSMEDARATYELGREFFPMEVELAKLIGQSVWDVSRSSTGNLVEWYLLRVAYERNELAPNKPGGEEYQRRMRSSYIGGYVKEPEKGLWESIAYLDFRSSAGSIIVTHNVSPDTLEKECKNYDVAPIVGYRFCKDFKGFIPSILEDLIETRQKVKRKMKATIDPIEKKMLDYRQRALKILANSYYGYQGYPKARWYSKECADSVTAWGRHYIETTIKEAEKFGFKVLYADTDGFFATIPNEKPETIKSKAKKFLKHINEKLPGMLELEYEGFYLRGFFVTKKKYALIDEDGHITTRGLEVVRRDWSEIAKETQAKVLEVILREGSIEKAAGIVKKVVEDLANYRVPVEKLIIHEQITRELKRYKATGPHVAIAKRLQARGIKVKPGTIISYVVLKGSKKISDRVILFDEYDSSRHKYDPDYYIHNQVLPAVLRILEAFGYKEKDLEYQRMKQTGLGAWLKMGKK

SEQ ID NO: 1669 - protein, 773 aa, unidentified
  REGION 1..773: note = Description of Unknown: Synthetic polypeptide
MILDTDYITENGKPVIRIFKKEKGEFKIEYDRNFEPYIYALLEDDESIEDIKKITGERHGKKVRIIRVEKVKKKFLGEPIEVWKLVFEHPQDYPAIRDAIRSHPAVREIFEYDIPFAKRYLIDKGLVPMEGGEELKLLAFAIATFYREGDEFAEGEILMISYADESGAKVITWKKIDLPYVEVVSTEREAIKRFLQVLREKDPDVLLTYNGDNFDFAYIKKRCEKLGLKFTIGRDGSEPKIQRMGDRFAVEVKGRIHLDLAPVVRHTIRLPTYTLEAVYEAVFGKKKEKVYAEEIAEAWKSEEGLKRVAQYSMEDARATYELGREFFPMEVELAKLIGQSVWDVSRSSTGNLVEWYLLRVAYERNELAPNKPGGEEYQRRMRSSYIGGYVKEPEKGLWESIAYLDFRSSAGSIIVTHNVSPDTLEKECKNYDVAPIVGYRFCKDFKGFIPSILEDLIETRQKVKRKMKATIDPIEKKMLDYRQRALKILANSYYGYQGYPKARWYSKECAESVTAWGRHYIETTIKEAEKFGFKVLYADTDGFFATIPNEKPETIKSKAKKFLKHINEKLPGMLELEYEGFYLRGFFVTKKKYALIDEDGHITTRGLEVVRRDWSEIAKETQAKVLEVILREGSIEKAAGIVKKVVEDLANYRVPVEKLIIHEQITRELKRYKATGPHVAIAKRLQARGIKVKPGTIISYVVLKGSKKISDRVILFDEYDSSRHKYDPDYYIHNQVLPAVLRILEAFGYKEKDLEYQRMKQTGLGAWLKMGKK

SEQ ID NO: 1670 - protein, 773 aa, unidentified
  REGION 1..773: note = Description of Unknown: Synthetic polypeptide
MILDTDYITENGKPVIRIFKKEKGEFKIEYDRNFEPYIYALLEDDESIEDIKKITGERHGKKVRIIRVEKVKKNFLGEPIEVWKLVFEHPQDYPAIRDAIRSHPAVREIFEYDIPFAKRYLIDKGLVPMEGGEELKLLAFAIATFYHEGDEFAEGEILMISYADESGAKVITWKKIDLPYVEVVSTEREAIKRFLQVLREKDPDVLLTYNGDNFDFAYIKKRCEKLGLKFTIGRDGSEPKIQRMGDRFAVEVKGRIHLDLAPVVRHTIRLPTYTLEAVYEAVFGKKKEKVYAEEIAEAWKSEEGLKRVAQYSMEDARATYELGREFFPMEVELAKLIGQSVWDVSRSSTGNLVEWYLLRVAYERNELAPNKPGGREYQRRMRSSYIGGYVKEPEKGLWESIAYLDFRSSAGSIIVTHNVSPDTLEKECKNYDVAPIVGYRFCKDFKGFIPSILEDLIETRQKVKRKMKATIDPIEKKMLDYRQRALKILANSYYGYQGYPKARWYSKECAESVTAWGRHYIETTIKEAEKFGFKVLYADTDGFFATIPNEKPETIKSKAKKFLKHINEKLPGMLELEYEGFYLRGFFVTKKKYALIDEDGHITTRGLEVVRRDWSEIAKETQAKVLEVILREGSIEKAAGIVKKVVEDLANYRVPVEKLIIHEQITRELKRYKATGPHVAIAKRLQARGIKVKPGTIISYVVLKGSKKISDRVILFDEYDSSRHKYDPDYYIHNQVLPAVLRILEAFGYKEKDLEYQRMKQTGLGAWLKMGKK

SEQ ID NO: 1671 - protein, 773 aa, unidentified; identical to SEQ ID NO: 37
  REGION 1..773: note = Description of Unknown: Synthetic polypeptide

SEQ ID NO: 1672 - protein, 773 aa, unidentified
  REGION 1..773: note = Description of Unknown: Synthetic polypeptide
MILDTDYITENGKPVIRIFKKEKGEFKIEYDRNFEPYIYALLEDDESIEDIKKITGERHGKKVRIIRVEKVKKKFLGEPIEVWKLVFEHPQDYPAIRDAIRSHPAVREIFEYDIPFAKRYLIDKGLVPMEGGEELKLLAFNIATFYHEGDEFAEGEILMISYADESGAKVITWKKIDLPYVEVVSTEREAIKRFLQVLREKDPDVLLTYNGDNFDFAYIKKRCEKLGLKFTIGRDGSEPKIQRMGDRFAVEVKGRIHLDLAPVVRHTIRLPTYTLEAVYEAVFGKKKEKVYAEEIAEAWKSEEGLKRVAQYSMEDARATYELGREFFPLEVELAKLIGQSVWDVSRSSTGNLVEWYLLRVAYERNELAPNKPGGEEYQRRMRSSYIGGYVKEPEKGLWESIAYLDFRSSAGSIIVTHNVSPDTLEKECKNYDVAPEVGYRFCKDFKGFIPSILEDLIETRQKVKRKMKATIDPIEKKMLDYRQRALKILANSYYGYQGYPKARWYSKECAESVTAWGRHYIETTIKEAEKFGFKVLYADTDGFFATIPNEKPETIKSKAKKFLKHINEKLPGMLELEYEGFYLRGFFVTKKRYALIDEDGHITTRGLEVVRRDWSEIAKETQAKVLEVILREGSIEKAAGIVKKVVEDLANYRVPVEKLIIHEQITRELKRYKATGPHVAIAKRLQARGIKVKPGTIISYVVLKGSKKISDRVILFDEYDSSRHKYDPDYYIHNQVLPAVLRILEAFGYKEKDLEYQRMKQTGLGAWLKMGKK

SEQ ID NO: 1673 - protein, 773 aa, unidentified
  REGION 1..773: note = Description of Unknown: Synthetic polypeptide
MILDTDYITENGKPVIRIFKKEKGEFKIEYDRNFEPYIYALLEDDESIEDIKKITGERHGKKVRIIRVEKVKKKFLGEPIEVWKLVFEHPQDYPAIRDAIRSHPAVREIFEYDIPFAKRYLIDKGLVPMEGGEELKLLAFAIATFYHEGDEFAEGEILMISYADESGAKVITWKKIDLPYVEVVSTEREAIKRFLQVLREKDPDVLLTYNGDNFDFAYIKKRCEKLGLKFTIGRDGSEPKIQRMGDRFAVEVKGRIHLDLAPVVRHTIRLPTYTLEAVYEAVFGKKKEKVYAEEIAEAWKSEEGLKRVAQYSMEDARATYELGREFFPMEVELAKLIGQSVWDVSRSSTGNLVEWYLLRVAYERNELAPNKPGGEEYQRRMRSSWIGGYVKEPEKGLWESIAYLDFRSSAGSIIVTHNVSPDTLEKECKNYDVAPIVGYRFCKDFKGFIPSILEDLIETRQKVKRKMKATIDPIEKKMLDYRQRALKILANSYYGYQGYPKARWYSKECAESVTAWGRHYIETTIKEAEKFGFKVLYADTDGFFATIPNEKPETIKSKAKKFLKHINEKLPGMLELEYEGFYLRGFFVTKKKYALIDEDGHITTRGLEVVRRDWSEIAKETQAKVLEVILREGSIEKAAGIVKKVVEDLANYRVPVEKLIIHEQITRELKRYKATGPHVAIAKRLQARGIKVKPGTIISYVVLKGSKKISDRVILFDEYDSSRHKYDPDYYIHNQVLPAVLRILEAFGYKEKDLEYQRMKQTGLGAWLKMGKK

SEQ ID NO: 1674 - protein, 773 aa, unidentified
  REGION 1..773: note = Description of Unknown: Synthetic polypeptide
MILDTDYITENGKPVIRIFKKEKGEFKIEYDRNFEPYIYALLEDDESIEDIKKITGERHGKKVRIIRVEKVKKKFLGEPIEVWKLVFEHPQDYPAIRDAIRSHPAVREIFEYDIPFAKRYLIDKGLVPMEGGEELKLLAFAIATFYHEGDEFAEGEILMISYADESGAKVITWKKIDLPYVEVVSTEREAIKRFLQVLREKDPDVLLTYNGDNFDFAYIKKRCEKLGLKFTIGRDGSEPKIQRMGDRFAVEVKGRIHLDLAPVVRHTIRLPTYTLEAVYEAVFGKKKEKVYAEEIAEAWKSEEGLKRVAQYSMEDARATYELGREFFPMEVELAKLIGQSVWDVSRSSTGNLVEWYLLRVAYERNELAPNKPGGEEYQRRMRSSYIGGYVKEPEKGLWESIAYLDFRSSAGSIIVTHNVSPDTLEKECKNYDVAPIVGYRFCKDFKGFIPSILEDLIETRQKVKRKMKATIDPIEKKMLDYRQRALKILANSYYGYQGYPKARWYSKECAESVTAWGRHYIETTIKEAEKFGFKVLYADTDGFFATIPNEKPETIKSKAKKFLKHINEKLPGMLELEYEGFYLRGFFVTKKKYALIDEDGHITTRGLEVVRRDWSEIAKETQAKVLEVILRDGSIEKAAGIVKKVVEDLANYRVPVEKLIIHEQITRELKRYKATGPHVAIAKRLQARGIKVKPGTIISYVVLKGSKKISDRVILFDEYDSSRHKYDPDYYIHNQVLPAVLRILEAFGYKEKDLEYQRMKQTGLGAWLKMGKK

SEQ ID NO: 1675 - protein, 773 aa, unidentified
  REGION 1..773: note = Description of Unknown: Synthetic polypeptide
MILDTDYITENGKPVIRIFKKEKGEFKIEYDRNFEPYIYALLEDDESIEDIKKITGERHGKKVRIIRVEKVKKKFLGEPIEVWKLVFEHPQDYPAIRDAIRSHPAVREIFEYDIPFAKRYLIDKGLVPMEGGEELKLLAFNIATFYHEGDEFAEGEILMISYADESGAKVITWKKIDLPYVEVVSTEREAIKRFLQVLREKDPDVLLTYNGDNFDFAYIKKRCEKLGLKFTIGRDGSEPKIQRMGDRFAVEVKGRIHLDLAPVVRHTIRLPTYTLEAVYEAVFGKKKEKVYAEEIAEAWKSEEGLKRVAQYSMEDARATYELGREFFPLEVELAKLIGQSVWDVSRSSTGNLVEWYLLRVAYERNELAPNKPGGEEYQRRMRSSYIGGYVKEPEKGLWESIAYLDFRSSAGSIIVTHNVSPDTLEKECKNYDVAPEVGYRFCKDFKGFIPSILEDLIETRQKVKRKMKATIDPIEKKMLDYRQRALKILANSYYGYQGYPKARWYSKECAESVTAWGRHYIETTIKEAEKFGFKVLYADTDGFFATIPNEKPETIKSKAKKFLKHINEKLPGMLELEYEGFYLRGFFVTKKKYALIDEDGHITTRGLEVVRRDWSEIAKETQAKVLEVILREGSIEKAAGIVKKVVEDLANYRVPVEKLIIHEQITRELKRYKATGPHVAIAKRLQARGIKVKPGTIISYVVLKGSKKISDRVILFDEYDSSRHKYDPDYYIHNQVLPAVLRILEAFGYKEKDLEYQRMKQTGLGAWLKMGKK

SEQ ID NO: 1676 - protein, 773 aa, unidentified
  REGION 1..773: note = Description of Unknown: Synthetic polypeptide
MILDTDYITENGKPVIRIFKKEKGEFKIEYDRNFEPYIYALLEDDESIEDIKKITGERHGKKVRIIRVEKVKKKFLGEPIEVWKLVFEHPQDYPAIRDAIRSHPAVREIFEYDIPFAKRYLIDKGLVPMEGGEELKLLAFAIATFYHEGDEFAEGEILMISYADESGAKVITWKKIDLPYVEVVSTEREAIKRFLQVLREKDPDVLLTYNGDNFDFAYIKKRCEKLGLKFTIGRDGSEPKIQRMGDRFAVEVKGRIHLDLFPVVRHTIRLPTYTLEAVYEAVFGKKKEKVYAEEIAEAWKSEEGLKRVAQYSMEDARATYELGREFFPMEVELAKLIGQSVWDVSRSSTGNLVEWYLLRVAYERNELAPNKPGGEEYQRRMRSSYIGGYVKEPEKGLWESIAYLDFRSSAGSIIVTHNVSPDTLEKECKNYDVAPIVGYRFCKDFKGFIPSILEDLIETRQKVKRKMKATIDPIEKKMLDYRQRALKILANSYYGYQGYPKARWYSKECAESVTAWGRHYIETTIKEAEKFGFKVLYADTDGFFATIPNEKPETIKSKAKKFLKHINEKLPGMLELEYEGFYLRGFFVTKKKYALIDEDGHITTRGLEVVRRDWSEIAKETQAKVLEVILREGSIEKAAGIVKKVVEDLANYRVPVEKLIIHEQITRELKRYKATGPHVAIAKRLQARGIKVKPGTIISYVVLKGSKKISDRVILFDEYDSSRHKYDPDYYIHNQVLPAVLRILEAFGYKEKDLEYQRMKQTGLGAWLKMGKK

SEQ ID NO: 1677 - protein, 773 aa, unidentified
  REGION 1..773: note = Description of Unknown: Synthetic polypeptide
MILDTDYITENGKPVIRIFKKEKGEFKIEYDRNFEPYIYALLEDDESIEDIKKITGERHGKKVRIIRVEKVKKKFLGEPIEVWKLVFEHPQDYPAIRDAIRSHPAVREIFEYDIPFAKRYLIDKGLVPMEGGEELKLLAFAIATFYHEGDEFAEGEILMISYADESGAKVITWKKIDLPYVEVVSTEREAIKRFLQVLREKDPDVLLTYNGDNFDFAYIKKRCEKLGLKFTIGRDGSEPKIQRMGDRFAVEVKGRIHLDLAPVVRHTIRLPTYTLEAVYEAVFGKKKEKVYAEEIAEAWKSEEGLKRVAQYSMEDARATYELGREFFPMEVELAKLIGQSVWDVSRSSTGNLVEWYLLRVAYERNELAPNKPGGEEYQRRMRSSYIGGYVKEPEKGLWESIAYLDFRSSAGSIIVTHNVSPDTLEKECKNYDVAPIVGYRFCKDFKGFIPSILEDLIETRQKVKRKMKATIDPIEKKLLDYRQRALKILANSYYGYQGYPKARWYSKECAESVTAWGRHYIETTIKEAEKFGFKVLYADTDGFFATIPNEKPETIKSKAKKFLKHINEKLPGMLELEYEGFYLRGFFVTKKKYALIDEDGHITTRGLEVVRRDWSEIAKETQAKVLEVILREGSIEKAAGIVKKVVEDLANYRVPVEKLIIHEQITRELKRYKATGPHVAIAKRLQARGIKVKPGTIISYVVLKGSKKISDRVILFDEYDSSRHKYDPDYYIHNQVLPAVLRILEAFGYKEKDLEYQRMKQTGLGAWLKMGKK

SEQ ID NO: 1678 - protein, 773 aa, unidentified
  REGION 1..773: note = Description of Unknown: Synthetic polypeptide
MILDTDYITENGKPVIRIFKKEKGEFKIEYDRNFEPYIYALLEDDESIEDIKKITGERHGKKVRIIRVEKVKKNFLGEPIEVWKLVFEHPQDYPAIRDAIRSHPAVREIFEYDIPFAKRYLIDKGLVPMEGGEELKLLAFAIATFYHEGEEFAEGEILMISYADESGAKVITWKKIDLPYVEVVSTEREAIKRFLQVLREKDPDVLLTYNGDNFDFAYIKKRCEKLGLKFTIGRDGSEPKIQRMGDRFAVEVKGRIHLDLAPVVRHTIRLPTYTLEAVYEAVFGKKKEKVYAEEIAEAWKSEEGLKRVAQYSMEDARATYELGREFFPMEVELAKLIGQSVWDVSRSSTGNLVEWYLLRVAYERNELAPNKPGGEEYQRRMRSSYIGGYVKEPEKGLWESIAYLDFRSSAGSIIVTHNVSPDTLEKECKNYDVAPIVGYRFCKDFKGFIPSILEDLIETRQKVKRKMKATIDPIEKKMLDYRQRALKILANSYYGYQGYPKARWYSKECAESVTAWGRHYIETTIKEAEKFGFKVLYADTDGFFATIPNEKPETIKSKAKKFLKHINEKLPGMLELEYEGFYLRGFFVTKKKYALIDEDGHITTRGLEVVRRDWSEIAKETQAKVLEVILREGSIEKAAGIVKKVVEDLANYRVPVEKLIIHEQITRELKRYKATGPHVAIAKRLQARGIKVKPGTIISYVVLKGSKKISDRVILFDEYDSSRHKYDPDYYIHNQVLPAVLRILEAFGYKEKDLEYQRMKQTGLGAWLKMGKK

SEQ ID NO: 1679 - protein, 773 aa, unidentified
  REGION 1..773: note = Description of Unknown: Synthetic polypeptide
MILDTDYITENGKPVIRIFKKEKGEFKIEYDRNFEPYIYALLEDDESIEDIKKITGERHGKKVRIIRVEKVKKKFLGEPIEVWKLVFEHPQDYPAIRDAIRSHPAVREIFEYDIPFAKRYLIDKGLVPMEGGEELKLLAFAIATFYHEGDEFAEGEILMISYADESGAKVITWKKIDLPYVEVVSTEREAIKRFLQVLREKDPDVLLTYNGDNFDFAYIKKRCEKLGLKFTIGRDGSEPKIQRMGDRFAVEVKGRIHLDLAPVVRHTIRLPTYTLEAVYEAVFGKKKEKVYAEEIAEAWKSEEGLKRVAQYSMEDARATYELGREFFPMEVELAKLIGQSVWDVSRSSTGNLVEWYLLRVAYERNELAPNKPGGEEYQRRMRSSYIGGYVKEPEKGLWESIAYLDFRSSAGSIIVTHNVSPDTLEKECKNYDVAPIVGYRFCKDFKGFIPSILEDLIETRQKVKRKMKATVDPIEKKMLDYRQRALKILANSYYGYQGYPKARWYSKECAESVTAWGRHYIETTIKEAEKFGFKVLYADTDGFFATIPNEKPETIKSKAKKFLKHINEKLPGMLELEYEGFYLRGFFVTKKKYALIDEDGHITTRGLEVVRRDWSEIAKETQAKVLEVILREGSIEKAAGIVKKVVEDLANYRVPVEKLIIHEQITRELKRYKATGPHVAIAKRLQARGIKVKPGTIISYVVLKGSKKISDRVILFDEYDSSRHKYDPDYYIHNQVLPAVLRILEAFGYKEKDLEYQRMKQTGLGAWLKMGKK

SEQ ID NO: 1680 - protein, 773 aa, unidentified
  REGION 1..773: note = Description of Unknown: Synthetic polypeptide
MILDTDYITENGKPVIRIFKKEKGEFKIEYDRNFEPYIYALLEDDESIEDIKKITGERHGKKVRIIRVEKVKKKFLGEPIEVWKLVFEHPQDYPAIRDAIRSHPAVREIFEYDIPFAKRYLIDKGLVPMEGGEELKLLAFAIATFYHEGDEFAEGEILMISYADESGAKVITWKKIDLPYVEVVSTEREAIKRFLQVLREKDPDVLLTYNGDNFDFAYIKKRCEKLGLKFTIGRDGSEPKIQRMGDRFAVEVKGRIHLDLAPVVRHTIRLPTYTLEAVYEAVFGKKKEKVYAEEIAEAWKSEEGLKRVAQYSMEDARATYELGREFFPMEVELAKLIGQSVWDVSRSSTGNLVEWYLLRVAYERNELAPNKPGGEEYQRRMRSSYIGGYVKEPEKGLWESIAYLDFRSSAGSIIVTHNVSPDTLEKECENYDVAPIVGYRFCKDFKGFIPSILEDLIETRQKVKRKMKATIDPIEKKMLDYRQRALKILANSYYGYQGYPKARWYSKECAESVTAWGRHYIETTIKEAEKFGFKVLYADTDGFFATIPNEKPETIKSKAKKFLKHINEKLPGMLELEYEGFYLRGFFVTKKKYALIDEDGHITTRGLEVVRRDWSEIAKETQAKVLEVILREGSIEKAAGIVKKVVEDLANYRVPVEKLIIHEQITRELKRYKATGPHVAIAKRLQARGIKVKPGTIISYVVLKGSKKISDRVILFDEYDSSRHKYDPDYYIHNQVLPAVLRILEAFGYKEKDLEYQRMKQTGLGAWLKMGKK

SEQ ID NO: 1681 - protein, 773 aa, unidentified
  REGION 1..773: note = Description of Unknown: Synthetic polypeptide
MILDTDYITENGKPVIRIFKKEKGEFKIEYDRNFEPYIYALLEDDESIEDIKKITGERHGKKVRIIRVEKVKKNFLGEPIEVWKLVFEHPQDYPAIRDAIRSHPAVREIFEYDIPFAKRYLIDKGLVPMEGGEELKLLAFAIATFYHEGDEFAEGEILMISYADESGAKVITWKKIDLPYVEVVSTEREAIKRFLQVLREKDPDVLLTYNGDNFDFAYIKKRCEKLGLKFTIGRDGSEPKIQRMGDRFAVEVKGRIHLDLAPVVRHTIRLPTYTLEAVYEAVFGKPKEKVYAEEIAEAWKSEEGLKRVAQYSMEDARATYELGREFFPMEVELAKLIGQSVWDVSRSSTGNLVEWYLLRVAYERNELAPNKPGGEEYQRRMRSSYIGGYVKEPEKGLWESIAYLDFRSSAGSIIVTHNVSPDTLEKECKNYDVAPIVGYRFCKDFKGFIPSILEDLIETRQKVKRKMKATIDPIEKKMLDYRQRALKILANSYYGYQGYPKARWYSKECAESVTAWGRHYIETTIKEAEKFGFKVLYADTDGFFATIPNEKPETIKSKAKKFLKHINEKLPGMLELEYEGFYLRGFFVTKKKYALIDEDGHITTRGLEVVRRDWSEIAKETQAKVLEVILREGSIEKAAGIVKKVVEDLANYRVPVEKLIIHEQITRELKRYKATGPHVAIAKRLQARGIKVKPGTIISYVVLKGSKKISDRVILFDEYDSSRHKYDPDYYIHNQVLPAVLRILEAFGYKEKDLEYQRMKQTGLGAWLKMGKK

SEQ ID NO: 1682 - protein, 773 aa, unidentified
  REGION 1..773: note = Description of Unknown: Synthetic polypeptide
MILDTDYITENGKPVIRIFKKEKGEFKIEYDRNFEPYIYALLEDDESIEDIKKITGERHGKKVRIIRVEKVKKNFLGEPIEVWKLVFEHPQDYPAIRDAIRSHPAVREIFEYDIPFAKRYLIDKGLVPMEGGEELKLLAFAIATFYHEGDEFAEGEILMISYADESGAKVITWKKIDLPYVEVVSTEREAIKRFLQVLREKDPDVLLTYNGDNFDFAYIKKRCEKLGLKFTIGRDGSEPKIQRMGDRFAVEVKGRIHLDLAPVVRHTIRLPTYTLEAVYEAVFGKKKEKVYAEEIAEAWKSEEGLKRVAQYSMEDARATYELGREFFPMEVELAKLIGQSVWDVSRSSTGNLVEWYLLRVAYERNELAPNKPGGEEYQRRMRSSYIGGYVKEPEKGLWESIAYLDFRSSAGSIIVTHNVSPDTLEKECKNYDVAPIVGYRFCKDFKGFIPSILEDLIETRQKVKRKMKATIDPIEKKMLDYRQRALKILANSYYGYQGYPKARWYSKECAESVTAWGRHYIETTIKEAEKFGFKVLYADTDGFFATIPNEKPETIKSKAKKFLKHINEKLPGMLELEYEGFYLRGFFVTKKKYALIDEDGHITTRGLEVVRRDWSEIAKETQARVLEVILREGSIEKAAGIVKKVVEDLANYRVPVEKLIIHEQITRELKRYKATGPHVAIAKRLQARGIKVKPGTIISYVVLKGSKKISDRVILFDEYDSSRHKYDPDYYIHNQVLPAVLRILEAFGYKEKDLEYQRMKQTGLGAWLKMGKK

SEQ ID NO: 1683 - protein, 773 aa, unidentified
  REGION 1..773: note = Description of Unknown: Synthetic polypeptide
MILDTDYITENGKPVIRIFKKEKGEFKIEYDRNFEPYIYALLEDDESIEDIKKITGERHGKKVRIIRVEKVKKNFLGEPIEVWKLVFEHPQDYPAIRDAIRSHPAVREIFEYDIPFAKRYLIDKGLVPMEGGEELKLLAFDIETFYHEGDEFAEGEILMISYADESGAKVITWKKIDLPYVEVVSTEREAIKRFLQVLREKDPDVLLTYNGDNFDFAYIKKRCEKLGLKFTIGRDGSEPKIQRMGDRFAVEVKGRIHLDLAPVVRHTIRLPTYTLEAVYEAVFGKKKEKVYAEEIAEAWKSEEGLKRVAQYSMEDARATYELGREFFPMEVELAKLIGQSVWDVSRSSTGNLVEWYLLRVAYERNELAPNKPGGEEYQRRMRSSYIGGYVKEPEKGLWESIAYLDFRSSAGSIIVTHNVSPDTLEKECKNYDVAPIVGYRFCKDFKGFIPSILEDLIETRQKVKRKMKATIDPIEKKMLDYRQRALKILANSYYGYQGYPKARWYSKECAESVTAWGRHYIETTIKEAEKFGFKVLYADTDGFFATIPNEKPETIKSKAKKFLKHINEKLPGMLELEYEGFYLRGFFVTKKKYALIDEDGHITTRGLEVVRRDWSEIAKETQAKVLEVILREGSIEKAAGIVKKVVEDLANYRVPVEKLIIHEQITRELKRYKATGPHVAIAKRLQARGIKVKPGTIISYVVLKGSKKISDRVILFDEYDSSRHKYDPDYYIHNQVLPAVLRILEAFGYKEKDLEYQRMKQTGLGAWLKMGKK

SEQ ID NO: 1684 - protein, 773 aa, unidentified
  REGION 1..773: note = Description of Unknown: Synthetic polypeptide
MILDTDYITENGKPVIRIFKKEKGEFKIEYDRNFEPYIYALLEDDESIEDIKKITGERHGKKVRIIRVEKVKKNFLGEPIEVWKLVFEHPQDYPAIRDAIRSHPAVREIFEYDIPFAKRYLIDKGLVPMEGGEELKLLAFNIATFYHEGDEFAEGEILMISYADESGAKVITWKKIDLPYVEVVSTEREAIKRFLQVLREKDPDVLLTYNGDNFDFAYIKKRCEKLGLKFTIGRDGSEPKIQRMGDRFAVEVKGRIHLDLAPVVRHTIRLPTYTLEAVYEAVFGKKKEKVYAEEIAEAWKSEEGLKRVAQYSMEDARATYELGREFFPMEVELAKLIGQSVWDVSRSSTGNLVEWYLLRVAYERNELAPNKPGGEEYQRRMRSSYIGGYVKEPEKGLWESIAYLDFRSSAGSIIVTHNVSPDTLEKECKNYDVAPIVGYRFCKDFKGFIPSILEDLIETRQKVKRKMKATIDPIEKKMLDYRQRALKILANSYYGYQGYPKARWYSKECAESVTAWGRHYIETTIKEAEKFGFKVLYADTDGFFATIPNEKPETIKSKAKKFLKHINEKLPGMLELEYEGFYLRGFFVTKKKYALIDEDGHITTRGLEVVRRDWSEIAKETQAKVLEVILRDGSIEKAAGIVKKVVEDLANYRVPVEKLIIHEQITRELKRYKATGPHVAIAKRLQARGIKVKPGTIISYVVLKGSKKISDRVILFDEYDSSRHKYDPDYYIHNQVLPAVLRILEAFGYKEKDLEYQRMKQTGLGAWLKMGKK

SEQ ID NO: 1685 - protein, 773 aa, unidentified
  REGION 1..773: note = Description of Unknown: Synthetic polypeptide
MILDTDYITENGKPVIRIFKKEKGEFKIEYDRNFEPYIYALLEDDESIEDIKKITGERHGKKVRIIRVEKVKKNFLGEPIEVWKLVFEHPQDYPAIRDAIRSHPAVREIFEYDIPFAKRYLIDKGLVPMEGGEELKLLAFAIATFYHEGDEFAEGEILMISYADESGAKVITWKKIDLPYVEVVSTEREAIKRFLQVLREKDPDVLLTYNGDNFDFAYIKKRCEKLGLKFTIGRDGSEPKIQRMGDRFAVEVKGRIHLDLAPVVRHTIRLPTYTLEAVYEAVFGKKKEKVYAEEIAEAWKSEEGLKRVAQYSMEDARATYELGREFFPMEVELAKLIGQSVWDVSRSSTGNLVEWYLLRVAYERNELAPNKPGEEEYQRRMRSSYIGGYVKEPEKGLWESIAYLDFRSSAGSIIVTHNVSPDTLEKECKNYDVAPIVGYRFCKDFKGFIPSILEDLIETRQKVKRKMKATIDPIEKKMLDYRQRALKILANSYYGYQGYPKARWYSKECAESVTAWGRHYIETTIKEAEKFGFKVLYADTDGFFATIPNEKPETIKSKAKKFLKHINEKLPGMLELEYEGFYLRGFFVTKKKYALIDEDGHITTRGLEVVRRDWSEIAKETQAKVLEVILREGSIEKAAGIVKKVVEDLANYRVPVEKLIIHEQITRELKRYKATGPHVAIAKRLQARGIKVKPGTIISYVVLKGSKKISDRVILFDEYDSSRHKYDPDYYIHNQVLPAVLRILEAFGYKEKDLEYQRMKQTGLGAWLKMGKK

SEQ ID NO: 1686 - protein, 773 aa, unidentified; identical to SEQ ID NO: 647
  REGION 1..773: note = Description of Unknown: Synthetic polypeptide

SEQ ID NO: 1687 - protein, 773 aa, unidentified
  REGION 1..773: note = Description of Unknown: Synthetic polypeptide
MILDTDYITENGKPVIRIFKKEKGEFKIEYDRNFEPYIYALLEDDESIEDIKKITGERHGKKVRIIRVEKVKKKFLGEPIEVWKLVFEHPQDYPAIRDAIRSHPAVREIFEYDIPFAKRYLIDKGLVPMEGGEELKLLAFAIATFYHEGDEFAEGEILMISYADESGAKVITWKKIDLPYVEVVSTEREAIKRFLQVLREKDPDVLLTYNGDNFDFAYIKKRCEKLGLKFTIGRDGSEPKIQRMGDRFAVEVKGRIHLDLAPVVRHTIRLPTYTLEAVYEAVFGKKKEKVYAEEIAEAWKSEEGLKRVAQYSMEDARATYELGREFFPMEVELAKLIGQSVWDVSRSSTGNLVEWYLLRVAYERNELAPNKPGGEEYQRRMRSSYIGGYVKEPEKGLWESIAYLDFRSSAGSIIVTHNVSPDTLEKECKNYDVAPIVGYRFCKDFKGFIPSILEDLIETRQKVKRKMKASKDPIEKKMLDYRQRALKILANSYYGYQGYPKARWYSKECAESVTAWGRHYIETTIKEAEKFGFKVLYADTDGFFATIPNEKPETIKSKAKKFLKHINEKLPGMLELEYEGFYLRGFFVTKKKYALIDEDGHITTRGLEVVRRDWSEIAKETQAKVLEVILREGSIEKAAGIVKKVVEDLANYRVPVEKLIIHEQITRELKRYKATGPHVAIAKRLQARGIKVKPGTIISYVVLKGSKKISDRVILFDEYDSSRHKYDPDYYIHNQVLPAVLRILEAFGYKEKDLEYQRMKQTGLGAWLKMGKK

SEQ ID NO: 1688 - protein, 773 aa, unidentified
  REGION 1..773: note = Description of Unknown: Synthetic polypeptide
MILDTDYITENGKPVIRIFKKEKGEFKIEYDRNFEPYIYALLEDDESIEDIKKITGERHGKKVRIIRVEKVKKKFLGEPIEVWKLVFEHPQDYPAIRDAIRSHPAVREIFEYDIPFAKRYLIDKGLVPMEGGEELKLLAFAIATFYHEGDEFAEGEILMISYADESGAKVITWKKIDLPYVEVVSTEREAIKRFLQVLREKDPDVLLTYNGDNFDFAYIKKRCEKLGLKFTIGRDGSEPKIQRMGDRFAVEVKGRIHLDLAPVVRHTIRLPTYTLEAVYEAVFGKKKEKVYAEEIAEAWKSEEGLKRVAQYSMEDARATYELGREFFPMEVELAKLIGQSVWDVSRSSTGNLVEWYLLRVAYERNELAPNKPGGEEYQRRMRSSYIGGYVKEPEKGLWESIAQLDFRSSAGSIIVTHNVSPDTLEKECKNYDVAPIVGYRFCKDFKGFIPSILEDLIETRQKVKRKMKATIDPIEKKMLDYRQRALKILANSYYGYQGYPKARWYSKECAESVTAWGRHYIETTIKEAEKFGFKVLYADTDGFFATIPNEKPETIKSKAKKFLKHINEKLPGMLELEYEGFYLRGFFVTKKKYALIDEDGHITTRGLEVVRRDWSEIAKETQAKVLEVILREGSIEKAAGIVKKVVEDLANYRVPVEKLIIHEQITRELKRYKATGPHVAIAKRLQARGIKVKPGTIISYVVLKGSKKISDRVILFDEYDSSRHKYDPDYYIHNQVLPAVLRILEAFGYKEKDLEYQRMKQTGLGAWLKMGKK

SEQ ID NO: 1689 - protein, 773 aa, unidentified
  REGION 1..773: note = Description of Unknown: Synthetic polypeptide
MILDTDYITENGKPVIRIFKKEKGEFKIEYDRNFEPYIYALLEDDESIEDIKKITGERHGKKVRIIRVEKVKKNFLGRPIEVWKLVFEHPQDYPAIRDAIRSHPAVREIFEYDIPFAKRYLIDKGLVPMEGGEELKLLAFAIATFYHEGDEFAEGEILMISYADESGAKVITWKKIDLPYVEVVSTEREAIKRFLQVLREKDPDVLLTYNGDNFDFAYIKKRCEKLGLKFTIGRDGSEPKIQRMGDRFAVEVKGRIHLDLAPVVRHTIRLPTYTLEAVYEAVFGKKKEKVYAEEIAEAWKSEEGLKRVAQYSMEDARATYELGREFFPMEVELAKLIGQSVWDVSRSSTGNLVEWYLLRVAYERNELAPNKPGGEEYQRRMRSSYIGGYVKEPEKGLWESIAYLDFRSSAGSIIVTHNVSPDTLEKECKNYDVAPIVGYRFCKDFKGFIPSILEDLIETRQKVKRKMKATIDPIEKKMLDYRQRALKILANSYYGYQGYPKARWYSKECAESVTAWGRHYIETTIKEAEKFGFKVLYADTDGFFATIPNEKPETIKSKAKKFLKHINEKLPGMLELEYEGFYLRGFFVTKKKYALIDEDGHITTRGLEVVRRDWSEIAKETQAKVLEVILREGSIEKAAGIVKKVVEDLANYRVPVEKLIIHEQITRELKRYKATGPHVAIAKRLQARGIKVKPGTIISYVVLKGSKKISDRVILFDEYDSSRHKYDPDYYIHNQVLPAVLRILEAFGYKEKDLEYQRMKQTGLGAWLKMGKK

SEQ ID NO: 1690 - protein, 773 aa, unidentified
  REGION 1..773: note = Description of Unknown: Synthetic polypeptide
MILDTDYITENGKPVIRIFKKEKGEFKIEYDRNFEPYIYALLEDDESIEDIKKITGERHGKKVRIIRVEKVKKNFLGEPIEVWKLVFEHPQDYPAIRDAIRSHPAVREIFEYDIPFAKRYLIDKGLVPMEGGEELKLLAFAIATFYHEGDEFAEGEILMISYADESGAKVITWKKIDLPYVEVVSTEREAIKRFLQVLREKDPDVLLTYNGDNFDFAYIKKRCEKLGLKFTIGRDGSEPKIQRMGDRFAVEVKGRIHLDLAPVVRHTIRLPTYTLEAVYEAVFGKKKEKVYAEEIAEAWKSEEGLKRVAQYSMEDARATYELGREFFPMEVELAKLIGQSVWDVSRSSTGNLVEWYLLRVAYERNELAPNKPGGEEYQRRMRSSYIGGYVKEPEKGLWESIAYLDFRSSAGSIIVTHNVSPDTLEKECKNYDVAPIVGYRFCKDFKGFIPSILEDLIETRQKVKRKMKATIDPIEKKMLDYRQRALKILANSYYGYQGYPKARWYSKECAESVTAWGRHYIETTIKEAEKFGFKVLYADTDGFFATIPNEKPETIKSKAKKFLKHINEKLPGMLELEYEGFYLRGFFVTKKKYALIDEDGHITTRGLEVVRRDWSEIAKETQAKVLEVILREGSIEKAAGIVKKVVEDLANYRVPVEKLIIHEQITRELKRYKATGPHVAIAKRLQARGIKVKPGTIISYVVLKGSKKISDRVILFDEYDSSRHKYDPDYYIHNQVLPAVLRILEAFGYREKDLEYQRMKQTGLGAWLKMGKK

SEQ ID NO: 1691 - protein, 773 aa, unidentified
  REGION 1..773: note = Description of Unknown: Synthetic polypeptide
MILDTDYITENGKPVIRIFKKEKGEFKIEYDRNFEPYIYALLEDDESIEDIKKITGERHGKKVRIIRVEKVKKKFLGEPIEVWKLVFEHPQDYPAIRDAIRSHPAVREIFEYDIPFAKRYLIDKGLVPMEGGEELKLLAFAIATFYHEGDEFAEGEILMISYADESGAKVITWKKIDLPYVEVVSTEREAIKRFLQVLREKDPDVLLTYNGDNFDFAYIKKRCEKLGLKFTIGRDGSEPKIQRMGDRFAVEVKGRIHLDLAPVVRHTIRLPTYTLEAVYEAVFGKKKEKVYAEEIAEAWKSEEGLKRVAQYSMEDARATYELGREFFPMEVELAKLIGQSVWDVSRSSTGNLVEWYLLRVAYERNELAPNKPGGEEYQRRMRSSYIGGYVKEPEKGLWESIAYLDFRSSAGSIIVTHNVSPDTLEKECKNYDVAPIVGYRFCKDFKGFIPSILEDLIETRQKVKRKMKATIDPIEKKMLDYRQRALKILANSYYGYQGYPKARWYSKECAESVTAWGRHYIETTIKEAEKFGFKVLYADTDGFFATIPNEKPETIKSKAKKFLKHINEKLPGMLELEYEGFYLRGFFVTKKKYALIDEDGHITTAGLEVVRRDWSEIAKETQAKVLEVILREGSIEKAAGIVKKVVEDLANYRVPVEKLIIHEQITRELKRYKATGPHVAIAKRLQARGIKVKPGTIISYVVLKGSKKISDRVILFDEYDSSRHKYDPDYYIHNQVLPAVLRILEAFGYKEKDLEYQRMKQTGLGAWLKMGKK

SEQ ID NO: 1692 - protein, 773 aa, unidentified
  REGION 1..773: note = Description of Unknown: Synthetic polypeptide
MILDTDYITENGKPVIRIFKKEKGEFKIEYDRNFEPYIYALLEDDESIEDIKKITGERHGKKVRIIRVEKVKKKFLGEPIEVWKLVFEHPQDYPAIRDAIRSHPAVREIFEYDIPFAKRYLIDKGLVPMEGGEELKLLAFAIATFYHEGDEFAEGEILMISYADESGAKVITWKKIDLPYVEVVSTEREAIKRFLQVLREKDPDVLLTYNGDNFDFAYIKKRCEKLGLKFTIGRDGSEPKIQRMGDRFAVEVKGRIHLDLAPVVRHTIRLPTYTLEAVYEAVFGKKKEKVYAEEIAEAWKSEEGLKRVAQYSMEDARATYELGREFFPMEVELAKLIGQSVWDVSRSSTGNLVEWYLLRVAYERNELAPNKPGGEEYQRRMRSSYIGGYVKEPEKGLWESIAYLDFRSSAGSIIVTHNVSPDTLEKECKNYDVAPIVGYRFCKDFKGFIPSILEDLIEERQKVKRKMKATIDPIEKKMLDYRQRALKILANSYYGYQGYPKARWYSKECAESVTAWGRHYIETTIKEAEKFGFKVLYADTDGFFATIPNEKPETIKSKAKKFLKHINEKLPGMLELEYEGFYLRGFFVTKKKYALIDEDGHITTRGLEVVRRDWSEIAKETQAKVLEVILREGSIEKAAGIVKKVVEDLANYRVPVEKLIIHEQITRELKRYKATGPHVAIAKRLQARGIKVKPGTIISYVVLKGSKKISDRVILFDEYDSSRHKYDPDYYIHNQVLPAVLRILEAFGYKEKDLEYQRMKQTGLGAWLKMGKK

SEQ ID NO: 1693 - protein, 773 aa, unidentified
  REGION 1..773: note = Description of Unknown: Synthetic polypeptide
MILDTDYITENGKPVIRIFKKEKGEFKIEYDRNFEPYIYALLEDDESIEDIKKITGERHGKKVRIIRVEKVKKNFLGEPIEVWKLVFEHPQDYPAIRDAIRSHPAVREIFEYDIPFAKRYLIDKGLVPMEGGEELKLLAFNIATFYHEGDEFAEGEILMISYADESGAKVITWKKIDLPYVEVVSTEREAIKRFLQVLREKDPDVLLTYNGDNFDFAYIKKRCEKLGLKFTIGRDGSEPKIQRMGDRFAVEVKGRIHLDLAPVVRHTIRLPTYTLEAVYEAVFGKKKEKVYAEEIAEAWKSEEGLKRVAQYSMEDARATYELGREFFPMEVELAKLIGQSVWDVSRSSTGNLVEWYLLRVAYERNELAPNKPGGEEYQRRMRSSYIGGYVKEPEKGLWESIAYLDFRSSAGSIIVTHNVSPDTLEKECKNYDVAPIVGYRFCKDFKGFIPSILEDLIETRQKVKRKMKATIDPIEKKMLDYRQRALKILANSYYGYQGYPKARWYSKECAESVTAWGRHYIETTIKEAEKFGFKVLYADTDGFFATIPNEKPETIKSKAKKFLKHINEKLPGMLELEYEGFYLRGFFVTKKKYALIDEDGHITTRGLEVVRRDWSEIAKETQAKVLEVILRHGSIEKAAGIVKKVVEDLANYRVPVEKLIIHEQITRELKRYKATGPHVAIAKRLQARGIKVKPGTIISYVVLKGSKKISDRVILFDEYDSSRHKYDPDYYIHNQVLPAVLRILEAFGYKEKDLEYQRMKQTGLGAWLKMGKK

SEQ ID NO: 1694 - protein, 773 aa, unidentified
  REGION 1..773: note = Description of Unknown: Synthetic polypeptide
MILDTDYITENGKPVIRIFKKEKGEFKIEYDRNFEPYIYALLEDDESIEDIKKITGERHGKKVRIIRVEKVKKKFLGEPIEVWKLVFEHPQDYPAIRDAIRSHPAVREIFEYDIPFAKRYLIDKGLVPMEGGEELKLLAFAIATFYHEGDEFAEGEILMISYADESGAKVITWKKIDLPYVEVVSTEREAIKRFLQVLREKDPDVLLTYNGDNFDFAYIKKRCEKLGLKFTIGRDGSEPKIQRMGDRFAVEVKGRIHLDLAPVVRHTIRLPTYTLEAVYEAVFGKKKEKVYAEEIAEAWKSEEGLKRVAQYSMEDARATYELGREFFPMEVELAKLIGQSVWDVSRSSTGNLVEWYLLRVAYERNELAPNKPGGEEYQRRMRSSYIGGYVKEPEKGLWESIAYLDFRSSAGSIIVTHNVSPDTLEKECKNYDVAPIVGYRFCKDFKGFIPSILEDLIETRQKVKRKMKATIDPIEKKMLDYRQRALKILANSYYGYQGYPKARWYSKECAESVTAWGRHYIETTIKEAEKFGFKVLHGIIDGFFATIPNEKPETIKSKAKKFLKHINEKLPGMLELEYEGFYLRGFFVTKKKYALIDEDGHITTRGLEVVRRDWSEIAKETQAKVLEVILREGSIEKAAGIVKKVVEDLANYRVPVEKLIIHEQITRELKRYKATGPHVAIAKRLQARGIKVKPGTIISYVVLKGSKKISDRVILFDEYDSSRHKYDPDYYIHNQVLPAVLRILEAFGYKEKDLEYQRMKQTGLGAWLKMGKK

SEQ ID NO: 1695 - protein, 773 aa, unidentified
  REGION 1..773: note = Description of Unknown: Synthetic polypeptide
MILDTDYITENGKPVIRIFKKEKGEFKIEYDRNFEPYIYALLEDDESIEDIKKITGERHGKKVRIIRVEKVKKKFLGEPIEVWKLVFEHPQDYPAIRDAIRSHPAVREIFEYDIPFAKRYLIDKGLVPMEGGEELKLLAFAIATFYHEGDEFAEGEILMISYADESGAKVITWKKIDLPYVEVVSTEREAIKRFLQVLREKDPDVLLTYNGDNFDFAYIHKRCEKLGLKFTIGRDGSEPKIQRMGDRFAVEVKGRIHLDLAPVVRHTIRLPTYTLEAVYEAVFGKKKEKVYAEEIAEAWKSEEGLKRVAQYSMEDARATYELGREFFPMEVELAKLIGQSVWDVSRSSTGNLVEWYLLRVAYERNELAPNKPGGEEYQRRMRSSYIGGYVKEPEKGLWESIAYLDFRSSAGSIIVTHNVSPDTLEKECKNYDVAPIVGYRFCKDFKGFIPSILEDLIETRQKVKRKMKATIDPIEKKMLDYRQRALKILANSYYGYQGYPKARWYSKECAESVTAWGRHYIETTIKEAEKFGFKVLYADTDGFFATIPNEKPETIKSKAKKFLKHINEKLPGMLELEYEGFYLRGFFVTKKKYALIDEDGHITTRGLEVVRRDWSEIAKETQAKVLEVILREGSIEKAAGIVKKVVEDLANYRVPVEKLIIHEQITRELKRYKATGPHVAIAKRLQARGIKVKPGTIISYVVLKGSKKISDRVILFDEYDSSRHKYDPDYYIHNQVLPAVLRILEAFGYKEKDLEYQRMKQTGLGAWLKMGKK

SEQ ID NO: 1696 - protein, 773 aa, unidentified
  REGION 1..773: note = Description of Unknown: Synthetic polypeptide
MILDTDYITENGKPVIRIFKKEAGEFKIEYDRNFEPYIYALLEDDESIEDIKKITGERHGKKVRIIRVEKVKKNFLGEPIEVWKLVFEHPQDYPAIRDAIRSHPAVREIFEYDIPFAKRYLIDKGLVPMEGGEELKLLAFAIATFYHEGDEFAEGEILMISYADESGAKVITWKKIDLPYVEVVSTEREAIKRFLQVLREKDPDVLLTYNGDNFDFAYIKKRCEKLGLKFTIGRDGSEPKIQRMGDRFAVEVKGRIHLDLAPVVRHTIRLPTYTLEAVYEAVFGKKKEKVYAEEIAEAWKSEEGLKRVAQYSMEDARATYELGREFFPMEVELAKLIGQSVWDVSRSSTGNLVEWYLLRVAYERNELAPNKPGGEEYQRRMRSSYIGGYVKEPEKGLWESIAYLDFRSSAGSIIVTHNVSPDTLEKECKNYDVAPEVGYRFCKDFKGFIPSILEDLIETRQKVKRKMKATIDPIEKKMLDYRQRALKILANSYYGYQGYPKARWYSKECAESVTAWGRHYIETTIKEAEKFGFKVLYADTDGFFATIPNEKPETIKSKAKKFLKHINEKLPGMLELEYEGFYLRGFFVTKKKYALIDEDGHITTRGLEVVRRDWSEIAKETQAKVLEVILREGSIEKAAGIVKKVVEDLANYRVPVEKLIIHEQITRELKRYKATGPHVAIAKRLQARGIKVKPGTIISYVVLKGSKKISDRVILFDEYDSSRHKYDPDYYIHNQVLPAVLRILEAFGYKEKDLEYQRMKQTGLGAWLKMGKK

SEQ ID NO: 1697 - protein, 773 aa, unidentified
  REGION 1..773: note = Description of Unknown: Synthetic polypeptide
MILDTDYITENGKPVIRIFKKEKGEFKIEYDRNFEPYIYALLEDDESIEDIKKITGERHGKKVRIIRVEKVKKNFLGEPIEVWKLVFEHPQDYPAIRDAIRSHPAVREIFEYDIPFAKRYLIDKGLVPMEGGEELKLLAFAIATFYHEGDEFAEGEILMISYADESGAKVITWKKIDLPYVEVVSTEREAIKRFLQVLREKDPDVLLTYNGDNFDFAYIKKRCEKLGLKFTIGRDGSEPKIQRMGDRFAVEVKGRIHLDLAPVVRHTIRLPTYTLEAVYEAVFGKKKEKVYAEEIAEAWKSEEGLKRVAQYSMEDARATYELGREFFPMEVELAKLIGQSVWDVSRSSTGNLVEWYLLRVAYERNELAPNKPGGEEYQRRMRSSYIGGYVKEPEKGLWESIAYLDFRSSAGSIIVTHNVSPDTLEKECKNYDVAPIVGYRFCKDFKGFIPSILEDLIETRQKVKRKMKATIDPIEKKMLDYRQRALKILANSYYGYQGYPKARWYSKECAESVTAWGRHYIETTIKEAEKFGFKVLYADTDGFFATIPNEKPETIKSKAKKFLKHINEKLPGMLELEYEGFYLRGFFVTKKKYALIDEDGHITTRGLEVVRRDWSEIAKETQAKVLEVILREGSIEKAAGIVKKVVKDLANYRVPVEKLIIHEQITRELKRYKATGPHVAIAKRLQARGIKVKPGTIISYVVLKGSKKISDRVILFDEYDSSRHKYDPDYYIHNQVLPAVLRILEAFGYKEKDLEYQRMKQTGLGAWLKMGKK

SEQ ID NO: 1698 - protein, 773 aa, unidentified
  REGION 1..773: note = Description of Unknown: Synthetic polypeptide
MILDTDYITENGKPVIRIFKKEKGEFKIEYDRNFEPYIYALLEDDESIEDIKKITGERHGKKVRIIRVEKVKKKFLGEPIEVWKLVFEHPQDVPAIRDAIRSHPAVREIFEYDIPFAKRYLIDKGLVPMEGGEELKLLAFAIQTFYHEGDEFAEGEILMISYADESGAKVITWKKIDLPYVEVVSTEREAIKRFLQVLREKDPDVLLTYNGDNFDFAYIKKRCEKLGLKFTIGRDGSEPKIQRMGDRFAVEVKGRIHLDLYPVVRHTIRLPTYTLEAVYEAVFGKKKEKVYAEEIAEAWKSEEGLKRVAQYSMEDARATYELGREFFPMEVELAKLIGQSVWDVSRSSTGNLVEWYLLRVAYERNELAPNKPGGEEYQRRMRSSYIGGYVKEPEKGLWESIAYLDFRSLYPSIIVTHNVSPDTLEKECKNYDVAPIVGYRFCKDFKGFIPSILEDLIETRQKVKRKMKATIDPIEKKMLDYRQRALKILANSYYGYQGYPKARWYSKECAESVTAWGRHYIETTIKEAEKFGFKVLYADTDGFFATIPNEKPETIKSKAKKFLKHINEKLPGMLELEYEGFYLRGFFVTKKKYALIDEDGHITTRGLEVVRRDWSEIAKETQAKVLEVILREGSIEKAAGIVKKVVEDLANYRVPVEKLIIHEQITRELKDYKATGPHVAIAKRLQARGIKVKPGTIISYVVLKGSKKISDRVILFDEYDSSRHKYDPDYYIHNQVLPAVLRILEAFGYKEKDLEYQRMKQTGLGAWLKMGKK

SEQ ID NO: 1699 - protein, 773 aa, unidentified
  REGION 1..773: note = Description of Unknown: Synthetic polypeptide
MILDTDYITENGKPVIRIFKKEKGEFKIEYDRNFEPYIYALLEDDESIEEIKKITGERHGKKVRIIRVEKVKKNFLGEPIEVWKLVFEHPQDYPAIRDAIRSHPAVREIFEYDIPFAKRYLIDKGLVPMEGGEELKLLAFAIATFYHEGDEFAEGEILMISYADESGAKVITWKKIDLPYVEVVSTEREAIKRFLQVLREKDPDVLLTYNGDNFDFAYIKKRCEKLGLKFTIGRDGSEPKIQRMGDRFAVEVKGRIHLDLAPVVRHTIRLPTYTLEAVYEAVFGKKKEKVYAEEIAEAWKSEEGLKRVAQYSMEDARATYELGREFFPMEVELAKLIGQSVWDVSRSSTGNLVEWYLLRVAYERNELAPNKPGGEEYQRRMRSSYIGGYVKEPEKGLWESIAYLDFRSSAGSIIVTHNVSPDTLEKECKNYDVAPIVGYRFCKDFKGFIPSILEDLIETRQKVKRKMKATIDPIEKKMLDYRQRALKILANSYYGYQGYPKARWYSKECAESVTAWGRHYIETTIKEAEKFGFKVLYADTDGFFATIPNEKPETIKSKAKKFLKHINEKLPGMLELEYEGFYLRGFFVTKKKYALIDEDGHITTRGLEVVRRDWSEIAKETQAKVLEVILREGSIEKAAGIVKKVVEDLANYRVPVEKLIIHEQITRELKRYKATGPHVAIAKRLQARGIKVKPGTIISYVVLKGSKKISDRVILFDEYDSSRHKYDPDYYIHNQVLPAVLRILEAFGYKEKDLEYQRMKQTGLGAWLKMGKK

SEQ ID NO: 1700 - protein, 773 aa, unidentified
  REGION 1..773: note = Description of Unknown: Synthetic polypeptide
MILDTDYITENGKPVIRIFKKEKGEFKIEYDRNFEPYIYALLEDDESIEDIKKITGERHGKKVRIIRVEKVKKNFLGEPIEVWKLVFEHPQDYPAIRDAIRSHPAVREIYEYDIPFAKRYLIDKGLVPMEGGEELKLLAFAIATFYHEGDEFAEGEILMISYADESGAKVITWKKIDLPYVEVVSTEREAIKRFLQVLREKDPDVLLTYNGDNFDFAYIKKRCEKLGLKFTIGRDGSEPKIQRMGDRFAVEVKGRIHLDLAPVVRHTIRLPTYTLEAVYEAVFGKKKEKVYAEEIAEAWKSEEGLKRVAQYSMEDARATYELGREFFPMEVELAKLIGQSVWDVSRSSTGNLVEWYLLRVAYERNELAPNKPGGEEYQRRMRSSYIGGYVKEPEKGLWESIAYLDFRSSAGSIIVTHNVSPDTLEKECKNYDVAPIVGYRFCKDFKGFIPSILEDLIETRQKVKRKMKATIDPIEKKMLDYRQRALKILANSYYGYQGYPKARWYSKECAESVTAWGRHYIETTIKEAEKFGFKVLYADTDGFFATIPNEKPETIKSKAKKFLKHINEKLPGMLELEYEGFYLRGFFVTKKKYALIDEDGHITTRGLEVVRRDWSEIAKETQAKVLEVILREGSIEKAAGIVKKVVEDLANYRVPVEKLIIHEQITRELKRYKATGPHVAIAKRLQARGIKVKPGTIISYVVLKGSKKISDRVILFDEYDSSRHKYDPDYYIHNQVLPAVLRILEAFGYKEKDLEYQRMKQTGLGAWLKMGKK

SEQ ID NO: 1701 - protein, 773 aa, unidentified
  REGION 1..773: note = Description of Unknown: Synthetic polypeptide
MILDTDYITENGKPVIRIFKKEKGEFKIEYDRNFEPYIYALLEDDESIEDIKKITGERHGKKVRIIRVEKVKKKFLGEPIEVWKLVFEHPQDYPAIRDAIRSHPAVREIFEYDIPFAKRYLIDKGLVPMEGGEELKLLAFAIATFYHEGDEFAEGEILMISYADESGAKVITWKKIDLPYVEVVSTEREAIKRFLQVLREKDPDVLLTYNGDNFDFAYIKKRCEKLGLKFTIGRDGSEPKIQRMGDRFAVEVKGRIHLDLAPVVRHTIRLPTYTLEAVYEAVFGKKKEKVYAEEIAEAWKSEEGLKRVAQYSMEDARATYELGREFFPMEVELAKLIGQSVWDVSRSSTGNLVEWYLLRVAYERNELAPNKPGGEEYQRRMRSSYIGGYVKEPEKGLWESIADLDFRSSAGSIIVTHNVSPDTLEKECKNYDVAPIVGYRFCKDFKGFIPSILEDLIETRQKVKRKMKATIDPIEKKMLDYRQRALKILANSYYGYQGYPKARWYSKECAESVTAWGRHYIETTIKEAEKFGFKVLYADTDGFFATIPNEKPETIKSKAKKFLKHINEKLPGMLELEYEGFYLRGFFVTKKKYALIDEDGHITTRGLEVVRRDWSEIAKETQAKVLEVILREGSIEKAAGIVKKVVEDLANYRVPVEKLIIHEQITRELKRYKATGPHVAIAKRLQARGIKVKPGTIISYVVLKGSKKISDRVILFDEYDSSRHKYDPDYYIHNQVLPAVLRILEAFGYKEKDLEYQRMKQTGLGAWLKMGKK

SEQ ID NO: 1702 - protein, 773 aa, unidentified
  REGION 1..773: note = Description of Unknown: Synthetic polypeptide
MILDTDYITENGKPVIRIFKKEKGEFKIEYDRNFEPYIYALLEDDESIEDIKKITGERHGKKVRIIRVEKVKKNFLGEPIEVWKLVFTHPQDYPAIRDAIRSHPAVREIFEYDIPFAKRYLIDKGLVPMEGGEELKLLAFAIATFYHEGDEFAEGEILMISYADESGAKVITWKKIDLPYVEVVSTEREAIKRFLQVLREKDPDVLLTYNGDNFDFAYIKKRCEKLGLKFTIGRDGSEPKIQRMGDRFAVEVKGRIHLDLAPVVRHTIRLPTYTLEAVYEAVFGKKKEKVYAEEIAEAWKSEEGLKRVAQYSMEDARATYELGREFFPMEVELAKLIGQSVWDVSRSSTGNLVEWYLLRVAYERNELAPNKPGGEEYQRRMRSSYIGGYVKEPEKGLWESIAYLDFRSSAGSIIVTHNVSPDTLEKECKNYDVAPIVGYRFCKDFKGFIPSILEDLIETRQKVKRKMKATIDPIEKKMLDYRQRALKILANSYYGYQGYPKARWYSKECAESVTAWGRHYIETTIKEAEKFGFKVLYADTDGFFATIPNEKPETIKSKAKKFLKHINEKLPGMLELEYEGFYLRGFFVTKKKYALIDEDGHITTRGLEVVRRDWSEIAKETQAKVLEVILREGSIEKAAGIVKKVVEDLANYRVPVEKLIIHEQITRELKRYKATGPHVAIAKRLQARGIKVKPGTIISYVVLKGSKKISDRVILFDEYDSSRHKYDPDYYIHNQVLPAVLRILEAFGYKEKDLEYQRMKQTGLGAWLKMGKK

SEQ ID NO: 1703 - protein, 773 aa, unidentified
  REGION 1..773: note = Description of Unknown: Synthetic polypeptide
MILDTDYITENGKPVIRIFKKEKGEFKIEYDRNFEPYIYALLEDDESIEDIKKITGERHGKKVRIIRVEKVKKKFLGEPIEVWKLVFEHPQDYPAIRDAIRSHPAVREIFEYDIPFAKRYLIDKGLVPMEGGEELKLLAFAIATFYQEGDEFAEGEILMISYADESGAKVITWKKIDLPYVEVVSTEREAIKRFLQVLREKDPDVLLTYNGDNFDFAYIKKRCEKLGLKFTIGRDGSEPKIQRMGDRFAVEVKGRIHLDLAPVVRHTIRLPTYTLEAVYEAVFGKKKEKVYAEEIAEAWKSEEGLKRVAQYSMEDARATYELGREFFPMEVELAKLIGQSVWDVSRSSTGNLVEWYLLRVAYERNELAPNKPGGEEYQRRMRSSYIGGYVKEPEKGLWESIAYLDFRSSAGSIIVTHNVSPDTLEKECKNYDVAPIVGYRFCKDFKGFIPSILEDLIETRQKVKRKMKATIDPIEKKMLDYRQRALKILANSYYGYQGYPKARWYSKECAESVTAWGRHYIETTIKEAEKFGFKVLYADTDGFFATIPNEKPETIKSKAKKFLKHINEKLPGMLELEYEGFYLRGFFVTKKKYALIDEDGHITTRGLEVVRRDWSEIAKETQAKVLEVILREGSIEKAAGIVKKVVEDLANYRVPVEKLIIHEQITRELKRYKATGPHVAIAKRLQARGIKVKPGTIISYVVLKGSKKISDRVILFDEYDSSRHKYDPDYYIHNQVLPAVLRILEAFGYKEKDLEYQRMKQTGLGAWLKMGKK

SEQ ID NO: 1704 - protein, 773 aa, unidentified
  REGION 1..773: note = Description of Unknown: Synthetic polypeptide
MILDTDYITENGKPVIRIFKKEKGEFKIEYDRNFEPYIYALLEDDESIEDIKKITGERHGKKVRIKRVEKVKKNFLGEPIEVWKLVFEHPQDYPAIRDAIRSHPAVREIFEYDIPFAKRYLIDKGLVPMEGGEELKLLAFAIATFYHEGDEFAEGEILMISYADESGAKVITWKKIDLPYVEVVSTEREAIKRFLQVLREKDPDVLLTYNGDNFDFAYIKKRCEKLGLKFTIGRDGSEPKIQRMGDRFAVEVKGRIHLDLAPVVRHTIRLPTYTLEAVYEAVFGKKKEKVYAEEIAEAWKSEEGLKRVAQYSMEDARATYELGREFFPMEVELAKLIGQSVWDVSRSSTGNLVEWYLLRVAYERNELAPNKPGGEEYQRRMRSSYIGGYVKEPEKGLWESIAYLDFRSSAGSIIVTHNVSPDTLEKECKNYDVAPIVGYRFCKDFKGFIPSILEDLIETRQKVKRKMKATIDPIEKKMLDYRQRALKILANSYYGYQGYPKARWYSKECAESVTAWGRHYIETTIKEAEKFGFKVLYADTDGFFATIPNEKPETIKSKAKKFLKHINEKLPGMLELEYEGFYLRGFFVTKKKYALIDEDGHITTRGLEVVRRDWSEIAKETQAKVLEVILREGSIEKAAGIVKKVVEDLANYRVPVEKLIIHEQITRELKRYKATGPHVAIAKRLQARGIKVKPGTIISYVVLKGSKKISDRVILFDEYDSSRHKYDPDYYIHNQVLPAVLRILEAFGYKEKDLEYQRMKQTGLGAWLKMGKK

SEQ ID NO: 1705 - protein, 773 aa, unidentified
  REGION 1..773: note = Description of Unknown: Synthetic polypeptide
MILDTDYITENGKPVIRIFKKEKGEFKIEYDRNFEPYIYALLEDDESIEDIKKITGERHGKKVRIIRVEKVKKKFLGEPIEVWKLVFEHPQDYPAIRDAIRSHPAVREIFEYDIPFAKRYLIDKGLVPMEGGEELKLLAFAIATFYHEGDEFAEGEILMISYADESGAKVITWKKIDLPYVEVVSTEREAIKRFLQVLREKDPDVLLTYNGDNFDFAYIIKRCEKLGLKFTIGRDGSEPKIQRMGDRFAVEVKGRIHLDLAPVVRHTIRLPTYTLEAVYEAVFGKKKEKVYAEEIAEAWKSEEGLKRVAQYSMEDARATYELGREFFPMEVELAKLIGQSVWDVSRSSTGNLVEWYLLRVAYERNELAPNKPGGEEYQRRMRSSYIGGYVKEPEKGLWESIAYLDFRSSAGSIIVTHNVSPDTLEKECKNYDVAPIVGYRFCKDFKGFIPSILEDLIETRQKVKRKMKATIDPIEKKMLDYRQRALKILANSYYGYQGYPKARWYSKECAESVTAWGRHYIETTIKEAEKFGFKVLYADTDGFFATIPNEKPETIKSKAKKFLKHINEKLPGMLELEYEGFYLRGFFVTKKKYALIDEDGHITTRGLEVVRRDWSEIAKETQAKVLEVILREGSIEKAAGIVKKVVEDLANYRVPVEKLIIHEQITRELKRYKATGPHVAIAKRLQARGIKVKPGTIISYVVLKGSKKISDRVILFDEYDSSRHKYDPDYYIHNQVLPAVLRILEAFGYKEKDLEYQRMKQTGLGAWLKMGKK

SEQ ID NO: 1706 - protein, 773 aa, unidentified
  REGION 1..773: note = Description of Unknown: Synthetic polypeptide
MILDTDYITENGKPVIRIFKKEKGEFKIEYDRNFEPYIYALLEDDESIEDIKKITGERHGKKVRIIRVEKVKKNFLGEPIEVWKLVFEHPQDYPAIRDAIRSHPAVVEIFEYDIPFAKRYLIDKGLVPMEGGEELKLLAFAIATFYHEGDEFAEGEILMISYADESGAKVITWKKIDLPYVEVVSTEREAIKRFLQVLREKDPDVLLTYNGDNFDFAYIKKRCEKLGLKFTIGRDGSEPKIQRMGDRFAVEVKGRIHLDLAPVVRHTIRLPTYTLEAVYEAVFGKKKEKVYAEEIAEAWKSEEGLKRVAQYSMEDARATYELGREFFPMEVELAKLIGQSVWDVSRSSTGNLVEWYLLRVAYERNELAPNKPGGEEYQRRMRSSYIGGYVKEPEKGLWESIAYLDFRSSAGSIIVTHNVSPDTLEKECKNYDVAPIVGYRFCKDFKGFIPSILEDLIETRQKVKRKMKATIDPIEKKMLDYRQRALKILANSYYGYQGYPKARWYSKECAESVTAWGRHYIETTIKEAEKFGFKVLYADTDGFFATIPNEKPETIKSKAKKFLKHINEKLPGMLELEYEGFYLRGFFVTKKKYALIDEDGHITTRGLEVVRRDWSEIAKETQAKVLEVILREGSIEKAAGIVKKVVEDLANYRVPVEKLIIHEQITRELKRYKATGPHVAIAKRLQARGIKVKPGTIISYVVLKGSKKISDRVILFDEYDSSRHKYDPDYYIHNQVLPAVLRILEAFGYKEKDLEYQRMKQTGLGAWLKMGKK

SEQ ID NO: 1707 - protein, 773 aa, unidentified
  REGION 1..773: note = Description of Unknown: Synthetic polypeptide
MILDTDYITENGKPVIRIFKKEAGEFKIEYDRNFEPYIYALLEDDESIEDIKKITGERHGKKVRIIRVEKVKKNFLGEPIEVWKLVFEHPQDYPAIRDAIRSHPAVREIFEYDIPFAKRYLIDKGLVPMEGGEELKLLAFNIATFYHEGDEFAEGEILMISYADESGAKVITWKKIDLPYVEVVSTEREAIKRFLQVLREKDPDVLLTYNGDNFDFAYIKKRCEKLGLKFTIGRDGSEPKIQRMGDRFAVEVKGRIHLDLAPVVRHTIRLPTYTLEAVYEAVFGKKKEKVYAEEIAEAWKSEEGLKRVAQYSMEDARATYELGREFFPMEVELAKLIGQSVWDVSRSSTGNLVEWYLLRVAYERNELAPNKPGGEEYQRRMRSSYIGGYVKEPEKGLWESIAYLDFRSSAGSIIVTHNVSPDTLEKECKNYDVAPEVGYRFCKDFKGFIPSILEDLIETRQKVKRKMKATIDPIEKKMLDYRQRALKILANSYYGYQGYPKARWYSKECAESVTAWGRHYIETTIKEAEKFGFKVLYADTDGFFATIPNEKPETIKSKAKKFLKHINEKLPGMLELEYEGFYLRGFFVTKKKYALIDEDGHITTRGLEVVRRDWSEIAKETQAKVLEVILREGSIEKAAGIVKKVVEDLANYRVPVEKLIIHEQITRELKRYKATGPHVAIAKRLQARGIKVKPGTIISYVVLKGSKKISDRVILFDEYDSSRHKYDPDYYIHNQVLPAVLRILEAFGYKEKDLEYQRMKQTGLGAWLKMGKK

SEQ ID NO: 1708 - protein, 773 aa, unidentified
  REGION 1..773: note = Description of Unknown: Synthetic polypeptide
MILDTDYITENGKPVIRIFKKEKGEFKIEYDRNFEPYIYALLEDDESIEDIKKITGERHGKKVRIIRVEKVKKKFLGEPIEVWKLVFEHPQDYPAIRDAIRSHPAVREIFEYDIPFAKRYLIDKGLVPMEGGEELKLLAFAIATFYHEGDEFAEGEILMISYADESGAKVITWKKIDLPYVEVVSTEREAIKRFLQVLREKDPDVLLTYNGDNFDFAYIKKRCEKLGLRFTIGRDGSEPKIQRMGDRFAVEVKGRIHLDLAPVVRHTIRLPTYTLEAVYEAVFGKKKEKVYAEEIAEAWKSEEGLKRVAQYSMEDARATYELGREFFPMEVELAKLIGQSVWDVSRSSTGNLVEWYLLRVAYERNELAPNKPGGEEYQRRMRSSYIGGYVKEPEKGLWESIAYLDFRSSAGSIIVTHNVSPDTLEKECKNYDVAPIVGYRFCKDFKGFIPSILEDLIETRQKVKRKMKATIDPIEKKMLDYRQRALKILANSYYGYQGYPKARWYSKECAESVTAWGRHYIETTIKEAEKFGFKVLYADTDGFFATIPNEKPETIKSKAKKFLKHINEKLPGMLELEYEGFYLRGFFVTKKKYALIDEDGHITTRGLEVVRRDWSEIAKETQAKVLEVILREGSIEKAAGIVKKVVEDLANYRVPVEKLIIHEQITRELKRYKATGPHVAIAKRLQARGIKVKPGTIISYVVLKGSKKISDRVILFDEYDSSRHKYDPDYYIHNQVLPAVLRILEAFGYKEKDLEYQRMKQTGLGAWLKMGKK

SEQ ID NO: 1709 - protein, 773 aa, unidentified
  REGION 1..773: note = Description of Unknown: Synthetic polypeptide
MILDTDYITENGKPVIRIFKKEKGEFKIEYDRNFEPYIYALLEDDESIEDIKKITGERHGKKVRIIRVEKVKKKFLGEPIEVWKLVFEHPQDYPAIRDAIRSHPAVREIFEYDIPFAKRYLIDKGLVPMEGGEELKLLAFAIATFYHEGDEFAEGEILMISYADESGAKVITWKKIDLPYVEVVSTEREAIKRFLQVLREKDPDVLLTYNGDNFDFAYIKKRCEKLGLKFTIGRDGSEPKIQRMGDRFAVEVKGRIHLDLAPVVRHTIYLPTYTLEAVYEAVFGKKKEKVYAEEIAEAWKSEEGLKRVAQYSMEDARATYELGREFFPMEVELAKLIGQSVWDVSRSSTGNLVEWYLLRVAYERNELAPNKPGGEEYQRRMRSSYIGGYVKEPEKGLWESIAYLDFRSSAGSIIVTHNVSPDTLEKECKNYDVAPIVGYRFCKDFKGFIPSILEDLIETRQKVKRKMKATIDPIEKKMLDYRQRALKILANSYYGYQGYPKARWYSKECAESVTAWGRHYIETTIKEAEKFGFKVLYADTDGFFATIPNEKPETIKSKAKKFLKHINEKLPGMLELEYEGFYLRGFFVTKKKYALIDEDGHITTRGLEVVRRDWSEIAKETQAKVLEVILREGSIEKAAGIVKKVVEDLANYRVPVEKLIIHEQITRELKRYKATGPHVAIAKRLQARGIKVKPGTIISYVVLKGSKKISDRVILFDEYDSSRHKYDPDYYIHNQVLPAVLRILEAFGYKEKDLEYQRMKQTGLGAWLKMGKK

SEQ ID NO: 1710 - protein, 773 aa, unidentified
  REGION 1..773: note = Description of Unknown: Synthetic polypeptide
MILDTDYITENGKPVIRIFKKEKGEFKIEYDRNFEPYIYALLEDDESIEDIKKITGERHGKKVRIIRVEKVKKKFLGEPIEVWKLVFEHPQDYPAIRDAIRSHPAVREIFEYDIPFAKRYLIDKGLVPMEGGEELKLLAFAIATFYHEGDEFAEGEILMISYADESGAKVITWKKIDLPYVEVVSTEREAIKRFLQVLREKDPDVLLTYNGDNFDFAYIKKRCEKLGLKFTIGRDGSEPKIQRMGDRFAVEVKGRIHLDLAPVVRHTIRLPTYTLEAVYEAVFGKKKEKVYAEEIAEAWKSEEGLKRVAQYSMEDARATYELGREFFPMEVELAKLIGQSVWDVSRSSTGNLVEWYLLRVAYERNELAPNKPGGEEYQRRMRSSYIGGYVKEPEKGLWESIAYLDFRSSAGSIIVTHNVSPDTLEKECKNYDVAPIVGYRFCKDFKGFIPSILEDLIETRQKVKRKMKATINPIEKKMLDYRQRALKILANSYYGYQGYPKARWYSKECAESVTAWGRHYIETTIKEAEKFGFKVLYADTDGFFATIPNEKPETIKSKAKKFLKHINEKLPGMLELEYEGFYLRGFFVTKKKYALIDEDGHITTRGLEVVRRDWSEIAKETQAKVLEVILREGSIEKAAGIVKKVVEDLANYRVPVEKLIIHEQITRELKRYKATGPHVAIAKRLQARGIKVKPGTIISYVVLKGSKKISDRVILFDEYDSSRHKYDPDYYIHNQVLPAVLRILEAFGYKEKDLEYQRMKQTGLGAWLKMGKK

SEQ ID NO: 1711 - protein, 773 aa, unidentified
  REGION 1..773: note = Description of Unknown: Synthetic polypeptide
MILDTDYITENGKPVIRIFKKEAGEFKIEYDRNFEPYIYALLEDDESIEDIKKITGERHGKKVRIIRVEKVKKKFLGEPIEVWKLVFEHPQDYPAIRDAIRSHPAVREIFEYDIPFAKRYLIDKGLVPMEGGEELKLLAFAIATFYHEGDEFAEGEILMISYADESGAKVITWKKIDLPYVEVVSTEREAIKRFLQVLREKDPDVLLTYNGDNFDFAYIKKRCEKLGLKFTIGRDGSEPKIQRMGDRFAVEVKGRIHLDLAPVVRHTIRLPTYTLEAVYEAVFGKKKEKVYAEEIAEAWKSEEGLKRVAQYSMEDARATYELGREFFPMEVELAKLIGQSVWDVSRSSTGNLVEWYLLRVAYERNELAPNKPGGEEYQRRMRSSYIGGYVKEPEKGLWESIAYLDFRSSAGSIIVTHNVSPDTLEKECKNYDVAPEVGYRFCKDFKGFIPSILEDLIETRQKVKRKMKATIDPIEKKMLDYRQRALKILANSYYGYQGYPKARWYSKECAESVTAWGRHYIETTIKEAEKFGFKVLYADTDGFFATIPNEKPETIKSKAKKFLKHINEKLPGMLELEYEGFYLRGFFVTKKRYALIDEDGHITTRGLEVVRRDWSEIAKETQAKVLEVILREGSIEKAAGIVKKVVEDLANYRVPVEKLIIHEQITRELKRYKATGPHVAIAKRLQARGIKVKPGTIISYVVLKGSKKISDRVILFDEYDSSRHKYDPDYYIHNQVLPAVLRILEAFGYKEKDLEYQRMKQTGLGAWLKMGKK

SEQ ID NO: 1712 - protein, 773 aa, unidentified
  REGION 1..773: note = Description of Unknown: Synthetic polypeptide
MILDTDYITENGKPVIRIFKKEKGEFKIEYDRNFEPYIYALLEDDESIEDIKKITGERHGKKVRIIRVEKVKKKFLGEPIEVWKLVFEHPQDYPAIRDAIRSHPAVREIFEYDIPFAKRYLIDKGLVPMEGGEELKLLAFAIATFYHEGDEFAEGEILMISYADESGAKVITWKKIDLPYVEVVSTEREAIKRFLQVLREKDPDVLLTYNGDNFDFAYIKKRCEKLGLKFTIGRDGSEPKIQRMGDRFAVEVKGRIHLDLAPVVRHTIRLPTYTLEAVYEAVFGKKKEKVYAEEIAEAWKSEEGLKRVAQYSMEDARATYELGREFFPMEVELAKLIGQSVWDVSRSSTGNLVEWYLLRVAYERNELAPNKPGGEEYQRRMRSSYIGGYVKEPEKGLWESIAELDFRSSAGSIIVTHNVSPDTLEKECKNYDVAPIVGYRFCKDFKGFIPSILEDLIETRQKVKRKMKATIDPIEKKMLDYRQRALKILANSYYGYQGYPKARWYSKECAESVTAWGRHYIETTIKEAEKFGFKVLYADTDGFFATIPNEKPETIKSKAKKFLKHINEKLPGMLELEYEGFYLRGFFVTKKKYALIDEDGHITTRGLEVVRRDWSEIAKETQAKVLEVILREGSIEKAAGIVKKVVEDLANYRVPVEKLIIHEQITRELKRYKATGPHVAIAKRLQARGIKVKPGTIISYVVLKGSKKISDRVILFDEYDSSRHKYDPDYYIHNQVLPAVLRILEAFGYKEKDLEYQRMKQTGLGAWLKMGKK

SEQ ID NO: 1713 - protein, 773 aa, unidentified
  REGION 1..773: note = Description of Unknown: Synthetic polypeptide
MILDTDYITENGKPVIRIFKKEKGEFKIEYDRNFEPYIYALLEDDESIEDIKKITGERHGKKVRIIRVEKVKKKFLGEPIEVWKLVFEHPQDVPAIRDAIRSHPAVREIFEYDIPFAKRYLIDKGLVPMEGGEELKLLAFDIETFYHEGDEFAEGEILMISYADESGAKVITWKKIDLPYVEVVSTEREAIKRFLQVLREKDPDVLLTYNGDNFDFAYIKKRCEKLGLKFTIGRDGSEPKIQRMGDRFAVEVKGRIHLDLYPVVRHTIRLPTYTLEAVYEAVFGKKKEKVYAEEIAEAWKSEEGLKRVAQYSMEDARATYELGREFFPMEVELAKLIGQSVWDVSRSSTGNLVEWYLLRVAYERNELAPNKPGGEEYQRRMRSSYIGGYVKEPEKGLWESIAYLDFRSLYGSIIVTHNVSPDTLEKECKNYDVAPIVGYRFCKDFKGFIPSILEDLIETRQKVKRKMKATIDPIEKKMLDYRQRALKILANSYYGYQGYPKARWYSKECAESVTAWGRHYIETTIKEAEKFGFKVLYADTDGFFATIPNEKPETIKSKAKKFLKHINEKLPGMLELEYEGFYLRGFFVTKKKYALIDEDGHITTRGLEVVRRDWSEIAKETQAKVLEVILREGSIEKAAGIVKKVVEDLANYRVPVEKLIIHEQITRELKDYKATGPHVAIAKRLQARGIKVKPGTIISYVVLKGSKKISDRVILFDEYDSSRHKYDPDYYIHNQVLPAVLRILEAFGYKEKDLEYQRMKQTGLGAWLKMGKK

SEQ ID NO: 1714 - protein, 792 aa, unidentified
  REGION 1..792: note = Description of Unknown: Synthetic polypeptide
  source 1..792: note = Euryarchaeota archaeon
MPRILKGFLIDADYETVEGRALIRLFLRGEEGSFVVYDDSFSPYFYALPGDEPERVKERILASGAAEAIQKVEIEEKRLFGTPRVALRITVSHPQDVPRIRERIRRVEGVDLILEHDILFVRRYLIDRGIKPLTWLRLEVEERDGRALLRGVEQLEEEPPELRVAAVDIEVYNPKGAPRSSKDEIIMISVATSDGVEKVLTWREVQGLEQVEVLQDEKEMLLRFAELIKEGDYDVIVGYNTDSFDFPYIRDRLKKLGISLPLGRLDAELEVSRRGALPEARIRGRAHVDLYPIVRRHVKLNSYVLESVVEELLGIKKEKLDGERLFTYWDEGGEKRALLARYALEDARVTLALAEKFLPLYCELSTIVGQSLNDVARMTSGQLVEWLLMRYATPRGELIPNHPAGEEYAARARATYAGGYVREPKRGLVEHIAVFDFRSLYPSIIVSHNIDPSTLIVGNCEENRAPELEYCFSLEREGFIPAILKELIRRRAEIKRELKRSEGDRRRTLSFAEKALKILANSFYGYMGYPRARWYRRECAESVAAFARMYIKQVMRIAEEEFKLEVVYGDTDSLFVVIPPEKRELAQKFLQKVNESMPGIIELEFEGFYRRGLFVTKKRYALLSEDGKMVVKGLEFVRRDWAPIARETQKEVLRILLEEADPEKAARLVRDVIERIRQRRVSLEDITIYTQLTKRIKSYKSLEPHVVAAQKLKERGREVAPGMIIGYIITKGTKGISQRATPVEFARLEDYDPEYYIDNQILPAIQRIFEAIGYTRDYLKEGITQTSLSRWF

SEQ ID NO: 1715 - protein, 789 aa, unidentified
  REGION 1..789: note = Description of Unknown: Synthetic polypeptide
MPRILKGFLIDADFETVEGRALIRLFLRGEEGSFVVYDDSFSPYFYALPGDEPERVKERILASGAAEAIQKVEIEEKRLFGTPRVALRITVSHPQDVPRIRERIRRVEGVDLILELDILFVRRYLIDRGIKPLTWLRLEVEERDGRALLRGVEQLEEEPPELRVAAVAIAVYNPKGAPRSSKDEIIMISVATSDGVEKVLTWREVQGLEQVEVLQDEKEMLLRFAELIKEGDYDVIVGYNTDSFDFPYIRDRLKKLGISLPLGRLDAELEVSRRGALPEARIRGRAHVDLYPIVRRHVKLNSYDLESVVEELLGIKKEKLDGERLFTYWDEGGEKRALLARYALEDARVTLALAEKFLPLYLELSTIVGQSLNDVARMTSGQLVEWLLMRYATPRGELIPNHPAGEEYAARARATYAGGYVREPKRGLVEHIAVFDFRSFGPSIIVSHNIDPSTLIVGNCEENRAPELEYCFSLEREGFIPAILKELIRRRAEIKRELKRSEGDRRRTLSFAEKALKILANSFYGYMGYPRARWYRRECAESVAAFARMYIKQVMRIAEEEFKLEVVYGDTDSLFVVIPPEKRELAQKFLQKVNESMPGIIELEFEGFYRRGLFVTKKRYALLSEDGKMVVKGLEFVRRDWAPIARETQKEVLRILLEEADPEKAARLVRDVIERIRQRRVSLEDITIYTQLTKRIKSYKSLEPHVVAAQKLKERGREVAPGMIIGYIITKGTKGISQRATPVEFARLEDYDPEYYIDNQILPAIQRIFEAIGYTRDYLKEGITQTSLS

SEQ ID NO: 1716 - protein, 792 aa, unidentified
  REGION 1..792: note = Description of Unknown: Synthetic polypeptide
MPRILKGFLIDADFETVEGRALIRLFLRGEEGSFVVYDDSFSPYFYALPGDEPERVKERILASGAAEAIQKVEIEEKRLFGTPRVALRITVSHPQDVPRIRERIRRVEGVDLILEHDILFVRRYLIDRGIKPLTWLRLEVEERDGRALLRGVEQLEEEPPELRVAAVAIAVYNPKGAPRSSKDEIIMISVATSDGVEKVLTWREVQGLEQVEVLQDEKEMLLRFAELIKEGDYDVIVGYNTDSFDFPYIRDRLKKLGISLPLGRLDAELEVSRRGALPEARIRGRAHVDLYPIVRRHVKLNSYVLESVVEELEGIKKEKLDGERLFTYWDEGGEKRALLARYALEDARVTLALAEKFLPLYCELSTIVGQSLNDVARMTSGQLVEWLLMRYATPRGELIPNHPAGEEYAARARATYAGGYVREPKRGLVEHIAVFDFRSFGPSIIVSHNIDPSTLIVGNCEENRAPELEYCFSLEREGFIPAILKELIRRRAEIKRELKRSEGDRRRTLSFAEKALKILANSFYGYMGYPRARWYRRECAESVAAFARMYIKQVMRIAEEEFKLEVVYGDTDSLFVVIPPEKRELAQKFLQKVNESMPGIIELEFEGFYRRGLFVTKKRYALLSEDGKMVVKGLEFVRRDWAPIARETQKEVLRILLEEADPEKAARLVRDVIERIRQRRVSLEDITIYTQLTKRIKSYKSLEPHVVAAQKLKERGREVAPGMIIGYIITKGTKGISQRATPVEFARLEDYDPEYYIDNQILPAIQRIFEAIGYTRDYLKEGITQTSLSRWF

SEQ ID NO: 1717 - protein, 792 aa, unidentified
  REGION 1..792: note = Description of Unknown: Synthetic polypeptide
MPRILKGFLIDADFETVEGRALIRLFLRGEEGSFVVYDDSFSPYFYALPGDEPERVKERILASGAAEAIQKVEIEEKRLFGTPRVALRITVSHPQDVPRIRERIRRVEGVDLILEHDILFVRRYLIDRGIKPLTWLRLEVEERDGRALLRGVEQLEEEPPELRVAAVAIAVYNPKGAPRSSKDEIIMISVATSDGVEKVLTWREVQGLEQVEVLQDEKEMLLRFAELIKEGDYDVIVGYNTDSFDFPYIRDRLKKLGISLPLGRLDAELEVSRRGALPEARIRGRAHVDLYPIVRRHVKLNSYVLESVVEELLGIKKEKLDGERLFTYWDEGGEKRALLARYALEDARVTLALAEKFLPLYCELSTIVGQSLNDVARMTSGQLVEWLLMRYATPRGELIPNHPAGEEYAARARATYAGGYVREPKRGLVEHIAVFDFRSFGPSIIVSHNIDPSTLIVGNCEENRAPELEYCFSLEREGFIPAILKELIRRRAEIKRELKRSEGDRRRTLSFAEKALKILANSFYGYMGYPRARWYRRECAESVAAFARMYIKQVMRIAEEEFKLEVVYGDTDSLFVVIPPEKRELAQKFLQKVNESMPGIIELEFEGFYRRGLFVTKKRYALLSEDGKMVVKGLEFVRRDRAPIARETQKEVLRILLEEADPEKAARLVRDVIERIRQRRVSLEDITIYTQLTKRIKSYKSLEPHVVAAQKLKERGREVAPGMIIGYIITKGTKGISQRATPVEFARLEDYDPEYYIDNQILPAIQRIFEAIGYTRDYLKEGITQTSLSRWF

SEQ ID NO: 1718 - protein, 792 aa, unidentified
  REGION 1..792: note = Description of Unknown: Synthetic polypeptide
MPRILKGFLIDADFETVEGRALIRLFLRGEEGSFVVYDDSFSPYFYALPGDEPERVKERILASGAAEAIQKVEIEEKRLFGTPRVALRITVSHPQDVPRIRERIRRVEGVDLILEHDILFVRRYLIDRGIKPLTWLRLEVEERDGRALLRGVEQLEEEPPELRVAAVAIAVYNPKGAPRSSKDEIIMISVATSDGVEKVLTWREVQGLEQVEVLQDEKEMLLRFAELIKEGDYDVIVGYNTDSFDFPYIRDRLKKLGISLPLGRLDAELEVSRRGALPEARIRGRAHVDLYPIVRRHVKLNSYVLESVVEELLKIKKEKLDGERLFTYWDEGGEKRALLARYALEDARVTLALAEKFLPLYCELSTIVGQSLNDVARMTSGQLVEWLLMRYATPRGELIPNHPAGEEYAARARATYAGGYVREPKRGLVEHIAVFDFRSFGPSIIVSHNIDPSTLIVGNCEENRAPELEYCFSLEREGFIPAILKELIRRRAEIKRELKRSEGDRRRTLSFAEKALKILANSFYGYMGYPRARWYRRECAESVAAFARMYIKQVMRIAEEEFKLEVVYGDTDSLFVVIPPEKRELAQKFLQKVNESMPGIIELEFEGFYRRGLFVTKKRYALLSEDGKMVVKGLEFVRRDWAPIARETQKEVLRILLEEADPEKAARLVRDVIERIRQRRVSLEDITIYTQLTKRIKSYKSLEPHVVAAQKLKERGREVAPGMIIGYIITKGTKGISQRATPVEFARLEDYDPEYYIDNQILPAIQRIFEAIGYTRDYLKEGITQTSLSRWF

SEQ ID NO: 1719 - protein, 789 aa, unidentified
  REGION 1..789: note = Description of Unknown: Synthetic polypeptide
MPRILKGFLIDADFETVEGRALIRLFLRGEEGSFVVYDDSFSPYFYALPGDEPERVKERILASGAAEAIQKVEIEEKRLFGTPRVALRITVSHPQDVPRIRERIRRVEGVDLILEHDILFVRRYLIDRGIKPLTWLRLEVEERDGRALLRGVEQLEEEPPELRVAAVAIAVYNPKGAPRSSKDEIIMISVATSDGVEKVLTWREVQGLEQVEVLQDEKEMLLRFAELIKEGDYDVIVGYNTDSFDFPYIRDRLKKLGISLPLGRLDAELEVSRRGALPEARIRGRAHVDLYPIVRRHVKLNSYDLESVVEELLGIKKEKLDGERLFTYWDEGGEKRALLARYALEDARVTLALAEKFLPLYLELSTIVGQSLNDVARMTSGQLVEWLLMRYATPRGELIPNHPAGEEYAARARATYAGGYVREPKRGLVEHIAVFDFRSFGPSIIVSHNIDPSRLIVGNCEENRAPELEYCFSLEREGFIPAILKELIRRRAEIKRELKRSEGDRRRTLSFAEKALKILANSFYGYMGYPRARWYRRECAESVAAFARMYIKQVMRIAEEEFKLEVVYGDTDSLFVVIPPEKRELAQKFLQKVNESMPGIIELEFEGFYRRGLFVTKKRYALLSEDGKMVVKGLEFVRRDWAPIARETQKEVLRILLEEADPEKAARLVRDVIERIRQRRVSLEDITIYTQLTKRIKSYKSLEPHVVAAQKLKERGREVAPGMIIGYIITKGTKGISQRATPVEFARLRDYDPEYYIDNQILPAIQRIFEAIGYTRDYLKEGITQTSLS

SEQ ID NO: 1720 - protein, 792 aa, unidentified
  REGION 1..792: note = Description of Unknown: Synthetic polypeptide
MPRILKGFLIDADFETVEGRALIRLFLRGEEGSFVVYDDSFSPYFYALPGDEPERVKERILASGAAEAIQKVEIEEKRLFGTPRVALRITVSHPQDVPRIRERIRRVEGVDLILEHDILFVRRYLIDRGIKPLTWLRLEVEERDGRALLRGVEQLEEEPPELRVAAVSIAVYNPKGAPRSSKDEIIMISVATSDGVEKVLTWREVQGLEQVEVLQDEKEMLLRFAELIKEGDYDVIVGYNTDSFDFPYIRDRLKKLGISLPLGRLDAELEVSRRGALPEARIRGRAHVDLYPIVRRHVKLNSYVLESVVEELLGIKKEKLDGERLFTYWDEGGEKRALLARYALEDARVTLALAEKFLPLYCELSTIVGQSLNDVARMTSGQLVEWLLMRYATPRGELIPNHPAGEEYAARARATYAGGYVREPKRGLVEHIAVFDFRSFGPSIIVSHNIDPSTLIVGNCEENRAPELEYCFSLEREGFIPAILKELIRRRAEIKRELKRSEGDRRRTLSFAEKALKILANSFYGYMGYPRARWYRRECAESVAAFARMYIKQVMRIAEEEFKLEVVYGDTDSLFVVIPPEKRELAQKFLQKVNESMPGIIELEFEGFYRRGLFVTKKRYALLSEDGKMVVKGLEFVRRDWAPIARETQKEVLRILLEEADPEKAARLVRDVIERIRQRRVSLEDITIYTQLTKRIKSYKSLEPHVVAAQKLKERGREVAPGMIIGYIITKGTKGISQRATPVEFARLEDYDPEYYIDNQILPAIQRIFEAIGYTRDYLKEGITQTSLSRWF

SEQ ID NO: 1721 - protein, 792 aa, unidentified
  REGION 1..792: note = Description of Unknown: Synthetic polypeptide
MPRILKGFLIDADFETVEGRALIRLFLRGEEGSFVVYDDSFSPYFYALPGDEPERVKERILASGAAEAIQKVEIEEKRLFGTPRVALRITVSHPQDVPRIRERIRRVEGVDLILEHDILFVRRYLIDRGIKPLTWLRLEVEERDGRALLRGVEQLEEEPPELRVAAVAIAVYNPKGAPRSSKDEIIMISVATSDGVEKVLTWREVQGLEQVEVLQDEKEMLLRFAELIKEGDYDVIVGYNTDSFDFPYIRDRLKKLGISLPLGRLDAELEVSRRGALPEARIRGRAHVDLYPIVRRHVKLNSYDLESVVEELLGIKKEKLDGERLFTYWDEGGEKRALLARYALEDARVTLALAEKFLPLYLELSTIVGQSLNDVARMTSGQLVEWLLMRYATPRGELIPNHPAGEEYAARARATYAGGYVREPKRGLVEHIAVFDFRSFGPSIIVSHNIDPSTLIVGNCEENRAPELEYCFSLEDEGFIPAILKELIRRRAEIKRELKRSEGDRRRTLSFAEKALKILANSFYGYMGYPRARWYRRECAESVAAFARMYIKQVMRIAEEEFKLEVVYGDTDSLFVVIPPEKRELAQKFLQKVNESMPGIIELEFEGFYRRGLFVTKKRYALLSEDGKMVVKGLEFVRRDWAPIARETQKEVLRILLEEADPEKAARLVRDVIERIRQRRVSLEDITIYTQLTKRIKSYKSLEPHVVAAQKLKERGREVAPGMIIGYIITKGTKGISQRATPVEFARLEDYDPEYYIDNQILPAIQRIFEAIGYTRDYLKEGITQTSLSRDF

SEQ ID NO: 1722 - protein, 789 aa, unidentified
  REGION 1..789: note = Description of Unknown: Synthetic polypeptide
MPRILKGFLIDADFETVEGRALIRLFLRGEEGSFVVYDDSFSPYFYALPGDEPERVKERILASGAAEAIQKVEIEEKRLFGTPRVALRITVSHPQDVPRIRERIRRVEGVDLILEHDILFVRRYLIDRGIKPLTWLRLEVEERDGRALLRGVEQLEEEPPELRVAAVAIAVYNPKGAPRSSKDEIIMISVATSDGVEKVLTWREVQGLEQVEVLQDEKEMLLRFAELIKEGDYDVIVGYNSDSFDFPYIRDRLKKLGISLPLGRLDAELEVSRRGALPEARIRGRAHVDLYPIVRRHVKLNSYDLESVVEELLGIKKEKLDGERLFTYWDEGGEKRALLARYALEDARVTLALAEKFLPLYLELSTIVGQSLNDVARMTSGQLVEWLLMRYATPRGELIPNHPAGEEYAARARATYAGGYVREPKRGLVEHIAVFDFRSFGPSIIVSHNIDPSTLIVGNCEENRAPELEYCFSLEREGFIPAILKELIRRRAEIKRELKRSEGDRRRTLSFAEKALKILANSFYGYMGYPRARWYRRECAESVAAFARMYIKQVMRIAEEEFKLEVVYGDTDSLFVVIPPEKRELAQKFLQKVNESMPGIIELEFEGFYRRGLFVTKKRYALLSEDGKMVVKGLEFVRRDWAPIARETQKEVLRILLEEADPEKAARLVRDVIERIRQRRVSLEDITIYTQLTKRIKSYKSLEPHVVAAQKLKERGREVAPGMIIGYIITKGTKGISQRATPVEFARLEDYDPEYYIDNQILPAIQRIFEAIGYTRDYLKEGITQTSLS

SEQ ID NO: 1723 - protein, 792 aa, unidentified
  REGION 1..792: note = Description of Unknown: Synthetic polypeptide
MPRILKGFLIDADFETVEGRALIRLFLRGEEGSFVVYDDSFSPYFYALPGDEPERVKERILASGAAEAIQKVEIEEKRLFGTPRVALRITVSHPQDVPRIRERIRRVEGVDLILEHDILFVRRYLIDRGIKPLTWLRLEVEERDGRALLRGVEQLEEEPPELRVAAVAIAVYNPKGAPRSSKDEIIAISVATSDGVEKVLTWREVQGLEQVEVLQDEKEMLLRFAELIKEGDYDVIVGYNTDSFDFPYIRDRLKKLGISLPLGRLDAELEVSRRGALPEARIRGRAHVDLYPIVRRHVKLNSYDLESVVEELLGIKKEKLDGERLFTYWDEGGEKRALLARYALEDARVTLALAEKFLPLYCELSTIVGQSLNDVARMTSGQLVEWLLMRYATPRGELIPNHPAGEEYAARARATYAGGYVREPKRGLVEHIAVFDFRSFGPSIIVSHNIDPSTLIVGNCEENRAPELEYCFSLEREGFIPAILKELIRRRAEIKRELKRSEGDRRRTLSFAEKALKILANSFYGYMGYPRARWYRRECAESVAAFARMYIKQVMRIAEEEFKLEVVYGDTDSLFVVIPPEKRELAQKFLQKVNESMPGIIELEFEGFYRRGLFVTKKRYALLSEDGKMVVKGLEFVRRDWAPIARETQKEVLRILLEEADPEKAARLVRDVIERIRQRRVSLEDITIYTQLTKRIKSYKSLEPHVVAAQKLKERGREVAPGMIIGYIITKGTKGISQRATPVEFARLEDYDPEYYIDNQILPAIQRIFEAIGYTRDYLKEGITQTSLSRWF

SEQ ID NO: 1724 - protein, 792 aa, unidentified
  REGION 1..792: note = Description of Unknown: Synthetic polypeptide
MPRILKGFLIDADFETVEGRALIRLFLRGEEGSFVVYDDSFSPYFYALPGDEPERVKERILASGAAEAIQKVEIEEKRLFGTPRVALRITVSHPQDVPRIRERIRRVEGVDLILEHDILFVRRYLIDRGIKPLTWLRLEVEERDGRALLRGVEQLEEEPPELRVAAVAIAVYNPKGAPRSSKDEIIMISVATSDGVEKVLTWREVQGLEQVEVLQDEKEMLLRFAELIKEGDYDVIVGYNTDSFDFPYIRDRLKKLGISLPLGRLDAELEVSRRGALPEARIRGRAHVDLYPIVRRHVKLNSYDLESVVEELLGIKKEKLDGERLFTYYDEGGEKRALLARYALEDARVTLALAEKFLPLYCELSTIVGQSLNDVARMTSGQLVEWLLMRYATPRGELIPNHPAGEEYAARARATYAGGYVREPKRGLVEHIAVFDFRSFGPSIIVSHNIDPSTLIVGNCEENRAPELEYCFSLEREGFIPAILKELIRRRAEIKRELKRSEGDRRRTLSFAEKALKILANSFYGYMGYPRARWYRRECAESVAAFARMYIKQVMRIAEEEFKLEVVYGDTDSLFVVIPPEKRELAQKFLQKVNESMPGIIELEFEGFYRRGLFVTKKRYALLSEDGKMVVKGLEFVRRDWAPIARETQKEVLRILLEEADPEKAARLVRDVIERIRQRRVSLEDITIYTQLTKRIKSYKSLEPHVVAAQKLKERGREVAPGMIIGYIITKGTKGISQRATPVEFARLEDYDPEYYIDNQILPAIQRIFEAIGYTRDYLKEGITQTSLSRWF

SEQ ID NO: 1725 - protein, 792 aa, unidentified
  REGION 1..792: note = Description of Unknown: Synthetic polypeptide
MPRILKGFLIDADFETVEGRALIRLFLRGEEGSFVVYDDSFSPYFYALPGDEPERVKERILASGAAEAIQKVEIEEKRLFGTPRVALRITVSHPQDVPRIRERIRRVEGVDLILEHDILFVRRYLIDRGIKPLTWLRLEVEERDGRALLRGVEQLEEEPPELRVAAVAIAVYNPKGAPRSSKDEIIMISVATSDGVEKVLTWREVQGLEQVEVLQDEKEMLLRFAELIKEGDYDVIVGYNTDSFDFPYIRDRLKKLGISLPLGRLDAELEVSRRGALPEARIRGRAHVDLYPIVRRHVKLNSYDLESVVEELLGIKKEKLDGERLFTYWDEGGEKRALLARYALEDARVTLALAEKFLPLYCELSTIVGQSLNDVARMTSGQLVEWLLMRYATPRGELIPNHPAGEEYAARARATYAGGYVREPKRGLVEHIAVFDFRSFGPSIIVSHNIDPSTLIVGNCEENRAPELEYCFSLEREGFIPAILKELIRRRAEIKRELKRSEGDRRRTLSFAEKALKILANSFYGYMGYPRARWYRRECAESVAAFARMYIKQVMRIAEEEFKLEVVYGDTDSLFVVIPPEKRELAQKFLQKVNESMPGIIELEFEGFYRRGLFVTKKRYALLSEDGKMVVKGLEFVRRDWAPIARETQKEVLRILLEEADPEKAARLVRDVIERIRQRRVSLEDITIYTQLTKRIKSYKSLEPHVVAAQKLKERGREVAPGMIIGYIITKGTKGISQRATPVEFARLEDYDPEYYIDNQILPAIQRIFEAIGYTRDYLKEGITQTSLSRWF

SEQ ID NO: 1726 - protein, 792 aa, unidentified
  REGION 1..792: note = Description of Unknown: Synthetic polypeptide
MPRILKGFLIDADFETVEGRALIRLFLRGEEGSFVVYDDSFSPYFYALPGDEPERVKERILASGAAEAIQKVEIEEKRLFGTPRVALRITVSHPQDVPRIRERIRRVEGVDLILEHDILFVRRYLIDRGIKPLTWLRLEVEERDGRALLRGVEQLEEEPPELRVAAVAIAVYNPKGAPRSSKDEIIMISVATSDGVEKVLTWREVQGLEQVEVLQDEKEMLLRFAELIKEGDYDVIVGYNTDSFDFPYIRDRLKKLGISLPLGRLDAELEVSRRGALPEARIRGRAHVDLYPIVDRHVKLNSYDLESVVEELLGIKKEKLDGERLFTYWDEGGEKRALLARYALEDARVTLALAEKFLPLYCELSTIVGQSLNDVARMTSGQLVEWLLMRYATPRGELIPNHPAGEEYAARARATYAGGYVREPKRGLVEHIAVFDFRSFGPSIIVSHNIDPSTLIVGNCEENRAPELEYCFSLEREGFIPAILKELIRRRAEIKRELKRSEGDRRRTLSFAEKALKILANSFYGYMGYPRARWYRRECAESVAAFARMYIKQVMRIAEEEFKLEVVYGDTDSLFVVIPPEKRELAQKFLQKVNESMPGIIELEFEGFYRRGLFVTKKRYALLSEDGKMVVKGLEFVRRDWAPIARETQKEVLRILLEEADPEKAARLVRDVIERIRQRRVSLEDITIYTQLTKRIKSYKSLEPHVVAAQKLKERGREVAPGMIIGYIITKGTKGISQRATPVEFARLEDYDPEYYIDNQILPAIQRIFEAIGYTRDYLKEGITQTSLSRWF

SEQ ID NO: 1727 - protein, 792 aa, unidentified
  REGION 1..792: note = Description of Unknown: Synthetic polypeptide
MPRILKGFLIDADFETVEGRALIRLFLRGEEGSFVVYDDSFSPYFYALPGDEPERVKERILASGAAEAIQKVEIEEKRLFGTPRVALRITVSHPQDVPRIRERIRRVEGVDLILEHDILFVRRYLIDRGIKPLTWLRLEVEERDGRALLRGVEQLEEEPPELRVAAVAIAVYNPKGAPRSSKDEIIMISVATSDGVEKVLTWREVQGLEQVEVLQDEKEMLLRFAELIKEGDYDVIVGYNTDSFDFPYIRDRLKKLGISLPLGRLDAELEVSRRGALPEARIRGRAHVDLYPIVRRHVKLNSYDLESVVEELLGIKKEKLDGERLFTYWDEGGEKRALLARYALEDARVTLALAEKFLPLYCELSTIVGQSLNDVARMTSGQLVEWLLMRYATPRGELIPNHPAGEEYAARARATYAGGYVREPKRGLVEHIAVFDFRSFGPSIIVSHNIDPSRLIVGNCEENRAPELEYCFSLEREGFIPAILKELIRRRAEIKRELKRSEGDRRRTLSFAEKALKILANSFYGYMGYPRARWYRRECAESVAAFARMYIKQVMRIAEEEFKLEVVYGDTDSLFVVIPPEKRELAQKFLQKVNESMPGIIELEFEGFYRRGLFVTKKRYALLSEDGKMVVKGLEFVRRDWAPIARETQKEVLRILLEEADPEKAARLVRDVIERIRQRRVSLEDITIYTQLTKRIKSYKSLEPHVVAAQKLKERGREVAPGMIIGYIITKGTKGISQRATPVEFARLEDYDPEYYIDNQILPAIQRIFEAIGYTRDYLKEGITQTSLSRDF

SEQ ID NO: 1728 - protein, 792 aa, unidentified
  REGION 1..792: note = Description of Unknown: Synthetic polypeptide
MPRILKGFLIDADFETVEGRALIRLFLRGEEGSFVVYDDSFSPYFYALPGDEPERVKERILASGAAEAIQKVEIEEKRLFGTPRVALRITVSHPQDVPRIRERIRRVEGVDLILEHDILFVRRYLIDRGIKPLTWLRLEVEERDGRALLRGVEQLEEEPPELRVAAVAIAVYNPKGAPRSSKDEIIMISVATSDGVEKVLTWREVQGLEQVEVLQDEKEMLLRFAELIKEGDYDVIVGYNTDSFDFPYIRDRLKKLGISLPLGRLDAELEVSRRGALPEARIRGRAHVDLYPIVRRHVKLNSYVLESVVEELLGIKKEKLDGERLFTYWDEGGEKRALLARYALEDARVTLALAEKFLPLYSELSTIVGQSLNDVARMTSGQLVEWLLMRYATPRGELIPNHPAGEEYAARARATYAGGYVREPKRGLVEHIAVFDFRSFGPSIIVSHNIDPSTLIVGNCEENRAPELEYCFSLEREGFIPAILKELIRRRAEIKRELKRSEGDRRRTLSFAEKALKILANSFYGYMGYPRARWYRRESAESVAAFARMYIKQVMRIAEEEFKLEVVYGDTDSLFVVIPPEKRELAQKFLQKVNESMPGIIELEFEGFYRRGLFVTKKRYALLSEDGKMVVKGLEFVRRDWAPIARETQKEVLRILLEEADPEKAARLVRDVIERIRQRRVSLEDITIYTQLTKRIKSYKSLEPHVVAAQKLKERGREVAPGMIIGYIITKGTKGISQRATPVEFARLEDYDPEYYIDNQILPAIQRIFEAIGYTRDYLKEGITQTSLSRWF

SEQ ID NO: 1729 - protein, 792 aa, unidentified
  REGION 1..792: note = Description of Unknown: Synthetic polypeptide
MPRILKGFLIDADFETVEGRALIRLFLRGEEGSFVVYDDSFSPYFYALPGDEPERVKERILASGAAVAIQKVEIEEKRLFGTPRVALRITVSHPQDVPRIRERIRRVEGVDLILEHDILFVRRYLIDRGIKPLTWLRLEVEERDGRALLRGVEQLEEEPPELRVAAVAIAVYNPKGAPRSSKDEIIMISVATSDGVEKVLTWREVQGLEQVEVLQDEKEMLLRFAELIKEGDYDVIVGYNTDSFDFPYIRDRLKKLGISLPLGRLDAELEVSRRGALPEARIRGRAHVDLYPIVRRHVKLNSYVLESVVEELLGIKKEKLDGERLFTYWDEGGEKRALLARYALEDARVTLALAEKFLPLYCELSTIVGQSLNDVARMTSGQLVEWLLMRYATPRGELAPNHPAGEEYAARARATYAGGYVREPKRGLVEHIAVFDFRSFGPSIIVSHNIDPSTLIVGNCEENRAPELEYCFSLEREGFIPAILKELIRRRAEIKRELKRSEGDRRRTLSFAEKALKILANSFYGYMGYPRARWYRRECAESVAAFARMYIKQVMRIAEEEFKLEVVYGDTDSLFVVIPPEKRELAQKFLQKVNESMPGIIELEFEGFYRRGLFVTKKRYALLSEDGKMVVKGLEFVRRDWAPIARETQKEVLRILLEEADPEKAARLVRDVIERIRQRRVSLEDITIYTQLTKRIKSYKSLEPHVVAAQKLKERGREVAPGMIIGYIITKGTKGISQRATPVEFARLEDYDPEYYIDNQILPAIQRIFEAIGYTRDYLKEGITQTSLSRWF

SEQ ID NO: 1730 - protein, 792 aa, unidentified
  REGION 1..792: note = Description of Unknown: Synthetic polypeptide
MPRILKGFLIDADFETVEGRALIRLFLRGEEGSFVVYDDSFSPYFYALPGDEPERVKERILASGAAEAIQKVEIEEKRLFGTPRVALRITVSHPQDVPRIRERIRRVEGVDLILEHDILFVRRYLIDRGIKPLTWLRLEVEERDGRALLRGVEQLEEEPPELRVAAVAIAVYNPKGAPRSSKDEIIMISVATSDGVEKVLTWREVQGLEQVEVLQDEKEMLLRFAELIKEGDYDVIVGYNTDSFDFPYIRDRLKKLGISLPLGRLDAELEVSRRGALPEARIRGRAHVDLYPIVRRHVKLNSYVLESVVEELLGIKKEKLDGERLFTYWDEGGEKRALLARYALEDARVTLALAEKFLPLYLELSTIVGQSLNDVARMTSGQLVEWLLMRYATPRGELIPNHPAGEEYAARARATYAGGYVREPKRGLVEHIAVFDFRSFGPSIIVSHNIDPSTLIVGNCEENRAPELEYCFSLEREGFIPAILKELIRRRAEIKRELKRSEGDRRRTLSFAEKALKILANSFYGYMGYPRARWYRRECAESVAAFARMYIKQVMRIAEEERKLEVVYGDTDSLFVVIPPEKRELAQKFLQKVNESMPGIIELEFEGFYRRGLFVTKKRYALLSEDGKMVVKGLEFVRRDWAPIARETQKEVLRILLEEADPEKAARLVRDVIERIRQRRVSLEDITIYTQLTKRIKSYKSLEPHVVAAQKLKERGREVAPGMIIGYIITKGTKGISQRATPVEFARLEDYDPEYYIDNQILPAIQRIFEAIGYTRDYLKEGITQTSLSRWF

SEQ ID NO: 1731 - protein, 792 aa, unidentified
  REGION 1..792: note = Description of Unknown: Synthetic polypeptide
MPRILKGFLIDADFETVEGRALIRLFLRGEEGSFVVYDDSFSPYFYALPGDEPERVKERILASGAAEAIQKVEIEEKRLFGTPRVALRITVSHPQDVPRIRERIRRVEGVDLILEHDILFVRRYLIDRGIKPLTWLRLEVEERDGRALLRGVEQLEEEPPELRVAAVAILVYNPKGAPRSSKDEIIMISVATSDGVEKVLTWREVQGLEQVEVLQDEKEMLLRFAELIKEGDYDVIVGYNTDSFDFPYIRDRLKKLGISLPLGRLDAELEVSRRGALPEARIRGRAHVDLYPIVRRHVKLNSYVLESVVEELLGIKKEKLDGERLFTYWDEGGEKRALLARYALEDARVTLALAEKFLPLYIELSTIVGQSLNDVARMTSGQLVEWLLMRYATPRGELIPNHPAGEEYAARARATYAGGYVREPKRGLVEHIAVFDFRSFGPSIIVSHNIDPSTLIVGNCEENRAPELEYCFSLEREGFIPAILKELIRRRAEIKRELKRSEGDRRRTLSFAEKALKILANSFYGYMGYPRARWYRRESAESVAAFARMYIKQVMRIAEEEFKLEVVYGDTDSLFVVIPPEKRELAQKFLQKVNESMPGIIELEFEGFYRRGLFVTKKRYALLSEDGKMVVKGLEFVRRDWAPIARETQKEVLRILLEEADPEKAARLVRDVIERIRQRRVSLEDITIYTQLTKRIKSYKSLEPHVVAAQKLKERGREVAPGMIIGYIITKGTKGISQRATPVEFARLEDYDPEYYIDNQILPAIQRIFEAIGYTRDYLKEGITQTSLSRWF

SEQ ID NO: 1732 - protein, 792 aa, unidentified
  REGION 1..792: note = Description of Unknown: Synthetic polypeptide
MPRILKGFLIDADFETVEGRALIRLFLRGEEGSFVVYDDSFSPYFYALPGDEPERVKERILASGAAEAIQKVEIEEKRLFGTPRVALRITVSHPQDVPRIRERIRRVEGVDLILEHDILFVRRYLIDRGIKPLTWLRLEVEERDGRALLRGVEQLEEEPPELRVAAVAIAVYNPKGAPRSSKDEIIMISVATSDGVEKVLTWREVQGLEQVEVLQDEKEMLLRFAELIKEGDYDVIVGYNTDSFDFPYIRDRLKKLGISLPLGRLDAELEVSRRGALPEARIRGRAHVDLYPIVRRHVKLNSYDLESVVEELLGIKKEKLDGERLFTYWDEGGEKRALLARYALEDARVTLALAEKFLPLYCELSTIVGQSLNDVARMTSGQLVEWLLMRYATPRGELIPNHPAGEEYAARARATYAGGYVREPKRGLVEHIAVFDFRSFGPSIIVSHNIDPSTLIVGNCEENRAPELEYCFSLEREGFIPAILKELIRRRAEIKRELKRSEGDRRRTLSFAEKALKILAASFYGYMGYPRARWYRRECAESVAAFARMYIKQVMRIAEEEFKLEVVYGDTDSLFVVIPPEKRELAQKFLQKVNESMPGIIELEFEGFYRRGLFVTKKRYALLSEDGKMVVKGLEFVRRDWAPIARETQKEVLRILLEEADPEKAARLVRDVIERIRQRRVSLEDITIYTQLTKRIKSYKSLEPHVVAAQKLKERGREVAPGMIIGYIITKGTKGISQRATPVEFARLEDYDPEYYIDNQILPAIQRIFEAIGYTRDYLKEGITQTSLSRWF

SEQ ID NO: 1733 - protein, 792 aa, unidentified
  REGION 1..792: note = Description of Unknown: Synthetic polypeptide
MPRILKGFLIDADFETVEGRALIRLFLRGEEGSFVVYDDSFSPYFYALPGDEPERVKERILASGAAEAIQKVEIEEKRLFGTPRVALRITVSHPQDVPRIRERIRRVEGVDLILEHDILFVRRYLIDRGIKPLTWLRLEVEERDGRALLRGVEQLEEEPPELRVAAVAIAVYNPKGAPRSSKDEIIMISVATSDGVEKVLTWREVQGLEQVEVLQDEKEMLLRFAELIKEGDYDVIVGYNTDSFDFPYIRDRLKKLGISLPLGRLDAELEVSRRGALPEARIRGRAHVDLYPIVRRHVKLNSYVLESVVEELLGIKKEKLDGERLFTYWDEGGEKRALLARYALEDARVTLALAEKFLPLYCELSTIVGQSLNDVARMTSGQLVEWLLMRYATPRGELIPNHPAGEEYAARARATYAGGYVREPKRGLVEHIAVFDFRSFGPSIIVSHNIDPSTLIVGNCEENRAPELEYCFSLEREGFIPAILKELIRRRAEIKRELKRSEGDRRRTLSFAEKALKILANSFYGYMGYPRARWYRRECAESVAAFARMYIKQVMRIAEEEFKLEVVYGDTDSLFVVIPPEKRELAQKFLQKVNESMPGIIELEFEGFYRRGLFVTKKRYALLSEDGKMVVKGLEFVRRDWAPIARETQKEVLRILLEEADPEKAARLVRDVIERIRQRRVSLEDITIYTSLTKRIKSYKSLEPHVVAAQKLKERGREVAPGMIIGYIITKGTKGISQRATPVEFARLEDYDPEYYIDNQILPAIQRIFEAIGYTRDYLKEGITQTSLSRWF

SEQ ID NO: 1734 - protein, 792 aa, unidentified
  REGION 1..792: note = Description of Unknown: Synthetic polypeptide
MPRILKGFLIDADFETVEGRALIRLFLRGEEGSFVVYDDSFSPYFYALPGDEPERVKERILASGAAEAIQKVEIEEKRLFGTPRVALRITVSHPQDVPRIRERIRRVEGVDLILEHDILFVRRYLIDRGIKPLTWLRLEVEERDGRALLRGVEQLEEEPPELRVAAVAILVYNPKGAPRSSKDEIIMISVATSDGVEKVLTWREVQGLEQVEVLQDEKEMLLRFAELIKEGDYDVIVGYNTDSFDFPYIRDRLKKLGISLPLGRLDAELEVSRRGALPEARIRGRAHVDLYPIVRRHVKLNSYVLESVVEELLGIKKEKLDGERLFTYWDEGGEKRALLARYALEDARVTLALAEKFLPLYSELSTIVGQSLNDVARMTSGQLVEWLLMRYATPRGELIPNHPAGEEYAARARATYAGGYVREPKRGLVEHIAVFDFRSFGPSIIVSHNIDPSTLIVGNCEENRAPELEYCFSLEREGFIPAILKELIRRRAEIKRELKRSEGDRRRTLSFAEKALKILANSFYGYMGYPRARWYRREVAESVAAFARMYIKQVMRIAEEEFKLEVVYGDTDSLFVVIPPEKRELAQKFLQKVNESMPGIIELEFEGFYRRGLFVTKKRYALLSEDGKMVVKGLEFVRRDWAPIARETQKEVLRILLEEADPEKAARLVRDVIERIRQRRVSLEDITIYTQLTKRIKSYKSLEPHVVAAQKLKERGREVAPGMIIGYIITKGTKGISQRATPVEFARLEDYDPEYYIDNQILPAIQRIFEAIGYTRDYLKEGITQTSLSRWF

SEQ ID NO: 1735 - protein, 792 aa, unidentified
  REGION 1..792: note = Description of Unknown: Synthetic polypeptide
MPRILKGFLIDADFETVEGRALIRLFLRGEEGSFVVYDDSFSPYFYALPGDEPERVKERILASGAAEAIQKVEIEEKRLFGTPRVALRITVSHPQDVPRIRERIRRVEGVDLILEHDILFVRRYLIDRGIKPLTWLRLEVEERDGRALLRGVEQLEEEPPELRVAAVAILVYNPKGAPRSSKDEIIMISVATSDGVEKVLTWREVQGLEQVEVLQDEKEMLLRFAELIKEGDYDVIVGYNTDSFDFPYIRDRLKKLGISLPLGRLDAELEVSRRGALPEARIRGRAHVDLYPIVRRHVKLNSYVLESVVEELLGIKKEKLDGERLFTYWDEGGEKRALLARYALEDARVTLALAEKFLPLYAELSTIVGQSLNDVARMTSGQLVEWLLMRYATPRGELIPNHPAGEEYAARARATYAGGYVREPKRGLVEHIAVFDFRSFGPSIIVSHNIDPSTLIVGNCEENRAPELEYCFSLEREGFIPAILKELIRRRAEIKRELKRSEGDRRRTLSFAEKALKILANSFYGYMGYPRARWYRRECAESVAAFARMYIKQVMRIAEEEFKLEVVYGDTDSLFVVIPPEKRELAQKFLQKVNESMPGIIELEFEGFYRRGLFVTKKRYALLSEDGKMVVKGLEFVRRDWAPIARETQKEVLRILLEEADPEKAARLVRDVIERIRQRRVSLEDITIYTQLTKRIKSYKSLEPHVVAAQKLKERGREVAPGMIIGYIITKGTKGISQRATPVEFARLEDYDPEYYIDNQILPAIQRIFEAIGYTRDYLKEGITQTSLSRWF

SEQ ID NO: 1736 - protein, 792 aa, unidentified
  REGION 1..792: note = Description of Unknown: Synthetic polypeptide
MPRILKGFLIDADFETVEGRALIRLFLRGEEGSFVVYDDSFSPYFYALPGDEPERVKERILASGAAEAIQKVEIEEKRLFGTPRVALRITVSHPQDVPRIRERIRRVEGVDLILEHDILFVRRYLIDRGIKPLTWLRLEVEERDGRALLRGVEQLEEEPPELRVAAVAIAVYNPKGAPRSSKDEIIMISVATSDGVEKVLTWREVQGLEQVEVLQDEKEMLLRFAELIKEGDYDVIVGYNTDSFDFPYIRDRLKKLGISLPLGRLDAELEVSRRGALPEARIRGRAHVDLYPIVRRHVKLNSYVLESVVEELLGIKKEKLDGERLFTYWDEGGEKRALLARYALEDARVTLALAEKFLPLYCELSTIVGQSLNDVARMTSGQLVEWLLMRYATPRGELIPNHPAGEEYAARARATYAGGYVREPKRGLVEHIAVFDFRSFGPSIIVSHNIDPSTLIVGNCEENRAPELEYCFSLEREGFIPAILKELIRRRAEIKRELKRSEGDRRRTLSFAEKALKILRNSFYGYMGYPRARWYRRECAESVAAFARMYIKQVMRIAEEEFKLEVVYGDTDSLFVVIPPEKRELAQKFLQKVNESMPGIIELEFEGFYRRGLFVTKKRYALLSEDGKMVVKGLEFVRRDWAPIARETQKEVLRILLEEADPEKAARLVRDVIERIRQRRVSLEDITIYTQLTKRIKSYKSLEPHVVAAQKLKERGREVAPGMIIGYIITKGTKGISQRATPVEFARLEDYDPEYYIDNQILPAIQRIFEAIGYTRDYLKEGITQTSLSRWF

SEQ ID NO: 1737 - protein, 792 aa, unidentified
  REGION 1..792: note = Description of Unknown: Synthetic polypeptide
MPRILKGFLIDADFETVEGRALIRLFLRGEEGSFVVYDDSFSPYFYALPGDEPERVKERILASGAAEAIQKVEIEEKRLFGTPRVALRITVSHPQDVPRIRERIRRVEGVDLNLEHDILFVRRYLIDRGIKPLTWLRLEVEERDGRALLRGVEQLEEEPPELRVAAVAIAVYNPKGAPRSSKDEIIMISVATSDGVEKVLTWREVQGLEQVEVLQDEKEMLLRFAELIKEGDYDVIVGYNTDSFDFPYIRDRLKKLGISLPLGRLDAELEVSRRGALPEARIRGRAHVDLYPIVRRHVKLNSYVLESVVEELLGIKKEKLDGERLFTYWDEGGEKRALLARYALEDARVTLALAEKFLPLYCELSTIVGQSLNDVARMTSGQLVEWLLMRYATPRGELIPNHPAGEEYAARARATYAGGYVREPKRGLVEHIAVFDFRSFGPSIIVSHNIDPSTLIVGNCEENRAPELEYCFSLEREGFIPAILKELIRRRAEIKRELKRSEGDRRRTLSFAEKALKILANSFYGYMGYPRARWYRRECAESVAAFARMYIKQVMRIAEEEFKLEVVYGDTDSLFVVIPPEKRELAQKFLQKVNESMPGIIELEFEGFYRRGLFVTKKRYALLSEDGKMVVKGLEFVRRDWAPIARETQKEVLRILLEEADPEKAARLVRDVIERIRQRRVSLEDITIYTQLTKRIKSYKSLEPHVVAAQKLKERGREVAPGMIIGYIITKGTKGISQRATPVEFARLEDYDPEYYIDNQILPAIQRIFEAIGYTRDYLKEGITQTSLSRWF

SEQ ID NO: 1738 - protein, 792 aa, unidentified
  REGION 1..792: note = Description of Unknown: Synthetic polypeptide
MPRILKGFLIDADFETVEGRALIRLFLRGEEGSFVVYDDSFSPYFYALPGDEPERVKERILASGAAEAIQKVEIEEKRLFGTPRVALRITVSHPQDVPRIRERIRRVEGVDLILEHDILFVRRYLIDRGIKPLTWLRLEVEERDGRALLRGVEQLEEEPPELRVAAVAIAVYNPKGAPRSSKDEIIMISVATSDGVEKVLTWREVQGLEQVEVLQDEKEMLLRFAELIKEGDYDVIVGYNTDSFDFPYIRDRLKKLGISLPLGRLDAELEVSRRGALPEARIRGRAHVDLYPIVRRHVKLNSYDLESVVEELLGIKKEKLDGERLFTYWDEGGEKRALLARYALEDARVTLALAEKFLPLYCELSTIVGQSLNDVARMTSGQLVEWLLMRYATPRGELIPNHPAGEEYAARARATYAGGYVREPKRGLVEHIAVFDFRSFGPSIIVSHNIDPSTLIVGNCEENRAPELEYCFSLEREGFIPAILKELIRRRAEIKRELKRSEGDRRRTLSFAEKALKILANSFYGYMGYPRARWYRRECAESVAAFARVYIKQVMRIAEEEFKLEVVYGDTDSLFVVIPPEKRELAQKFLQKVNESMPGIIELEFEGFYRRGLFVTKKRYALLSEDGKMVVKGLEFVRRDWAPIARETQKEVLRILLEEADPEKAARLVRDVIERIRQRRVSLEDITIYTQLTKRIKSYKSLEPHVVAAQKLKERGREVAPGMIIGYIITKGTKGISQRATPVEFARLEDYDPEYYIDNQILPAIQRIFEAIGYTRDYLKEGITQTSLSRWF

SEQ ID NO: 1739 - protein, 792 aa, unidentified
  REGION 1..792: note = Description of Unknown: Synthetic polypeptide
MPRILKGFLIDADFETVEGRALIRLFLRGEEGSFVVYDDSFSPYFYALPGDEPERVKERILASGAAEAIQKVEIEEKRLFGTPRVALRITVSHPQDVPRIRERIRRVEGVDLILEHDILFVRRYLIDRGIKPLTWLRLEVEERDGRALLRGVEQLEEEPPELRVAAVAIAVYNPKGAPRSSKDEIIMISVATSDGVEKVLTWREVQGLEQVEVLQDEKEMLLRFAELIKEGDYDVIVGYNTDSFDFPYIRDRLKKLGISLPLGRLDAELEVSRRGALPEARIRGRAHVDLYPIVRRHVKLNSYDLESVVEELLGIKKEKLDGERLFTYWDEGGEKRALLARYALEDARVTLALAEKFLPLYCELSTIVGQSLNDVARMTSGQLVEWLLMRYATPRGELIPNHPAGEEYAARARATYAGGYVREPKRGLVEHIAVFDFRSFGPSIIVSHNIDPSTLIVGNCEENRAPELEYCFSLEREGFIPAILKELIRRRAEIKRELKRSEGDRRRTLSFAEKALKILAKSFYGYMGYPRARWYRRECAESVAAFARMYIKQVMRIAEEEFKLEVVYGDTDSLFVVIPPEKRELAQKFLQKVNESMPGIIELEFEGFYRRGLFVTKKRYALLSEDGKMVVKGLEFVRRDWAPIARETQKEVLRILLEEADPEKAARLVRDVIERIRQRRVSLEDITIYTQLTKRIKSYKSLEPHVVAAQKLKERGREVAPGMIIGYIITKGTKGISQRATPVEFARLEDYDPEYYIDNQILPAIQRIFEAIGYTRDYLKEGITQTSLSRWF

SEQ ID NO: 1740 - protein, 792 aa, unidentified
  REGION 1..792: note = Description of Unknown: Synthetic polypeptide
MPRILKGFLIDADFETVEGRALIRLFLRGEEGSFVVYDDSFSPYFYALPGDEPERVKERILASGAAEAIQKVEIEEKRLFGTPRVALRITVSHPQDVPRIRERIRRVEGVDLILEHDILFVRRYLIDRGIKPLTWLRLEVEERDGRALLRGVEQLEEEPPELRVAAVAIAVYNPKGAPRSSKDEIIMISVATSDGVEKVLTWREVQGLEQVEVLQDEKEMLLRFAELIKEGDYDVIVGYNTDSFDFPYIRDRLKKLGISLPLGRLDAELEVSRRGALPEARIRGRAHVDLYPIVRRHVKLNSYVLESVVEELLGIKKEKLDGERLFTYWDEGGEKRALLARYALEDARVTLALAEKFLPLYCELSTIVGQSLNDVARMTSGQLVEWLLMRYATPRGELAPNHPAGEEYAARARATYAGGYVREPKRGLVEHIAVFDFRSFGPSIIVSHNIDPSTLIVGNCEENRAPELEYCFSLEREGFIPAILKELIRRRAEIKRELKRSEGDRRRTLSFAEKALKILANSFYGYMGYPRARWYRRECAESVAAFARMYIKQVMRIAEEEFKLEVVYGDTDSLFVVIPPEKRELAQKFLQKVNESMPGIIELEFEGFYRRGLFVTKKRYALLSEDGKMVVKGLEFVRRDWAPIARETQKEVLRILLEEADPEKAARLVRDVIERIRQRRVSLEDITIYTQLTKRIKSYKSLEPHVVAAQKLKERGREVAPGMIIGYIITKGTKGISQRATPVEFARLEDYDPEYYIDNQILPAIQRIFEAIGYTRDYLKEGITQTSLSRWF

SEQ ID NO: 1741 - protein, 792 aa, unidentified
  REGION 1..792: note = Description of Unknown: Synthetic polypeptide
MPRILKGFLIDADFETVEGRALIRLFLRGEEGSFVVYDDSFSPYFYALPGDEPERVKERILASGAAEAIQKVEIEEKRLFGTPRVALRITVSHPQDVPRIRERIRRVEGVDLILEHDILFVRRYLIDRGIKPLTWLRLEVEERDGRALLRGVEQLEEEPPELRVAAVAIAVYNPKGAPRSSKDEIIMISVATSDGVEKVLTWREVQGLEQVEVLQDEKEMLLRFAELIKEGDYDVIVGYNTDSFDFPYIRDRLKKLGISLPLGRLDAELEVSRRGALPEARIRGRAHVDLYPIVRRHVKLNSYVLESVVEELLGIKKEKLDGERLFTYWDEGGEKRALLARYALEDARVTLALAEKFLPLYCELSTIVGQSLNDVARMTSGQLVEWLLMRYATPRGELAPNHPAGEEYAARARATYAGGYVREPKRGLVEHIAVFDFRSFGPSIIVSHNIDPSTLIVGNCEENRAPELEYCFSLEREGFIPAILKELIRRRAEIKRELKRSEGDRRRTLSFAEKALKILANSFYGYMGYPRARWYRRECAESVAAFARMYIKQVMRIAEEEFKLEVVYGDTDSLFVVIPPEKRELAQKFLQKVNESMPGIIELEFEGFYRRGLFVTKKRYALLSEDGKMVVKGLEFVRRDWAPIARETQKEVLRILLEEADPEKAARLVRDVIERIRQRRVSLEDITIYTQLTKRIKSYKSLEPHVVAAQKLKERGREVAPGMIIGYIITKGTKGISQRATPVEFARLEDYDPEYYINNQILPAIQRIFEAIGYTRDYLKEGITQTSLSRWF

SEQ ID NO: 1742 - protein, 792 aa, unidentified
  REGION 1..792: note = Description of Unknown: Synthetic polypeptide
MPRILKGFLIDADFETVEGRALIRLFLRGEEGSFVVYDDSFSPYFYALPGDEPERVKERILASGAAEAIQKVEIEEKRLFGTPRVALRITVSHPQDVPRIRERIRRVEGVDLILEHDILFVRRYLIDRGIKPLTWLRLEVEERDGRALLRGVEQLEEEPPELRVAAVAIAVYNPKGAPRSSKDEIIMISVATSDGVEKVLTWREVQGLEQVEVLQDEKEMLLRFAELIKEGDYDVIVGYNTDSFDFPYIRDRLKKLGISLPLGRLDAELEVSRRGALPEARIRGRAHVDLYPIVRRHVKLNSYDLESVVEELLGIKKEKLDGERLFTYWDEGGEKRALLARYALEDARVTLALAEKFLPLYCELSTIVGQSLNDVARMTSGQLVEWLLMRYATPRGELIPNHPAGEEYAARARATYAGGYVREPKRGLVEFIAVFDFRSFGPSIIVSHNIDPSTLIVGNCEENRAPELEYCFSLEREGFIPAILKELIRRRAEIKRELKRSEGDRRRTLSFAEKALKILANSFYGYMGYPRARWYRRECAESVAAFARMYIKQVMRIAEEEFKLEVVYGDTDSLFVVIPPEKRELAQKFLQKVNESMPGIIELEFEGFYRRGLFVTKKRYALLSEDGKMVVKGLEFVRRDWAPIARETQKEVLRILLEEADPEKAARLVRDVIERIRQRRVSLEDITIYTQLTKRIKSYKSLEPHVVAAQKLKERGREVAPGMIIGYIITKGTKGISQRATPVEFARLEDYDPEYYIDNQILPAIQRIFEAIGYTRDYLKEGITQTSLSRWF

SEQ ID NO: 1743 - protein, 791 aa, unidentified
  REGION 1..791: note = Description of Unknown: Synthetic polypeptide
MPRILKGFLIDADFETVEGRALIRLFLRGEEGSFVVYDDSFSPYFYALPGDEPERVKERILASGAAEAIQKVEIEEKRLFGTPRVALRITVSHPQDVPRIRERIRRVEGVDLILEHDILFVRRYLIDRGIKPLTWLRLEVEERDGRALLRGVEQLEEEPPELRVAAVAIAVYNPKGAPRSSKDEIIMISVATSDGVEKVLTWREVQGLEQVEVLQDEKEMLLRFAELIKEGDYDVIVGYNTDSFDFPYIRDRLKKLGISLPLGRLDAELEVSRRGALPEARIRGRAHVDLYPIVRRHVKLNSYVLESVVEELLGIKKEKLVGERLFTYWDEGGEKRALLARYALEDARVTLALAEKFLPLYCLSTIVGQSLNDVARMTSGQLVEWLLMRYATPRGELIPNHPAGEEYAARARATYAGGYVREPKRGLVEHIAVFDFRSFGPSIIVSHNIDPSTLIVGNCEENRAPELEYCFSLEREGFIPAILKELIRRRAEIKRELKRSEGDRRRTLSFAEKALKILANSFYGYMGYPRARWYRRECAESVAAFARMYIKQVMRIAEEEFKLEVVYGDTDSLFVVIPPEKRELAQKFLQKVNESMPGIIELEFEGFYRRGLFVTKKRYALLSEDGKMVVKGLEFVRRDWAPIARETQKEVLRILLEEADPEKAARLVRDVIERIRQRRVSLEDITIYTQLTKRIKSYKSLEPHVVAAQKLKERGREVAPGMIIGYIITKGTKGISQRATPVEFARLEDYDPEYYIDNQILPAIQRIFEAIGYTRDYLKEGITQTSLSRWF

SEQ ID NO: 1744 - protein, 792 aa, unidentified
  REGION 1..792: note = Description of Unknown: Synthetic polypeptide
MPRILKGFLIDADFETVEGRALIRLFLRGEEGSFVVYDDSFSPYFYALPGDEPERVKERILASGAAEAIQKVEIEEKRLFGTPRVALRITVSHPQDVPRIRERIRRVEGVDLILEHDILFVRRYLIDRGIKPLTWLRLEVEERDGRALLRGVEQLEEEPPELRVAAVAIAVYNPKGAPRSSKDEIIMISVATSDGVEKVLTWREVQGLEQVEVLQDEKEMLLRFAELIKEGDYDVIVGYNTDSFDFPYIRDRLKKLGISLPLGRLDAELEVSRRGALPEARIRGRAHVDLYPIVRRHVKLNSYVLESVVEELLGIKKEKLDGERLFTYWDEGGEKRALLARYALEDARVTLALAEKFLPVYCELSTIVGQSLNDVARMTSGQLVEWLLMRYATPRGELIPNHPAGEEYAARARATYAGGYVREPKRGLVEHIAVFDFRSFGPSIIVSHNIDPSTLIVGNCEENRAPELEYCFSLEREGFIPAILKELIRRRAEIKRELKRSEGDRRRTLSFAEKALKILANSFYGYMGYPRARWYRRECAESVAAFARMYIKQVMRIAEEEFKLEVVYGDTDSLFVVIPPEKRELAQKFLQKVNESMPGIIELEFEGFYRRGLFVTKKRYALLSEDGKMVVKGLEFVRRDWAPIARETQKEVLRILLEEADPEKAARLVRDVIERIRQRRVSLEDITIYTQLTKRIKSYKSLEPHVVAAQKLKERGREVAPGMIIGYIITKGTKGISQRATPVEFARLEDYDPEYYIDNQILPAIQRIFEAIGYTRDYLKEGITQTSLSRWF

SEQ ID NO: 1745 - protein, 792 aa, unidentified
  REGION 1..792: note = Description of Unknown: Synthetic polypeptide
MPRILKGFLIDADFETVEGRALIRLFLRGEEGSFVVYDDSFSPYFYALPGDEPERVKERILASGAAEAIQKVEIEEKRLFGTPRVALRITVSHPQDVPRIRERIRRVEGVDLILEHDILFVRRYLIDRGIKPLTWLRLEVEERDGRALLRGVEQLEEEPPELRVAAVAIAVYNPKGAPRSSKDEIIMISVATSDGVEKVLTWREVQGLEQVEVLQDEKEMLLRFAELIKEGDYDVIVGYNTDSFDFPYIRDRLKKLGISLPLGRLDAELEVSRRGALPEARIRGRAHVDLYPIVRRHVKLNSYDLESVVEELLGIKKEKLDGERLFTYWDEGGEKRALLARYALEDARVTLALAEKFLPLYCELSTIVGQSLNDVARMTSGQLVEWLLMRYATPRGELIPNHPAGEEYAARARATYAGGYVREPKRGLVEHIAVFDFRSFGPSIIVSHNICPSTLIVGNCEENRAPELEYCFSLEREGFIPAILKELIRRRAEIKRELKRSEGDRRRTLSFAEKALKILANSFYGYMGYPRARWYRRECAESVAAFARMYIKQVMRIAEEEFKLEVVYGDTDSLFVVIPPEKRELAQKFLQKVNESMPGIIELEFEGFYRRGLFVTKKRYALLSEDGKMVVKGLEFVRRDWAPIARETQKEVLRILLEEADPEKAARLVRDVIERIRQRRVSLEDITIYTQLTKRIKSYKSLEPHVVAAQKLKERGREVAPGMIIGYIITKGTKGISQRATPVEFARLEDYDPEYYIDNQILPAIQRIFEAIGYTRDYLKEGITQTSLSRDF

SEQ ID NO: 1746 - protein, 792 aa, unidentified
  REGION 1..792: note = Description of Unknown: Synthetic polypeptide
MPRILKGFLIDADFETVEGRALIRLFLRGEEGSFVVYDDSFSPYFYALPGDEPERVKERILASGAAEAIQKVEIEEKRLFGTPRVALRITVSHPQDVPRIRERIRRVEGVDLILEHDILFVRRYLIDRGIKPLTWLRLEVEERDGRALLRGVEQLEEEPPELRVAAVAIAVYNPKGAPRSSKDEIIMISVATSDGVEKVLTWREVQGLEQVEVLQDEKEMLLRFAELIKEGDYDVIVGYNTDSFDFPYIRDRLKKLGISLPLGRLDAELEVSRRGALPEARIRGRAHVDLYPIVRRHVKLRSYVLESVVEELLGIKKEKLDGERLFTYWDEGGEKRALLARYALEDARVTLALAEKFLPLYCELSTIVGQSLNDVARMTSGQLVEWLLMRYATPRGELIPNHPAGEEYAARARATYAGGYVREPKRGLVEHIAVFDFRSFGPSIIVSHNIDPSTLIVGNCEENRAPELEYCFSLEREGFIPAILKELIRRRAEIKRELKRSEGDRRRTLSFAEKALKILANSFYGYMGYPRARWYRRECAESVAAFARMYIKQVMRIAEEEFKLEVVYGDTDSLFVVIPPEKRELAQKFLQKVNESMPGIIELEFEGFYRRGLFVTKKRYALLSEDGKMVVKGLEFVRRDWAPIARETQKEVLRILLEEADPEKAARLVRDVIERIRQRRVSLEDITIYTQLTKRIKSYKSLEPHVVAAQKLKERGREVAPGMIIGYIITKGTKGISQRATPVEFARLEDYDPEYYIDNQILPAIQRIFEAIGYTRDYLKEGITQTSLSRWF

SEQ ID NO: 1747 - protein, 792 aa, unidentified
  REGION 1..792: note = Description of Unknown: Synthetic polypeptide
MPRILKGFLIDADFETVEGRALIRLFLRGEEGSFVVYDDSFSPYFYALPGDEPERVKERILASGAAEAIQKVEIEEKRLFGTPRVALRITVSHPQDVPRIRERIRRVEGVDLILEHDILFVRRYLIDRGIKPLTWLRLEVEERDGRALLRGVEQLEEEPPELRVAAVAIAVYNPKGAPRSSKDEIIMISVATSDGVEKVLTWREVQGLEQVEVLQDEKEMLLRFAELTKEGDYDVIVGYNTDSFDFPYIRDRLKKLGISLPLGRLDAELEVSRRGAIPEARIRGRAHVDLYPIVRRHVKLSSYVLESVIEGLLGIKKEKLDGERLFTYWDEGDEKRALLARYALEDARDTLALAEKFLPLYCELSTIVGQSLNDVARMTSGQLVEWLLMRYATPRGELIPNHPAGEEYAARARATYAGGYVREPKRGLVEHIAVFDFRSFGPSIIVSHNIDPSTLIVGNCEENRAPELEYCFSLEREGFIPAILKELIRRRAEIKRELKRSEGDRRRTLSFAEKALKILANSFYGYMGYPRARWYRRECAESVAAFARMYIKQVMRIAEEEFKLEVVYGDTDSLFVVIPPEKRELAQKFLQKVNESMPGIIELEFEGFYRRGLFVTKKRYALLSEDGKMVVKGLEFVRRDWAPIARETQKEVLRILLEEADPEKAARLVRDVIERIRQRRVSLEDITIYTQLTKRIKSYKSLEPHVVAAQKLKERGREVAPGMIIGYIITKGTKGISQRATPVEFARLEDYDPEYYIDNQILPAIQRIFEAIGYTRDYLKEGITQTSLSRWF

SEQ ID NO: 1748 - protein, 792 aa, unidentified
  REGION 1..792: note = Description of Unknown: Synthetic polypeptide
MPRILKGFLIDADFETVEGRALIRLFLRGEEGSFVVYDDSFSPYFYALPGDEPERVKERILASGAAEAIQKVEIEEKRLFGTPRVALRITVSHPQDVPRIRERIRRVEGVDLILEHDILFVRRYLIDRGIKPLTWLRLEVEERDGRALLRGVEQLEEEPPELRVAAVAIAVYNPKGAPRSSKDEIIMISVATSDGVEKVLTWREVQGLEQVEVLQDEKEMLLRFAELIKEGDYDVIVGYNTDSFDFPYIRDRLKKLGISLPLGRLDAELEVSRRGALPEARIRGRAHVDLYPIVRRHVKLNSYDLESVVEELLGIKKEKLDGERLFTYWDEGGEKRALLARYALEDARVTLALAEKFLPLYCELSTIVGQSLNDVARMTSGQLVEWLLMRYATPRGELIPNHPAGEEYAARARATYAGGYVREPKRGLVEHIAVFDFRSFGPSIIVSHNIDPSTLIVGNCEENRAPELEYCFSLEREGFIPAILKELIRRRAEIKRELKRSEGDRRRTLSFAEKALKILANSFYGYMGYPRARWYRRECAESVAAFARMYIRQVMRIAEEEFKLEVVYGDTDSLFVVIPPEKRELAQKFLQKVNESMPGIIELEFEGFYRRGLFVTKKRYALLSEDGKMVVKGLEFVRRDWAPIARETQKEVLRILLEEADPEKAARLVRDVIERIRQRRVSLEDITIYTQLTKRIKSYKSLEPHVVAAQKLKERGREVAPGMIIGYIITKGTKGISQRATPVEFARLEDYDPEYYIDNQILPAIQRIFEAIGYTRDYLKEGITQTSLSRWF

SEQ ID NO: 1749 - protein, 792 aa, unidentified
  REGION 1..792: note = Description of Unknown: Synthetic polypeptide
MPRILKGFLIDADFETVEGRALIRLFLRGEEGSFVVYDDSFSPYFYALPGDEPERVKERILASGAAEAIQKVEIEEKRLFGTPRVALRITVSHPQDVPRIRERIRRVEGVDLILEHDILFVRRYLIDRGIKPLTWLRLEVEERDGRALLRGVEQLEEEPPELRVAAVAIAVYNPKGAPRSSKDEIIMISVATSDGVEKVLTWREVQGLEQVEVLQDEKEMLLRFAELIKEGDYDVIVGYNTDSFDFPYIRDRLKKLGISLPLGRLDAELEVSRRGALPEARIRGRAHVDLYPIVRRHVKLNSYDLESVVEELLGIKKEKLDGERLFTYWDEGGEKRALLARYALEDARVTLALAEKFLPLYCELSTIVGQSLNDVARMTSGQLVEWLLLRYATPRGELIPNHPAGEEYAARARATYAGGYVREPKRGLVEHIAVFDFRSFGPSIIVSHNIDPSTLIVGNCEENRAPELEYCFSLEREGFIPAILKELIRRRAEIKRELKRSEGDRRRTLSFAEKALKILANSFYGYMGYPRARWYRRECAESVAAFARMYIKQVMRIAEEEFKLEVVYGDTDSLFVVIPPEKRELAQKFLQKVNESMPGIIELEFEGFYRRGLFVTKKRYALLSEDGKMVVKGLEFVRRDWAPIARETQKEVLRILLEEADPEKAARLVRDVIERIRQRRVSLEDITIYTQLTKRIKSYKSLEPHVVAAQKLKERGREVAPGMIIGYIITKGTKGISQRATPVEFARLEDYDPEYYIDNQILPAIQRIFEAIGYTRDYLKEGITQTSLSRWF

SEQ ID NO: 1750 - protein, 792 aa, unidentified
  REGION 1..792: note = Description of Unknown: Synthetic polypeptide
MPRILKGFLIDADFETVEGRALIRLFLRGEEGSFVVYDDSFSPYFYALPGDEPERVKERILASGAAEAIQKVEIEEKRLFGTPRVALRITVSHPQDVPRIRERIRRVEGVDLILEHDILFVRRYLIDRGIKPLTWLRLEVEERDGRALLRGVEQLEEEPPELRVAAVAIAVYNPKGAPRSSKDEIIMISVATSDGVEKVLTWREVQGLEQVEVLQDEKEMLLRFAELIKEGDYDVIVGYNTDSFDFPYIRDRLKKLGISLPLGRLDAELEVSRRGALPEARIRGRAHVDLYPIVRRHVKLNSYVLESVVEELLGIKKEKLDGERLFTYWDEGGEKRALLARYALEDARVTLALAEKFLPLYCELSTIVGQSLNDVARMTSGQLVEWLLMRYATPRGELIPNHPAGEEYAARARATYAGGYVREPKRGLVEHIAVFDFRSFGPSIIVSHNIDPSTLIVGNCEENRAPELEYCFSLEREGFIPAILKELIRRRAEIKRELKRSEGDRRRTLSFAEKALKILANSFYGYMGYPRARWYRRECAESVAAFARMYIKQVMRIAEEEFKLEVVYGDTDSLFVVIPPEKRELAQKFLQKVNESMPGIIELEFEGFYRRGLFVTKKRYALLSEDGKMVVKGLEFVRRDWAPIARETQKEVLRILLEEADPEKAARLVRDVIERIRQRRVSLEDITIYTQLTKRIKSYKSLEPHVVAAQKLKERGREVAPGMIIGYIITKGTKGISQRATPVEFARLEDYDPEYYIDNQILPAIQRIFEAIGYTRDYLKEGITQTSLSRWD

SEQ ID NO: 1751 - protein, 792 aa, unidentified
  REGION 1..792: note = Description of Unknown: Synthetic polypeptide
MPRILKGFLIDADFETVEGRALIRLFLRGEEGSFVVYDDSFSPYFYALPGDEPERVKERILASGAAEAIQKVEIEEKRLFGTPRVALRITVSHPQDVPRIRERIRRVEGVDLILEHDIPFVRRYLIDRGIKPLTWLRLEVEERDGRALLRGVEQLEEEPPELRVAAVAIAVYNPKGAPRSSKDEIIMISVATSDGVEKVLTWREVQGLEQVEVLQDEKEMLLRFAELIKEGDYDVIVGYNTDSFDFPYIRDRLKKLGISLPLGRLDAELEVSRRGALPEARIRGRAHVDLYPIVRRHVKLNSYVLESVVEELLGIKKEKLDGERLFTYWDEGGEKRALLARYALEDARVTLALAEKFLPLYCELSTIVGQSLNDVARMTSGQLVEWLLMRYATPRGELIPNHPAGEEYAARARATYAGGYVREPKRGLVEHIAVFDFRSFGPSIIVSHNIDPSTLIVGNCEENRAPELEYCFSLEREGFIPAILKELIRRRAEIKRELKRSEGDRRRTLSFAEKALKILANSFYGYMGYPRARWYRRECAESVAAFARMYIKQVMRIAEEEFKLEVVYGDTDSLFVVIPPEKRELAQKFLQKVNESMPGIIELEFEGFYRRGLFVTKKRYALLSEDGKMVVKGLEFVRRDWAPIARETQKEVLRILLEEADPEKAARLVRDVIERIRQRRVSLEDITIYTQLTKRIKSYKSLEPHVVAAQKLKERGREVAPGMIIGYIITKGTKGISQRATPVEFARLEDYDPEYYIDNQILPAIQRIFEAIGYTRDYLKEGITQTSLSRWF

SEQ ID NO: 1752 - protein, 792 aa, unidentified
  REGION 1..792: note = Description of Unknown: Synthetic polypeptide
MPRILKGFLIDADFETVEGRALIRLFLRGEEGSFVVYDDSFSPYFYALPGDEPERVKERILASGAAEAIQKVEIEEKRLFGTPRVALRITVSHPQDVPRIRERIRRVEGVDLILEHDILFVRRYLIDRGIKPLTWLRLEVEERDGRALLRGVEQLEEEPPELRVAAVAIAVYNPKGAPRSSKDEIIMISVATSDGVEKVLTWREVQGLEQVEVLQDEKEMLLRFAELIKEGDYDVIVGYNTDSFDFPYIRDRLKKLGISLPLGRLDAELEVSRRGALPEARIRGRAHVDLYPIVRRHVKLNSYDLESVVEELLGIKKEKLDGERLFTYVDEGGEKRALLARYALEDARVTLALAEKFLPLYCELSTIVGQSLNDVARMTSGQLVEWLLMRYATPRGELIPNHPAGEEYAARARATYAGGYVREPKRGLVEHIAVFDFRSFGPSIIVSHNIDPSTLIVGNCEENRAPELEYCFSLEREGFIPAILKELIRRRAEIKRELKRSEGDRRRTLSFAEKALKILANSFYGYMGYPRARWYRRECAESVAAFARMYIKQVMRIAEEEFKLEVVYGDTDSLFVVIPPEKRELAQKFLQKVNESMPGIIELEFEGFYRRGLFVTKKRYALLSEDGKMVVKGLEFVRRDWAPIARETQKEVLRILLEEADPEKAARLVRDVIERIRQRRVSLEDITIYTQLTKRIKSYKSLEPHVVAAQKLKERGREVAPGMIIGYIITKGTKGISQRATPVEFARLEDYDPEYYIDNQILPAIQRIFEAIGYTRDYLKEGITQTSLSRWF

SEQ ID NO: 1753 - protein, 792 aa, unidentified
  REGION 1..792: note = Description of Unknown: Synthetic polypeptide
MPRILKGFLIDADFETVEGRALIRLFLRGEEGSFVVYDDSFSPYFYALPGDEPERVKERILASGAAEAIQKVEIEEKRLFGTPRVALRITVSHPQDVPRIRERIRRVEGVDLILEHDILFVRRYLIDRGIKPLTWLRLEVEERDGRALLRGVEQLEEEPPELRVAAVAIAVYNPKGAPRSSKDEIIMISVATSDGVEKVLTWREVQGLEQVEVLQDEKEMLLRFAELIKEGDYDVIVGYNTDSFDFPYIRDRLKKLGISLPLGRLDAELEVSRRGALPEARIRGRAHVDLYPIVRRHVKLNSYVLESVVEELLGIKKEKLDGERLFTYWDEGGEKRALLARYALEDARVTLALAEKFLPLYCELSTIVGQSLNDVARMTSGQLVEWLLMRYATPRGELIPNHPAGEEYAARARATYAGGYVREPKRGLVEHIAVFDFRSFGPSIIVSHNIDPSTLIVGNCEENRAPELEYCFSLEREGFIPAILKELIRRRAEIKRELKRSEGDRRRTLSFAEKALKILANSFYGYMGYPRARWYRRECAESVAAFARMYIKQVMRIAEEEFKLEVVYGDTDSLFVVIPPEKRELAQKFLQKVNESMPGIIELEFEGFYRRGLFVTKKRYALLSEDGKMVVKGLEFVRRDWAPIARETQKEVLRILLEEADPEKAARLVRDVIERIRQRRVSLEDITIYTQLTKRIKSYKSLEPHVVAAQKLKERGREVAPGMIIGYIITKGTKGISQRATPVEFARLEDYDPEYYIDNQILPAIQRIFEAIGYTRDYLKEGITQTSLSRWF

SEQ ID NO: 1754 - protein, 792 aa, unidentified
  REGION 1..792: note = Description of Unknown: Synthetic polypeptide
MPRILKGFLIDADFETVEGRALIRLFLRGEEGSFVVYDDSFSPYFYALPGDEPERVKERILASGAAEAIQKVEIEEKRLFGTPRVALRITVSHPQDVPRIRERIRRVEGVDLILEHDILFVRRYLIDRGIKPLTWLRLEVEERDGRALLRGVEQLEERPPELRVAAVAIAVYNPKGAPRSSKDEIIMISVATSDGVEKVLTWREVQGLEQVEVLQDEKEMLLRFAELIKEGDYDVIVGYNTDSFDFPYIRDRLKKLGISLPLGRLDAELEVSRRGALPEARIRGRAHVDLYPIVRRHVKLNSYVLESVVEELLGIKKEKLDGERLFTYWDEGGEKRALLARYALEDARVTLALAEKFLPLYCELSTIVGQSLNDVARMTSGQLVEWLLMRYATPRGELIPNHPAGEEYAARARATYAGGYVREPKRGLVEHIAVFDFRSFGPSIIVSHNIDPSTLIVGNCEENRAPELEYCFSLEREGFIPAILKELIRRRAEIKRELKRSEGDRRRTLSFAEKALKILANSFYGYMGYPRARWYRRECAESVAAFARMYIKQVMRIAEEEFKLEVVYGDTDSLFVVIPPEKRELAQKFLQKVNESMPGIIELEFEGFYRRGLFVTKKRYALLSEDGKMVVKGLEFVRRDWAPIARETQKEVLRILLEEADPEKAARLVRDVIERIRQRRVSLEDITIYTQLTKRIKSYKSLEPHVVAAQKLKERGREVAPGMIIGYIITKGTKGISQRATPVEFARLEDYDPEYYIDNQILPAIQRIFEAIGYTRDYLKEGITQTSLSRWF

SEQ ID NO: 1755 - protein, 792 aa, unidentified
  REGION 1..792: note = Description of Unknown: Synthetic polypeptide
MPRILKGFLIDADFETVEGRALIRLFLRGEEGSFVVYDDSFSPYFYALPGDEPERVKERILASGAAEAIQKVEIEEKRLFGTPRVALRITVSHPQDVPRIRERIRRVEGVDLILEHDILFVRRYLIDRGIKPLTWLRLEVEERDGRALLRGVEQLEEEPPELRVAAVAIAVYNPKGAPRSSKDEIIMISVATSDGVEKVLTWREVQGLEQVEVLQDEKEMLLRFAELIKEGDYDVIVGYNTDSFDFPYIRDRLKKLGISLPLGRLDAELEVSRRGALPEARIRGRAHVDLYPIVRRHVKLNSYDLESVVEELLGIKKEKLDGERLFTYWDEGGEKRALLARYALEDARVTLALAEKFLPLYCELSTIVGQSLNDVARMTSGQLVEWLLMRYATPRGELIPNHPAGEEYAARARATYAGGYVREPKRGLVEHIAVFDFRSFGPSIIVSHNIDPSTLIVGNCEENRAPELEYCFSLEREGFIPAILKELIRRRAEIKRELKRSEGDRRRTLSFAEKALKILANSFYGYMGYPRARWYRRECAESVAAFARMYIKQVMRIAEEEFKLEVVYGDTDSLFVVIPPEKRELAQKFLQKVNESMPGIIELEFEGFYRRGLFVTKKRYALLSEDGKMVVKGLEFVRRDVAPIARETQKEVLRILLEEADPEKAARLVRDVIERIRQRRVSLEDITIYTQLTKRIKSYKSLEPHVVAAQKLKERGREVAPGMIIGYIITKGTKGISQRATPVEFARLEDYDPEYYIDNQILPAIQRIFEAIGYTRDYLKEGITQTSLSRWF

SEQ ID NO: 1756 - protein, 792 aa, unidentified
  REGION 1..792: note = Description of Unknown: Synthetic polypeptide
MPRILKGFLIDADFETVEGRALIRLFLRGEEGSFVVYDDSFSPYFYALPGDEPERVKERILASGAAEAIQKVEIEEKRLFGTPRVALRITVSHPQDVPRIRERIRRVEGVDLILEHDILFVRRYLIDRGIKPLTWLRLEVEERDGRALLRGVEQLEEEPPELRVAAVAIAVYNPKGAPRSSKDEIIMISVATSDGVEKVLTWREVQGLEQVEVLQDEKEMLLRFAELIKEGDYDVIVGYNTDSFDFPYIRDRLKKLGISLPLGRLDAELEVSRRGALPEARIRGRAHVDLYPIVRRHVKLNSYVLESVVEELLGIKKEKLDGERLFTYWDEGGEARALLARYALEDARVTLALAEKFLPLYCELSTIVGQSLNDVARMTSGQLVEWLLMRYATPRGELIPNHPAGEEYAARARATYAGGYVREPKRGLVEHIAVFDFRSFGPSIIVSHNIDPSTLIVGNCEENRAPELEYCFSLEREGFIPAILKELIRRRAEIKRELKRSEGDRRRTLSFAEKALKILANSFYGYMGYPRARWYRRECAESVAAFARMYIKQVMRIAEEEFKLEVVYGDTDSLFVVIPPEKRELAQKFLQKVNESMPGIIELEFEGFYRRGLFVTKKRYALLSEDGKMVVKGLEFVRRDWAPIARETQKEVLRILLEEADPEKAARLVRDVIERIRQRRVSLEDITIYTQLTKRIKSYKSLEPHVVAAQKLKERGREVAPGMIIGYIITKGTKGISQRATPVEFARLEDYDPEYYIDNQILPAIQRIFEAIGYTRDYLKEGITQTSLSRWF

SEQ ID NO: 1757 - protein, 791 aa, unidentified
  REGION 1..791: note = Description of Unknown: Synthetic polypeptide
MPRILKGFLIDADFETVEGRALIRLFLRGEEGSFVVYDDSFSPYFYALPGDEPERVKERILASGAAEAIQKVEIEEKRLFGTPRVALRITVSHPQDVPRIRERIRRVEGVDLILEHDILFVRRYLIDRGIKPLTWLRLEVEERDGRALLRGVEQLEEEPPELRVAAVAIAVYNPKGAPRSSKDEIIMISVATSDGVEKVLTWREVQGLEQVEVLQDEKEMLLRFAELIKEGDYDVIVGYNTDSFDFPYIRDRLKKLGISLPLGRLDAELEVSRRGALPEARIRGRAHVDLYPIVRRHVKLNSYVLESVVEELLGIKKEKLDGERLFTYWDEGGEKRALLARYALEDARVTLALAEKFLPLYCELSTIVGQSLNDVARMTSGQLVEWLLMRYATPRGELIPNHPAGEEYAARARATYAGGYVREPKRGLVEHIAVFDFRSFYPSIIVSHNIDPSTLIVGNCEENRAPELEYCFSLEREGFIPAILKELIRRRAEIKRELKRSEGDRRRTLSFAEKALKILANSFYGYMGYPRARWYRRECAESVAAFARMYIKQVMRIAEEEFKLEVVYGDTDSLFVVIPPEKRELAQKFLQKVNESMPGIIELEFEGFYRRGLFVTKKRYALLSEDGKMVVKGLEFVRRDWAPIARETQKEVLRILLEEADPEKAARLVRDVIERIRQRRVSLEDITIYTQLTKRIKSYKSLEPHVVAAQKLKERGREVAPGMIIGYIITKGTKGISQRATPVEFARLEDYDPEYYIDNQILPAIQRIFEAIGYTRDYLKEGITQTSLSRW

SEQ ID NO: 1758 - protein, 792 aa, unidentified
  REGION 1..792: note = Description of Unknown: Synthetic polypeptide
MPRILKGFLIDADFETVEGRALIRLFLRGEEGSFVVYDDSFSPYFYALPGDEPERVKERILASGAAEAIQKVEIEEKRLFGTPRVALRITVSHPQDVPRIRERIRRVEGVDLILEHDILFVRRYLIDRGIKPLTWLRLEVEERDGRALLRGVEQLEEEPPELRVAAVAIAVYNPKGAPRSSKDEIIMISVATSDGVEKVLTWREVQGLEQVEVLQDEKEMLLRFAELIKEGDYDVIVGYNTDSFDFPYIRDRLKKLGISLPLGRLDAELEVSRRGALPEARIRGRAHVDLYPIVRRHVKLNSYDLESVVEELLGIKKEKLDGERLFTYLDEGGEKRALLARYALEDARVTLALAEKFLPLYCELSTIVGQSLNDVARMTSGQLVEWLLMRYATPRGELIPNHPAGEEYAARARATYAGGYVREPKRGLVEHIAVFDFRSFGPSIIVSHNIDPSTLIVGNCEENRAPELEYCFSLEREGFIPAILKELIRRRAEIKRELKRSEGDRRRTLSFAEKALKILANSFYGYMGYPRARWYRRECAESVAAFARMYIKQVMRIAEEEFKLEVVYGDTDSLFVVIPPEKRELAQKFLQKVNESMPGIIELEFEGFYRRGLFVTKKRYALLSEDGKMVVKGLEFVRRDWAPIARETQKEVLRILLEEADPEKAARLVRDVIERIRQRRVSLEDITIYTQLTKRIKSYKSLEPHVVAAQKLKERGREVAPGMIIGYIITKGTKGISQRATPVEFARLEDYDPEYYIDNQILPAIQRIFEAIGYTRDYLKEGITQTSLSRWF

SEQ ID NO: 1759 - protein, 792 aa, unidentified
  REGION 1..792: note = Description of Unknown: Synthetic polypeptide
MPRILKGFLIDADFETVEGRALIRLFLRGEEGSFVVYDDSFSPYFYALPGDEPERVKERILASGAAEAIQKVEIEEKRLFGTPRVALRITVSHPQDVPRIRRRIRRVEGVDLILEHDILFVRRYLIDRGIKPLTWLRLEVEERDGRALLRGVEQLEEEPPELRVAAVAIAVYNPKGAPRSSKDEIIMISVATSDGVEKVLTWREVQGLEQVEVLQDEKEMLLRFAELIKEGDYDVIVGYNTDSFDFPYIRDRLKKLGISLPLGRLDAELEVSRRGALPEARIRGRAHVDLYPIVRRHVKLNSYVLESVVEELLGIKKEKLDGERLFTYWDEGGEKRALLARYALEDARVTLALAEKFLPLYCELSTIVGQSLNDVARMTSGQLVEWLLMRYATPRGELIPNHPAGEEYAARARATYAGGYVREPKRGLVEHIAVFDFRSFGPSIIVSHNIDPSTLIVGNCEENRAPELEYCFSLEREGFIPAILKELIRRRAEIKRELKRSEGDRRRTLSFAEKALKILANSFYGYMGYPRARWYRRECAESVAAFARMYIKQVMRIAEEEFKLEVVYGDTDSLFVVIPPEKRELAQKFLQKVNESMPGIIELEFEGFYRRGLFVTKKRYALLSEDGKMVVKGLEFVRRDWAPIARETQKEVLRILLEEADPEKAARLVRDVIERIRQRRVSLEDITIYTQLTKRIKSYKSLEPHVVAAQKLKERGREVAPGMIIGYIITKGTKGISQRATPVEFARLEDYDPEYYIDNQILPAIQRIFEAIGYTRDYLKEGITQTSLSRWF

SEQ ID NO: 1760 - protein, 792 aa, unidentified
  REGION 1..792: note = Description of Unknown: Synthetic polypeptide
NPRILKGFLIDADFETVEGRALIRLFLRGEEGSFVVYDDSFSPYFYALPGDEPERVKERILASGAAEAIQKVEIEEKRLFGTPRVALRITVSHPQDVPRIRERIRRVEGVDLILEHDILFVRRYLIDRGIKPLTWLRLEVEERDGRALLRGVEQLEEEPPELRVAAVAIAVYNPKGAPRSSKDEIIMISVATSDGVEKVLTWREVQGLEQVEVLQDEKEMLLRFAELIKEGDYDVIVGYNTDSFDFPYIRDRLKKLGISLPLGRLDAELEVSRRGALPEARIRGRAHVDLYPIVRRHVKLNSYVLESVVEELLGIKKEKLDGERLFTYWDEGGEKRALLARYALEDARVTLALAEKFLPLYCELSTIVGQSLNDVARMTSGQLVEWLLMRYATPRGELIPNHPAGEEYAARARATYAGGYVREPKRGLVEHIAVFDFRSFGPSIIVSHNIDPSTLIVGNCEENRAPELEYCFSLEREGFIPAILKELIRRRAEIKRELKRSEGDRRRTLSFAEKALKILANSFYGYMGYPRARWYRRECAESVAAFARMYIKQVMRIAEEEFKLEVVYGDTDSLFVVIPPEKRELAQKFLQKVNESMPGIIELEFEGFYRRGLFVTKKRYALLSEDGKMVVKGLEFVRRDWAPIARETQKEVLRILLEEADPEKAARLVRDVIERIRQRRVSLEDITIYTQLTKRIKSYKSLEPHVVAAQKLKERGREVAPGMIIGYIITKGTKGISQRATPVEFARLEDYDPEYYIDNQILPAIQRIFEAIGYTRDYLKEGITQTSLSRWF

SEQ ID NO: 1761 - protein, 792 aa, unidentified
  REGION 1..792: note = Description of Unknown: Synthetic polypeptide
MPRILKGFLIDADFETVEGRALIRLFLRGEEGSFVVYDDSFSPYFYALPGDEPERVKERILASGAAEAIQKVEIEEKRLFGTPRVALRITVSHPQDVPRIRERIRRVEGVDLILEHDILFVRRYLIDRGIKPLTWLRLEVEERDGRALLRGVEQLEEEPPELRVAAVAIAVYNPKGAPRSSKDEIITISVATSDGVEKVLTWREVQGLEQVEVLQDEKEMLLRFAELIKEGDYDVIVGYNTDSFDFPYIRDRLKKLGISLPLGRLDAELEVSRRGALPEARIRGRAHVDLYPIVRRHVKLNSYDLESVVEELLGIKKEKLDGERLFTYWDEGGEKRALLARYALEDARVTLALAEKFLPLYCELSTIVGQSLNDVARMTSGQLVEWLLMRYATPRGELIPNHPAGEEYAARARATYAGGYVREPKRGLVEHIAVFDFRSFGPSIIVSHNIDPSTLIVGNCEENRAPELEYCFSLEREGFIPAILKELIRRRAEIKRELKRSEGDRRRTLSFAEKALKILANSFYGYMGYPRARWYRRECAESVAAFARMYIKQVMRIAEEEFKLEVVYGDTDSLFVVIPPEKRELAQKFLQKVNESMPGIIELEFEGFYRRGLFVTKKRYALLSEDGKMVVKGLEFVRRDWAPIARETQKEVLRILLEEADPEKAARLVRDVIERIRQRRVSLEDITIYTQLTKRIKSYKSLEPHVVAAQKLKERGREVAPGMIIGYIITKGTKGISQRATPVEFARLEDYDPEYYIDNQILPAIQRIFEAIGYTRDYLKEGITQTSLSRWF

SEQ ID NO: 1762 - protein, 792 aa, unidentified
  REGION 1..792: note = Description of Unknown: Synthetic polypeptide
MPRILKGFLIDADFETVEGRALIRLFLRGEEGSFVVYDDSFSPYFYALPGDEPERVKERILASGAAEAIQKVEIEEKRLFGTPRVALRITVSHPQDVPRIRERIRRVEGVDLILEHDILFVRRYLIDRGIKPLTWLRLEVEERDGRALLRGVEQLEEEPPELRVAAVAIAVYNPKGAPRSSKDEIIMISVATSDGVEKVLTWREVQGLEQVEVLQDEKEMLLRFAELIKEGDYDVIVGYNTDSFDFPYIRDRLKKLGISLPLGRLDAELEVSRRGALPEARIRGRAHVDLYPIVRRHVKLNSYVLESVVEELLGIKKEKLDGERLFTYWDEGGEKRALLARYALEDARVTLALAEKFLPLYCELSTIVGQSLNDVARMTSGQLVEWLLMRYATPRGELIPNHPAGEEYAARARATYAGGYVREPKRGLVEHIAVFDFRSFGPSIIVSHNIDPSTLIVGNCEENRAPELEYCFSLEREGFIPAILKELIRRRAEIKRELKRSEGDRRRTLSFAEKALKILANSFYGYMGYPRARWYRRECAESVAAFARMYIKQVMRIAEEEFKLEVVYGDTDSLFVVIPPEKRELAQKFLQKVNESMPGIIELEFEGFYRRGLFVTKKRYALLSEDGKMVVKGLEFVRRKWAPIARETQKEVLRILLEEADPEKAARLVRDVIERIRQRRVSLEDITIYTQLTKRIKSYKSLEPHVVAAQKLKERGREVAPGMIIGYIITKGTKGISQRATPVEFARLEDYDPEYYIDNQILPAIQRIFEAIGYTRDYLKEGITQTSLSRWF

SEQ ID NO: 1763 - protein, 792 aa, unidentified
  REGION 1..792: note = Description of Unknown: Synthetic polypeptide
MPRILKGFLIDADFETVEGRALIRLFLRGEEGSFVVYDDSFSPYFYALPGDEPERVKERILASGAAEAIQKVEIEEKRLFGTPRVALRITVSHPQDVPRIRERIRRVEGVDLILEHDILFVRRYLIDRGIKPLTWLRLEVEERDGRALLRGVEQLEEEPPELRVAAVAIAVYNPKGAPRSSKDEIIMISVATSDGVEKVLTWREVQGLEQVEVLQDEKEMLLRFAELIKEGDYDVIVGYNTDSFDFPYIRDRLKKLGISLPLGRLDAELEVSRRGALPEARIRGRAHVDLYPIVRRHVKLNSYVLESVVEELLGIKKEKLDGERLFTYWDEGGEKRALLARYALEDARVTLALAEKFLPLYLELSTIVGQSLNDVARMTSGQLVEWLLMRYATPRGELIPNHPAGEEYAARARATYAGGYVREPKRGLVEHIAVFDFRSFGPSIIVSHNIDPSTLIVGNCEENRAPELEYCFSLEREGFIPAILKELIRRRAEIKRELKRSEGDRRRTLSFAEKALKILANSFYGYMGYPRARWYRRECAESVAAFARMYIKQVMRIAEEEFKLEVVYGDTDSLFVVIPPEKRELAQKFLQKVNESMPGIIELEFEGFYRRGLFVTKKRYALLSEDGKMVVKGLEFVRRDWAPIARETQKEVLRILLEEADPEKAARLVRDVIERIRQRRVSLEDITIYTQLTKRIKSYKSLEPHVVAAQKLKERGREVAPGMIIGYIITKGTKGISQRATPVEFARLEDYQPEYYIDNQILPAIQRIFEAIGYTRDYLKEGITQTSLSRWF

SEQ ID NO: 1764 - protein, 792 aa, unidentified
  REGION 1..792: note = Description of Unknown: Synthetic polypeptide
MPRILKGFLIDADFETVEGRALIRLFLRGEEGSFVVYDDSFSPYFYALPGDEPERVKERILASGAAEAIQKVEIEEKRLFGTPRVALRITVSHPQDVPRIRERIRRVEGVDLILEHDILFVRRYLIDRGIKPLTWLRLEVEERDGRALLRGVEQLEEEPPELRVAAVAIAVYNPKGAPRSSKDEIIMISVATSDGVEKVLTWREVQGLEQVEVLQDEKEMLLRFAELIKEGDYDVIVGYNTDSFDFPYIRDRLKKLGISLPLGRLDAELEVSRRGALPEARIRGRAHVDLYPIVRRHVKLNSYVLESVVEELLGIKKEKLDGERLFTYWDEGGEKRALLARYALEDARVTLALAEKFLPLYCELSTIVGQSLNDVARMTSGQLVEWLLMRYATPRGELIPNHPAGEEYAARARATYAGGYVREPKRGLVEHIAVFDFRSFGPSIIVSHNIDPSTLIVGNCEENRAPELEYCFSLEREGFIPAILKELIRRRAEIKRELKRSEGDRRRTLSFAEKALKILANSFYGYMGYPRARWYRRECAESVAAFARMYIKQVMRIAEEEFKLEVVYGDTDSLFVVIPPEKRELAQKFLQKVNESMPGIIELEFEGFYRRGLFVTKKRYALLSEDGKVVVKGLEFVRRDWAPIARETQKEVLRILLEEADPEKAARLVRDVIERIRQRRVSLEDITIYTQLTKRIKSYKSLEPHVVAAQKLKERGREVAPGMIIGYIITKGTKGISQRATPVEFARLEDYDPEYYIDNQILPAIQRIFEAIGYTRDYLKEGITQTSLSRWF

SEQ ID NO: 1765 - protein, 792 aa, unidentified
  REGION 1..792: note = Description of Unknown: Synthetic polypeptide
MPRILKGFLIDADFETVEGRALIRLFLRGEEGSFVVYDDSFSPYFYALPGDEPERVKERILASGAAEAIQKVEIEEKRLFGTPRVALRITVSHPQDVPRIRERIRRVEGVDLILEHDILFVRRYLIDRGIKPLTWLRLEVEERDGRALLRGVEQLEEEPPELRVAAVAIAVYNPKGAPRSSKDEIIMISVATSDGVEKVLTWREVQGLEQVEVLQDEKEMLLRFAELIKEGDYDVIVGYNTDSFDFPYIRDRLKKLGISLPLGRLDAELEVSRRGALPEARIRGRAHVDLYPIVRRHVKLNSYDLESVVEELLGIKKEKLDGERLFTYWDEGGEKRALLARYALEDARVTLALAEKFLPLYCELSTIVGQSLNDVARMTSGQLVEWLLMRYATPRGELIPNHPAGEEYAARARATYAGGYVREPKRGLVEHIAVFDFRSFGPSIIVSHNIDPSTLIVGNCEENRAPELEYCFSLEREGFIPAILKELIRRRAEIKRELKRSEGDRRRTLSFAEKALKILANSFYGYMGYPRARWYRRECAESVAAFARMYIKQVMRIAEEEFKLEVVYGDTDSLFVVIPPEKRELAQKFLQKVNESMPGIIELEFEGFYRRGLFVTKKRYALLSEDGKMVVKGLEFVRRDWAPIARETQKEVLRILLEEADPEKAARLVRDVIERIRQRRVSLEDITIYTQLTKRIKSYKSLEPHVVAAQKLKERGREVAPGVIIGYIITKGTKGISQRATPVEFARLEDYDPEYYIDNQILPAIQRIFEAIGYTRDYLKEGITQTSLSRWF

SEQ ID NO: 1766 - protein, 792 aa, unidentified
  REGION 1..792: note = Description of Unknown: Synthetic polypeptide
MPRILKGFLIDADFETVEGRALIRLFLRGEEGSFVVYDDSFSPYFYALPGDEPERVKERILASGAAEAIQKVEIEEKRLFGTPRVALRITVSHPQDVPRIRERIRRVEGVDLILEHDILFVRRYLIDRGIKPLDWLRLEVEERDGRALLRGVEQLEEEPPELRVAAVAIAVYNPKGAPRSSKDEIIMISVATSDGVEKVLTWREVQGLEQVEVLQDEKEMLLRFAELIKEGDYDVIVGYNTDSFDFPYIRDRLKKLGISLPLGRLDAELEVSRRGALPEARIRGRAHVDLYPIVRRHVKLNSYVLESVVEELLGIKKEKLDGERLFTYWDEGGEKRALLARYALEDARVTLALAEKFLPLYCELSTIVGQSLNDVARMTSGQLVEWLLMRYATPRGELIPNHPAGEEYAARARATYAGGYVREPKRGLVEHIAVFDFRSFGPSIIVSHNIDPSTLIVGNCEENRAPELEYCFSLEREGFIPAILKELIRRRAEIKRELKRSEGDRRRTLSFAEKALKILANSFYGYMGYPRARWYRRECAESVAAFARMYIKQVMRIAEEEFKLEVVYGDTDSLFVVIPPEKRELAQKFLQKVNESMPGIIELEFEGFYRRGLFVTKKRYALLSEDGKMVVKGLEFVRRDWAPIARETQKEVLRILLEEADPEKAARLVRDVIERIRQRRVSLEDITIYTQLTKRIKSYKSLEPHVVAAQKLKERGREVAPGMIIGYIITKGTKGISQRATPVEFARLEDYDPEYYIDNQILPAIQRIFEAIGYTRDYLKEGITQTSLSRWF

SEQ ID NO: 1767 - protein, 792 aa, unidentified
  REGION 1..792: note = Description of Unknown: Synthetic polypeptide
MPRILKGFLIDADFETVEGRALIRLFLRGEEGSFVVYDDSFSPYFYALPGDEPERVKERILASGAAEAIQKVEIEEKRLFGTPRVALRITVSHPQDVPRIRERIRRVEGVDLILEHDILFVRRYLIDRGIKPLTWLRLEVEERDGRALLRGVEQLEEEPPELRVAAVAIAVYNPKGAPRSSKDEIIMISVATSDGVEKVLTWREVQGLEQVEVLQDEKEMLLRFAELIKEGDYDVIVGYNTDSFDFPYIRDRLKKLGISLPLGRLDAELEVSRRGALPEARIRGRAHVDLYPIVRRHVKLNSYDLESVVEELLGIKKEKLDGERLFTYWDEGGEKRALLARYALEDARVTLALAEKFLPLYCELSTIVGQSLNDVARMTSGQLVEWLLMRYATPRGELIPNHPAGEEYAARARATYAGGYVREPKRGLVEHIAVFDFRSFGPSIIVSHNIDPSTLIVGNCEENRAPELEYCFSLEREGFIPAILKELIRRRAEIKRELKRSEGDRRRTLSFAEKALKILANSFYGYMGYPRARWYRRECAESVAAFARMYIKQVMRIAEEEFKLEVVYGDTDSLFVVIPPEKRELAQKFLQKVNESMPGIIELEFEGFYRRGLFVTKKRYALLSENGKMVVKGLEFVRRDWAPIARETQKEVLRILLEEADPEKAARLVRDVIERIRQRRVSLEDITIYTQLTKRIKSYKSLEPHVVAAQKLKERGREVAPGMIIGYIITKGTKGISQRATPVEFARLEDYDPEYYIDNQILPAIQRIFEAIGYTRDYLKEGITQTSLSRWF

SEQ ID NO: 1768 - protein, 792 aa, unidentified
  REGION 1..792: note = Description of Unknown: Synthetic polypeptide
MPRILKGFLIDADFETVEGRALIRLFLRGEEGSFVVYDDSFSPYFYALPGDEPERVKERILASGAAEAIQKVEIEEKRLFGTPRVALRITVSHPQDVPRIRERIRRVEGVDLILEHDILFVRRYLIDRGIKPLTRLRLEVEERDGRALLRGVEQLEEEPPELRVAAVAIAVYNPKGAPRSSKDEIIMISVATSDGVEKVLTWREVQGLEQVEVLQDEKEMLLRFAELIKEGDYDVIVGYNTDSFDFPYIRDRLKKLGISLPLGRLDAELEVSRRGALPEARIRGRAHVDLYPIVRRHVKLNSYDLESVVEELLGIKKEKLDGERLFTYWDEGGEKRALLARYALEDARVTLALAEKFLPLYCELSTIVGQSLNDVARMTSGQLVEWLLMRYATPRGELIPNHPAGEEYAARARATYAGGYVREPKRGLVEHIAVFDFRSFGPSIIVSHNIDPSTLIVGNCEENRAPELEYCFSLEREGFIPAILKELIRRRAEIKRELKRSEGDRRRTLSFAEKALKILANSFYGYMGYPRARWYRRECAESVAAFARMYIKQVMRIAEEEFKLEVVYGDTDSLFVVIPPEKRELAQKFLQKVNESMPGIIELEFEGFYRRGLFVTKKRYALLSEDGKMVVKGLEFVRRDWAPIARETQKEVLRILLEEADPEKAARLVRDVIERIRQRRVSLEDITIYTQLTKRIKSYKSLEPHVVAAQKLKERGREVAPGMIIGYIITKGTKGISQRATPVEFARLEDYDPEYYIDNQILPAIQRIFEAIGYTRDYLKEGITQTSLSRWF

SEQ ID NO: 1769 - protein, 792 aa, unidentified
  REGION 1..792: note = Description of Unknown: Synthetic polypeptide
MPRILKGFLIDADFETVEGRALIRLFLRGEEGSFVVYDDSFSPYFYALPGDEPERVKERILASGAAEAIQKVEIEEKRLFGTPRVALRITVSHPQDVPRIRERIRRVEGVDLILEHDILFVRRYLIDRGIKPLTWLRLEVEERDGRALLRGVEQLEEEPPELRVAAVAIAVYNPKGAPRSSKDEIIMISVATSDGVEKVLTWREVQGLEQVEVLQDEKEMLLRFAELIKEGDYDVIVGYNTDSFDFPYIRDRLKKLGISLPLGRLDAELEVSRRGALPEARIRGRAHVDLYPIVRRHVKLNSYDLESVVEELLGIKKEKLDGERLFTYWDEGGEKRALEARYALEDARVTLALAEKFLPLYCELSTIVGQSLNDVARMTSGQLVEWLLMRYATPRGELIPNHPAGEEYAARARATYAGGYVREPKRGLVEHIAVFDFRSFGPSIIVSHNIDPSTLIVGNCEENRAPELEYCFSLEREGFIPAILKELIRRRAEIKRELKRSEGDRRRTLSFAEKALKILANSFYGYMGYPRARWYRRECAESVAAFARMYIKQVMRIAEEEFKLEVVYGDTDSLFVVIPPEKRELAQKFLQKVNESMPGIIELEFEGFYRRGLFVTKKRYALLSEDGKMVVKGLEFVRRDWAPIARETQKEVLRILLEEADPEKAARLVRDVIERIRQRRVSLEDITIYTQLTKRIKSYKSLEPHVVAAQKLKERGREVAPGMIIGYIITKGTKGISQRATPVEFARLEDYDPEYYIDNQILPAIQRIFEAIGYTRDYLKEGITQTSLSRWF

SEQ ID NO: 1770 - protein, 792 aa, unidentified
  REGION 1..792: note = Description of Unknown: Synthetic polypeptide
MPRILKGFLIDADFETVEGRALIRLFLRGEEGSFVVYDDSFSPYFYALPGDEPERVKERILASGAAEAIQKVEIEEKRLFGTPRVALRITVSHPQDVPRIRERIRRVEGVDLILEHDILFVRRYLIDRGIKPLTLLRLEVEERDGRALLRGVEQLEEEPPELRVAAVAIAVYNPKGAPRSSKDEIIMISVATSDGVEKVLTWREVQGLEQVEVLQDEKEMLLRFAELIKEGDYDVIVGYNTDSFDFPYIRDRLKKLGISLPLGRLDAELEVSRRGALPEARIRGRAHVDLYPIVRRHVKLNSYDLESVVEELLGIKKEKLDGERLFTYWDEGGEKRALLARYALEDARVTLALAEKFLPLYCELSTIVGQSLNDVARMTSGQLVEWLLMRYATPRGELIPNHPAGEEYAARARATYAGGYVREPKRGLVEHIAVFDFRSFGPSIIVSHNIDPSTLIVGNCEENRAPELEYCFSLEREGFIPAILKELIRRRAEIKRELKRSEGDRRRTLSFAEKALKILANSFYGYMGYPRARWYRRECAESVAAFARMYIKQVMRIAEEEFKLEVVYGDTDSLFVVIPPEKRELAQKFLQKVNESMPGIIELEFEGFYRRGLFVTKKRYALLSEDGKMVVKGLEFVRRDWAPIARETQKEVLRILLEEADPEKAARLVRDVIERIRQRRVSLEDITIYTQLTKRIKSYKSLEPHVVAAQKLKERGREVAPGMIIGYIITKGTKGISQRATPVEFARLEDYDPEYYIDNQILPAIQRIFEAIGYTRDYLKEGITQTSLSRWF

SEQ ID NO: 1771 - protein, 792 aa, unidentified
  REGION 1..792: note = Description of Unknown: Synthetic polypeptide
MPRILKGFLIDADFETVEGRALIRLFLRGEEGNFVVYDDSFSPYFYALPGDEPERVKERILASGAAEAIQKVEIEEKRLFGTPRVALRITVSHPQDVPRIRERIRRVEGVDLILEHDILFVRRYLIDRGIKPLTWLRLEVEERDGRALLRGVEQLEEEPPELRVAAVAIAVYNPKGAPRSSKDEIIMISVATSDGVEKVLTWREVQGLEQVEVLQDEKEMLLRFAELIKEGDYDVIVGYNTDSFDFPYIRDRLKKLGISLPLGRLDAELEVSRRGALPEARIRGRAHVDLYPIVRRHVKLNSYDLESVVEELLGIKKEKLDGERLFTYWDEGGEKRALLARYALEDARVTLALAEKFLPLYCELSTIVGQSLNDVARMTSGQLVEWLLMRYATPRGELIPNHPAGEEYAARARATYAGGYVREPKRGLVEHIAVFDFRSFGPSIIVSHNIDPSTLIVGNCEENRAPELEYCFSLEREGFIPAILKELIRRRAEIKRELKRSEGDRRRTLSFAEKALKILANSFYGYMGYPRARWYRRECAESVAAFARMYIKQVMRIAEEEFKLEVVYGDTDSLFVVIPPEKRELAQKFLQKVNESMPGIIELEFEGFYRRGLFVTKKRYALLSEDGKMVVKGLEFVRRDWAPIARETQKEVLRILLEEADPEKAARLVRDVIERIRQRRVSLEDITIYTQLTKRIKSYKSLEPHVVAAQKLKERGREVAPGMIIGYIITKGTKGISQRATPVEFARLEDYDPEYYIDNQILPAIQRIFEAIGYTRDYLKEGITQTSLSRWF

SEQ ID NO: 1772 - protein, 789 aa, unidentified
  REGION 1..789: note = Description of Unknown: Synthetic polypeptide
MPRILKGFLIDADFETVEGRALIRLFLRGEEGSFVVYDDSFSPYFYALPGDEPERVKERILASGAAEAIQKVEIEEKRLFGTPRVALRITVSHPQDVPRIRERIRRVEGVDLILEHDILFVRRYLIDRGIKPLTWLRLEVEERDGRALLRGVEQLEEEPPELRVAAVAIAVYNPKGAPRSSKDEIIMISVATSDGVEKVLTWREVQGLEQVEVLQDEKEMLLRFAELIKEGDYDVIVGYNTDSFDFPYIRDRLKKLGISLPLGRLDAELEVSRRGALPEARIRGRAHVDLYPIVRRHVKLNSYVLESVVEELLGIKKEKLDGERLFTYWDEGGEKRALLARYALEDARVTLALAEKFLPLYLELSTIVGQSLNDVARMTSGQLVEWLLMRYATPRGELIPNHPAGEEYAARARATYAGGYVREPKRGLVEHIAVFDFRSFGPSIIVSHNIDPSTLIVGNCEENRAPELEYCFSLEREGFIPAILKELIRRRAEIKRELKRSEGDRRRTLSFAEKALKILANSFYGYMGYPRARWYRRECAESVAAFARMYIKQVMRIAEEEFKLEVVYGDTDSLFVVIPPEKRELAQKFLQKVNESMPGIIELEFEGFYRRGLFVTKKRYALLSEDGKMVVKGLEFVRRDWAPIARETQKEVLRILLEEADPEKAARLVRDVIERIRQRRVSLEDITIYTQLTKRIKSYKSLEPHVVAAQKLKERGREVAPGMIIGYIITKGTKGISQRATPVEFARLEDYDPEYYINNQILPAIQRIFEAIGYTRDYLKEGITQTSLS

SEQ ID NO: 1773 - protein, 789 aa, unidentified
  REGION 1..789: note = Description of Unknown: Synthetic polypeptide
MPRILKGFLIDADFETVEGRALIRLFLRGEEGSFVVYDDSFSPYFYALPGDEPERVKERILASGAAEAIQKVEIEEKRLFGTPRVALRITVSHPQDVPRIRERIRRVEGVDLILEHDILFVRRYLIDRGIKPLTWLRLEVEERDGRALLRGVEQLEEEPPELRVAAVAIAVYNPKGAPRSSKDEIIMISVATSDGVEKVLTWREVQGLEQVEVLQDEKEMLLRFAELIKEGDYDVIVGYNTDSFDFPYIRDRLKKLGISLPLGRLDAELEVSRRGALPEARIRGRAHVDLYPIVRRHVKLNSYDLESVVEELLGIKKEKLDGERLFTYWDEGGEKRALLARYALEDARVTLALAEKFLPLYLELSTIVGQSLNDVARMTSGQLVEWLLMRYATPRGELIPNHPAGEEYAARARATYAGGYVREPKRGLVEHIAVFDFRSFGPSIIVSHNIDPSTLIVGNCEENRAPELEYCFSLEREGFIPAILKELIRRRAEIKRELKRSEGDRRRTLSLAEKALKILANSFYGYMGYPRARWYRRECAESVAAFARMYIKQVMRIAEEEFKLEVVYGDTDSLFVVIPPEKRELAQKFLQKVNESMPGIIELEFEGFYRRGLFVTKKRYALLSEDGKMVVKGLEFVRRDWAPIARETQKEVLRILLEEADPEKAARLVRDVIERIRQRRVSLEDITIYTQLTKRIKSYKSLEPHVVAAQKLKERGREVAPGMIIGYIITKGTKGISQRATPVEFARLEDYDPEYYIDNQILPAIQRIFEAIGYTRDYLKEGITQTSLS

SEQ ID NO: 1774 - protein, 792 aa, unidentified
  REGION 1..792: note = Description of Unknown: Synthetic polypeptide
MPRILKGFLIDADFETVEGRALIRLFLRGEEGSFVVYDDSFSPYFYALPGDEPERVKERILASGAAEAIQKVEIEEKRLFGTDRVALRITVSHPQDVPRIRERIRRVEGVDLILEHDILFVRRYLIDRGIKPLTWLRLEVEERDGRALLRGVEQLEEEPPELRVAAVAIAVYNPKGAPRSSKDEIIMISVATSDGVEKVLTWREVQGLEQVEVLQDEKEMLLRFAELIKEGDYDVIVGYNTDSFDFPYIRDRLKKLGISLPLGRLDAELEVSRRGALPEARIRGRAHVDLYPIVRRHVKLNSYDLESVVEELLGIKKEKLDGERLFTYWDEGGEKRALLARYALEDARVTLALAEKFLPLYCELSTIVGQSLNDVARMTSGQLVEWLLMRYATPRGELIPNHPAGEEYAARARATYAGGYVREPKRGLVEHIAVFDFRSFGPSIIVSHNIDPSTLIVGNCEENRAPELEYCFSLEREGFIPAILKELIRRRAEIKRELKRSEGDRRRTLSFAEKALKILANSFYGYMGYPRARWYRRECAESVAAFARMYIKQVMRIAEEEFKLEVVYGDTDSLFVVIPPEKRELAQKFLQKVNESMPGIIELEFEGFYRRGLFVTKKRYALLSEDGKMVVKGLEFVRRDWAPIARETQKEVLRILLEEADPEKAARLVRDVIERIRQRRVSLEDITIYTQLTKRIKSYKSLEPHVVAAQKLKERGREVAPGMIIGYIITKGTKGISQRATPVEFARLEDYDPEYYIDNQILPAIQRIFEAIGYTRDYLKEGITQTSLSRWF

SEQ ID NO: 1775 - protein, 792 aa, unidentified
  REGION 1..792: note = Description of Unknown: Synthetic polypeptide
MPRILKGFLIDADFETVEGRALIRLFLRGEEGSFVVYDDSFSPYFYALPGDEPERVKERILASGAAEAIQKVEIEEKRLFGTPRVALRITVSHPQDVPRIRERIRRVEGVDLILEHDILFVRRYLIDRGIKPLTWLRLEVEERDGRALLRGVEQLEEEPPELRVAAVAIAVYNPKGAPRSSKDEIIMISVATSDGVEKVLTWREVQGLEQVEVLQDEKEMLLRFAELIKEGDYDVIVGYNTDSFDFPYIRDRLKKLGISLPLGRLDAELEVSRRGALPEARIRGRAHVDLYPIVRRHVKLNSYVLESVVEELLGIKKEKLDGERLFTYWDEGGEKRALLARYALEDARVTLALAEKFLPLYCELSTIVGQSLNDVARMTSGQLVEWLLMRYATPRGELIPNHPAGEEYAARARATYAGGYVREPKRGLVEHIAVFDFRSFGPSIIVSHNIDPSTLIVGNCEENRAPELEYCFSLEREGFIPAILKELIRRRAEIKRELKRSEGDRRRTLSFAEKALKILANSFYGYMGYPRARWYRRECAESVAAFARMYIKQVMRIAEEEFKLEVVYGDTDSLFVVIPPEKRELAQKFLQKVNESMPGIIELEFEGFYRRGLFVTKKRYALLSEDGKMVVKGLEFVRRDWAPIARETQKEVLRILLEEADPEKAARLVRDVIERIRQRRVSLEDITIYTQLTKRIKSYKSLEPHVVAAQKLKERGREVAPGMIIGYIITKGTKGISQRATPVEFARLEDYDPEYYIDNQILPAIQRIFEAIGYTRDYLKEGITQTSLSRWT

SEQ ID NO: 1776 - protein, 792 aa, unidentified
  REGION 1..792: note = Description of Unknown: Synthetic polypeptide
MPRILKGFLIDADFETVEGRALIRLFLRGEEGSFVVYDDSFSPYFYALPGDEPERVKERILASGAAEAIQKVEIEEKRLFGTPRVALRITVSHPQDVPRIRERIRRVEGVDLILEHDILFVRRYLIDRGIKPLTWLRLEVEERDGRALLRGVEQLEEEPPELRVAAVAIAVYNPKGAPRSSKDEIIMISVATSDGVEKVLTWREVQGLEQVEVLQDEKEMLLRFAELIKEGDYDVIVGYNTDSFDFPYIRDRLKKLGISLPLGRLDAELEVSRRGALPEARIRGRAHVDLYPIVRRHVKLNSYVLESVVEELLGIKKEKLDGERLFTYWDEGGEKRALLARYALEDARVTLALAEKFLPLYCELSTIVGQSLNDVARMTSGQLVEWLLMRYATPRGELIPNHPAGEEYAARARATYAGGYVREPKRGLVEHIAVFDFRSFGPSIIVSHNIDPSTLIVGNCEENRAPELEYCFSLEREGFIPAILKELIRRRAEIKRELKRSEGDRRRTLSFAEKALKILANSFYGYMGYPRARWYRRECAESVAAFARMYIKQVMRIAEEEFKLEVVYGDTDSLFVVIPPEKRELAQKFLQKVNESMPGIIELEFEGFYRRGLFVTKKRYALLSEDGKMVVKGLEFVRRDWAPIARETQKEVLRILLEEADPEKAARLVRDVIERIRQRRVSLEDIAIYTQLTKRIKSYKSLEPHVVAAQKLKERGREVAPGMIIGYIITKGTKGISQRATPVEFARLEDYDPEYYIDNQILPAIQRIFEAIGYTRDYLKEGITQTSLSRWF

SEQ ID NO: 1777 - protein, 792 aa, unidentified
  REGION 1..792: note = Description of Unknown: Synthetic polypeptide
MPRILKGFLIDADFETVEGRALIRLFLRGEEGSFVVYDDSFSPYFYALPGDEPERVKERILASGAAEAIQKVEIEEKRLFGTPRVALRITVSHPQDVPRIRERIRRVEGVDLILEHDILFVRRYLIDRGIKPLTWLRLEVEERDGRALLRGVEQLEEEPPELRVAAVAIAVYNPKGAPRSSKDEIIMISVATSDGVEKVLTWREVQGLEQVEVLQDEKEMLLRFAELIKEGDYDVIVGYNTDSFDFPYIRDRLKKLGISLPLGRLDAELEVSRRGALPEARIRGRAHVDLYPIVRRHVKLNSYVLESVVEELLGIKKEKLDGERLFTYWDEGGEKRALLARYALEDARVTLALAEKFLPLYCELSTIVGQSLNDVARMTSGQLVEWLLMRYATPRGELIPNHPAGEEYAARARATYAGGYVREPKRGLVEHIAVFDFRSFGPSIIVSHNIDPSTLIVGNCEENRAPELEYCFSLEREGFIPAILKELIRRRAEIKRELKRSEGDRRRTLSFAEKALKILANSFYGYMGYPRARWYRRECAESVAAFARMYIKQVMRIAEEEFKLEVVYGDTDSLFVVEPPEKRELAQKFLQKVNESMPGIIELEFEGFYRRGLFVTKKRYALLSEDGKMVVKGLEFVRRDWAPIARETQKEVLRILLEEADPEKAARLVRDVIERIRQRRVSLEDITIYTQLTKRIKSYKSLEPHVVAAQKLKERGREVAPGMIIGYIITKGTKGISQRATPVEFARLEDYDPEYYIDNQILPAIQRIFEAIGYTRDYLKEGITQTSLSRWF

SEQ ID NO: 1778 - protein, 792 aa, unidentified
  REGION 1..792: note = Description of Unknown: Synthetic polypeptide
MPRILKGFLIDADFETVEGRALIRLFLRGEEGSFVVYDDSFSPYFYALPGDEPERVKERILASGAAEAIQKVEIEEKRLFGTPRVALRITVSHPQDVPRIRERIRRVEGVDLILEHDILFVRRYLIDRGIKPLTWLRLEVEERDGRALLRGVEQLEEEPPELRVAAVAIAVYNPKGAPRSSKDEIIMISVATSDGVEKVLTWREVQGLEQVEVLQDEKEMLLRFAELIKEGDYDVIVGYNTDSFDFPYIRDRLKKLGISLPLGRLDAELEVSRRGALPEARIRGRAHVDLYPIVRRHVKLNSYVLESVVEELLGIKKEKLDGERLFTYWDEGGEKRALLARYALEDARVTLALAEKFLPLYCELSTIVGQSLNDVARMTSGQLVEWLLLRYATPRGELIPNHPAGEEYAARARATYAGGYVREPKRGLVEHIAVFDFRSFGPSIIVSHNIDPSTLIVGSCEENRAPELEYCFSLEREGFIPAILKELIRRRAEIKRELKRSEGDRRRTLSFAEKALKILANSFYGYMGYPRARWYRRECAESVAAFARMYIKQVMRIAEEEFKLEVVYGDTDSLFVVIPPEKRELAQKFLQKVNESMPGIIELEFEGFYRRGLFVTKKRYALLSEDGKMVVKGLEFVRRDWAPIARETQKEVLRILLEEADPEKAARLVRDVIERIRQRRVSLEDITIYTQLTKRIKSYKSLEPHVVAAQKLKERGREVAPGMIIGYIITKGTKGISQRATPVEFARLEDYDPEYYIDNQILPAIQRIFEAIGYTRDYLKEGITQTSLSRWF

SEQ ID NO: 1779 - protein, 792 aa, unidentified
  REGION 1..792: note = Description of Unknown: Synthetic polypeptide
MPRILKGFLIDADFETVEGRALIRLFLRGEEGSFVVYDDSFSPYFYALPGDEPERVKERILASGAAEAIQKVEIEEKRLFGTPRVALRITVSHPQDVPRIRERIRRVEGVDLILEHDILFVRRYLIDRGIKPLTWLRLEVEERDGRALLRGVEQLEEEPPELRVAAVAIAVYNPKGAPRSSKDEIIMISVATSDGVEKVLTWREVQGLEQVEVLQDEKEMLLRFAELIKEGDYDVIVGYNTDSFDFPYIRDRLKKLGISLPLGRLDAELEVSRRGALPEARIRGRAHVDLYPIVRRHVKLNSYDLESVVEELLGIKKEKLDGERLFTYWDEGGEKRALLARYALEDARVTLALAEKFLPLYCELSTIVGQSLNDVARMTSGQLVEWLLMRYATPRGELIPNHPAGEEYAARARATYAGGYVREPKRGLVEHIAVFDFRSFGPSIIVSHNIDPSTLIVGNCEENRAPELEYCFSLEREGFIPAILKELIRRRAEIKRELKRSEGDRRRTLSFAEKALKILANSFYGYMGYPRARWYRRECAESVAAFARNYIKQVMRIAEEEFKLEVVYGDTDSLFVVIPPEKRELAQKFLQKVNESMPGIIELEFEGFYRRGLFVTKKRYALLSEDGKMVVKGLEFVRRDWAPIARETQKEVLRILLEEADPEKAARLVRDVIERIRQRRVSLEDITIYTQLTKRIKSYKSLEPHVVAAQKLKERGREVAPGMIIGYIITKGTKGISQRATPVEFARLEDYDPEYYIDNQILPAIQRIFEAIGYTRDYLKEGITQTSLSRWF

SEQ ID NO: 1780 - protein, 792 aa, unidentified
  REGION 1..792: note = Description of Unknown: Synthetic polypeptide
MPRILKGFLIDADFETVEGRALIRLFLRGEEGSFVVYDDSFSPYFYALPGDEPERVKERILASGAAEAIQKVEIEEKRLFGTPRVALRITVSHPQDVPRIRERIRRVEGVDLILEHDILFVRRYLIDRGIKPLTWLRLEVEERDGRALLRGVEQLEEEPPELRVAAVAIAVYNPKGAPRSSKDEIIMISVATSDGVEKVLTWREVQGLEQVEVLQDEKEMLLRFAELIKEGDYDVIVGYNTDRFDFPYIRDRLKKLGISLPLGRLDAELEVSRRGALPEARIRGRAHVDLYPIVRRHVKLNSYVLESVVEELLGIKKEKLDGERLFTYWDEGGEKRALLARYALEDARVTLALAEKFLPLYCELSTIVGQSLNDVARMTSGQLVEWLLMRYATPRGELIPNHPAGEEYAARARATYAGGYVREPKRGLVEHIAVFDFRSFGPSIIVSHNIDPSTLIVGNCEENRAPELEYCFSLEREGFIPAILKELIRRRAEIKRELKRSEGDRRRTLSFAEKALKILANSFYGYMGYPRARWYRRECAESVAAFARMYIKQVMRIAEEEFKLEVVYGDTDSLFVVIPPEKRELAQKFLQKVNESMPGIIELEFEGFYRRGLFVTKKRYALLSEDGKMVVKGLEFVRRDWAPIARETQKEVLRILLEEADPEKAARLVRDVIERIRQRRVSLEDITIYTQLTKRIKSYKSLEPHVVAAQKLKERGREVAPGMIIGYIITKGTKGISQRATPVEFARLEDYDPEYYIDNQILPAIQRIFEAIGYTRDYLKEGITQTSLSRWF

SEQ ID NO: 1781 - protein, 792 aa, unidentified
  REGION 1..792: note = Description of Unknown: Synthetic polypeptide
MPRILKGFLIDADFETVEGRALIRLFLRGEEGSFVVYDRSFSPYFYALPGDEPERVKERILASGAAEAIQKVEIEEKRLFGTPRVALRITVSHPQDVPRIRERIRRVEGVDLILEHDILFVRRYLIDRGIKPLTWLRLEVEERDGRALLRGVEQLEEEPPELRVAAVAIAVYNPKGAPRSSKDEIIMISVATSDGVEKVLTWREVQGLEQVEVLQDEKEMLLRFAELIKEGDYDVIVGYNTDSFDFPYIRDRLKKLGISLPLGRLDAELEVSRRGALPEARIRGRAHVDLYPIVRRHVKLNSYVLESVVEELLGIKKEKLDGERLFTYWDEGGEKRALLARYALEDARVTLALAEKFLPLYCELSTIVGQSLNDVARMTSGQLVEWLLMRYATPRGELIPNHPAGEEYAARARATYAGGYVREPKRGLVEHIAVFDFRSFGPSIIVSHNIDPSTLIVGNCEENRAPELEYCFSLEREGFIPAILKELIRRRAEIKRELKRSEGDRRRTLSFAEKALKILANSFYGYMGYPRARWYRRECAESVAAFARMYIKQVMRIAEEEFKLEVVYGDTDSLFVVIPPEKRELAQKFLQKVNESMPGIIELEFEGFYRRGLFVTKKRYALLSEDGKMVVKGLEFVRRDWAPIARETQKEVLRILLEEADPEKAARLVRDVIERIRQRRVSLEDITIYTQLTKRIKSYKSLEPHVVAAQKLKERGREVAPGMIIGYIITKGTKGISQRATPVEFARLEDYDPEYYIDNQILPAIQRIFEAIGYTRDYLKEGITQTSLSRWF

SEQ ID NO: 1782 - protein, 792 aa, unidentified
  REGION 1..792: note = Description of Unknown: Synthetic polypeptide
MPRILKGFLIDADFETVEGRALIRLFLRGEEGSFVVYDDSFSPYFYALPGDEPERVKERILASGAAEAIQKVEIEEKRLFGTPRVALRITVSHPQDVPRIRERIRRVEGVDLILEHDILFVRRYLIDRGIKPLTWLRLEVEERDGRALLRGVEQLEEEPPELRVAAVAINVYNPKGAPRSSKDEIIMISVATSDGVEKVLTWREVQGLEQVEVLQDEKEMLLRFAELIKEGDYDVIVGYNTDSFDFPYIRDRLKKLGISLPLGRLDAELEVSRRGALPEARIRGRAHVDLYPIVRRHVKLNSYVLESVVEELLGIKKEKLDGERLFTYWDEGGEKRALLARYALEDARVTLALAEKFLPLYCELSTIVGQSLNDVARMTSGQLVEWLLMRYATPRGELIPNHPAGEEYAARARATYAGGYVREPKRGLVEHIAVFDFRSFGPSIIVSHNIDPSTLIVGNCEENRAPELEYCFSLEREGFIPAILKELIRRRAEIKRELKRSEGDRRRTLSFAEKALKILANSFYGYMGYPRARWYRRECAESVAAFARMYIKQVMRIAEEEFKLEVVYGDTDSLFVVIPPEKRELAQKFLQKVNESMPGIIELEFEGFYRRGLFVTKKRYALLSEDGKMVVKGLEFVRRDWAPIARETQKEVLRILLEEADPEKAARLVRDVIERIRQRRVSLEDITIYTQLTKRIKSYKSLEPHVVAAQKLKERGREVAPGMIIGYIITKGTKGISQRATPVEFARLEDYDPEYYIDNQILPAIQRIFEAIGYTRDYLKEGITQTSLSRWF

SEQ ID NO: 1783 - protein, 792 aa, unidentified
  REGION 1..792: note = Description of Unknown: Synthetic polypeptide
MPRILKGFLIDADFETVEGRALIRLFLRGEEGSFVVYDDSFSPYFYALPGDEPERVKERILASGAAEAIQKVEIEEKRLFGTPRVALRITVSHPQDVPRIRERIRRVEGVDLILEHDILFVRRYLIDRGIKPLTWLRLEVEERDGRALLRGVEQLEEEPPELRVAAVAIAVYNPKGAPRSSKDEIIMISVATSDGVEKVLTWREVQGLEQVEVLQDEKEMLLRFAELIKEGDYDVIVGYNTDSFDFPYIRDRLKKLGISLPLGRLDAELEVSRRGALPEARIRGRAHVDLNPIVRRHVKLNSYVLESVVEELLGIKKEKLDGERLFTYWDEGGEKRALLARYALEDARVTLALAEKFLPLYCELSTIVGQSLNDVARMTSGQLVEWLLMRYATPRGELIPNHPAGEEYAARARATYAGGYVREPKRGLVEHIAVFDFRSFGPSIIVSHNIDPSTLIVGNCEENRAPELEYCFSLEREGFIPAILKELIRRRAEIKRELKRSEGDRRRTLSFAEKALKILANSFYGYMGYPRARWYRRECAESVAAFARMYIKQVMRIAEEEFKLEVVYGDTDSLFVVIPPEKRELAQKFLQKVNESMPGIIELEFEGFYRRGLFVTKKRYALLSEDGKMVVKGLEFVRRDWAPIARETQKEVLRILLEEADPEKAARLVRDVIERIRQRRVSLEDITIYTQLTKRIKSYKSLEPHVVAAQKLKERGREVAPGMIIGYIITKGTKGISQRATPVEFARLEDYDPEYYIDNQILPAIQRIFEAIGYTRDYLKEGITQTSLSRWF

SEQ ID NO: 1784 - protein, 789 aa, unidentified
  REGION 1..789: note = Description of Unknown: Synthetic polypeptide
MPRILKGFLIDADFETVEGRALIRLFLRGEEGSFVVYDDSFSPYFYALPGDEPERVKERILASGAAEAIQKVEIEEKRLFGTPRVALRITVSHPQDVPRIHERIRRVEGVDLILEHDILFVRRYLIDRGIKPLTWLRLEVEERDGRALLRGVEQLEEEPPELRVAAVAIAVYNPKGAPRSSKDEIIMISVATSDGVEKVLTWREVQGLEQVEVLQDEKEMLLRFAELIKEGDYDVIVGYNTDSFDFPYIRDRLKKLGISLPLGRLDAELEVSRRGALPEARIRGRAHVDLYPIVRRHVKLNSYVLESVVEELLGIKKEKLDGERLFTYWDEGGEKRALLARYALEDARVTLALAEKFLPLYLELSTIVGQSLNDVARMTSGQLVEWLLMRYATPRGELIPNHPAGEEYAARARATYAGGYVREPKRGLVEHIAVFDFRSFGPSIIVSHNIDPSTLIVGNCEENRAPELEYCFSLEREGFIPAILKELIRRRAEIKRELKRSEGDRRRTLSFAEKALKILANSFYGYMGYPRARWYRRECAESVAAFARMYIKQVMRIAEEEFKLEVVYGDTDSLFVVIPPEKRELAQKFLQKVNESMPGIIELEFEGFYRRGLFVTKKRYALLSEDGKMVVKGLEFVRRDWAPIARETQKEVLRILLEEADPEKAARLVRDVIERIRQRRVSLEDITIYTQLTKRIKSYKSLEPHVVAAQKLKERGREVAPGMIIGYIITKGTKGISQRATPVEFARLEDYDPEYYIDNQILPAIQRIFEAIGYTRDYLKEGITQTSLS

SEQ ID NO: 1785 - protein, 792 aa, unidentified
  REGION 1..792: note = Description of Unknown: Synthetic polypeptide
MPRILKGFLIDADFETVEGRALIRLFLRGEEGSFVVYDDSFSPYFYALPGDEPERVKERILASGAAEAIQKVEIEEKRLFGTPRVALRITVSHPQDVPRIRERIRRVEGVDLILEHDILFVRRYLIDRGIKPLTWLRLEVEERDGRALLRGVEQLEEEPPELRVAAVAIAVYNPKGAPRSSKDEIIMISVATSDGVEKVLTWREVQGLEQVEVLQDEKEMLLRFAELIKEGDYDVIVGYNTDSFDFPYIRDRLKKLGISLPLGRLDAELEVSRRGALPEARIRGRAHVDLYPIVRRHVKLNSYVLESVVEELLGIKKEKLDGERLFTYWDEGGEKRALLARYALEDARVTLALAEKFLPLYCELSTIVGQSLNDVARMTSGQLVEWLLMRYATPRGELIPNHPAGEEYAARARATYAGGYVREPKRGLVEHIAVFDFRSFGPSIIVSHNIDPSTLIVGNCEENRAPELEYCFSLEREGFIPAILKELIRRRAEIKRELKRSEGDRRRTLSFAEKALKILANSFYGYMGYPRARWYRRECAESVAAFARMYIKQVMRIAEEEFKLEVVYGDTDSLFVVIPPEKRELAQKFLQKVNESMPGIIELEFEGFYRRGLFVTKKRYALLSEDGKMVVKGLEFVRRDWAPIARETQKEVLRILLEEADPEKAARLVRDVIERIRQRRVSLEDITIYTQLTKRIKSYKSLEPHVVAAQDLKERGREVAPGMIIGYIITKGTKGISQRATPVEFARLEDYDPEYYIDNQILPAIQRIFEAIGYTRDYLKEGITQTSLSRWF

SEQ ID NO: 1786 - protein, 790 aa, unidentified
  REGION 1..790: note = Description of Unknown: Synthetic polypeptide
MPRILKGFLIDADFETVEGRALIRLFLRGEEGSFVVYDDSFSPYFYALPGDEPERVKERILASGAAEAIQKVEIEEKRLFGTPRVALRITVSHPQDVPRIRERIRRVEGVDLILEHDILFVRRYLIDRGIKPLTWLRLEVEERDGRALLRGVEQLEEEPPELRVAAVAIAVRNPKGAPRSSKDEIIMISVATSDGVEKVLTWREVQGLEQVEVLQDEKEMLLRFAELIKEGDYDVIVGYNTDSFDFPYIRDRLKKLGISLPLGRLDAELEVSRRGALPEARIRGRAHVDLYPIVRRHVKLNSYVLESVVEELLGIKKEKLDGERLFTYWDEGGEKRALLARYALEDARVTLALAEKFLPLYCELSTIVGQSLNDVARMTSGQLVEWLLMRYATPRGELIPNHPAGEEYAARARATYAGGYVREPKRGLVEHIAVFDFRSFGPSIIVSHNIDPSTLIVGNCEENRAPELEYCFSLEREGFIPAILKELIRRRAEIKRELKRSEGDRRRTLSFAEKALKILANSFYGYMGYPRARWYRRECAESVAAFARMYIKQVMRIAEEEFKLEVVYGDTDSLFVVIPPEKRELAQKFLQKVNESMPGIIELEFEGFYRRGLFVTKKRYALLSEDGKMVVKGLEFVRRDWAPIARETQKEVLRILLEEADPEKAARLVRDVIERIRQRRVSLEDITIYTQLTKRIKSYKSLEPHVVAAQKLKERGREVAPGMIIGYIITKGTKGISQRATPVEFARLEDYDPEYYIDNQILPAIQRIFEAIGYTRDYLKEGITQTSLSR

SEQ ID NO: 1787 - protein, 792 aa, unidentified
  REGION 1..792: note = Description of Unknown: Synthetic polypeptide
MPRILKGFLIDADFETVEGRALIRLFLRGEEGSFVVYDDSFSPYFYALPGDEPERVKERILASGAAEAIQKVEIEEKRLFGTPRVALRITVSHPQDVPRIRERIRRVEGVDLILEHDILFVRRYLIDRGIKPLTWLRLEVEERDGRALLRGVEQLEEEPPELRVAAVAIAVYNPKGAPRSSKDEIIMISVATSDGVEKVLTWREVQGLEQVEVLQDEKEMLLRFAELIKEGDYDVIVGYNTDSFDFPYIRDRLKKLGISLPLGRLDAELEVSRRGALPEARIRGRAHVDLYPIVRRHVKLNSYVLESVVEELLGIKKEKLDGERLFTYWREGGEKRALLARYALEDARVTLALAEKFLPLYCELSTIVGQSLNDVARMTSGQLVEWLLMRYATPRGELIPNHPAGEEYAARARATYAGGYVREPKRGLVEHIAVFDFRSFGPSIIVSHNIDPSTLIVGNCEENRAPELEYCFSLEREGFIPAILKELIRRRAEIKRELKRSEGDRRRTLSFAEKALKILANSFYGYMGYPRARWYRRECAESVAAFARMYIKQVMRIAEEEFKLEVVYGDTDSLFVVIPPEKRELAQKFLQKVNESMPGIIELEFEGFYRRGLFVTKKRYALLSEDGKMVVKGLEFVRRDWAPIARETQKEVLRILLEEADPEKAARLVRDVIERIRQRRVSLEDITIYTQLTKRIKSYKSLEPHVVAAQKLKERGREVAPGMIIGYIITKGTKGISQRATPVEFARLEDYDPEYYIDNQILPAIQRIFEAIGYTRDYLKEGITQTSLSRWF

SEQ ID NO: 1788 - protein, 792 aa, unidentified
  REGION 1..792: note = Description of Unknown: Synthetic polypeptide
MPRILKGFLIDADFETVEGRALIRLFLRGEEGSFVVYDDSFSPYFYALPGDEPERVKERILASGAAEAIQKVEIEEKRLFGTPRVALRITVSHPQDVPRIRERIRRVEGVDLILEHDILFVRRYLIDRGIKPLTWLRLEVEERDGRALLRGVEQLEEEPPELRVAAVAIAVYNPKGAPRSSKDEIIMISVATSDGVEKVLTWREVQGLEQVEVLQDEKEMLLRFAELIKEGDYDVIVGYNTDSFDFPYIRDRLKKLGISLPLGRLDAELEVSRRGALPEARIRGRAHVDLYPIVRRHVKLNSYVLESVVEELLGIKKEKLDGERLFTYWDEGGEKRALLARYALEDARVTLALAEKFLPLYCELSTIVGQSLNDVARMTSGQLVEWLLMRYATPRGELIPNHPAGEEYAARARATYAGGYVREPKRGLVEHIAVFDFRSFGPSIIVSHNIDPSTLIVGNCEENRAPELEYCFSLEREGFIPAILKELIRRRAEIKRELKRSEGDRRRTLSFAEKALKILANSFYGYMGYPRARWYRRECAESVAAFARMYIKQVMRIAEEEFKLEVVYGDTDSLFVVIPPEKRELAQKFLQKVNESMPGIIELEFEGFYRRGLFVTKKRYALLSEDGKMVVKGLEFVRRDWAPIARETQKEVLRILLEEADPEKAARLVRDVIERIRQRRVSLEDITIYTQLTKRIKSYKSLEPHVVAAQTLKERGREVAPGMIIGYIITKGTKGISQRATPVEFARLEDYDPEYYIDNQILPAIQRIFEAIGYTRDYLKEGITQTSLSRWF

SEQ ID NO: 1789 - protein, 792 aa, unidentified
  REGION 1..792: note = Description of Unknown: Synthetic polypeptide
MPRILKGFLIDADFETVEGRALIRLFLRGEEGSFVVYDDSFSPYFYALPGDEPERVKERILASGAAEAIQKVEIEEKRLFGTPRVALRITVSHPQDVPRIRERIRRVEGVDNILEHDILFVRRYLIDRGIKPLTWLRLEVEERDGRALLRGVEQLEEEPPELRVAAVAIAVYNPKGAPRSSKDEIIMISVATSDGVEKVLTWREVQGLEQVEVLQDEKEMLLRFAELIKEGDYDVIVGYNTDSFDFPYIRDRLKKLGISLPLGRLDAELEVSRRGALPEARIRGRAHVDLYPIVRRHVKLNSYVLESVVEELLGIKKEKLDGERLFTYWDEGGEKRALLARYALEDARVTLALAEKFLPLYCELSTIVGQSLNDVARMTSGQLVEWLLMRYATPRGELIPNHPAGEEYAARARATYAGGYVREPKRGLVEHIAVFDFRSFGPSIIVSHNIDPSTLIVGNCEENRAPELEYCFSLEREGFIPAILKELIRRRAEIKRELKRSEGDRRRTLSFAEKALKILANSFYGYMGYPRARWYRRECAESVAAFARMYIKQVMRIAEEEFKLEVVYGDTDSLFVVIPPEKRELAQKFLQKVNESMPGIIELEFEGFYRRGLFVTKKRYALLSEDGKMVVKGLEFVRRDWAPIARETQKEVLRILLEEADPEKAARLVRDVIERIRQRRVSLEDITIYTQLTKRIKSYKSLEPHVVAAQKLKERGREVAPGMIIGYIITKGTKGISQRATPVEFARLEDYDPEYYIDNQILPAIQRIFEAIGYTRDYLKEGITQTSLSRWF

SEQ ID NO: 1790 - protein, 792 aa, unidentified
  REGION 1..792: note = Description of Unknown: Synthetic polypeptide
MPRILKGFLIDADFETVEGRALIRLFLRGEEGSFVVYDDSFSPYFYALPGDEPERVKERILASGAAEAIQKVEIEEKRLFGTPRVALRITVSHPQDVPRIRERIRRVEGVDLILEHDILFVRRYLIDRGIKPLTWLRLEVEERDGRALLRGVEQLEEEPPELRVAAVAIAVYNPKGAPRSSKDEIIMISVATSDGVEKVLTWREVQGLEQVEVLQDEKEMLLRFAELIKEGDYDVIVGYNTDSFDFPYIRDRLKKLGISLPLGRLDAELEVSRRGALPEARIRGRAHVDLYPIVRRHVKLNSYDLESVVEELLGIKKVKLDGERLFTYWDEGGEKRALLARYALEDARVTLALAEKFLPLYCELSTIVGQSLNDVARMTSGQLVEWLLMRYATPRGELIPNHPAGEEYAARARATYAGGYVREPKRGLVEHIAVFDFRSFGPSIIVSHNIDPSTLIVGNCEENRAPELEYCFSLEREGFIPAILKELIRRRAEIKRELKRSEGDRRRTLSFAEKALKILANSFYGYMGYPRARWYRRECAESVAAFARMYIKQVMRIAEEEFKLEVVYGDTDSLFVVIPPEKRELAQKFLQKVNESMPGIIELEFEGFYRRGLFVTKKRYALLSEDGKMVVKGLEFVRRDWAPIARETQKEVLRILLEEADPEKAARLVRDVIERIRQRRVSLEDITIYTQLTKRIKSYKSLEPHVVAAQKLKERGREVAPGMIIGYIITKGTKGISQRATPVEFARLEDYDPEYYIDNQILPAIQRIFEAIGYTRDYLKEGITQTSLSRWF

SEQ ID NO: 1791 - protein, 792 aa, unidentified
  REGION 1..792: note = Description of Unknown: Synthetic polypeptide
MPRILKGFLIDADFETVEGRALIRLFLRGEEGSFVVYDDSFSPYFYALPGDEPERVKERILASGAAEAIQKVEIEEKRLFGTPRVALRITVSHPQDVPRIRERIRRVEGVDLILEHDILFVRRYLIDRGIKPLTWLRLEVEERDGRALLRGVEQLEEEPPELRVAAVAIAVYNPKGAPRSSKDEIIMISVATSDGVEKVLTWREVQGLEQVEVLQDEKEMLLRFAELIKEGDYDVIVGYNTDSFDFPYIRDRLKKLGISLPLGRLDAELEVSRRGALPEARIRGRAHVDLYPIVRRHVKLNSYVLESVVEELLGIKKEKLDGERLFTYWDEGGEKRALLARYALEDARVTLALAEKFLPLYCELSTIVGQSLNDVARMTSGQLVEWLLMRYATLRGELIPNHPAGEEYAARARATYAGGYVREPKRGLVEHIAVFDFRSFGPSIIVSHNIDPSTLIVGNCEENRAPELEYCFSLEREGFIPAILKELIRRRAEIKRELKRSEGDRRRTLSFAEKALKILANSFYGYMGYPRARWYRRECAESVAAFARMYIKQVMRIAEEEFKLEVVYGDTDSLFVVIPPEKRELAQKFLQKVNESMPGIIELEFEGFYRRGLFVTKKRYALLSEDGKMVVKGLEFVRRDWAPIARETQKEVLRILLEEADPEKAARLVRDVIERIRQRRVSLEDITIYTQLTKRIKSYKSLEPHVVAAQKLKERGREVAPGMIIGYIITKGTKGISQRATPVEFARLEDYDPEYYIDNQILPAIQRIFEAIGYTRDYLKEGITQTSLSRWF

SEQ ID NO: 1792 - protein, 792 aa, unidentified
  REGION 1..792: note = Description of Unknown: Synthetic polypeptide
MPRILKGFLIDADFETVEGRALIRLFLRGEEGSFVVYDDSFSPYFYALPGDEPERVKERILASGAAEAIQKVEIEEKRLFGTPRVALRITVSHPQDVPRIRERIRRVEGVDLILEHDILFVRRYLIDRGIKPLTWLRLEVEERDGRALLRGVEQLEEEPPELRVAAVAIAVYNPKGAPRSSKDEIIMISVATSDGVEKVLTWREVQGLEQVEVLQDEKEMLLRFAELIKEGDYDVIVGYNTDSFDFPYIRDRLKKLGISLPLGRLDAELEVSRRGALPEARIRGRAHVDLYPIVRRHVKLNSYVLESVVEELLGIKKEKLDGERLFTYWDEGGEKRALLARYALEDARVTLALAEKFLPLYCELSTIVGQSLNDVARMTSGQLVEWLLMRYATPRGELIPNHPAGEEYAARARATYAGGYVREPKRGLVEHIAVFDFRSFGPSIIVSHNIDPSTLIVGNCEENRAPELEYCFSLEREGFIPAILKELIRRRAEIKRELKRSEGDRRRTLSFAEKALKILANSFYGYMGYPRARWYRRECAESVAAFARMYIKQVMRIAEEEFKLEVVYGDTDSLFVVIPPEKRELAQKFLQKVNESMPGIIELEFEGDYRRGLFVTKKRYALLSEDGKMVVKGLEFVRRDWAPIARETQKEVLRILLEEADPEKAARLVRDVIERIRQRRVSLEDITIYTQLTKRIKSYKSLEPHVVAAQKLKERGREVAPGMIIGYIITKGTKGISQRATPVEFARLEDYDPEYYIDNQILPAIQRIFEAIGYTRDYLKEGITQTSLSRWF

SEQ ID NO: 1793 - protein, 792 aa, unidentified
  REGION 1..792: note = Description of Unknown: Synthetic polypeptide
MPRILKGFLIDADFETVEGRALIRLFLRGEEGSFVVYDDSFSPYFYALPGDEPERVKERILASGAAEAIQKVEIEEKRLFGTPRVALRITVSHPQDVPRIRERIRRVEGVDLILEHDILFVRRYLIDRGIKPLTWLRLEVEERDGRALLRGVEQLEEEPPELRVAAVAIAVYNPKGAPRSSKDEIISISVATSDGVEKVLTWREVQGLEQVEVLQDEKEMLLRFAELIKEGDYDVIVGYNTDSFDFPYIRDRLKKLGISLPLGRLDAELEVSRRGALPEARIRGRAHVDLYPIVRRHVKLNSYVLESVVEELLGIKKEKLDGERLFTYWDEGGEKRALLARYALEDARVTLALAEKFLPLYCELSTIVGQSLNDVARMTSGQLVEWLLMRYATPRGELIPNHPAGEEYAARARATYAGGYVREPKRGLVEHIAVFDFRSFGPSIIVSHNIDPSTLIVGNCEENRAPELEYCFSLEREGFIPAILKELIRRRAEIKRELKRSEGDRRRTLSFAEKALKILANSFYGYMGYPRARWYRRECAESVAAFARMYIKQVMRIAEEEFKLEVVYGDTDSLFVVIPPEKRELAQKFLQKVNESMPGIIELEFEGFYRRGLFVTKKRYALLSEDGKMVVKGLEFVRRDWAPIARETQKEVLRILLEEADPEKAARLVRDVIERIRQRRVSLEDITIYTQLTKRIKSYKSLEPHVVAAQKLKERGREVAPGMIIGYIITKGTKGISQRATPVEFARLEDYDPEYYIDNQILPAIQRIFEAIGYTRDYLKEGITQTSLSRWF

SEQ ID NO: 1794 - protein, 792 aa, unidentified
  REGION 1..792: note = Description of Unknown: Synthetic polypeptide
MPRILKGFLIDADFETVEGRALIRLFLRGEEGSFVVYDDSFSPYFYALPGDEPERVKERILASGAAEAIQKVEIEEKRLFGTPRVALRITVSHPQDVPRIRERIRRVEGVDLILEHDILFVRRYLIDRGIKPLTWLRLEVEERDGRALLRGVEQLEEEPPELRVAAVAIAVYNPKGAPRSSKDEIIMISVATSDGVEKVLTWREVQGLEQVEVLQDEKEMLLRFAELIKEGDYDVIVGYNTDSFDFPYIRDRLKKLGISLPLGRLDAELEVSRRGALPEARIRGRAHVDLYPIVRRHVKLNSYVLESVVEELLGIKKEKLDGERLFTYWDEGGEKRALLARYALEDARVTLALAEKFLPLYCELSTIVGQSLNDVARMTSGQLVEWLLMRYATPRGELIPNHPAGEEYAARARATYAGGYVREPKRGLVEHIAVFDFRSFGPSIIVSHNIDPSTLIVGNCEENRAPELEYCFSLEREGFIPAILKELIRRRAEIKRELKRSEGDRRRTLSFAEKALKILANSFYGYMGYPRARWYRRECAESVAAFARMYIKQVMRIAEEEFKLEVVYGDTDSLFVVIPPEKRELAQKFLQKVNESMPGIIELEFEGFYRRGLFVTKKRYALLSEDGKMVVKGLEFVRRDVAPIARETQKEVLRILLEEADPEKAARLVRDVIERIRQRRVSLEDITIYTQLTKRIKSYKSLEPHVVAAQKLKERGREVAPGMIIGYIITKGTKGISQRATPVEFARLEDYDPEYYIDNQILPAIQRIFEAIGYTRDYLKEGITQTSLSRWF

SEQ ID NO: 1795 - protein, 792 aa, unidentified
  REGION 1..792: note = Description of Unknown: Synthetic polypeptide
MPRILKGFLIDADFETVEGRALIRLFLRGEEGSFVVYDDSFSPYFYALPGDEPERVKERILASGAAEAIQKVEIEEKRLFGTPRVALRITVSHPQDVPRIRERIRRVEGVDLILEHDILFVRRYLIDRGIKPLTWLRLEVEERDGRALLRGVEQLEEEPPELRVAAVAIAVYNPKGAPRSSKDEIIMISVATSDGVEKVLTWREVQGLEQVEVLQDEKEMLLRFAELIKEGDYDVIVGYNTDSFDFPYIRDRLKKLGISLPLGRLDAELEVSRRGALPEARIRGRAHVDLYPIVRRHVKLNSYVLESVVEELLGIKKEKLDGERLFTYWDEGGEKRALLARYALEDARVTLALAEKFLPLYCELSTIVGQSLNDVARMTSGQLVEWLLMRYATPRGELINNHPAGEEYAARARATYAGGYVREPKRGLVEHIAVFDFRSFGPSIIVSHNIDPSTLIVGNCEENRAPELEYCFSLEREGFIPAILKELIRRRAEIKRELKRSEGDRRRTLSFAEKALKILANSFYGYMGYPRARWYRRECAESVAAFARMYIKQVMRIAEEEFKLEVVYGDTDSLFVVIPPEKRELAQKFLQKVNESMPGIIELEFEGFYRRGLFVTKKRYALLSEDGKMVVKGLEFVRRDWAPIARETQKEVLRILLEEADPEKAARLVRDVIERIRQRRVSLEDITIYTQLTKRIKSYKSLEPHVVAAQKLKERGREVAPGMIIGYIITKGTKGISQRATPVEFARLEDYDPEYYIDNQILPAIQRIFEAIGYTRDYLKEGITQTSLSRWF

SEQ ID NO: 1796 - protein, 792 aa, unidentified
  REGION 1..792: note = Description of Unknown: Synthetic polypeptide
MPRILKGFLIDADFETVEGRALIRLFLRGEEGSFVVYDDSFSPYFYALPGDEPERVKERILASGAAEAIQKVEIEEKRLFGTPRVALRITVSHPQDVPRIRERIRRVEGVDLILEHDILFVRRYLIDRGIKPLTWLRLEVEERDGRALLRGVEQLEEEPPELRVAAVAIAVYTPKGAPRSSKDEIIMISVATSDGVEKVLTWREVQGLEQVEVLQDEKEMLLRFAELIKEGDYDVIVGYNTDSFDFPYIRDRLKKLGISLPLGRLDAELEVSRRGALPEARIRGRAHVDLYPIVRRHVKLNSYVLESVVEELLGIKKEKLDGERLFTYWDEGGEKRALLARYALEDARVTLALAEKFLPLYCELSTIVGQSLNDVARMTSGQLVEWLLMRYATPRGELIPNHPAGEEYAARARATYAGGYVREPKRGLVEHIAVFDFRSFGPSIIVSHNIDPSTLIVGNCEENRAPELEYCFSLEREGFIPAILKELIRRRAEIKRELKRSEGDRRRTLSFAEKALKILANSFYGYMGYPRARWYRRECAESVAAFARMYIKQVMRIAEEEFKLEVVYGDTDSLFVVIPPEKRELAQKFLQKVNESMPGIIELEFEGFYRRGLFVTKKRYALLSEDGKMVVKGLEFVRRDWAPIARETQKEVLRILLEEADPEKAARLVRDVIERIRQRRVSLEDITIYTQLTKRIKSYKSLEPHVVAAQKLKERGREVAPGMIIGYIITKGTKGISQRATPVEFARLEDYDPEYYIDNQILPAIQRIFEAIGYTRDYLKEGITQTSLSRWF

SEQ ID NO: 1797 - protein, 789 aa, unidentified
  REGION 1..789: note = Description of Unknown: Synthetic polypeptide
MPRILKGFLIDADFETVEGRALIRLFLRGEEGSFVVYDDSFSPYFYALPGDEPERVKERILASGAAEAIQKVEIEEKRLFGTPRVALRITVSHPQDVPRIRERIRRVEGVDLILEHDILFVRRYLIDRGIKPLTWLRLEVEERDGRALLRGVEQLEEEPPELRVAAVAIAVYNPKGAPRSSKDEIIMISVATSDGVEKVLTWREVQGLEQVEVLQDEKEMLLRFAELIKEGDYDVIVGYNTDSFDFPYIRDRLKKLGISLPLGRLDAELEVSRRGALPEARIRGRAHVDLYPIVRRHVKLNSYDLESVVEELLGIKKEKLDGERLFTYWDEGGEKRALLARYALEDARVTLALAEKFLPLYLELSTIVGQSLNDVARMTSGQLVEWLLMRYATPRGELIPNHPAGEEYAARARATYAGGYVREPKRGLVEHIAVFDFRSFGPSIIVSHNIDPSTLIVGNCEENRAPELEYCFSLEREGFIPAILKELIRRRAEIKRELKRSEGDRRRTLSFAEKALKILANSFYGYMGYPRARWYRRECAESVAAFARMYIKQVMRIAEEEFKLEVVYGDTDSLFVVIPPEKRELAQKFLQKVNESMPGIIELEFEGFYRRGLFVTKKRYALLSEDGKMVVKGLEFVRRDWAPIARETQKEVLRILLEEADPEKAARLVRDVIERIRQRRVSLEDITIYTQLTKRIKSYKSLEPHVVAAQKLKERGREVAPGMIIGYIITKGTKGISQRATPVEFARLRDYDPEYYIDNQILPAIQRIFEAIGYTRDYLKEGITQTSLS

SEQ ID NO: 1798 - protein, 792 aa, unidentified
  REGION 1..792: note = Description of Unknown: Synthetic polypeptide
MPRILKGFLIDADFETVEGRALIRLFLRGEEGSFVVYDDSFSPYFYALPGDEPERVKERILASGAAEAIQKVEIEEKRLFGTPRVALRITVSHPQDVPRIRERIRRVEGVDLILEHDILFVRRYLIDRGIKPLTWLRLEVEERDGRALLRGVEQLEEEPPELRVAAVAIAVYNPKGAPRSSKDEIIMISVATSDGVEKVLTWREVQGLEQVEVLQDEKEMLLRFAELIKEGDYDVIVGYNTDSFDFPYIRDRLKKLGISLPLGRLDAELEVSRRGALPEARIRGRAHVDLYPIVRRHVKLNSGVLESVVEELLGIKKEKLDGERLFTYWDEGGEKRALLARYALEDARVTLALAEKFLPLYCELSTIVGQSLNDVARMTSGQLVEWLLMRYATPRGELIPNHPAGEEYAARARATYAGGYVREPKRGLVEHIAVFDFRSFGPSIIVSHNIDPSTLIVGNCEENRAPELEYCFSLEREGFIPAILKELIRRRAEIKRELKRSEGDRRRTLSFAEKALKILANSFYGYMGYPRARWYRRECAESVAAFARMYIKQVMRIAEEEFKLEVVYGDTDSLFVVIPPEKRELAQKFLQKVNESMPGIIELEFEGFYRRGLFVTKKRYALLSEDGKMVVKGLEFVRRDWAPIARETQKEVLRILLEEADPEKAARLVRDVIERIRQRRVSLEDITIYTQLTKRIKSYKSLEPHVVAAQKLKERGREVAPGMIIGYIITKGTKGISQRATPVEFARLEDYDPEYYIDNQILPAIQRIFEAIGYTRDYLKEGITQTSLSRWF

SEQ ID NO: 1799 - protein, 792 aa, unidentified
  REGION 1..792: note = Description of Unknown: Synthetic polypeptide
MPRILKGFLIDADFETVEGRALIRLFLRGEEGSFVVYDDSFSPYFYALPGDEPERVKERILASGAAEAIQKVEIEEKRLFGTPRVALRITVSHPQDVPRIRERIRRVEGVDLILEHDILFVRRYLIDRGIKPLTWLRLEVEERDGRALLRGVEQLEEEPPELRVAAVAIAVRNPKGAPRSSKDEIIMISVATSDGVEKVLTWREVQGLEQVEVLQDEKEMLLRFAELIKEGDYDVIVGYNTDSFDFPYIRDRLKKLGISLPLGRLDAELEVSRRGALPEARIRGRAHVDLYPIVRRHVKLNSYVLESVVEELLGIKKEKLDGERLFTYWDEGGEKRALLARYALEDARVTLQLAEKFLPLYLELSTIVGQSLNDVARMTSGQLVEWLLMRYATPRGELIPNHPAGEEYAARARATYAGGYVREPKRGLVEHIAVFDFRSFGPSIIVSHNIDPSTLIVGNCEENRAPELEYCFSLEREGFIPAILKELIRRRAEIKRELKRSEGDRRRTLSFAEKALKILANSFYGYMGYPRARWYRRECAESVAAFARMYIKQVMRIAEEEFKLEVVYGDTDSLFVVIPPEKRELAQKFLQKVNESMPGIIELEFEGFYRRGLFVTKKRYALLSEDGKMVVKGLEFVRRDWAPIARETQKEVLRILLEEADPEKAARLVRDVIERIRQRRVSLEDITIYTQLTKRIKSYKSLEPHVVAAQKLKERGREVAPGMIIGYIITKGTKGISQRATPVEFARLEDYDPEYYIDNQILPAIQRIFEAIGYTRDYLKEGITQTSLSRWF

SEQ ID NO: 1800 - protein, 792 aa, unidentified
  REGION 1..792: note = Description of Unknown: Synthetic polypeptide
MPRILKGFLIDADFETVEGRALIRLFLRGEEGSFVVYDDSFSPYFYALPGDEPERVKERILASGAAEAIQKVEIEEKRLFGTPRVALRITVSHPQDVPRIRERIRRVEGVDLILEHDILFVRRYLIDRGIKPLTWLRLEVEERDGRALLRGVEQLEEEPPELRVAAVAIAVYNPKGAPRSSKDEIIMISVATSDGVEKVLTWREVQGLEQVEVLQDEKEMLLRFAELIKEGDYDVIVGYNTDSFDFPYIRDRLKKLGISLPLGRLDAELEVSRRGALPEARIRGRAHVDLYPIVRRHVKLNSYVLESVVEELLGIKKEKLDGERLFTYWDEGGEKRALLARYALEDARVTLALAEKFLPLYCELSTIVGQSLNDVARMTSGQLVEWLLMRYATPRGELIPNHPAGEEYAARARATYAGGYVREPKRGLVEHIAVFDFRSFGPSIIVSHNIDPSTLIVGNCEENRAPELEYCFSLEREGFIPAILKELIRRRAEIKRELKRSEGDRRRTLSFAEKALKILANSFYGYMGYPRARWYRRECAESVAAFARMYIKQVMRIAEEEFKLEVVYGDTDSLFVVNPPEKRELAQKFLQKVNESMPGIIELEFEGFYRRGLFVTKKRYALLSEDGKMVVKGLEFVRRDWAPIARETQKEVLRILLEEADPEKAARLVRDVIERIRQRRVSLEDITIYTQLTKRIKSYKSLEPHVVAAQKLKERGREVAPGMIIGYIITKGTKGISQRATPVEFARLEDYDPEYYIDNQILPAIQRIFEAIGYTRDYLKEGITQTSLSRWF

SEQ ID NO: 1801 - protein, 792 aa, unidentified
  REGION 1..792: note = Description of Unknown: Synthetic polypeptide
MPRILKGFLIDADFETVEGRALIRLFLRGEEGSFVVYDDSFSPYFYALPGDEPERVKERILASGAAEAIQKVEIEEKRLFGTPRVALRITVSHPQDVPRIRERIRRVEGVDLILEHDILFVRRWLIDRGIKPLTWLRLEVEERDGRALLRGVEQLEEEPPELRVAAVAIAVYNPKGAPRSSKDEIIMISVATSDGVEKVLTWREVQGLEQVEVLQDEKEMLLRFAELIKEGDYDVIVGYNTDSFDFPYIRDRLKKLGISLPLGRLDAELEVSRRGALPEARIRGRAHVDLYPIVRRHVKLNSYDLESVVEELLGIKKEKLDGERLFTYWDEGGEKRALLARYALEDARVTLALAEKFLPLYCELSTIVGQSLNDVARMTSGQLVEWLLMRYATPRGELIPNHPAGEEYAARARATYAGGYVREPKRGLVEHIAVFDFRSFGPSIIVSHNIDPSTLIVGNCEENRAPELEYCFSLEREGFIPAILKELIRRRAEIKRELKRSEGDRRRTLSFAEKALKILANSFYGYMGYPRARWYRRECAESVAAFARMYIKQVMRIAEEEFKLEVVYGDTDSLFVVIPPEKRELAQKFLQKVNESMPGIIELEFEGFYRRGLFVTKKRYALLSEDGKMVVKGLEFVRRDWAPIARETQKEVLRILLEEADPEKAARLVRDVIERIRQRRVSLEDITIYTQLTKRIKSYKSLEPHVVAAQKLKERGREVAPGMIIGYIITKGTKGISQRATPVEFARLEDYDPEYYIDNQILPAIQRIFEAIGYTRDYLKEGITQTSLSRWF

SEQ ID NO: 1802 - protein, 791 aa, unidentified
  REGION 1..791: note = Description of Unknown: Synthetic polypeptide
PRILKGFLIDADFETVEGRALIRLFLRGEEGSFVVYDDSFSPYFYALPGDEPERVKERILASGAAEAIQKVEIEEKRLFGTPRVALRITVSHPQDVPRIRERIRRVEGVDLILEHDILFVRRYLIDRGIKPLTWLRLEVEERDGRALLRGVEQLEEEPPELRVAAVAIAVYNPKGAPRSSKDEIIMISVATSDGVEKVLTWREVQGLEQVEVLQDEKEMLLRFAELIKEGDYDVIVGYNTDSFDFPYIRDRLKKLGISLPLGRLDAELEVSRRGALPEARIRGRAHVDLYPIVRRHVKLNSYVLESVVEELLGIKKEKLDGERLFTYWDEGGEKRALLARYALEDARVTLALAEKFLPLYCELSTIVGQSLNDVARMTSGQLVEWLLMRYATPRGELIPNHPAGEEYAARARATYAGGYVREPKRGLVEHIAVFDFRSFGPSIIVSHNIDPSTLIVGNCEENRAPELEYCFSLEREGFIPAILKELIRRRAEIKRELKRSEGDRRRTLSFAEKALKILANSFYGYMGYPRARWYRRECAESVAAFARMYIKQVMRIAEEEFKLEVVYGDTDSLFVVIPPEKRELAQKFLQKVNESMPGIIELEFEGFYRRGLFVTKKRYALLSEDGKMVVKGLEFVRRDWAPIARETQKEVLRILLEEADPEKAARLVRDVIERIRQRRVSLEDITIYTQLTKRIKSYKSLEPHVVAAQKLKERGREVAPGMIIGYIITKGTKGISQRATPVEFARLEDYDPEYYIDNQILPAIQRIFEAIGYTRDYLKEGITQTSLSRWF

SEQ ID NO: 1803 - protein, 792 aa, unidentified
  REGION 1..792: note = Description of Unknown: Synthetic polypeptide
MPRILKGFLIDADFETVEGRALIRLFLRGEEGSFVVYDDSFSPYFYALPGDEPERVKERILASGAAEAIQKVEIEEKRLFGTPRVALRITVSHPQDVPRIRERIRRVEGVDLILEHDILFVRRYLIDRGIKPLTWLRLEVEERDGRALLRGVEQLEEEPPELRVAAVAIAVYNPKGAPRSSKDEIIMISVATSDGVEKVLTWREVQGLEQVEVLQDEKEMLLRFAELIKEGDYDVIVGYNTDSFDFPYIRDRLKKLGISLPLGRLDAELEVSRRGALPEARIRGRAHVDLYPIVRRHVKLNSYVLESVVEELLGIKKEKLDGERLFTYWDEGGEKRALLARYALEDARVTLALAEKFLPLYCELSTIVGQSLNDVARMTSGQLVEWLLMRYATPRGELIPNHPAGEEYAARARATYAGGYVREPKRGLVEHIAVFDFRSFGPSIIVSHNIDPSTLIVGNCEENRAPELEYCFSLEREGFIPAILKELIRRRAEIKRELKRSEGDRRRTLSFAEKALKILANSFYGYMGYPRARWYRRECAESVAAFARMYIKQVMRIAEEEFKLEVVYGDTDSLFVVIPPEKRELAQKFLQKVNESMPGIIELEFEGFYRRGLFVTKKRYALLSEDGKMVVRGLEFVRRDWAPIARETQKEVLRILLEEADPEKAARLVRDVIERIRQRRVSLEDITIYTQLTKRIKSYKSLEPHVVAAQKLKERGREVAPGMIIGYIITKGTKGISQRATPVEFARLEDYDPEYYIDNQILPAIQRIFEAIGYTRDYLKEGITQTSLSRWF

SEQ ID NO: 1804 - protein, 789 aa, unidentified
  REGION 1..789: note = Description of Unknown: Synthetic polypeptide
MPRILKGFLIDADFETVEGRALIRLFLRGEEGSFVVYDDSFSPYFYALPGDEPERVKERILASGAAEAIQKVEIEEKRLFGTPRVALRITVSHPQDVPRIRERIRRVEGVDLILEHDILFVRRYLIDRGIKPLTWLRLEVEERDGRALLRGVEQLEEEPPELRVAAVAIAVYNPKGAPRSSKDEIIMISVATSDGVEKVLTWREVQGLEQVEVLQDEKEMLLRFAELIKEGDYDVIVGYNTDSFDFPYIRDRLKKLGISLPLGRLDAELEVSRRGALPEARIRGRAHVDLYPIVRRHVKLNSYDLESVVEELLGIKKEKLDGERLFTYWDEGGEKRALLARYALEDARVTLALAEKFLPLYLELSTIVGQSLNDVARMTSGQLVEWLLMRYATPRGELIPNHPAGEEYAARARATYAGGYVREPKRGLVEHIAVFDFRSFGPSIIVSHNICPSTLIVGNCEENRAPELEYCFSLEREGFIPAILKELIRRRAEIKRELKRSEGDRRRTLSFAEKALKILANSFYGYMGYPRARWYRRECAESVAAFARMYIKQVMRIAEEEFKLEVVYGDTDSLFVVIPPEKRELAQKFLQKVNESMPGIIELEFEGFYRRGLFVTKKRYALLSEDGKMVVKGLEFVRRDWAPIARETQKEVLRILLEEADPEKAARLVRDVIERIRQRRVSLEDITIYTQLTKRIKSYKSLEPHVVAAQKLKERGREVAPGMIIGYIITKGTKGISQRATPVEFARLEDYDPEYYIDNQILPAIQRIFEAIGYTRDYLKEGITQTSLS

SEQ ID NO: 1805 - protein, 792 aa, unidentified
  REGION 1..792: note = Description of Unknown: Synthetic polypeptide
VPRILKGFLIDADFETVEGRALIRLFLRGEEGSFVVYDDSFSPYFYALPGDEPERVKERILASGAAEAIQKVEIEEKRLFGTPRVALRITVSHPQDVPRIRERIRRVEGVDLILEHDILFVRRYLIDRGIKPLTWLRLEVEERDGRALLRGVEQLEEEPPELRVAAVAIAVYNPKGAPRSSKDEIIMISVATSDGVEKVLTWREVQGLEQVEVLQDEKEMLLRFAELIKEGDYDVIVGYNTDSFDFPYIRDRLKKLGISLPLGRLDAELEVSRRGALPEARIRGRAHVDLYPIVRRHVKLNSYVLESVVEELLGIKKEKLDGERLFTYWDEGGEKRALLARYALEDARVTLALAEKFLPLYCELSTIVGQSLNDVARMTSGQLVEWLLMRYATPRGELIPNHPAGEEYAARARATYAGGYVREPKRGLVEHIAVFDFRSFGPSIIVSHNIDPSTLIVGNCEENRAPELEYCFSLEREGFIPAILKELIRRRAEIKRELKRSEGDRRRTLSFAEKALKILANSFYGYMGYPRARWYRRECAESVAAFARMYIKQVMRIAEEEFKLEVVYGDTDSLFVVIPPEKRELAQKFLQKVNESMPGIIELEFEGFYRRGLFVTKKRYALLSEDGKMVVKGLEFVRRDWAPIARETQKEVLRILLEEADPEKAARLVRDVIERIRQRRVSLEDITIYTQLTKRIKSYKSLEPHVVAAQKLKERGREVAPGMIIGYIITKGTKGISQRATPVEFARLEDYDPEYYIDNQILPAIQRIFEAIGYTRDYLKEGITQTSLSRWF

SEQ ID NO: 1806 - protein, 792 aa, unidentified
  REGION 1..792: note = Description of Unknown: Synthetic polypeptide
MPRILKGFLIDADFETVEGRALIRLFLRGEEGSFVVYDDSFSPYFYALPGDEPERVKERILASGAAEAIQKVEIEEKRLFGTPRVALRITVSHPQDVPRIRERIRRVEGVDLILEHDILFVRRYLIDRGIKPLTWLRLEVEERDGRALLRGVEQLEEEPPELRVAAVAIAVYNPKGAPRSSKDEIIMISVATSDGVEKVLTWREVQGLEQVEVLQDEKEMLLRFAELIKEGDYDVIVGYNTDSFDFPYIRDRLKKLGISLPLGRLDAELEVSRRGALPEARIRGRAHVDLYPIVRRHVKLNSYVLESVVEELLGIKKEKLDGERLFTYVDEGGEKRALLARYALEDARVTLALAEKFLPLYCELSTIVGQSLNDVARMTSGQLVEWLLMRYATPRGELIPNHPAGEEYAARARATYAGGYVREPKRGLVEHIAVFDFRSFGPSIIVSHNIDPSTLIVGNCEENRAPELEYCFSLEREGFIPAILKELIRRRAEIKRELKRSEGDRRRTLSFAEKALKILANSFYGYMGYPRARWYRRECAESVAAFARMYIKQVMRIAEEEFKLEVVYGDTDSLFVVIPPEKRELAQKFLQKVNESMPGIIELEFEGFYRRGLFVTKKRYALLSEDGKMVVKGLEFVRRDWAPIARETQKEVLRILLEEADPEKAARLVRDVIERIRQRRVSLEDITIYTQLTKRIKSYKSLEPHVVAAQKLKERGREVAPGMIIGYIITKGTKGISQRATPVEFARLEDYDPEYYIDNQILPAIQRIFEAIGYTRDYLKEGITQTSLSRWF

SEQ ID NO: 1807 - protein, 792 aa, unidentified
  REGION 1..792: note = Description of Unknown: Synthetic polypeptide
MPRILKGFLIDADFETVEGRALIRLFLRGEEGSFVVYDDSFSPYFYALPGDEPERVKERILASGAAEAIQKVEIEEKRLFGTPRVALRITVSHPQDVPRIRERIRRVEGVDLILEHDILFVRRYLIDRGIKPLTWLRLEVEERDGRALLRGVEQLEEEPPELRVAAVAIAVYNPKGAPRSSKDEIIMISVATSDGVEKVLTWREVQGLEQVEVLQDEKEMLLRFAELIKEGDYDVIVGYNTDSFDFPYIRDRLKKLGISLPLGRLDAELEVSRRGALPEARIRGRAHVDLYPIVRRHVKLNSYVLESVVEELLGIKKEKLDGERLFTYWDEGGEKRALLARYALEDARVTLALAEKFLPLYCELSTIVGQSLNDVARMTSGQLVEWLLMRYATPRGELIPNHPAGEEYAARARATYAGGYVREPKRGLVEHIAVFDFRSFGPSIIVSHNIDPSTLIVGNCEENRAPELEYCFSLEREGFIPAILKELIRRRAEIKRELKRSEGDRRRTLSFAEKALKILANSFYGYMGYPRARWYRRECAESVAAFARMYIKQVMRIAEEEFKLEVVYGDTDSLFVVIPPEKREQAQKFLQKVNESMPGIIELEFEGFYRRGLFVTKKRYALLSEDGKMVVKGLEFVRRDWAPIARETQKEVLRILLEEADPEKAARLVRDVIERIRQRRVSLEDITIYTQLTKRIKSYKSLEPHVVAAQKLKERGREVAPGMIIGYIITKGTKGISQRATPVEFARLEDYDPEYYIDNQILPAIQRIFEAIGYTRDYLKEGITQTSLSRWF

SEQ ID NO: 1808 - protein, 792 aa, unidentified
  REGION 1..792: note = Description of Unknown: Synthetic polypeptide
MPRILKGFLIDADFETVEGRALIRLFLRGEEGSFVVYDDSFSPYFYALPGDEPERVKERILASGAAEAIQKVEIEEKRLFGTPRVALRITVSHPQDVPRIRERIRRVEGVDLILEHDILFVRRYLIDRGIKPLTWLRLEVEERDGRALLRGVEQLEEEPPELRVAAVAIAVYNPKGAPRSSKDEIIMISVATSDGVEKVLTWREVQGLEQVEVLQDEKEMLLRFAELIKEGDYDVIVGYNTDSFDFPYIRDRLKKLGISLPLGRLDAELEVSRRGALPEARIRGRAHVDLYPIVRRHVKLNSYVLESVVEELLGIKKEKLDGERLFTYWDEGGEKRALLARYALEDARVTLALAEKFLPLYCELSTIVGQSLNDVARMTSGQLVEWLLMRYATPRGELIPNHPAGEEYAARARATYAGGYVREPKRGLVEHIAVFDFRSFGPSIIVSHNIDPSTLIVGNCEENRAPELEYCFSLEREGFIPAILKELIRRRAEIKRELKRSEGDRRRTLSFAEKALKILANSFYGYMGYPRARWYRRECAESVAAFARMYIKQVMRIAEEEFKLEVVYGDTDSLFVVIPPEKRELAQSFLQKVNESMPGIIELEFEGFYRRGLFVTKKRYALLSEDGKMVVKGLEFVRRDWAPIARETQKEVLRILLEEADPEKAARLVRDVIERIRQRRVSLEDITIYTQLTKRIKSYKSLEPHVVAAQKLKERGREVAPGMIIGYIITKGTKGISQRATPVEFARLEDYDPEYYIDNQILPAIQRIFEAIGYTRDYLKEGITQTSLSRWF

SEQ ID NO: 1809 - protein, 789 aa, unidentified
  REGION 1..789: note = Description of Unknown: Synthetic polypeptide
MPRILKGFLIDADFETVEGRALIRLFLRGEEGSFVVYDDSFSPYFYALPGDEPERVKERILASGAAEAIQKVEIEEKRLFGTPRVALRITVSHPQDVPRIRERIRRVEGVDLILEHDILFVRRYLIDRGIKPLTWLRLEVEERDGRALLRGVEQLEEEPPELRVAAVAIAVYNPKGAPRSSKDEIIMISVATSDGVEKVLTWREVQGLEQVEVLQDEKEMLLRFAELIKEGDYDVIVGYNTDSFDFPYIRDRLKKLGISLPLGRLDAELEVSRRGALPEARIRGRAHVDLYPIVRRHVKLNSYVLESVVEELLGIKKEKLDGERLFTYWDEGGEKRALLARYALEDARVTLALAEKFLPLYLELSTIVGQSLNDVARMTSGQLVEWLLMRYATPRGELIPNHPAGEEYAARARATYAGGYVREPKRGLVEHIAVFDFRSFGPSIIVSHNIDPSTLIVGNCEENRAPELEYCFSLEREGFIPAILKELIRRRAEIKRELKRSEGDRRRTLSFAEKALKILANSFYGYMGYPRARWYRRECAESVAAFARMYIKQVMRIAEEEFKLEVVYGDTDSLFVVIPPEKRELAQKFLQKVNESMPGIIELEFEGFYRRGLFVTKKRYALLSEDGKMVVKGLEFVRRDWAPIARETQKEVLRILLEEADPEKAARLVRDVIERIRQRRVSLEDITIYTQLTKRIKSYKSLEPHVVAAQKLKERGREVAPGMIIGYIITKGTKGISQRATPVEFARLRDYDPEYYIDNQILPAIQRIFEAIGYTRDYLKEGITQTSLS

SEQ ID NO: 1810 - protein, 792 aa, unidentified
  REGION 1..792: note = Description of Unknown: Synthetic polypeptide
MPRILKGFLIDADFETVEGRALIRLFLRGEEGSFVVYDDSFSPYFYALPGDEPERVKERILASGAAEAIQKVEIEEKRLFGTPRVALRITVSHPQDVPRIRERIRRVEGVDLILEHDILFVRRYLIDRGIKPLTWLRLEVEERDGRALLRGVEQLEEEPPELRVAAVAIAVYNPKGAPRSSKDEIIMISVATSDGVEKVLTWREVQGLEQVEVLQDEKEMLLRFAELIKEGDYDVIVGYNTDSFDFPYIRDRLKKLGISLPLGRLDAELEVSRRGALPEARIRGRAHVDLYPIVRRHVKLNSYVLESVVEELLGIKKEKLDGERLFTYWDEGGEKRALLARYALEDARVTLALAEKFLPLYCELSTIVGQSLNDVARMTSGQLVEWLLMRYATPRGELIPNHPAGEEYAARARATYAGGYVREPKRGLVEHIAVFDFRSFGPSIIVSHNIDPSTLIVGNCEENRAPELEYCFSLEREGFIPAILKELIRRRAEIKRELKRSEGDRRRTLSFAEKALKILANSFYGYMGYPRARWYRRECAESVAAFARMYIKQVMRIAEEEFKLEVVYGDTDSLFVVIPPEKRELAQKFLQNVNESMPGIIELEFEGFYRRGLFVTKKRYALLSEDGKMVVKGLEFVRRDWAPIARETQKEVLRILLEEADPEKAARLVRDVIERIRQRRVSLEDITIYTQLTKRIKSYKSLEPHVVAAQKLKERGREVAPGMIIGYIITKGTKGISQRATPVEFARLEDYDPEYYIDNQILPAIQRIFEAIGYTRDYLKEGITQTSLSRWF

SEQ ID NO: 1811 - protein, 792 aa, unidentified
  REGION 1..792: note = Description of Unknown: Synthetic polypeptide
MPRILKGFLIDADFETVEGRALIRLFLRGEEGSFVVYDDSFSPYFYALPGDEPERVKERILASGAAEAIQKVEIEEKRLFGTPRVALRITVSHPQDVPRIRERIRRVEGVDLILEHDILFVRRYLIDRGIKPLTALRLEVEERDGRALLRGVEQLEEEPPELRVAAVAIAVYNPKGAPRSSKDEIIMISVATSDGVEKVLTWREVQGLEQVEVLQDEKEMLLRFAELIKEGDYDVIVGYNTDSFDFPYIRDRLKKLGISLPLGRLDAELEVSRRGALPEARIRGRAHVDLYPIVRRHVKLNSYDLESVVEELLGIKKEKLDGERLFTYWDEGGEKRALLARYALEDARVTLALAEKFLPLYCELSTIVGQSLNDVARMTSGQLVEWLLMRYATPRGELIPNHPAGEEYAARARATYAGGYVREPKRGLVEHIAVFDFRSFGPSIIVSHNIDPSTLIVGNCEENRAPELEYCFSLEREGFIPAILKELIRRRAEIKRELKRSEGDRRRTLSFAEKALKILANSFYGYMGYPRARWYRRECAESVAAFARMYIKQVMRIAEEEFKLEVVYGDTDSLFVVIPPEKRELAQKFLQKVNESMPGIIELEFEGFYRRGLFVTKKRYALLSEDGKMVVKGLEFVRRDWAPIARETQKEVLRILLEEADPEKAARLVRDVIERIRQRRVSLEDITIYTQLTKRIKSYKSLEPHVVAAQKLKERGREVAPGMIIGYIITKGTKGISQRATPVEFARLEDYDPEYYIDNQILPAIQRIFEAIGYTRDYLKEGITQTSLSRWF

SEQ ID NO: 1812 - protein, 792 aa, unidentified
  REGION 1..792: note = Description of Unknown: Synthetic polypeptide
MPRILKGFLIDADFETVEGRALIRLFLRGEEGSFVVYDDSFSPYFYALPGDEPERVKERILASGAAEAIQKVEIEEKRLFGTPRVALRITVSHPQDVPRIRERIRRVEGVDLILEHDILFVRRYLIDRGIKPLTWLRLEVEERDGRALLRGVEQLEEEPPELRVAAVAIAVYNPKGAPRSSKDEIIMISVATSDGVEKVLTWREVQGLEQVEVLQDEKEMLLRFAELIKEGDYDVIVGYNTDSFDFPYIRDRLKKLGISLPLGRLDAELEVSRRGQLPEARIRGRAHVDLYPIVRRHVKLNSYVLESVVEELLGIKKEKLDGERLFTYWDEGGEKRALLARYALEDARVTLALAEKFLPLYLELSTIVGQSLNDVARMTSGQLVEWLLMRYATPRGELIPNHPAGEEYAARARATYAGGYVREPKRGLVEHIAVFDFRSFGPSIIVSHNIDPSTLIVGNCEENRAPELEYCFSLEREGFIPAILKELIRRRAEIKRELKRSEGDRRRTLSFAEKALKILANSFYGYMGYPRARWYRRECAESVAAFARMYIKQVMRIAEEEFKLEVVYGDTDSLFVVIPPEKRELAQKFLQKVNESMPGIIELEFEGFYRRGLFVTKKRYALLSEDGKMVVKGLEFVRRDWAPIARETQKEVLRILLEEADPEKAARLVRDVIERIRQRRVSLEDITIYTQLTKRIKSYKSLEPHVVAAQKLKERGREVAPGMIIGYIITKGTKGISQRATPVEFARLEDYDPEYYIDNQILPAIQRIFEAIGYTRDYLKEGITQTSLSRWF

SEQ ID NO: 1813 - protein, 792 aa, unidentified; identical to SEQ ID NO: 1753
  REGION 1..792: note = Description of Unknown: Synthetic polypeptide

SEQ ID NO: 1814 - protein, 792 aa, unidentified
  REGION 1..792: note = Description of Unknown: Synthetic polypeptide
MPRILKGFLIDADFETVEGRALIRLFLRGEEGSFVVYDDSFSPYFYALPGDEPERVKERILASGAAEAIQKVEIEEKRLFGTPRVALRITVSHPQDVPRIRERIRRVEGVDLILEHDILFVRRYLIDRGIKPLTWLRLEVEERDGRALLRGVEQLEEEPPELRVAAVAIAVYNPKGAPRSSKDEIIMISVATSDGVEKVLTWREVQGLEQVEVLQDEKEMLLRFAELIKEGDYDVIVGYNTDSFDFPYIRDRLKKLGISLPLGRLDAELEVSRRGALPEARIRGRAHVDLYPIVRRHVKLNSYVLESVVEELLGIKKEKLDGERLFTYWDEGGEKRALLARYALEDARVTLALAEKFLPLYCELSTIVGQSLNDVARMTSGQLVEWLLMRYATPRGELIPNHPAGEEYAARARATYAGGYVREPKRGLVEHIAVFDFRSFGPSIIVSHNIDPSTLIVGNCEENRAPELEYCFSLEREGFIPAILKELIRRRAEIKRELKRSEGDRRRTLSFATKALKILANSFYGYMGYPRARWYRRECAESVAAFARMYIKQVMRIAEEEFKLEVVYGDTDSLFVVIPPEKRELAQKFLQKVNESMPGIIELEFEGFYRRGLFVTKKRYALLSEDGKMVVKGLEFVRRDWAPIARETQKEVLRILLEEADPEKAARLVRDVIERIRQRRVSLEDITIYTQLTKRIKSYKSLEPHVVAAQKLKERGREVAPGMIIGYIITKGTKGISQRATPVEFARLEDYDPEYYIDNQILPAIQRIFEAIGYTRDYLKEGITQTSLSRWF

SEQ ID NO: 1815 - protein, 792 aa, unidentified
  REGION 1..792: note = Description of Unknown: Synthetic polypeptide
MPRILKGFLIDADFETVEGRALIRLFLRGEEGSFVVYDDSFSPYFYALPGDEPERVKERILASGAAEAIQKVEIEEKRLFGTPRVALRITVSHPQDVPRIRERIRRVEGVDLILEHDILFVRRYLIDRGIKPLTWLRLEVEERDGRALLRGVEQLEEEPPELRVAAVAIAVYNPKGAPRSSKDEIIMISVATSDGVEKVLTWREVQGLEQVEVLQDEKEMLLRFAELIKEGDYDVIVGYNTDSFDFPYIRDRLKKLGISLPLGRLDAELEVSRRGALPEARIRGRAHVDLYPIVRRHVKLNSYVLESVVEELLGIKKEKLDGERLFTYWDEGGEKRALLARYALEDARVTLALAEKFLPLYCELSTIVGQSLNDVARMNSGQLVEWLLMRYATPRGELIPNHPAGEEYAARARATYAGGYVREPKRGLVEHIAVFDFRSFGPSIIVSHNIDPSTLIVGNCEENRAPELEYCFSLEREGFIPAILKELIRRRAEIKRELKRSEGDRRRTLSFAEKALKILANSFYGYMGYPRARWYRRECAESVAAFARMYIKQVMRIAEEEFKLEVVYGDTDSLFVVIPPEKRELAQKFLQKVNESMPGIIELEFEGFYRRGLFVTKKRYALLSEDGKMVVKGLEFVRRDWAPIARETQKEVLRILLEEADPEKAARLVRDVIERIRQRRVSLEDITIYTQLTKRIKSYKSLEPHVVAAQKLKERGREVAPGMIIGYIITKGTKGISQRATPVEFARLEDYDPEYYIDNQILPAIQRIFEAIGYTRDYLKEGITQTSLSRWF

SEQ ID NO: 1816 - protein, 792 aa, unidentified
  REGION 1..792: note = Description of Unknown: Synthetic polypeptide
MPRILKGFLIDADFETVEGRALIRLFLRGEEGSFVVYDDSFSPYFYALPGDEPERVKERILASGAAEAIQKVEIEEKRLFGTPRVALRITVSHPQDVPRIRERIRRVEGVDLILEHDILFVRRYLIDRGIKPLTWLRLEVEERDGRALLRGVEQLEEEPPELRVAAVAIAVYNPKGAPRSSKDEIIMISVATSDGVEKVLTWREVQGLEQVEVLQDEKEMLLRFAELIKEGDYDVIVGYNTDSFDFPYIRDRLKKLGISLPLGRLDAELEVSRRGALPEARIRGRAHVDLYPIVRRHVKLNSYVLESVVEELLGIKKEKLDGERLFTYWDEGGEKRALLARYALEDARVTLALAEKFLPLYLELSTIVGQSLNDVARMTSGQLVEWLLMRYATPRGELIPNHPAGEEYAARARATYAGGYVREPKRGLVEHIAVFDFRSFGPSIIVSHNIDPSTLIVGNCEENRAPELEYCFSLEREGFIPAILKELIRRRAEIKRELKRSEGDRRRTLSFAEKALKILANSFYGYMGYPRARWYRRECAESVAAFARMYIKQVMRIAEEEFKLEVVYGDTDSLFVVIPPEKREVAQKFLQKVNESMPGIIELEFEGFYRRGLFVTKKRYALLSEDGKMVVKGLEFVRRDWAPIARETQKEVLRILLEEADPEKAARLVRDVIERIRQRRVSLEDITIYTQLTKRIKSYKSLEPHVVAAQKLKERGREVAPGMIIGYIITKGTKGISQRATPVEFARLEDYDPEYYIDNQILPAIQRIFEAIGYTRDYLKEGITQTSLSRWF

SEQ ID NO: 1817 - protein, 792 aa, unidentified
  REGION 1..792: note = Description of Unknown: Synthetic polypeptide
MPRILKGFLIDADFETVEGRALIRLFLRGEEGSFVVYDDSFSPYFYALPGDEPERVKERILASGAAEAIQKVEIEEKRLFGTPRVALRITVSHPQDVPRIRERIRRVEGVDLILEHDILFVRRYLIDRGIKPLTWLRLEVEERDGRALLRGVEQLEEEPPELRVAAVAIAVYNPKGAPRSSKDEIIMISVATSDGVEKVLTWREVQGLEQVEVLQDEKEMLLRFAELIKEGDYDVIVGYNTDSFDFPRIRDRLKKLGISLPLGRLDAELEVSRRGALPEARIRGRAHVDLYPIVRRHVKLNSYVLESVVEELLGIKKEKLDGERLFTYWDEGGEKRALLARYALEDARVTLALAEKFLPLYCELSTIVGQSLNDVARMTSGQLVEWLLMRYATPRGELIPNHPAGEEYAARARATYAGGYVREPKRGLVEHIAVFDFRSFGPSIIVSHNIDPSTLIVGNCEENRAPELEYCFSLEREGFIPAILKELIRRRAEIKRELKRSEGDRRRTLSFAEKALKILANSFYGYMGYPRARWYRRECAESVAAFARMYIKQVMRIAEEEFKLEVVYGDTDSLFVVIPPEKRELAQKFLQKVNESMPGIIELEFEGFYRRGLFVTKKRYALLSEDGKMVVKGLEFVRRDWAPIARETQKEVLRILLEEADPEKAARLVRDVIERIRQRRVSLEDITIYTQLTKRIKSYKSLEPHVVAAQKLKERGREVAPGMIIGYIITKGTKGISQRATPVEFARLEDYDPEYYIDNQILPAIQRIFEAIGYTRDYLKEGITQTSLSRWF

SEQ ID NO: 1818 - protein, 792 aa, unidentified
  REGION 1..792: note = Description of Unknown: Synthetic polypeptide
MPRILKGFLIDADFETVEGRALIRLFLRGEEGSFVVYDDSFSPYFYALPGDEPERVKERILASGAAEAIQKVEIEEKRLFGTPRVALRITVSHPQDVPRIRERIRRVEGVDLILEHDILFVRRYLIDRGIKPLTWLRLEVEERDGRALLRGVEQLEEEPPELRVAAVAIAVYNPKGAPRSSKDEIIMISVATSDGVEKVLTWREVQGLEQVEVLQDEKEMLLRFAELIKEGDYDVIVGYNTDSFDFPYIRDRLKKLGISLPLGRLDAELEVSRRGALPEARIRGRAHVDLYPIVRRHVKLNSYDLESVVEELLGIKKEKLDGERLFTYWDEGGEKRALLARYALEDARVTLALAEKFLPLYCELSTIVGQSLNDVARMTSGQLVEWLLMRYATPRGELIPNHPAGEEYAARARATYAGGYVREPKRGLVEHIAVFDFRSFGPSIIVSHNIDPSTLIVGNCEENRAPELEYCFSLEREGFIPAILKELIRRRAEIKRELKRSEGDRRRTLSFAEKALKILANSFYGYMGYPRARWYRRECAESVAAFARMYIKQVMRIAEEEFKLEVVYGDTDSLFVVIPPEKRELAQKFLQKVNESMPGIIELEFEGFYRRGLFVTKKRYALLSEDGKMVVKGLEFVRRDWAPIARETQSEVLRILLEEADPEKAARLVRDVIERIRQRRVSLEDITIYTQLTKRIKSYKSLEPHVVAAQKLKERGREVAPGMIIGYIITKGTKGISQRATPVEFARLEDYDPEYYIDNQILPAIQRIFEAIGYTRDYLKEGITQTSLSRWF

SEQ ID NO: 1819 - protein, 792 aa, unidentified
  REGION 1..792: note = Description of Unknown: Synthetic polypeptide
MPRILKGFLIDADFETVEGRALIRLFLRGEEGSFVVYDDSFSPYFYALPGDEPERVKERILASGAAEAIQKVEIEEKRLFGTPRVALRITVSHPQDVPRIRERIRRVEGVDLILEHDILFVRRYLIDRGIKPLTWLRLEVEERDGRALLRGVEQLEEEPPELRVAAVAIAVYNPKGAPRSSKDEIIMISVATSDGVEKVLTWREVQGLEQVEVLQDEKEMLLRFAELIKEGDYDVIVGYNTDSFDFPYIRDRLKKLGISLPLGRLDAELEVSRRGALPEARIRGRAHVDLYPIVRRHVKLNSYVLESVVEELLGIKKEKLDGERLFTYWDEGGEKRALLARYALEDARVTLALAEKFLPLYCELSTIVGQSLNDVARMTSGQLVEWLLMRYATPRGELIPNHPAGEEYAARARATYAGGYVREPKRGLVEHIAVFDFRSFGPSIIVSHNIDPSTLIVGNCEENRAPELEYCFSLEREGFIPAILKELIRRRAEIKRELKRSEGDRRRTLSFAEKALKILANSFYGYMGYPRARWYRRECAESVAAFARMYIRQVMRIAEEEFKLEVVYGDTDSLFVVIPPEKRELAQKFLQKVNESMPGIIELEFEGFYRRGLFVTKKRYALLSEDGKMVVKGLEFVRRDWAPIARETQKEVLRILLEEADPEKAARLVRDVIERIRQRRVSLEDITIYTQLTKRIKSYKSLEPHVVAAQKLKERGREVAPGMIIGYIITKGTKGISQRATPVEFARLEDYDPEYYIDNQILPAIQRIFEAIGYTRDYLKEGITQTSLSRWF

SEQ ID NO: 1820 - protein, 586 aa, unidentified
  REGION 1..586: note = Description of Unknown: Synthetic polypeptide
MPRILKGFLIDADFETVEGRALIRLFLRGEEGSFVVYDDSFSPYFYALPGDEPERVKERILASGAAEAIQKVEIEEKRLFGTPRVALRITVSHPQDVPRIRERIRRVEGVDLILEHDILFVRRYLIDRGIKPLTWLRLEVEERDGRALLRGVEQLEEEPPELRVAAVAIAVYNPKGAPRSSKDEIIMISVATSDGVEKVLTWREVQGLEQVEVLQDEKEMLLRFAELIKEGDYDVIVGYNTDSFDFPYIRDRLKKLGISLPLGRLDAELEVSRRGALPEARIRGRAHVDLYPIVRRHVKLNSYVLESVVEELLGIKKEKLDGERLFTYWDEGGEKRALLARYALEDARVTLALAEKFLPLYCELSTIVGQSLNDVARMTSGQLVEWLLMRYATPRGELFPNHPAGEEYAARARATHAGGYVREPKRGLVEHIAVFDFRSFGPSIIVSHNIDPSTLIVGNCEENRTPELEYCFSLEREGFIPAILKVLIRRRAEIKRELKRSEGDRRRTLSFAEKALKILANSFYGYLGFPRAHWYRRECAESVAAFARMYIKQVMRIAEEEFKLEVVYGDTDSLFVVIPPERRELA

SEQ ID NO: 1821 - protein, 792 aa, unidentified
  REGION 1..792: note = Description of Unknown: Synthetic polypeptide
MPRILKGFLIDADFETVEGRALIRLFLRGEEGSFVVYDDSFSPYFYALPGDEPERVKERILASGAAEAIQKVEIEEKRLFGTPRVALRITVSHPQDVPRIRERIRRVEGVDLILEHDILFVRRYLIDRGIKPLTWLRLEVEERDGRALLRGVEQLEEEPPELRVAAVAIAVYNPKGAPRSSKDEIIMISVATSDGVEKVLTWREVQGLEQVEVLQDEKEMLLRFAELIKEGDYDVIVGYNTDSFDFPYIRDRLKKLGISLPLGRLDAELEVSRRGALPEARIRGRAHVDLYPIVRRHVKLNSYVLESVVEELLGIKKEKLDGERLFTYWDEGGEKRALLARYALEDARVTLALAEKFLPLYCELSTIVGQSLNDVARMTSGQLVEWLLMRYATPRGELIPNHPAGEEYAARARATYAGGYVREPKRGLVEHIAVFDFRSFGPSIIVSHNIDPSTLIVGNCEENRAPELEYCFSLEREGFIPAILKELIRRRAEIKRELKRSEGDRRRTLSFAEKALKILANSFYGYMGYPRARWYRRECAESVAAFARMYIKQVMRIAEEERKLEVVYGDTDSLFVVIPPEKRELAQKFLQKVNESMPGIIELEFEGFYRRGLFVTKKRYALLSEDGKMVVKGLEFVRRDWAPIARETQKEVLRILLEEADPEKAARLVRDVIERIRQRRVSLEDITIYTQLTKRIKSYKSLEPHVVAAQKLKERGREVAPGMIIGYIITKGTKGISQRATPVEFARLEDYDPEYYIDNQILPAIQRIFEAIGYTRDYLKEGITQTSLSRWF

SEQ ID NO: 1822 - protein, 792 aa, unidentified
  REGION 1..792: note = Description of Unknown: Synthetic polypeptide
MPRILKGFLIDADFETVEGRALIRLFLRGEEGSFVVYDDSFSPYFYALPGDVPERVKERILASGAAEAIQKVEIEEKRLFGTPRVALRITVSHPQDMPRIRERIRRVEGVDLILEHDILFVRRYLIDRGIKPLTWLRLEVEERDGRALLRGVEQLEEEPPELRVAAVAIAVYNPKGAPRSSKDEIIMISVATSDGVEKVLTWREVQGLEQVEVLQDEKEMLLRFAELIKEGDYDVIVGYNTDSFDFPYIRDRLKKLGISLPLGRLDAELEVSRRGALPEARIRGRAHVDLYPIVRRHVKLNSYVLESVVEELLGIKKEKLDGERLFTYWDEGGEKRALLARYALEDARVTLALAEKFLPLYCELSTIVGQSLNDVARMTSGQLVEWLLMRYATPRGELIPNHPAGEEYAARARATYAGGYVREPKRGLVEHIAVFDFRSFGPSIIVSHNIDPSTLIVGNCEENRAPELEYCFSLEREGFIPAILKELIRRRAEIKRELKRSEGDRRRTLSFAEKALKILANSFYGYMGYPRARWYRRECAESVAAFARMYIKQVMRIAEEEFKLEVVYGDTDSLFVVIPPEKRELAQKFLQKVNESMPGIIELEFEGFYRRGLFVTKKRYALLSEDGKMVVKGLEFVRRDWAPIARETQKEVLRILLEEADPEKAARLVRDVIERIRQRRVSLEDITIYTQLTKRIKSYKSLEPHVVAAQKLKERGREVAPGMIIGYIITKGTKGISQRATPVEFARLEDYDPEYYIDNQILPAIQRIFEAIGYTRDYLKEGITQTSLSRWF

SEQ ID NO: 1823 - protein, 792 aa, unidentified
  REGION 1..792: note = Description of Unknown: Synthetic polypeptide
MPRILKGFLIDADFETVEGRALIRLFLRGEEGSFVVYDDSFSPYFYALPGDEPERVKERILASGAAEAIQKVEIEEKRLFGTPRVALRITVSHPQDVPRIRERIRRVEGVDLILEHDILFVRRYLIDRGIKPLTWLRLEVEERDGRALLRGVEQLEEEPPELRVAAVAIAVYNPKGAPRSSKDEIIMISVATSDGVEKVLTWREVQGLEQVEVLQDEKEMLLRFAELIKEGDYDVIVGYNTDSFDFPYIRDRLKKLGISLPLGRLDAELEVSRRGALPEARIRGRAHVDLYPIVRRHVKLNSYVLESVVEELLGIKKEKLDGERLFTYWDEGGEKRALLARYALEDARVTLALAEKFLPLYCELSTIVGQSLNDVARMTSGQLVEWLLMRYATPRGELIPNLPAGEEYAARARATYAGGYVREPKRGLVEHIAVFDFRSFGPSIIVSHNIDPSTLIVGNCEENRAPELEYCFSLEREGFIPAILKELIRRRAEIKRELKRSEGDRRRTLSFAEKALKILANSFYGYMGYPRARWYRRECAESVAAFARMYIKQVMRIAEEEFKLEVVYGDTDSLFVVIPPEKRELAQKFLQKVNESMPGIIELEFEGFYRRGLFVTKKRYALLSEDGKMVVKGLEFVRRDWAPIARETQKEVLRILLEEADPEKAARLVRDVIERIRQRRVSLEDITIYTQLTKRIKSYKSLEPHVVAAQKLKERGREVAPGMIIGYIITKGTKGISQRATPVEFARLEDYDPEYYIDNQILPAIQRIFEAIGYTRDYLKEGITQTSLSRWF

SEQ ID NO: 1824 - protein, 789 aa, unidentified
  REGION 1..789: note = Description of Unknown: Synthetic polypeptide
MPRILKGFLIDADFETVEGRALIRLFLRGEEGSFVVYDDSFSPYFYALPGDEPERVKERILASGAAEAIQKVEIEEKRLFGTPRVALRITVSHPLDVPRIRERIRRVEGVDLILEHDILFVRRYLIDRGIKPLTWLRLEVEERDGRALLRGVEQLEEEPPELRVAAVAIAVYNPKGAPRSSKDEIIMISVATSDGVEKVLTWREVQGLEQVEVLQDEKEMLLRFAELIKEGDYDVIVGYNTDSFDFPYIRDRLKKLGISLPLGRLDAELEVSRRGALPEARIRGRAHVDLYPIVRRHVKLNSYDLESVVEELLGIKKEKLDGERLFTYWDEGGEKRALLARYALEDARVTLALAEKFLPLYCELSTIVGQSLNDVARMTSGQLVEWLLMRYATPRGELIPNHPAGEEYAARARATYAGGYVREPKRGLVEHIAVFDFRSFGPSIIVSHNIDPSTLIVGNCEENRAPELEYCFSLEREGFIPAILKELIRRRAEIKRELKRSEGDRRRTLSFAEKALKILANSFYGYMGYPRARWYRRECAESVAAFARMYIKQVMRIAEEEFKLEVVYGDTDSLFVVIPPEKRELAQKFLQKVNESMPGIIELEFEGFYRRGLFVTKKRYALLSEDGKMVVKGLEFVRRDWAPIARETQKEVLRILLEEADPEKAARLVRDVIERIRQRRVSLEDITIYTQLTKRIKSYKSLEPHVVAAQKLKERGREVAPGMIIGYIITKGTKGISQRATPVEFARLEDYDPEYYIDNQILPAIQRIFEAIGYTRDYLKEGITQTSLS

SEQ ID NO: 1825 - protein, 792 aa, unidentified
  REGION 1..792: note = Description of Unknown: Synthetic polypeptide
MPRILKGFLIDADFETVEGRALIRLFLRGEEGSFVVYDDSFSPYFYALPGDEPERVKERILASGAAEAIQKVEIEEKRLFGTPRVALRITVSHPQDVPRIRERIRRVEGVDLILEHDILFVRRYLIDRGIKPLTWLRLEVEERDGRALLRGVEQLEEEPPELRVAAVAIAVYNPKGAPRSSKDEIIMISVATSDGVEKVLTWREVQGLEQVEVLQDEKEMLLRFAELIKEGDYDVIVGYNTDSFDFPYIRDRLKKLGISLPLGRLDAELEVSRRGALPEARIRGRAHVDLYPIVRRHVKLNSYDLESVVEELLGIKKEKLDGERLFTYWDEGGEKRALLARYALEDARVTLALAEKFLPLYCELSTIVGQSLNDVARMTSGQLVEWLLMRYATPRGELIPNHPAGEEYAARARATYAGGYVREPKRGLVEHIAVFDFRSFGPSIIVSHNIDPSTLIVGNCEENRAPELEYCFSLEREGFIPAILKELIRRRAEIKRELKRSEGDRRRTLSFAEKALKILANSFYGYMGYPRARWYRRECAESVAAFARMYIKQVMRIAEEEFKLEVVYGDTDSLFVVIPPEKRELAQKFLQKVNESMPGIIELEFEGFYRRGLFVTKKRYALLSEDGKMVVKGLEFVRRDWAPIANETQKEVLRILLEEADPEKAARLVRDVIERIRQRRVSLEDITIYTQLTKRIKSYKSLEPHVVAAQKLKERGREVAPGMIIGYIITKGTKGISQRATPVEFARLEDYDPEYYIDNQILPAIQRIFEAIGYTRDYLKEGITQTSLSRWF

SEQ ID NO: 1826 - protein, 792 aa, unidentified
  REGION 1..792: note = Description of Unknown: Synthetic polypeptide
MPRILKGFLIDADFETVEGRALIRLFLRGEEGSFVVYDDSFSPYFYALPGDEPERVKERILASGAAEAIQKVEIEEKRLFGTPRVALRITVSHPQDVPRIRERIRRVEGVDLILEHDILFVRRYLIDRGIKPLTWLRLEVEERDGRALLRGVEQLEEEPPELRVAAVAIAVYNPKGAPRSSKDEIIMISVATSDGVEKVLTWREVQGLEQVEVLQDEKEMLLRFAELIKEGDYDVIVGYNTDSFDFPYIRDRLKKLGISLPLGRLDAELEVSRRGALPEARIRGRAHVDLYPIVRRHVKLNSYVLESVVEELLGIKKEKLDGERLFTYWDEGGEKRALLARYALEDARVTLALAERFLPLYCELSTIVGQSLNDVARMTSGQLVEWLLMRYATPRGELIPNHPAGEEYAARARATYAGGYVREPKRGLVEHIAVFDFRSFGPSIIVSHNIDPSTLIVGNCEENRAPELEYCFSLEREGFIPAILKELIRRRAEIKRELKRSEGDRRRTLSFAEKALKILANSFYGYMGYPRARWYRRECAESVAAFARMYIKQVMRIAEEEFKLEVVYGDTDSLFVVIPPEKRELAQKFLQKVNESMPGIIELEFEGFYRRGLFVTKKRYALLSEDGKMVVKGLEFVRRDWAPIARETQKEVLRILLEEADPEKAARLVRDVIERIRQRRVSLEDITIYTQLTKRIKSYKSLEPHVVAAQKLKERGREVAPGMIIGYIITKGTKGISQRATPVEFARLEDYDPEYYIDNQILPAIQRIFEAIGYTRDYLKEGITQTSLSRWF

SEQ ID NO: 1827 - protein, 792 aa, unidentified
  REGION 1..792: note = Description of Unknown: Synthetic polypeptide
MPRILKGFLIDADFETVEGRALIRLFLRGEEGSFVVYDDSFSPYFYALPGDEPERVKERILASGAAEAIQKVEIEEKRLFGTPRVALRITVSHPQDVPRIRERIRRVEGVDLILEHDILFVRRYLIDRGIKPLTWLRLEVEERDGRALLRGVEQLEEEPPELRVAAVAIAVYNPKGAPRSSKDEIIMISVATSDGVEKVLTWREVQGLEQVEVLQDEKEMLLRFAELIKEGDYDVIVGYNTDSFDFPYIRDRLKKLGISLPLGRLDAELEVSRRGALPEARIRGRAHVDLYPIVRRHVKLNSYDLESVVEELLGIKKEKLDGERRFTYWDEGGEKRALLARYALEAARVTLALAEKFLPLYCELSTIVGQSLNDVARMTSGQLVEWLLMRYATPRGELIPNHPAGEEYAARARATYAGGYVREPKRGLVEHIAVFDFRSFGPSIIVSHNIDPSTLIVGNCEENRAPELEYCFSLEREGFIPAILKELIRRRAEIKRELKRSEGDRRRTLSFAEKALKILANSFYGYMGYPRARWYRRECAESVAAFARMYIKQVMRIAEEEFKLEVVYGDTDSLFVVIPPEKRELAQKFLQKVNESMPGIIELEFEGFYRRGLFVTKKRYALLSEDGKMVVKGLEFVRRDWAPIARETQKEVLRILLEEADPEKAARLVRDVIERIRQRRVSLEDITIYTQLTKRIKSYKSLEPHVVAAQKLKERGREVAPGMIIGYIITKGTKGISQRATPVEFARLEDYDPEYYIDNQILPAIQRIFEAIGYTRDYLKEGITQTSLSRWF

SEQ ID NO: 1828 - protein, 792 aa, unidentified
  REGION 1..792: note = Description of Unknown: Synthetic polypeptide
MPRILKGFLIDADFETVEGRALIRLFLRGEEGSFVVYDDSFSPYFYALPGDEPERVKERILASGAAEAIQKVEIEEKRLFGTPRVALRITVSHPQDVPRIRERIRRVEGVDLILEHDILFVRRYLIDRGIKPLTWLRLEVEERDGRALLRGVEQLEEEPPELRVAAVAIAVYNPKGAPRSSKDEIIMISVATSDGVEKVLTWREVQGLEQVEVLQDEKEMLLRFAELIKEGDYDVIVGYNTDSFDFPYIRDRLKKLGISLPLGRLDAELEVSRRGALPEARIRGRAHVDLYPIVRRHVKLNSYVLESVVEELLGIKKEKLDGERLFTYWDEGGEKRALLARYALEDARVTLALAEEFLPLYCELSTIVGQSLNDVARMTSGQLVEWLLMRYATPRGELIPNHPAGEEYAARARATYAGGYVREPKRGLVEHIAVFDFRSFGPSIIVSHNIDPSTLIVGNCEENRAPELEYCFSLEREGFIPAILKELIRRRAEIKRELKRSEGDRRRTLSFAEKALKILANSFYGYMGYPRARWYRRECAESVAAFARMYIKQVMRIAEEEFKLEVVYGDTDSLFVVIPPEKRELAQKFLQKVNESMPGIIELEFEGFYRRGLFVTKKRYALLSEDGKMVVKGLEFVRRDWAPIARETQKEVLRILLEEADPEKAARLVRDVIERIRQRRVSLEDITIYTQLTKRIKSYKSLEPHVVAAQKLKERGREVAPGMIIGYIITKGTKGISQRATPVEFARLEDYDPEYYIDNQILPAIQRIFEAIGYTRDYLKEGITQTSLSRWF

SEQ ID NO: 1829 - protein, 792 aa, unidentified
  REGION 1..792: note = Description of Unknown: Synthetic polypeptide
MPRILKGFLIDADFETVEGRALIRLFLRGEEGSFVVYDDSFSPYFYALPGDEPERVKERILASGAAEAIQKVEIEEKRLFGTPRVALRITVSHPQDVPRIRERIRRVEGVDLILEHDILFVRRYLIDRGIKPLTWLRLEVEERDGRALLRGVEQLEEEPPELRVAAVAIAVYNPKGAPRSSKDEIIMISVATSDGVEKVLTWREVQGLEQVEVLQDEKEMLLRFAELIKEGDYDVIVGYNTDSFDFPYIRDRLKKLGISLPLGRLDAELEVSRRGALPEARIRGRAHVDLYPIVRRHVKLNSYVLESVVEELLGIKKEKLDGERLFTYWDEGGEKRALLARYALEDARVTLALAEKFLPLYCELSTIVGQSLNDVARMTSGQLVEWLLMRYATPRGELIPNHPAGEEYAARARATYAGGYVREPKRGLVEHIAVFDFRSFGPSIIVSHNIDPSTLIVGNCEENRAPELEYCFSLEREGFIPAILKELIRRRAEIKRELKRSEGDRRRTLSFAEKALKILAYSFYGYMGYPRARWYRRECAESVAAFARMYIKQVMRIAEEEFKLEVVYGDTDSLFVVIPPEKRELAQKFLQKVNESMPGIIELEFEGFYRRGLFVTKKRYALLSEDGKMVVKGLEFVRRDWAPIARETQKEVLRILLEEADPEKAARLVRDVIERIRQRRVSLEDITIYTQLTKRIKSYKSLEPHVVAAQKLKERGREVAPGMIIGYIITKGTKGISQRATPVEFARLEDYDPEYYIDNQILPAIQRIFEAIGYTRDYLKEGITQTSLSRWF

SEQ ID NO: 1830 - protein, 792 aa, unidentified
  REGION 1..792: note = Description of Unknown: Synthetic polypeptide
MPRILKGFLIDADFETVEGRALIRLFLRGEEGSFVVYDDSFSPYFYALPGDEPERVKERILASGAAEAIQKVEIEEKRLFGTPRVALRITVSHPQDVPRIRERIRRVEGVDLILEHDILFVRRYLIDRGIKPLTWLRLEVEERDGRALLRGVEQLEEEPPELRVAAVAIAVYNPKGAPRSSKDEIIMISVATSDGVEKVLTWREVQGLEQVEVLQDEKEMLLRFAELIKEGDYDVIVGYNTDSFDFPYIRDRLKKLGISLPLGRLDAELEVSRRGALPEARIRGRAHVDLYPIVRRHVKLNSYVLESVVEELLGIKKEKLDGERLFTYWDEGGEKRALLARYALEDARVTLALAEKFLPLYCELSTIVGQSLNDVARMTSGQLVEWLLMRYATPRGELIPNHPAGEEYAARARATYAGGYVREPKRGLVEHIAVFDFRSFGPSIIVSHNIDPSTLIVGNCEENRAPELEYCFSLEREGFIPAILKELIRRRAEIKRELKRSEGDRRRTLSFAEKALKILANSFYGYMGYPRARWYRRECAESVAAFARMYIKQVMRIAEEEFKLEVVYGDTDSLFVVIPPEKRELAQKFLQKVNESMPGIIELEFEGFYRRGLFVTKKRYALLSEDGKMVVKGLEFVRRDWAPIARETQKEVLRILLEEADPEKAARLVRDVIERIRQRRVSLEDITIYTQLTKRIKSYKSLEPHVVAAQKLKERGREVAPGMIIGYIITKGTKGISQRATPVEFARLEDYRPEYYIDNQILPAIQRIFEAIGYTRDYLKEGITQTSLSRWF

SEQ ID NO: 1831 - protein, 789 aa, unidentified
  REGION 1..789: note = Description of Unknown: Synthetic polypeptide
MPRILKGFLIDADFETVEGRALIRLFLRGEEGSFVVYDDSFSPYFYALPGDEPERVKERILASGAAEAIQKVEIEEKRLFGTPRVALRITVSHPQDVPRIRERIRRVEGVDLILEHDILFVRRYLIDRGIKPLTWLRLEVEERDGRALLRGVEQLEEEPPELRVAAVAIAVYNPKGAPRSSKDEIIMISVATSDGVEKVLTWREVQGLEQVEVLQDEKEMLLRFAELIKEGDYDVIVGYNTDSFDFPYIRDRLKKLGISLPLGRLDAELEVSRRGALPEARIRGRAHVDLYPIVRRHVKLNSYVLESVVEELLGIKKEKLDGERLFTYWDEGGEKRALLARYALEDARVTLALAEKFLPLYLDLSTIVGQSLNDVARMTSGQLVEWLLMRYATPRGELIPNHPAGEEYAARARATYAGGYVREPKRGLVEHIAVFDFRSFGPSIIVSHNIDPSTLIVGNCEENRAPELEYCFSLEREGFIPAILKELIRRRAEIKRELKRSEGDRRRTLSFAEKALKILANSFYGYMGYPRARWYRRECAESVAAFARMYIKQVMRIAEEEFKLEVVYGDTDSLFVVIPPEKRELAQKFLQKVNESMPGIIELEFEGFYRRGLFVTKKRYALLSEDGKMVVKGLEFVRRDWAPIARETQKEVLRILLEEADPEKAARLVRDVIERIRQRRVSLEDITIYTQLTKRIKSYKSLEPHVVAAQKLKERGREVAPGMIIGYIITKGTKGISQRATPVEFARLEDYDPEYYIDNQILPAIQRIFEAIGYTRDYLKEGITQTSLS

SEQ ID NO: 1832 - protein, 792 aa, unidentified
  REGION 1..792: note = Description of Unknown: Synthetic polypeptide
MPRILKGFLIDADFETVEGRALIRLFLRGEEGSFVVYDDSFSPYFYALPGDEPERVKERILASGAAEAIQKVEIEEKRLFGTPRVALRITVSHPQDVPRIRERIRRVEGVDLILEHDILFVRRYLIDRGIKPLTWLRLEVEERDGRALLRGVEQLEEEPPELRVAAVAIAVYNPKGAPRSSKDEIRMISVATSDGVEKVLTWREVQGLEQVEVLQDEKEMLLRFAELIKEGDYDVIVGYNTDSFDFPYIRDRLKKLGISLPLGRLDAELEVSRRGALPEARIRGRAHVDLYPIVRRHVKLNSYVLESVVEELLGIKKEKLDGERLFTYWDEGGEKRALLARYALEDARVTLALAEKFLPLYLELSTIVGQSLNDVARMTSGQLVEWLLMRYATPRGELIPNHPAGEEYAARARATYAGGYVREPKRGLVEHIAVFDFRSFGPSIIVSHNIDPSTLIVGNCEENRAPELEYCFSLEREGFIPAILKELIRRRAEIKRELKRSEGDRRRTLSFAEKALKILANSFYGYMGYPRARWYRRECAESVAAFARMYIKQVMRIAEEEFKLEVVYGDTDSLFVVIPPEKRELAQKFLQKVNESMPGIIELEFEGFYRRGLFVTKKRYALLSEDGKMVVKGLEFVRRDWAPIARETQKEVLRILLEEADPEKAARLVRDVIERIRQRRVSLEDITIYTQLTKRIKSYKSLEPHVVAAQKLKERGREVAPGMIIGYIITKGTKGISQRATPVEFARLEDYDPEYYIDNQILPAIQRIFEAIGYTRDYLKEGITQTSLSRWF

SEQ ID NO: 1833 - protein, 779 aa, unidentified
  REGION 1..779: note = Description of Unknown: Synthetic polypeptide
MPRILKGFLIDADFETVEGRALIRLFLRGEEGSFVVYDDSFSPYFYALPGDEPERVKERILASGAAEAIQKVEIEEKRLFGTPRVALRITVSHPQDVPRIRERIRRVEGVDLILEHDILFVRRYLIDRGIKPLTWLRLEVEERDGRALLRGVEQLEEEPPELRVAAVAIAVYNPKGAPRSSKDEIIMISVATSDGVEKVLTWREVQGLEQVEVLQDEKEMLLRFAELIKEGDYDVIVGYNTDSFDFPYIRDRLKKLGISLPLGRLDAELEVSRRGALPEARIRGRAHVDLYPIVRRHVKLNSYVLESVVEELLGIKKEKLDGERLFTYWDEGGEKRALLARYALEDARVTLALAEKFLPLYCELSTIVGQSLNDVARMTSGQLVEWLLMRYATPRGELIPNHPAGEEYAARARATYAGGYVREPKRGLVEHIAVFDFRSFGPSIIVSHNIDPSTLIVGNCEENRAPELEYCFSLEREGFIPAILKELIRRRAEIKRELKRSEGDRRRTLSFAEKALKILANSFYGYMGYPRARWYRRECAESVAAFARMYIKQVMRIAEEEFKLEVVYGDTDSLFVVIPPEKRELAQKFLQKVNESMPGIIELEFEGFYRRGLFVTKKRYALLSEDGKMVVKGLEFVRRDWAPIARETQKEVLRILLEEADPEKAARLVRDVIERIRQRRVSLEDITIYTQLTKRIKSYKSLEPHVVAAQKLKERGREVAPGMIIGYIITKGTKGISQRATPVEFARLEDYDPEYYIDNQILPAIQRIFEAIGYTRDYL

SEQ ID NO: 1834 - protein, 792 aa, unidentified
  REGION 1..792: note = Description of Unknown: Synthetic polypeptide
MPRILKGFLIDADFETVEGRALIRLFLRGEEGSFVVYDDSFSPYFYALPGDEPERVKERILASGAAEAIQKVEIEEKRLFGTPRVALRITVSHPQDVPRIRERIRRVEGVDLILEHDILFVRRYLIDRGIKPLTWLRLEVEERDGRALLRGVEQLEEEPPELRVAAVAIAVYNPKGAPRSSKDEIIMISVATSDGVEKVLTWREVQGLEQVEVLQDEKEMLLRFAELIKEGDYDVIVGYNTDSFDFPYIRDRLKKLGISLPLGRLDAELEVSRRGALPEARIRGRAHVDLYPIVRRHVKLNSYVLESVVEELLGIKKEKLDGERLFTYWDEGGEKRALLARYALEDARVTLALAEKFLPLYCELSTIVGQSLNDVARMTSGQLVEWLLMRYATPRGELIPNHPAGEEYAARARATYAGGYVREPKRGLVEHIAVFDFRSFGPSIIVSHNIDPSTLIVGNCEENRAPELEYCFSLEREGFIPAILKELIRRRAEIKRELKRSEGERRRTLSFAEKALKILANSFYGYMGYPRARWYRRECAESVAAFARMYIKQVMRIAEEEFKLEVVYGDTDSLFVVIPPEKRELAQKFLQKVNESMPGIIELEFEGFYRRGLFVTKKRYALLSEDGKMVVKGLEFVRRDWAPIARETQKEVLRILLEEADPEKAARLVRDVIERIRQRRVSLEDITIYTQLTKRIKSYKSLEPHVVAAQKLKERGREVAPGMIIGYIITKGTKGISQRATPVEFARLEDYDPEYYIDNQILPAIQRIFEAIGYTRDYLKEGITQTSLSRWF

SEQ ID NO: 1835 - protein, 792 aa, unidentified
  REGION 1..792: note = Description of Unknown: Synthetic polypeptide
MPRILKGFLIDADFETVEGRALIRLFLRGEEGSFVVYDDSFSPYFYALPGDEPERVKERILASGAAEAIQKVEIEEKRLFGTPRVALRITVSHPQDVPRIRERIRRVEGVDLILEHDILFVRRYLIDRGIKPLTWLRLEVEERDGRALLRGVEQLEEEPPELRVAAVAIAVYNPKGAPRSSKDEIIMISVATSDGVEKVLTWREVQGLEQVEVLQDEKEMLLRFAELIKEGDYDVIVGYNTDSFDFPYIRDRLKKLGISLPLGRLDAELEVSRRGALPEARIRGRAHVDLYPIVRRHVKLNSYVLESVVEELLGIKKEKLDGERLFTYWDEGGEKRALLARYALEDARVTLALAEKFLPLYCELSTIVGQSLNDVARMTSGQLVEWLLMRYATPRGELIPNHPAGEEYAARARATYAGGYVREPKRGLVEHIAVFDFRSFGPSIIVSHNIDPSTLIVGNCEENRAPELEYCFSLEREGFIPAILKELIRRRAEIKRELKRSEGDRRRTLSFAEKALKILANSFYGYMGYPRARWYRRECAESVAAFARMYIKQVMRIAEEEFKLEVVYGDTDSLFVVIPPEKRELAQKFLQKVNESMPGIIELEFEGFYRRGLFVTKKRYALLSEDGKMVVKGLEFVRRDWAPIARETQKEVLRILLEEADPEKAARLVRDVIERIRQRRVSLEDITIYTQLTKRIKSYKSLEPHVVAAQKSKERGREVAPGMIIGYIITKGTKGISQRATPVEFARLEDYDPEYYIDNQILPAIQRIFEAIGYTRDYLKEGITQTSLSRWF

SEQ ID NO: 1836 - protein, 792 aa, unidentified
  REGION 1..792: note = Description of Unknown: Synthetic polypeptide
MPRILKGFLIDADFETVEGRALIRLFLRGEEGSFVVYDDSFSPYFYALPGDEPERVKERILASGAAEAIQKVEIEEKRLFGTPRVALRITVSHPQDVPRIRERIRRVEGVDLILEHDILFVRRYLIDRGIKPLTWLRLEVEERDGRALLRGVEQLEEEPPELRVAAVAIAVYNPKGAPRSSKDEIIMISVATSDGVEKVLTWREVQGLEQVEVLQDEKEMLLRFAELIKEGDYDVIVGYNTDSFDFPYIRDRLKKLGISLPLGRLDAELEVSRRGALPEARIRGRAHVDLYPIVRRHVKLNSYVLESVVEELLGIKKEKLDGERLFTYWDEGGEKRALLARYALEDARVTLALAEKFLPLYCELSTIVGQSLNDVARMTSGQLVEWLLMRYATPRGELIPNHPAGEEYAARARATYAGGYVREPKRGLVEHIAVFDFRSFGPSIIVSHNIDPSTLIVGNCEENRAPELEYCFSLEREGFIPAILKELIRRRAEIKRELKRSEGDRRRTLSFAEKALKILANSFYGYMGYPRARWYRRECAESVAAFARMYIKQVMRIAEEEFKLEVVYGDTDSLFVVIPPEKRELAQKFLQKVNESMPGIIELEFEGFYRRGLFVTKKRYALLSEDGKMVVKGLEFVDRDWAPIARETQKEVLRILLEEADPEKAARLVRDVIERIRQRRVSLEDITIYTQLTKRIKSYKSLEPHVVAAQKLKERGREVAPGMIIGYIITKGTKGISQRATPVEFARLEDYDPEYYIDNQILPAIQRIFEAIGYTRDYLKEGITQTSLSRWF

SEQ ID NO: 1837 - protein, 792 aa, unidentified
  REGION 1..792: note = Description of Unknown: Synthetic polypeptide
MPRILKGFLIDADFETVEGRALIRLFLRGEEGSFVVYDDSFSPYFYALPGDEPERVKERILASGAAEAIQKVEIEEKRLFGTPRVALRITVSHPQDVPRIRERIRRVEGVDLILEHDILFVRRYLIDRGIKPLTWLRLEVEERDGRALLRGVEQLEEEPPELRVAAVAIAVYNPKGAPRSSKDEIIMISVATSDGVEKVLTWREVQGLEQVEVLQDEKEMLLRFAELIKEGDYDVIVGYNTDSFDFPYIRDRLKKLGISLPLGRLDAELEVSRRGALPEARIRGRAHVDLYPIVRRHVKLNSYDLESVVEELLGIKKEKLDGERLFTYWDEGGEKRALLARYALEDARVTLALAEKFLPLYCELSTIVGQSLNDVARMTSGQLVEWLLMRYATPRGELIPNHPAGEEYAARARATYAGGYVREPKRGLVEHIAVFDFRSFGPSIIVSHNIDPSTLIVGNCEENRAPELEYCFRLEREGFIPAILKELIRRRAEIKRELKRSEGDRRRTLSFAEKALKILANSFYGYMGYPRARWYRRECAESVAAFARMYIKQVMRIAEEEFKLEVVYGDTDSLFVVIPPEKRELAQKFLQKVNESMPGIIELEFEGFYRRGLFVTKKRYALLSEDGKMVVKGLEFVRRDWAPIARETQKEVLRILLEEADPEKAARLVRDVIERIRQRRVSLEDITIYTQLTKRIKSYKSLEPHVVAAQKLKERGREVAPGMIIGYIITKGTKGISQRATPVEFARLEDYDPEYYIDNQILPAIQRIFEAIGYTRDYLKEGITQTSLSRWF

SEQ ID NO: 1838 - protein, 792 aa, unidentified
  REGION 1..792: note = Description of Unknown: Synthetic polypeptide
MPRILKGFLIDADFETVEGRALIRLFLRGEEGSFVVYDDSFSPYFYALPGDEPERVKERILASGAAEAIQKVEIEEKRLFGTPRVALRITVSHPQDVPRIRERIRRVEGVDLILEHDILFVRRYLIDRGIKPLTWLRLEVEERDGRALLRGVEQLEEEPPELRVAAVAIAVYNPKGAPRSSKDEIIMISVATSDGVEKVLTWREVQGLEQVEVLQDEKEMLLRFAELIKEGDYDVIVGYNTDSFDFPYIRDRLKKLGISLPLGRLDAELEVSRRGALPEARIRGRAHVDLYPIVRRHVKLNSYVLESVVEELLGIKKEKLDGERLFTYWDEGGEKRALLARYALEDARVTLALAEKFLPLYCELSTIVGQSLNDVARMTSGQLVEWLLMRYATPRGELIPNHPAGEEYAARARATYAGGYVREPKRGLVEHIAVFDFRSFGPSIIVSHNIDPSTLIVGNCEENRAPELEYCFSLEREGFIPAILKELIRRRAEIKRELKRSEGDRRRTLSFAEKALKILANSFYGYMGYPRARWYRRECAESVAAFARNYIKQVMRIAEEEFKLEVVYGDTDSLFVVIPPEKRELAQKFLQKVNESMPGIIELEFEGFYRRGLFVTKKRYALLSEDGKMVVKGLEFVRRDWAPIARETQKEVLRILLEEADPEKAARLVRDVIERIRQRRVSLEDITIYTQLTKRIKSYKSLEPHVVAAQKLKERGREVAPGMIIGYIITKGTKGISQRATPVEFARLEDYDPEYYIDNQILPAIQRIFEAIGYTRDYLKEGITQTSLSRWF

SEQ ID NO: 1839 - protein, 792 aa, unidentified
  REGION 1..792: note = Description of Unknown: Synthetic polypeptide
MPRILKGFLIDADFETVEGRALIRLFLRGEEGSFVVYDDSFSPYFYALPGDEPERVKERILASGAAEAIQKVEIEEKRLFGTPRVALRITVSHPQDVPRIRERIRRVEGVDLILEHDILFVRRYLIDRGIKPLTWLRLEVEERDGRALLRGVEQLEEEPPELRVAAVAIAVYNPKGAPRSSKDEIIMISVATSDGVEKVLTWREVQGLEQVEVLQDGKEMLSRFAELIKEGDYDVIVGYNTDSFDFPYIRDRLKKLGISLPLGRLDAELEVCRRGALPEARIRGRAHVDLYPIVRRHVKLNSYVLESVVEELLGIKKEKLDSERLFTYWDEGGEKRALLARYALEDARVTLALAEKFLPLYCELSTIVGLSLNDVARMTSGQLVEWLLMRYATPRGELIPNHPAGEEYAARARATYAGGYVREPKRGLVEHIAVFDFRSFGPSIIVSHNIDPSTLIVGNCEENRAPELEYCFSLEREGFIPAILKELIRRRAEIKRELKRSEGDRRRTLSFAEKALKILANSFYGYMGYPRARWYRRECAESVAAFARMYIKQVMRIAEEEFKLEVVYGDTDSLFVVIPPEKRELAQKFLQKVNESMPGIIELEFEGFYRRGLFVTKKRYALLSEDGKMVVKGLEFVRRDWAPIARETQKEVLRILLEEADPEKAARLVRDVIERIRQRRVSLEDITIYTQLTKRIKSYKSLEPHVVAAQKLKERGREVAPGMIIGYIITKGTKGISQRATPVEFARLEDYDPEYYIDNQILPAIQRIFEAIGYTRDYLKEGITQTSLSRWF

SEQ ID NO: 1840 - protein, 792 aa, unidentified
  REGION 1..792: note = Description of Unknown: Synthetic polypeptide
MPRILKGFLIDADFETVEGRALIRLFLRGEEGSFVVYDDSFSPYFYALPGDEPERVKERILASGAAEAIQKVEIEEKRLFGTPRVALRITVSHPQDVPRIRERIRRVEGVDLILEHDILFVRRYLIDRGIKPLTWLRLEVEERDGRALLRGVEQLEEEPPELRVAAVAIAVYNPKGAPRSSKDEIIMISVATSDGVEKVLTWREVQGLEQVEVLQDEKEMLLRFAELIKEGDYDVIVGYNTDSFDFPYIRDRLKKLGISLPLGRLDAELEVSRRGALPEARIRGRAHVDLYPIVRRHVKLNSYVLESVVEELLGIKKEKLDGERLFTYWDEGGEKRALLARYALEDARVTLALAEKFLPLYCELSTIVGQSLNDVARMTSGQLVEWLLMRYATPRGELIPNHPAGEEYAARARATYAGGYVREPKRGLVEHIAVFDFRSFGPSIIVSHNIDPSTLIVGNCEENRAPELEYCFSLEREGFIPAILKELIRRRAEIKRELKRSEGDRRRTLSFAEKALKILANSFYGYMGYPRARWYRRECAESVAAFARMYIKQVMRIAEEEFKLEVVYGDTDSLFVVIPPEKRELAQKFLQKVNESMPGIIELEFEGFYRRGLFVTKKRYALLSEDGKMVVKGLEFVRRDWAPIARETQREVLRILLEEADPEKAARLVRDVIERIRQRRVSLEDITIYTQLTKRIKSYKSLEPHVVAAQKLKERGREVAPGMIIGYIITKGTKGISQRATPVEFARLEDYDPEYYIDNQILPAIQRIFEAIGYTRDYLKEGITQTSLSRWF

SEQ ID NO: 1841 - protein, 792 aa, unidentified
  REGION 1..792: note = Description of Unknown: Synthetic polypeptide
MPRILKGFLIDADFETVEGRALIRLFLRGEEGSFVVYDDSFSPYFYALPGAEPERVKERILASGAAEAIQKVEIEEKRLFGTPRVALRITVSHPQDVPRIRERIRRVEGVDLILEHDILFVRRYLIDRGIKPLTWLRLEVEERDGRALLRGVEQLEEEPPELRVAAVAIAVYNPKGAPRSSKDEIIMISVATSDGVEKVLTWREVQGLEQVEVLQDEKEMLLRFAELIKEGDYDVIVGYNTDSFDFPYIRDRLKKLGISLPLGRLDAELEVSRRGALPEARIRGRAHVDLYPIVRRHVKLNSYVLESVVEELLGIKKEKLDGERLFTYWDEGGEKRALLARYALEDARVTLALAEKFLPLYCELSTIVGQSLNDVARMTSGQLVEWLLMRYATPRGELIPNHPAGEEYAARARATYAGGYVREPKRGLVEHIAVFDFRSFGPSIIVSHNIDPSTLIVGNCEENRAPELEYCFSLEREGFIPAILKELIRRRAEIKRELKRSEGDRRRTLSFAEKALKILANSFYGYMGYPRARWYRRECAESVAAFARMYIKQVMRIAEEEFKLEVVYGDTDSLFVVIPPEKRELAQKFLQKVNESMPGIIELEFEGFYRRGLFVTKKRYALLSEDGKMVVKGLEFVRRDWAPIARETQKEVLRILLEEADPEKAARLVRDVIERIRQRRVSLEDITIYTQLTKRIKSYKSLEPHVVAAQKLKERGREVAPGMIIGYIITKGTKGISQRATPVEFARLEDYDPEYYIDNQILPAIQRIFEAIGYTRDYLKEGITQTSLSRWF

SEQ ID NO: 1842 - protein, 792 aa, unidentified
  REGION 1..792: note = Description of Unknown: Synthetic polypeptide
MPRILKGFLIDADFETVEGRALIRLFLRGEEGSFVVYDDSFSPYFYALPGDEPERVKERILASGAAEAIQKVEIEEKRLFGTPRVALRITVSHPQDVPRIRERIRRVEGVDLILEHDILFVRRYLIDRGIKPLTWLRLEVEERDGRALLRGVEQLEEEPPELRVAAVAIAVYNPKGAPRSSKDEIIMISVATSDGVEKVLTWREVQGLEQVEVLQDEKEMLLRFAELIKEGDYDVIVGYNTDSFDFPYIRDRLKKLGISLPLGRLDAELEVSRRGALPEARIRGRAHVDLYPIVRRHVKLNSYVLESVVEELLGIKKEKLDGERLFTYWDEGGEKRALLARYALEDARVTLALAEKFLPLYAELSTIVGQSLNDVARMTSGQLVEWLLMRYATPRGELIPNHPAGEEYAARARATYAGGYVREPKRGLVEHIAVFDFRSFGPSIIVSHNIDPSTLIVGNCEENRAPELEYCFSLEREGFIPAILKELIRRRAEIKRELKRSEGDRRRTLSFAEKALKILANSFYGYMGYPRARWYRREVAESVAAFARMYIKQVMRIAEEEFKLEVVYGDTDSLFVVIPPEKRELAQKFLQKVNESMPGIIELEFEGFYRRGLFVTKKRYALLSEDGKMVVKGLEFVRRDWAPIARETQKEVLRILLEEADPEKAARLVRDVIERIRQRRVSLEDITIYTQLTKRIKSYKSLEPHVVAAQKLKERGREVAPGMIIGYIITKGTKGISQRATPVEFARLEDYDPEYYIDNQILPAIQRIFEAIGYTRDYLKEGITQTSLSRWF

SEQ ID NO: 1843 - protein, 792 aa, unidentified
  REGION 1..792: note = Description of Unknown: Synthetic polypeptide
MPRILKGFLIDADFETVEGRALIRLFLRGEEGSFVVYDDSFSPYFYALPGDEPERVKERILASGAAEAIQKVEIEEKRLFGTPRVALRITVSHPQDVPRIRERIRRVEGVDLILEHDILFVRRYLIDRGIKPLTWLRLEVEERDGRALLRGVEQLEEEPPELRVAAVAIAVYNPKGAPRSSKDEIIMISVATSDGVEKVLTWREVQGLEQVEVLQDEKEMLLRFAELIKEGDYDVIVGYNTDSFDFPYIRDRLKKLGISLPLGRLDAELEVSRRGALPEARIRGRAHVDLYPIVRRHVKLNSYDLESVVEELLGIKKEKLDGERLFTYWDEGGEKRALLARYALEDARVTLALAEKFLPLYCELSTIVGQSLNDVARMTSGQLVEWLLMRYATPRGELIPNHPAGEEYAARARATYAGGYVREPKRGLVEHIAVFDFRSFGPSIIVSHNIDPSTLIVGNCEENRAPELEYCFSLEREGFIPAILKELIRRRAEIKRELKRSEGDRRRTLSFAEKALKILANSFYGYMGYPRARWYRSECAESVAAFARMYIKQVMRIAEEEFKLEVVYGDTDSLFVVIPPEKRELAQKFLQKVNESMPGIIELEFEGFYRRGLFVTKKRYALLSEDGKMVVKGLEFVRRDWAPIARETQKEVLRILLEEADPEKAARLVRDVIERIRQRRVSLEDITIYTQLTKRIKSYKSLEPHVVAAQKLKERGREVAPGMIIGYIITKGTKGISQRATPVEFARLEDYDPEYYIDNQILPAIQRIFEAIGYTRDYLKEGITQTSLSRWF

SEQ ID NO: 1844 - protein, 792 aa, unidentified
  REGION 1..792: note = Description of Unknown: Synthetic polypeptide
MPRILKGFLIDADFETVEGRALIRLFLRGEEGSFVVYDDSFSPYFYALPGDEPERVKERILASGAAEAIQKVEIEEKRLFGTPRVALRITVSHPQDVPRIRERIRRVEGVDLILEHDILFVRRYLIDRGIKPLTWLRLEVEERDGRALLRGVEQLEEEPPELRVAAVAIAVYNPKGAPRSSKDEIIMISVATSDGVEKVLTWREVQGLEQVEVLQDEKEMLLRFAELIKEGDYDVIVGYNTDSFDFPYIRDRLKKLGISLPLGRLDAELEVSRRGALPEARIRGRAHVDLYPIVRRHVKLNSYDLESVVEELLGIKKEKLDGERLFTYWDEGGEKRALLARYALEDARVTLALAEKFLPLYLELSTIVGQSLNDVARMTSGQLVEWLLMRYATPRGELIPNHPAGEEYAARARATYAGGYVREPKRGLVEHIAVFDFRSFGPSIIVSHNIDPSTLIVGNCEENRAPELEYCFSLEREGFIPAILKELIRRRAEIKRELKRSEGDRRRTLSFAEKALKILANSFYGYMGYPRARWYRRECAESVAAFARMYIKQVMRIAEEEFKLEVVYGDTDSLFVVIPPEKRELAQKFLQKVNESMPGIIELEFEGFYRRGLFVTKKRYALLSEDGKMVVKGLEFVRRDWAPIARETQKEVLRILLEEADPEKAARLVRDVIERIRQRRVSLEDITIYTQLTKRIKSYKSLEPHVVAAQKLKERGREVAPGMIIGYIITKGTKGISQRATPVEFARLEDYDPEYYIDNQILPAIQRIFEAIGYTRDYLKEGITQTSLSRWF

SEQ ID NO: 1845 - protein, 792 aa, unidentified
  REGION 1..792: note = Description of Unknown: Synthetic polypeptide
MPRILKGFLIDADFETVEGRALIRLFLRGEEGSFVVYDDSFSPYFYALPGDEPERVKERILASGAAEAIQKVEIEEKRLFGTPRVALRITVSHPQDVPRIRERIRRVEGVDLILEHDILFVRRYLIDRGIKPLTWLRLEVEERDGRALLRGVEQLEEEPPELRVAAVAIAVYNPKGAPRSSKDEIIMISVATSDGVEKVLTWREVQGLEQVEVLQDEKEMLLRFAELIKEGDYDVIVGYNTDSFDFPYIRDRLKKLGISLPLGRLDAELEVSRRGALPEARIRGRAHVDLYPIVRRHVKLNSYDLESVVEELLGIKKEKLDGERLFTYWDEGGEKRALLARYALEDARVTLALAEKFLPLYLELSTIVGQSLNDVARMTSGQLVEWLLMRYATPRGELIPNHPAGEEYAARARATYAGGYVREPKRGLVEHIAVFDFRSFGPSIIVSHNIDPSTLIVGNCEENRAPELEYCFSLEREGFIPAILKELIRRRAEIKRELKRSEGDRRRTLSFAEKALKILANSFYGYMGYPRARWYRRECAESVAAFARMYIKQVMRIAEEEFKLEVVYGDTDSLFVVIPPEKRELAQKFLQKVNESMPGIIELEFEGFYRRGLFVTKKRYALLSEDGKMVVKGLEFVRRDWAPIARETQKEVLRILLEEADPEKAARLVRDVIERIRQRRVSLEDITIYTQLTKRIKSYKSLEPHVVAAQKLKERGREVAPGMIIGYIITKGTKGISQRATPVEFARLEDYDPEYYIDNQILPAVQRIFEAIGYTRDYLKEGITQTSLSRWF

SEQ ID NO: 1846 - protein, 792 aa, unidentified
  REGION 1..792: note = Description of Unknown: Synthetic polypeptide
MPRILKGFLIDADFETVEGRALIRLFLRGEEGSFVVYDDSFSPYFYALPGDEPERVKERILASGAAEAIQKVEIEEKRLFGTPRVALRITVSHPQDVPRIRERIRRVEGVDLILEHDILFVRRYLIDRGIKPLTWLRLEVEERDGRALLRGVEQLEEEPPELRVAAVAIAVYNPKGAPRSSKDEIIMISVATSDGVEKVLTWREVQGLEQVEVLQDEKEMLLRFAELIKEGDYDVIVGYNTDSFDFPYIRDRLKKLGISLPLGRLDAELEVSRRGALPEARIRGRAHVDLYPIVRRHVKLNSYVLESVVEELLGIKKEKLDGERLFTYWDEGGEKRALLARYALEDARVTLALAEKFLPLYIELSTIVGQSLNDVARMTSGQLVEWLLMRYATPRGELIPNHPAGEEYAARARATYAGGYVREPKRGLVEHIAVFDFRSFGPSIIVSHNIDPSTLIVGNCEENRAPELEYCFSLEREGFIPAILKELIRRRAEIKRELKRSEGDRRRTLSFAEKALKILANSFYGYMGYPRARWYRREVAESVAAFARMYIKQVMRIAEEEFKLEVVYGDTDSLFVVIPPEKRELAQKFLQKVNESMPGIIELEFEGFYRRGLFVTKKRYALLSEDGKMVVKGLEFVRRDWAPIARETQKEVLRILLEEADPEKAARLVRDVIERIRQRRVSLEDITIYTQLTKRIKSYKSLEPHVVAAQKLKERGREVAPGMIIGYIITKGTKGISQRATPVEFARLEDYDPEYYIDNQILPAIQRIFEAIGYTRDYLKEGITQTSLSRWF

SEQ ID NO: 1847 - protein, 792 aa, unidentified; identical to SEQ ID NO: 1753
  REGION 1..792: note = Description of Unknown: Synthetic polypeptide

SEQ ID NO: 1848 - protein, 792 aa, unidentified
  REGION 1..792: note = Description of Unknown: Synthetic polypeptide
MPRILKGFLIDADDETVEGRALIRLFLRGEEGSFVVYDDSFSPYFYALPGDEPERVKERILASGAAEAIQKVEIEEKRLFGTPRVALRITVSHPQDVPRIRERIRRVEGVDLILEHDILFVRRYLIDRGIKPLTWLRLEVEERDGRALLRGVEQLEEEPPELRVAAVAIAVYNPKGAPRSSKDEIIMISVATSDGVEKVLTWREVQGLEQVEVLQDEKEMLLRFAELIKEGDYDVIVGYNTDSFDFPYIRDRLKKLGISLPLGRLDAELEVSRRGALPEARIRGRAHVDLYPIVRRHVKLNSYDLESVVEELLGIKKEKLDGERLFTYWDEGGEKRALLARYALEDARVTLALAEKFLPLYCELSTIVGQSLNDVARMTSGQLVEWLLMRYATPRGELIPNHPAGEEYAARARATYAGGYVREPKRGLVEHIAVFDFRSFGPSIIVSHNIDPSTLIVGNCEENRAPELEYCFSLEREGFIPAILKELIRRRAEIKRELKRSEGDRRRTLSFAEKALKILANSFYGYMGYPRARWYRRECAESVAAFARMYIKQVMRIAEEEFKLEVVYGDTDSLFVVIPPEKRELAQKFLQKVNESMPGIIELEFEGFYRRGLFVTKKRYALLSEDGKMVVKGLEFVRRDWAPIARETQKEVLRILLEEADPEKAARLVRDVIERIRQRRVSLEDITIYTQLTKRIKSYKSLEPHVVAAQKLKERGREVAPGMIIGYIITKGTKGISQRATPVEFARLEDYDPEYYIDNQILPAIQRIFEAIGYTRDYLKEGITQTSLSRWF

SEQ ID NO: 1849 - protein, 780 aa, unidentified
  REGION 1..780: note = Description of Unknown: Synthetic polypeptide
MPRILKGFLIDADFETVEGRALIRLFLRGEEGSFVVYDDSFSPYFYALPGDEPERVKERILASGAAEAIQKVEIEEKRLFGTPRVALRITVSHPQDVPRIRERIRRVEGVDLILEHDILFVRRYLIDRGIKPLTWLRLEVEERDGRALLRGVEQLEEEPPELRVAAVAIAVYNPKGAPRSSKDEIIMISVATSDGVEKVLTWREVQGLEQVEVLQDEKEMLLRFAELIKEGDYDVIVGYNTDSFDFPYIRDRLKKLGISLPLGRLDAELEVSRRGALPEARIRGRAHVDLYPIVRRHVKLNSYVLESVVEELLGIKKEKLDGERLFTYWDEGGEKRALLARYALEDARVTLALAEKFLPLYCELSTIVGQSLNDVARMTSGQLVEWLLMRYATPRGELIPNHPAGEEYAARARATYAGGYVREPKRGLVEHIAVFDFRSFGPSIIVSHNIDPSTLIVGNCEENRAPELEYCFSLEREGFIPAILKELIRRRAEIKRELKRSEGDRRRTLSFAEKALKILANSFYGYMGYPRARWYRRECAESVAAFARMYIKQVMRIAEEEFKLEVVYGDTDSLFVVIPPEKRELAQKFLQKVNESMPGIIELEFEGFYRRGLFVTKKRYALLSEDGKMVVKGLEFVRRDWAPIARETQKEVLRILLEEADPEKAARLVRDVIERIRQRRVSLEDITIYTQLTKRIKSYKSLEPHVVAAQKLKERGREVAPGMIIGYIITKGTKGISQRATPVEFARLEDYDPEYYIDNQILPAIQRIFEAIGYTRDYLK

SEQ ID NO: 1850 - protein, 792 aa, unidentified
  REGION 1..792: note = Description of Unknown: Synthetic polypeptide
MPRILKGFLIDADFETVEGRALIRLFLRGEEGSFVVYDDSFSPYFYALPGDEPERVKERILASGAAEAIQKVEIEEKRLFGTPRVALRITVSHPQDVPRIRERIRRVEGVDLILEHDILFVRRYLIDRGIKPLTWLRLEVEERDGRALLRGVEQLEEEPPELRVAAVAIAVYNPKGAPRSSKDEIIMISVATSDGVEKVLTWREVQGLEQVEVLQDEKEMLLRFAELIKEGDYDVIVGYNTDSFDFPYIRDRLKKLGISLPLGRLDAELEVSRRGALPEARIRGRAHVDLYPIVRRHVKLNSYVLESVVEELLGIKKEKLDGERLFTYWDEGGEKRALLARYALEDARVTLALAEKFLPLYCELSTIVGQSLNDVARMTSGQLVEWLLMRYATPRGELIPNHPAGEEYAARARATYAGGYVREPKRGLVEHIAVFDFRSFGPSIIVSHNIDPSTLIVGNCEENRAPELEYCFSLEREGFIPAILKELIRRRAEIKRELKRSEGDRRRTLSFAEKALKILANSFYGYMGYPRARWYRRECAESVAAFARMYIKQVMRIAEEEFKLEVVYGDTDSLFVVIPPEKRELAQKFLQKVNESMPGIIELEFEGFYRRGLFVTKKRYALLSEDGKMVVKGLEFVRRDWAPIARETQKEVLRILLEEADPEKAARLVRDVIERIRQRRVSLEDITIYTQLTKRIKSYKSLEPHVVAAQKLKERGREVAPGMIIGYIITKGTKGISQRATPVEFARLEDYDPEYYIDNQILPAIQRIFEAIGYTRDYLKEGITQTSLSRWA

SEQ ID NO: 1851 - protein, 792 aa, unidentified
  REGION 1..792: note = Description of Unknown: Synthetic polypeptide
MPRILKGFLIDADFETVEGRALIRLFLRREEGSFVVYDDSFSPYFYALPGDEPERVKERILASGAAEAIQKVEIEEKRLFGTPRVALRITVSHPQDVPRIRERIRRVEGVDLILEHDILFVRRYLIDRGIKPLTWLRLEVEERDGRALLRGVEQLEEEPPELRVAAVAIAVYNPKGAPRSSKDEIIMISVATSDGVEKVLTWREVQGLEQVEVLQDEKEMLLRFAELIKEGDYDVIVGYNTDSFDFPYIRDRLKKLGISLPLGRLDAELEVSRRGALPEARIRGRAHVDLYPIVRRHVKLNSYVLESVVEELLGIKKEKLDGERLFTYWDEGGEKRALLARYALEDARVTLALAEKFLPLYCELSTIVGQSLNDVARMTSGQLVEWLLMRYATPRGELIPNHPAGEEYAARARATYAGGYVREPKRGLVEHIAVFDFRSFGPSIIVSHNIDPSTLIVGNCEENRAPELEYCFSLEREGFIPAILKELIRRRAEIKRELKRSEGDRRRTLSFAEKALKILANSFYGYMGYPRARWYRRECAESVAAFARMYIKQVMRIAEEEFKLEVVYGDTDSLFVVIPPEKRELAQKFLQKVNESMPGIIELEFEGFYRRGLFVTKKRYALLSEDGKMVVKGLEFVRRDWAPIARETQKEVLRILLEEADPEKAARLVRDVIERIRQRRVSLEDITIYTQLTKRIKSYKSLEPHVVAAQKLKERGREVAPGMIIGYIITKGTKGISQRATPVEFARLEDYDPEYYIDNQILPAIQRIFEAIGYTRDYLKEGITQTSLSRWF

SEQ ID NO: 1852 - protein, 792 aa, unidentified
  REGION 1..792: note = Description of Unknown: Synthetic polypeptide
MPRILKGFLIDADFETVEGRALIRLFLRGEEGSFVVYDDSFSPYFYALPGDEPERVKERILASGAAEAIQKVEIEEKRLFGTPRVALRITVSHPQDVPRIRERIRRVEGVDLILEHDILFVRRYLIDRGIKPLTWLRLEVEERDGRALLRGVEQLEEEPPELRVAAVAIAVYNPKGAPRSSKDEIIMISVATSDGVEKVLTWREVQGLEQVEVLQDEKEMLLRFAELIKEGDYDVIVGYNTDSFDFPYIRDRLKKLGISLPLGRLDAELEVSRRGALPEARIRGRAHVDLYPIVRRHVKLNSYVLESVVEELLGIKKEKLDGERLFTYWDEGGEKRALLARYALEDARVTLALAEKFLPLYCELSTIVGQSLNDVARMTSGQLVEWLLMRYATPRGELIPNHPAGEEYAARARATYAGGYVREPKRGLVEHIAVFDFRSFGPSIIVSHNIDPSTLIVGNCEENRAPELEYCFSLEREGFIPAILKELIRRRAEIKRELKRSEGDRRRTLSFAEKALKILANSFYGYMGYPRARWYRRECAESVAAFARMYIKQVMRIAEEEFKLEVVYGDTDSLFVVIPPEKRELAQKFLQKVNESMPGIIELEFEGFYRRGLFVTKKRYALLSEDGKMVVKGLEFVRRDWAPIARETQKEVLRILLEEADPEKAARLVRDVIERIRQRRVSLEDITIYTQLTKRIKSYKSLEPHVVAAQKLKERGREVAPGMIIGYIITKGTKGISQRATPVEFARLEDYDPEYYIDNLILPAIQRIFEAFGYTRDYLKEGITQTSLSRWF

SEQ ID NO: 1853 - protein, 792 aa, unidentified
  REGION 1..792: note = Description of Unknown: Synthetic polypeptide
MPRILKGFLIDADFETVEGRALIRLFLRGEEGSFVVYDDSFSPYFYALPGDEPERVKERILASGAAEAIQKVEIEEKRLFGTPRVALRITVSHPQDVPRIRERIRRVEGVDLILEHDILFVRRYLIDRGIKPLTWLRLEVEERDGRALLRGVEQLEEEPPELRVAAVAIAVYNPKGAPRSSKDEIIMISVATSDGVEKVLTWREVQGLEQVEVLQDEKEMLLRFAELIKEGDYDVIVGYNTDSFDFPYIRDRLKKLGISLPLGRLDAELEVSRRGALPEARIRGRAHVDLYPIVRRHVKLNSYDLESVVEELLGIKKEKLDGERLFTYWDEGGEKRALLARYALEAARVTLALAEKFLPLYLELSTIVGQSLNDVARMTSGQLVEWLLMRYATPRGELIPNHPAGEEYAARARATYAGGYVREPKRGLVEHIAVFDFRSFGPSIIVSHNIDPSTLIVGNCEENRAPELEYCFSLEREGFIPAILKELIRRRAEIKRELKRSEGDRRRTLSFAEKALKILANSFYGYMGYPRARWYRRECAESVAAFARMYIKQVMRIAEEEFKLEVVYGDTDSLFVVIPPEKRELAQKFLQKVNESMPGIIELEFEGFYRRGLFVTKKRYALLSEDGKMVVKGLEFVRRDWAPIARETQKEVLRILLEEADPEKAARLVRDVIERIRQRRVSLEDITIYTQLTKRIKSYKSLEPHVVAAQKLKERGREVAPGMIIGYIITKGTKGISQRATPVEFARLEDYDPEYYIDNQILPAIQRIFEAIGYTRDYLKEGITQTSLSRWF

SEQ ID NO: 1854 - protein, 792 aa, unidentified
  REGION 1..792: note = Description of Unknown: Synthetic polypeptide
MPRILKGFLIDADFETVEGRALIRLFLRGEEGSFVVYDDSFSPYFYALPGDEPERVKERILASGAAEAIQKVEIEEKRLFGTPRVALRITVSHPQDVPRIRERIRRVEGVDLILEHDILFVRRYLIDRGIKPLTWLRLEVEERDGRALLRGVEQLEEEPPELRVAAVAIAVYNPKGAPRSSKDEIIMISVATSDGVEKVLTWREVQGLEQVEVLQDEKEMLLRFAELIKEGDYDVIVGYNTDSFDFPYIRDRLKKLGISLPLGRLDAELEVSRRGALPEARIRGRAHVDLYPIVRRHVKLNSYVLESVVEELLGIKKEKLDGERRFTYWDEGGEKRALLARYALEDARVTLALAEKFLPLYCELSTIVGQSLNDVARMTSGQLVEWLLMRYATPRGELIPNHPAGEEYAARARATYAGGYVREPKRGLVEHIAVFDFRSFGPSIIVSHNIDPSTLIVGNCEENRAPELEYCFSLEREGFIPAILKELIRRRAEIKRELKRSEGDRRRTLSFAEKALKILANSFYGYMGYPRARWYRRECAESVAAFARMYIKQVMRIAEEEFKLEVVYGDTDSLFVVIPPEKRELAQKFLQKVNESMPGIIELEFEGFYRRGLFVTKKRYALLSEDGKMVVKGLEFVRRDWAPIARETQKEVLRILLEEADPEKAARLVRDVIERIRQRRVSLEDITIYTQLTKRIKSYKSLEPHVVAAQKLKERGREVAPGMIIGYIITKGTKGISQRATPVEFARLEDYDPEYYIDNQILPAIQRIFEAIGYTRDYLKEGITQTSLSRWF

SEQ ID NO: 1855 - protein, 792 aa, unidentified
  REGION 1..792: note = Description of Unknown: Synthetic polypeptide
MPRILKGFLIDADFETVEGRALIRLFLRGEEGSFVVYDDSFSPYFYALPGDEPERVKERILASGAAEAIQKVEIEEKRLFGTPRVALRITVSHPQDVPRIRERIRRVEGVDLILEHDILFVRRYLIDRGIKPLTWLRLEDEERDGRALLRGVEQLEEEPPELRVAAVAIAVYNPKGAPRSSKDEIIMISVATSDGVEKVLTWREVQGLEQVEVLQDEKEMLLRFAELIKEGDYDVIVGYNTDSFDFPYIRDRLKKLGISLPLGRLDAELEVSRRGALPEARIRGRAHVDLYPIVRRHVKLNSYVLESVVEELLGIKKEKLDGERLFTYWDEGGEKRALLARYALEDARVTLALAEKFLPLYCELSTIVGQSLNDVARMTSGQLVEWLLMRYATPRGELIPNHPAGEEYAARARATYAGGYVREPKRGLVEHIAVFDFRSFGPSIIVSHNIDPSTLIVGNCEENRAPELEYCFSLEREGFIPAILKELIRRRAEIKRELKRSEGDRRRTLSFAEKALKILANSFYGYMGYPRARWYRRECAESVAAFARMYIKQVMRIAEEEFKLEVVYGDTDSLFVVIPPEKRELAQKFLQKVNESMPGIIELEFEGFYRRGLFVTKKRYALLSEDGKMVVKGLEFVRRDWAPIARETQKEVLRILLEEADPEKAARLVRDVIERIRQRRVSLEDITIYTQLTKRIKSYKSLEPHVVAAQKLKERGREVAPGMIIGYIITKGTKGISQRATPVEFARLEDYDPEYYIDNQILPAIQRIFEAIGYTRDYLKEGITQTSLSRWF

SEQ ID NO: 1856 - protein, 792 aa, unidentified
  REGION 1..792: note = Description of Unknown: Synthetic polypeptide
MPRILKGFLIDADFETVEGRALIRLFLRGEEGSFVVYDDSFSPYFYALPGDEPERVKERILASGAAEAIQKVEIEEKRLFGTPRVALRITVSHPQDVPRIRERIRRVEGVDLILEHDILFVRRYLIDRGIKPLTWLRLEVEERDGRALLRGVEQLEEEPPELRVAAVAIAVYNPKGAPRSSKDEIIMISVATSDGVEKVLTWREVQGLEQVEVLQDEKEMLLRFAELIKEGDYDVIVGYNTDSFDFPYIRDRLKKLGISLPLGRLDAELEVSRRGALPEARIRGRAHVDLYPIVRRHVKLNSYVLESVVEELLGIKKEKLDGERLFTYWDEGGEKRALLARYALEDARVTLALAEKFLPLYCELSTIVGQSLNDVARMTSGQLVEWLLMRYATPRGELIPNHPAGEEYAARARATYAGGYVREPKRGLVEHIAVFYFRSFGPSIIVSHNIDPSTLIVGNCEENRAPELEYCFSLEREGFIPAILKELIRRRAEIKRELKRSEGDRRRTLSFAEKALKILANSFYGYMGYPRARWYRRECAESVAAFARMYIKQVMRIAEEEFKLEVVYGDTDSLFVVIPPEKRELAQKFLQKVNESMPGIIELEFEGFYRRGLFVTKKRYALLSEDGKMVVKGLEFVRRDWAPIARETQKEVLRILLEEADPEKAARLVRDVIERIRQRRVSLEDITIYTQLTKRIKSYKSLEPHVVAAQKLKERGREVAPGMIIGYIITKGTKGISQRATPVEFARLEDYDPEYYIDNQILPAIQRIFEAIGYTRDYLKEGITQTSLSRWF

SEQ ID NO: 1857 - protein, 789 aa, unidentified
  REGION 1..789: note = Description of Unknown: Synthetic polypeptide
MPRILKGFLIDADFETVEGRALIRLFLRGEEGSFVVYDDSFSPYFYALPGDEPERVKERILASGAAEAIQKVEIEEKRLFGTPRVALRITVSHPQDVPRIRERIRRVEGVDLILEHDILFVRRYLIDRGIKPLTWLRLEVEERDGRALLRGVEQLEEEPPELRVAAVAIAVYNPKGAPRSSKDEIIMISVATSDGVEKVLTWREVQGLEQVEVLQDEKEMLLRFAELIKEGDYDVIVGYNTDSFDFPYIRDRLKKLGISLPLGRLDAELEVSRRGALPEARIRGRAHVDLYPIVRRHVKLNSYDLESVVEELLGIKKEKLDGERLFTYWDEGGEKRALLARYALEDARVTLALAEKFLPLYLELSTIVGQSLNDVARMTSGQLVEWLLMRYATPRGELIPNHPAGEEYAARARATYAGGYVREPKRGLVEHIAVFDFRSFGPSIIVSHNIDPSTLIVGNCEENRAPELEYCFSLEREGFIPAILKELIRRRAEIKRELKRSEGDRRRTLSFAEKALKILANSFYGYMGYPRARWYRRECAESVAAFARMYIKQVMRIAEEEFKLEVVYGDTDSLFVVIPPEKRELAQKFLQKVNESMPGIIELEFEGFYRRGLFVTKKRYALLSEDGKMVVKGLEFVRRDWAPIARETQKEVLRILLEEADPEKAARLVRDVIERIRQRRVSLEDITIYTQLTKRIKSYKSLEPHVVAAQKLKERGREVAPGMIIGYIITKGTKGISQRATPVEFARLEDYDPEYYIDNQILPAIQRIFEAIGYTRDYLKEGITQTSLS

SEQ ID NO: 1858 - protein, 792 aa, unidentified
  REGION 1..792: note = Description of Unknown: Synthetic polypeptide
MPRILKGFLIDADFETVEGRALIRLFLRGEEGSFVVYDDSFSPYFYALPGDEPERVKERILASGAAEAIQKVEIEEKRLFGTPRVALRITVSHPQDVPRIRERIRRVEGVDTILEHDILFVRRYLIDRGIKPLTWLRLEVEERDGRALLRGVEQLEEEPPELRVAAVAIAVYNPKGAPRSSKDEIIMISVATSDGVEKVLTWREVQGLEQVEVLQDEKEMLLRFAELIKEGDYDVIVGYNTDSFDFPYIRDRLKKLGISLPLGRLDAELEVSRRGALPEARIRGRAHVDLYPIVRRHVKLNSYVLESVVEELLGIKKEKLDGERLFTYWDEGGEKRALLARYALEDARVTLALAEKFLPLYCELSTIVGQSLNDVARMTSGQLVEWLLMRYATPRGELIPNHPAGEEYAARARATYAGGYVREPKRGLVEHIAVFDFRSFGPSIIVSHNIDPSTLIVGNCEENRAPELEYCFSLEREGFIPAILKELIRRRAEIKRELKRSEGDRRRTLSFAEKALKILANSFYGYMGYPRARWYRRECAESVAAFARMYIKQVMRIAEEEFKLEVVYGDTDSLFVVIPPEKRELAQKFLQKVNESMPGIIELEFEGFYRRGLFVTKKRYALLSEDGKMVVKGLEFVRRDWAPIARETQKEVLRILLEEADPEKAARLVRDVIERIRQRRVSLEDITIYTQLTKRIKSYKSLEPHVVAAQKLKERGREVAPGMIIGYIITKGTKGISQRATPVEFARLEDYDPEYYIDNQILPAIQRIFEAIGYTRDYLKEGITQTSLSRWF

SEQ ID NO: 1859 - protein, 792 aa, unidentified
  REGION 1..792: note = Description of Unknown: Synthetic polypeptide
MPRILKGFLIDADFETVEGRALIRLFLRGEEGSFVVYDDSFSPYFYALPGDEPERVKERILASGAAEAIQKVEIEEKRLFGTPRVALRITVSHPQDVPRIRERIRRVEGVDLILEHDILFVRRYLIDRGIKPLTWLRLEVEERDGRALLRGVEQLEEEPPELRVAAVAIAVYNPKGAPRSSKDEIIMISVATSDGVEKVLTWREVQGLEQVEVLQDEKEMLLRFAELIKEGDYDVIVGYNTDSFDFPYIRDRLKKLGISLPLGRLDAELEVSRRGALPEARIRGRAHVDLYPIVRRHVKLNSYDLESVVEELLGIKKEKLDGERLFTYWDEGGEKRALLARYALEDARVTLALAEKFLPLYCELSTIVGQSLNDVARMTSGQLVEWLLMRYATPRGELIPNHPAGEEYAARARATYAGGYVREPKRGLVEHIAVFDFRSFGPSIIVSHNIDPSTLIVGNCEENRAPELEYCFSLEREGFIPAILKELIRRRAEIKRELKRSEGDRRRTLSFAEKALKILANSFYGYMGYPRARWYRRECAESVAAFARMYIKQVMRIAEEEFKLEVVYGDTDSLFVVIPPEKRELAQKFLQKVNESMPGIIELEFEGFYRRGLFVTKKRYALLSEDGKMVVKGLEFVRRDWAPIARETQTEVLRILLEEADPEKAARLVRDVIERIRQRRVSLEDITIYTQLTKRIKSYKSLEPHVVAAQKLKERGREVAPGMIIGYIITKGTKGISQRATPVEFARLEDYDPEYYIDNQILPAIQRIFEAIGYTRDYLKEGITQTSLSRWF

SEQ ID NO: 1860 - protein, 792 aa, unidentified; identical to SEQ ID NO: 1760
  REGION 1..792: note = Description of Unknown: Synthetic polypeptide

SEQ ID NO: 1861 - protein, 792 aa, unidentified
  REGION 1..792: note = Description of Unknown: Synthetic polypeptide
MPRILKGFLIDADFETVEGRALIRLFLRGEEGSFVVYDDSFSPYFYALPGDEPERVKERILASGAAEAIQKVEIEEKRLFGTPRVALRITVSHPQDVPRIRERIRRVEGVDLILEHDILFVRRYLIDRGIKPLTFLRLEVEERDGRALLRGVEQLEEEPPELRVAAVAIAVYNPKGAPRSSKDEIIMISVATSDGVEKVLTWREVQGLEQVEVLQDEKEMLLRFAELIKEGDYDVIVGYNTDSFDFPYIRDRLKKLGISLPLGRLDAELEVSRRGALPEARIRGRAHVDLYPIVRRHVKLNSYVLESVVEELLGIKKEKLDGERLFTYWDEGGEKRALLARYALEDARVTLALAEKFLPLYCELSTIVGQSLNDVARMTSGQLVEWLLMRYATPRGELIPNHPAGEEYAARARATYAGGYVREPKRGLVEHIAVFDFRSFGPSIIVSHNIDPSTLIVGNCEENRAPELEYCFSLEREGFIPAILKELIRRRAEIKRELKRSEGDRRRTLSFAEKALKILANSFYGYMGYPRARWYRRECAESVAAFARMYIKQVMRIAEEEFKLEVVYGDTDSLFVVIPPEKRELAQKFLQKVNESMPGIIELEFEGFYRRGLFVTKKRYALLSEDGKMVVKGLEFVRRDWAPIARETQKEVLRILLEEADPEKAARLVRDVIERIRQRRVSLEDITIYTQLTKRIKSYKSLEPHVVAAQKLKERGREVAPGMIIGYIITKGTKGISQRATPVEFARLEDYDPEYYIDNQILPAIQRIFEAIGYTRDYLKEGITQTSLSRWF

SEQ ID NO: 1862 - protein, 792 aa, unidentified
  REGION 1..792: note = Description of Unknown: Synthetic polypeptide
MPRILKGFLIDADFETVEGRALIRLFLRGEEGSFVVYDDSFSPYFYALPGDEPERVKERILASGAAEAIQKVEIEEKRLFGTPRVALRITVSHPQDVPRIRERIRRVEGVDLALEHDILFVRRYLIDRGIKPLTWLRLEVEERDGRALLRGVEQLEEEPPELRVAAVAIAVYNPKGAPRSSKDEIIMISVATSDGVEKVLTWREVQGLEQVEVLQDEKEMLLRFAELIKEGDYDVIVGYNTDSFDFPYIRDRLKKLGISLPLGRLDAELEVSRRGALPEARIRGRAHVDLYPIVRRHVKLNSYVLESVVEELLGIKKEKLDGERLFTYWDEGGEKRALLARYALEDARVTLALAEKFLPLYCELSTIVGQSLNDVARMTSGQLVEWLLMRYATPRGELIPNHPAGEEYAARARATYAGGYVREPKRGLVEHIAVFDFRSFGPSIIVSHNIDPSTLIVGNCEENRAPELEYCFSLEREGFIPAILKELIRRRAEIKRELKRSEGDRRRTLSFAEKALKILANSFYGYMGYPRARWYRRECAESVAAFARMYIKQVMRIAEEEFKLEVVYGDTDSLFVVIPPEKRELAQKFLQKVNESMPGIIELEFEGFYRRGLFVTKKRYALLSEDGKMVVKGLEFVRRDWAPIARETQKEVLRILLEEADPEKAARLVRDVIERIRQRRVSLEDITIYTQLTKRIKSYKSLEPHVVAAQKLKERGREVAPGMIIGYIITKGTKGISQRATPVEFARLEDYDPEYYIDNQILPAIQRIFEAIGYTRDYLKEGITQTSLSRWF

SEQ ID NO: 1863 - protein, 792 aa, unidentified
  REGION 1..792: note = Description of Unknown: Synthetic polypeptide
MPRILKGFLIDADFETVEGRALIRLFLRGEEGSFVVYDDSFSPYFYALPGDEPERVKERILASGAAEAIQKVEIEEKRLFGTPRVALRITVSHPQDVPRIRERIRRVEGVDLILEHDILFVRRYLIDRGIKPLTWLRLEVEERDGRALLRGVEQLEEEPPELRVAAVAIAVYNPKGAPRSSKDEIIMISVATSDGVEKVLTWREVQGLEQVEVLQDEKEMLLRFAELIKEGDYDVIVGYNTDSFDFPYIRDRLKKLGISLPLGRLDAELEVSRRGALPEARIRGRAHVDLYPIVRRHVKLNSYDLESVVEELLGIKKEKLDGERLFTYWDEGGEKRALLARYALEDARVTLALAEKFLPLYCELSTIVGQSLNDVARMTSGQLVEWLLMRYATPRGELIPNHPAGEEYAARARATYAGGYVREPKRGLVEHIAVFDFRSFGPSIIVSHNIDPSTLIVGNCEENRAPELEMCFSLEREGFIPAILKELIRRRAEIKRELKRSEGDRRRTLSFAEKALKILANSFYGYMGYPRARWYRRECAESVAAFARMYIKQVMRIAEEEFKLEVVYGDTDSLFVVIPPEKRELAQKFLQKVNESMPGIIELEFEGFYRRGLFVTKKRYALLSEDGKMVVKGLEFVRRDWAPIARETQKEVLRILLEEADPEKAARLVRDVIERIRQRRVSLEDITIYTQLTKRIKSYKSLEPHVVAAQKLKERGREVAPGMIIGYIITKGTKGISQRATPVEFARLEDYDPEYYIDNQILPAIQRIFEAIGYTRDYLKEGITQTSLSRWF

SEQ ID NO: 1864 - protein, 789 aa, unidentified
  REGION 1..789: note = Description of Unknown: Synthetic polypeptide
MPRILKGFLIDADFETVEGRALIRLFLRGEEGSFVVYDDSFSPYFYALPGDEPERVKERILASGAAEAIQKVEIEEKRLFGTPRVALRITVSHPQDVPRIRERIRRVEGVDLILEHDIPFVRRYLIDRGIKPLTWLRLEVEERDGRALLRGVEQLEEEPPELRVAAVAIAVYNPKGAPRSSKDEIIMISVATSDGVEKVLTWREVQGLEQVEVLQDEKEMLLRFAELIKEGDYDVIVGYNTDSFDFPYIRDRLKKLGISLPLGRLDAELEVSRRGALPEARIRGRAHVDLYPIVRRHVKLNSYDLESVVEELLGIKKEKLDGERLFTYWDEGGEKRALLARYALEDARVTLALAEKFLPLYLELSTIVGQSLNDVARMTSGQLVEWLLMRYATPRGELIPNHPAGEEYAARARATYAGGYVREPKRGLVEHIAVFDFRSFGPSIIVSHNIDPSTLIVGNCEENRAPELEYCFSLEREGFIPAILKELIRRRAEIKRELKRSEGDRRRTLSFAEKALKILANSFYGYMGYPRARWYRRECAESVAAFARMYIKQVMRIAEEEFKLEVVYGDTDSLFVVIPPEKRELAQKFLQKVNESMPGIIELEFEGFYRRGLFVTKKRYALLSEDGKMVVKGLEFVRRDWAPIARETQKEVLRILLEEADPEKAARLVRDVIERIRQRRVSLEDITIYTQLTKRIKSYKSLEPHVVAAQKLKERGREVAPGMIIGYIITKGTKGISQRATPVEFARLEDYDPEYYIDNQILPAIQRIFEAIGYTRDYLKEGITQTSLS

SEQ ID NO: 1865 - protein, 792 aa, unidentified
  REGION 1..792: note = Description of Unknown: Synthetic polypeptide
MPRILKGFLIDADFETVEGRALIRLFLRGEEGSFVVYDDSFSPYFYALPGDEPERVKERILASGAAEAIQKVEIEEKRLFGTPRVALRITVSHPQDVPRIRWRIRRVEGVDLILEHDILFVRRYLIDRGIKPLTWLRLEVEERDGRALLRGVEQLEEEPPELRVAAVAIAVYNPKGAPRSSKDEIIMISVATSDGVEKVLTWREVQGLEQVEVLQDEKEMLLRFAELIKEGDYDVIVGYNTDSFDFPYIRDRLKKLGISLPLGRLDAELEVSRRGALPEARIRGRAHVDLYPIVRRHVKLNSYVLESVVEELLGIKKEKLDGERLFTYWDEGGEKRALLARYALEDARVTLALAEKFLPLYCELSTIVGQSLNDVARMTSGQLVEWLLMRYATPRGELIPNHPAGEEYAARARATYAGGYVREPKRGLVEHIAVFDFRSFGPSIIVSHNIDPSTLIVGNCEENRAPELEYCFSLEREGFIPAILKELIRRRAEIKRELKRSEGDRRRTLSFAEKALKILANSFYGYMGYPRARWYRRECAESVAAFARMYIKQVMRIAEEEFKLEVVYGDTDSLFVVIPPEKRELAQKFLQKVNESMPGIIELEFEGFYRRGLFVTKKRYALLSEDGKMVVKGLEFVRRDWAPIARETQKEVLRILLEEADPEKAARLVRDVIERIRQRRVSLEDITIYTQLTKRIKSYKSLEPHVVAAQKLKERGREVAPGMIIGYIITKGTKGISQRATPVEFARLEDYDPEYYIDNQILPAIQRIFEAIGYTRDYLKEGITQTSLSRWF

SEQ ID NO: 1866 - protein, 792 aa, unidentified
  REGION 1..792: note = Description of Unknown: Synthetic polypeptide
MPRILKGFLIDADFETVEGRALIRLFLRGEEGSFVVYDDSFSPYFYALPGDEPERVKERILASGAAEAIQKVEIEEKRLFGTPRVALRITVSHPQDVPRIRERIRRVEGVDLILEHDILFVRRYLIDRGIKPLTWLRLEVEERDGRALLRGVEQLEEEPPELRVAAVAIAVYNPKGAPRSSKDEIIMISVATSDGVEKVLTWREVQGLEQVEVLQDEKEMLLRFAELIKEGDYDVIVGYNTDSFDFPYIRDRLKKLGISLPLGRLDAELRVSRRGALPEARIRGRAHVDLYPIVRRHVKLNSYVLESVVEELLGIKKEKLDGERLFTYWDEGGEKRALLARYALEDARVTLALAEKFLPLYCELSTIVGQSLNDVARMTSGQLVEWLLMRYATPRGELIPNHPAGEEYAARARATYAGGYVREPKRGLVEHIAVFDFRSFGPSIIVSHNIDPSTLIVGNCEENRAPELEYCFSLEREGFIPAILKELIRRRAEIKRELKRSEGDRRRTLSFAEKALKILANSFYGYMGYPRARWYRRECAESVAAFARMYIKQVMRIAEEEFKLEVVYGDTDSLFVVIPPEKRELAQKFLQKVNESMPGIIELEFEGFYRRGLFVTKKRYALLSEDGKMVVKGLEFVRRDWAPIARETQKEVLRILLEEADPEKAARLVRDVIERIRQRRVSLEDITIYTQLTKRIKSYKSLEPHVVAAQKLKERGREVAPGMIIGYIITKGTKGISQRATPVEFARLEDYDPEYYIDNQILPAIQRIFEAIGYTRDYLKEGITQTSLSRWF

SEQ ID NO: 1867 - protein, 792 aa, unidentified
  REGION 1..792: note = Description of Unknown: Synthetic polypeptide
MPRILKGFLIDADFETVEGRALIRLFLRGEEGSFVVYDDSFSPYFYALPGDEPERVKERILASGAAEAIQKVEIEEKRLFGTPRVALRITVSHPQDVPRIRERIRRVEGVDLILEHDILFVRRYLIDRGIKPLTWLRLEVEERDGRALLRGVEQLEEEPPELRVAAVAIAVYNPKGAPRSSKDEIIMISVATSDGVEKVLTWREVQGLEQVEVLQDEKEMLLRFAELIKEGDYDVIVGYNTDSFDFPYIRDRLKKLGISLPLGRLDAELEVSRRGALPEARIRGRAHVDLYPIVRRHVKLNSYVLESVVEELLGIKKEKLDGERLFTYWDEGGEKRALLARYALEDARVTLALAEKFLPLYCELSTIVGQSLNDVARMTSGQLVEWLLMRYATPRGELIPNHPAGEEYAARARATYAGGYVREPKRGLVEHIAVFDFRSFGPSIIVSHNIDPSTLIVGNCEENRAPELEYCFSLEREGFIPAILKELIRRRAEIKRELKRSEGDRRRTLSFAEKALKILANSFYGYMGYPRARWYRRECAESVAAFARMYIKQVNRIAEEEFKLEVVYGDTDSLFVVIPPEKRELAQKFLQKVNESMPGIIELEFEGFYRRGLFVTKKRYALLSEDGKMVVKGLEFVRRDWAPIARETQKEVLRILLEEADPEKAARLVRDVIERIRQRRVSLEDITIYTQLTKRIKSYKSLEPHVVAAQKLKERGREVAPGMIIGYIITKGTKGISQRATPVEFARLEDYDPEYYIDNQILPAIQRIFEAIGYTRDYLKEGITQTSLSRWF

SEQ ID NO: 1868 - protein, 792 aa, unidentified
  REGION 1..792: note = Description of Unknown: Synthetic polypeptide
MPRILKGFLIDADFETVEGRALIRLFLRGEEGSFVVYDDSFSPYFYALPGDEPERVKERILASGAAEAIQKVEIEEKRLFGTPRVALRITVSHPQDVPRIRERIRRVEGVDLILEHDILFVRRYLIDRGIKPLTWLRLEVEERDGRALLRGVEQLEEEPPELRVAAVAIAVYNPKGAPRSSKDEIIMISVATSDGVEKVLTWREVQGLEQVEVLQDEKEMLLRFAELIKEGDYDVIVGYNTDSFDFPYIRDRLKKLGISLPLGRLDAELEVSRRGALPEARIRGRAHVDLYPIVRRHVKLNSYVLESVVEELLGIKKEKLDGERLFTYWDEGGEKRALLARYALEDARVTLALAEKFLPLYCELSTIVGQSLNDVARMTSGQLVEWLLMRYATPRGELIPNHPAGEEYAARARATYAGGYVREPKRGLVEHIAVFDFRSFGPSIIVSHNIDPSTLIVGNCEENRAPELEYCFSLEREGFIPAILKELIRRRAEIKRELKRSEGDRRRTLSFAEKALKILANSFYGYMGYPRARWYRRECAESVAAFARMYIKQVMRIAEEEFKLEVVYGDTDSLFVVIPPEKRELAQKFLQKVNESMPGIIELEFEGFYRRGLFVTKKRYALLSEDGKMVVKGLEFVRRDWAPIARETQKEVLRILLEEADPEKAARLVRDVIERIRQRRVSLEDITIYTQLTKRIKSYKSLEPHVVAAQKLKERGREVAPGMDIGYIITKGTKGISQRATPVEFARLEDYDPEYYIDNQILPAIQRIFEAIGYTRDYLKEGITQTSLSRWF

SEQ ID NO: 1869 - protein, 792 aa, unidentified
  REGION 1..792: note = Description of Unknown: Synthetic polypeptide
MPRILKGFLIDADFETVEGRALIRLFLRGEEGSFVVYDDSFSPYFYALPGDEPERVKERILASGAAEAIQKVEIEEKRLFGTPRVALRITVSHPQDVPRIRERIRRVEGVDLILEHDILFVRRYLIDRGIKPLTDLRLEVEERDGRALLRGVEQLEEEPPELRVAAVAIAVYNPKGAPRSSKDEIIMISVATSDGVEKVLTWREVQGLEQVEVLQDEKEMLLRFAELIKEGDYDVIVGYNTDSFDFPYIRDRLKKLGISLPLGRLDAELEVSRRGALPEARIRGRAHVDLYPIVRRHVKLNSYDLESVVEELLGIKKEKLDGERLFTYWDEGGEKRALLARYALEDARVTLALAEKFLPLYCELSTIVGQSLNDVARMTSGQLVEWLLMRYATPRGELIPNHPAGEEYAARARATYAGGYVREPKRGLVEHIAVFDFRSFGPSIIVSHNIDPSTLIVGNCEENRAPELEYCFSLEREGFIPAILKELIRRRAEIKRELKRSEGDRRRTLSFAEKALKILANSFYGYMGYPRARWYRRECAESVAAFARMYIKQVMRIAEEEFKLEVVYGDTDSLFVVIPPEKRELAQKFLQKVNESMPGIIELEFEGFYRRGLFVTKKRYALLSEDGKMVVKGLEFVRRDWAPIARETQKEVLRILLEEADPEKAARLVRDVIERIRQRRVSLEDITIYTQLTKRIKSYKSLEPHVVAAQKLKERGREVAPGMIIGYIITKGTKGISQRATPVEFARLEDYDPEYYIDNQILPAIQRIFEAIGYTRDYLKEGITQTSLSRWF

SEQ ID NO: 1870 - protein, 792 aa, unidentified
  REGION 1..792: note = Description of Unknown: Synthetic polypeptide
MPRILKGFLIDADFETVEGRALIRLFLRGEEGSFVVYDDSFSPYFYALPGDEPERVKERILASGAAEAIQKVEIEEKRLFGTPRVALRITVSHPQDVPRIRERIRRVEGVDLILEHDILFVRRYLIDRGIKPLTWLRLEVEERDGRALLRGVEQLEEEPPELRVAAVAIAVYNPKGAPRSSKDEIIMISVATSDGVEKVLTWREVQGLEQVEVLQDEKEMLLRFAELIKEGDYDVIVGYNTDSFDFPYIRDRLKKLGISLPLGRLDAELEVSRRGALPEARIRGRAHVDLYPIVRRHVKLNSYVLESVVEELLGIKKEKLDGERLFTYWDEGGEKRALLARYALEDARVTLALAEKFLPLYCELSTIVGQSLNDVARMTSGQLVEWLLMRYATPRGELIPNHPAGEEYAARARATYAGGYVREPKRGLVEHIAVFDFRSFGPSIIVSHNIDPSTLIVGNCEENRAPELEYCFSLEREGFIPAILKELIRRRAEIKRELKRSEGDRRRTLSFAEKALKILANSFYGYMGYPRARWYRRECAESVAAFARMYIKQVMRIAEEEFKLEVVYGDTDSLFVVIPPEKRELAQKFLQKVNESMPGIIELEFEGFYRRGLFVTKKRYALLSEDGKMVVKGLEFVRRDWAPIARETQKEVLRILLEEADPEKAARLVRDVIERIRQRRVSLEDITIYTQLTKRIKSYKSLEPHVVAAQKLKERGREVAPGMIIGYIITKGTKGISQRATPVEFARLEDYDPEYYIDNQILPAIQRIFEAIGYTRDYLKEGITQTSLSRDF

SEQ ID NO: 1871 - protein, 792 aa, unidentified
  REGION 1..792: note = Description of Unknown: Synthetic polypeptide
MPRILKGFLIDADFETVEGRALIRLFLRGEEGSFVVYDDSFSPYFYALPGDEPERVKERILASGAAEAIQKVEIEEKRLFGTPRVALRITVSHPQDVPRIRERIRRVEGVDLILEHDILFVRRYLIDRGIKPLTWLRLEVEERDGRALLRGVEQLEEEPPELRVAAVAIAVYNPKGAPRSSKDEIIMISVATSDGVEKVLTWREVQGLEQVEVLQDEKEMLLRFAELIKEGDYDVIVGYNTDSFDFPYIRDRLKKPGISLPLGRLDAELEVSRRGALPEARIRGRAHVDLYPIVRRHVKLNSYVLESVVEELLGIKKEKLDGERLFTYWDEGGEKRALLARYALEDARVTLALAEKFLPLYCELSTIVGQSLNDVARMTSGQLVEWLLMRYATPRGELIPNHPAGEEYAARARATYAGGYVREPKRGLVEHIAVFDFRSFGPSIIVSHNIDPSTLIVGNCEENRAPELEYCFSLEREGFIPAILKELIRRRAEIKRELKRSEGDRRRTLSFAEKALKILANSFYGYMGYPRARWYRRECAESVAAFARMYIKQVMRIAEEEFKLEVVYGDTDSLFVVIPPEKRELAQKFLQKVNESMPGIIELEFEGFYRRGLFVTKKRYALLSEDGKMVVKGLEFVRRDWAPIARETQKEVLRILLEEADPEKAARLVRDVIERIRQRRVSLEDITIYTQLTKRIKSYKSLEPHVVAAQKLKERGREVAPGMIIGYIITKGTKGISQRATPVEFARLEDYDPEYYIDNQILPAIQRIFEAIGYTRDYLKEGITQTSLSRWF

SEQ ID NO: 1872 - protein, 789 aa, unidentified; identical to SEQ ID NO: 1857
  REGION 1..789: note = Description of Unknown: Synthetic polypeptide

SEQ ID NO: 1873 - protein, 792 aa, unidentified; identical to SEQ ID NO: 1721
  REGION 1..792: note = Description of Unknown: Synthetic polypeptide

SEQ ID NO: 1874 - protein, 792 aa, unidentified
  REGION 1..792: note = Description of Unknown: Synthetic polypeptide
MPRILKGFLIDADFETVEGRALIRLFLRGEEGSFVVYDDSFSPYFYALPGDEPERVKERILASGAAEAIQKVEIEEKRLFGTPRVALRITVSHPQDVPRIRERIRRVEGVDLDLEHDILFVRRYLIDRGIKPLTWLRLEVEERDGRALLRGVEQLEEEPPELRVAAVAIAVYNPKGAPRSSKDEIIMISVATSDGVEKVLTWREVQGLEQVEVLQDEKEMLLRFAELIKEGDYDVIVGYNTDSFDFPYIRDRLKKLGISLPLGRLDAELEVSRRGALPEARIRGRAHVDLYPIVRRHVKLNSYVLESVVEELLGIKKEKLDGERLFTYWDEGGEKRALLARYALEAARVTLALAEKFLPLYCELSTIVGQSLNDVARMTSGQLVEWLLMRYATPRGELIPNHPAGEEYAARARATYAGGYVREPKRGLVEHIAVFDFRSFGPSIIVSHNIDPSTLIVGNCEENRAPELEYCFSLEREGFIPAILKELIRRRAEIKRELKRSEGDRRRTLSFAEKALKILANSFYGYMGYPRARWYRRECAESVAAFARMYIKQVMRIAEEEFKLEVVYGDTDSLFVVIPPEKRELAQKFLQKVNESMPGIIELEFEGFYRRGLFVTKKRYALLSEDGKMVVKGLEFVRRDWAPIARETQKEVLRILLEEADPEKAARLVRDVIERIRQRRVSLEDITIYTQLTKRIKSYKSLEPHVVAAQKLKERGREVAPGMIIGYIITKGTKGISQRATPVEFARLEDYDPEYYIDNQILPAIQRIFEAIGYTRDYLKEGITQTSLSRWF

SEQ ID NO: 1875 - protein, 792 aa, unidentified
  REGION 1..792: note = Description of Unknown: Synthetic polypeptide
MPRILKGFLIDADFETVEGRALIRLFLRGEEGSFVVYDDSFSPYFYALPGDEPERVKERILASGAAEAIQKVEIEEKRLFGTPRVALRITVSHPQDVPRIRERIRRVEGVDLILEHDILFVRRYLIDRGIKPLTWLRLEVEERDGRALLRGVEQLEEEPPELRVAAVAIAVYNPKGAPRSSKDEIIMISVATSDGVEKVLTWREVQGLEQVEVLQDEKEMLLRFAELIKEGDYDVIVGYNTDSFDFPYIRDRLKKLGISLPLGRLDAELEVSRRGALPEARIRGRAHVDLYPIVRRHVKLNSYVLESVVEELLGIKKEKLDGERLFTYWDEGGEKRALLARYALEDARVTLALAEKFLPLYCELSTIVGQSLNDVARMKSGQLVEWLLMRYATPRGELIPNHPAGEEYAARARATYAGGYVREPKRGLVEHIAVFDFRSFGPSIIVSHNIDPSTLIVGNCEENRAPELEYCFSLEREGFIPAILKELIRRRAEIKRELKRSEGDRRRTLSFAEKALKILANSFYGYMGYPRARWYRRECAESVAAFARMYIKQVMRIAEEEFKLEVVYGDTDSLFVVIPPEKRELAQKFLQKVNESMPGIIELEFEGFYRRGLFVTKKRYALLSEDGKMVVKGLEFVRRDWAPIARETQKEVLRILLEEADPEKAARLVRDVIERIRQRRVSLEDITIYTQLTKRIKSYKSLEPHVVAAQKLKERGREVAPGMIIGYIITKGTKGISQRATPVEFARLEDYDPEYYIDNQILPAIQRIFEAIGYTRDYLKEGITQTSLSRWF

SEQ ID NO: 1876 - protein, 792 aa, unidentified
  REGION 1..792: note = Description of Unknown: Synthetic polypeptide
MPRILKGFLIDADFETVEGRALIRLFLRGEEGSFVVYDDSFSPYFYALPGDEPERVKERILASGAAEAIQKVEIEEKRLFGTPRVALRITVSHPQDVPRIRERIRRVEGVDLILEHDILFVRRYLIDRGIKPLTWLRLEVEERDGRALLRGVEQLEEEPPELRVAAVAISVYNPKGAPRSSKDEIIMISVATSDGVEKVLTWREVQGLEQVEVLQDEKEMLLRFAELIKEGDYDVIVGYNTDSFDFPYIRDRLKKLGISLPLGRLDAELEVSRRGALPEARIRGRAHVDLYPIVRRHVKLNSYVLESVVEELLGIKKEKLDGERLFTYWDEGGEKRALLARYALEDARVTLALAEKFLPLYCELSTIVGQSLNDVARMTSGQLVEWLLMRYATPRGELIPNHPAGEEYAARARATYAGGYVREPKRGLVEHIAVFDFRSFGPSIIVSHNIDPSTLIVGNCEENRAPELEYCFSLEREGFIPAILKELIRRRAEIKRELKRSEGDRRRTLSFAEKALKILANSFYGYMGYPRARWYRRECAESVAAFARMYIKQVMRIAEEEFKLEVVYGDTDSLFVVIPPEKRELAQKFLQKVNESMPGIIELEFEGFYRRGLFVTKKRYALLSEDGKMVVKGLEFVRRDWAPIARETQKEVLRILLEEADPEKAARLVRDVIERIRQRRVSLEDITIYTQLTKRIKSYKSLEPHVVAAQKLKERGREVAPGMIIGYIITKGTKGISQRATPVEFARLEDYDPEYYIDNQILPAIQRIFEAIGYTRDYLKEGITQTSLSRWF

SEQ ID NO: 1877 - protein, 792 aa, unidentified
  REGION 1..792: note = Description of Unknown: Synthetic polypeptide
MPRILKGFLIDADFETVEGRALIRLFLRGEEGSFVVYDDSFSPYFYALPGDEPERVKERILASGAAEAIQKVEIEEKRLFGTPRVALRITVSHPQDVPRIRERIRRVEGVDLILEHDILFVRRYLIDRGIKPLTWLRLEVEERDGRALLRGVEQLEEEPPELRVAAVAIAVYNPKGAPRSSKDEIIMISVATSDGVEKVLTWREVQGLEQVEVLQDEKEMLLRFAELIKEGDYDVIVGYNTDSFDFPYIRDRLKKLGISLPLGRLDAELEVSRRGALPEARIRGRAHVDLYPIVRRHVKLNSYVLESVVEELLSIKKEKLDGERLFTYWDEGGEKRALLARYALEDARVTLALAEKFLPLYCELSTIVGQSLNDVARMTSGQLVEWLLMRYATPRGELIPNHPAGEEYAARARATYAGGYVREPKRGLVEHIAVFDFRSFGPSIIVSHNIDPSTLIVGNCEENRAPELEYCFSLEREGFIPAILKELIRRRAEIKRELKRSEGDRRRTLSFAEKALKILANSFYGYMGYPRARWYRRECAESVAAFARMYIKQVMRIAEEEFKLEVVYGDTDSLFVVIPPEKRELAQKFLQKVNESMPGIIELEFEGFYRRGLFVTKKRYALLSEDGKMVVKGLEFVRRDWAPIARETQKEVLRILLEEADPEKAARLVRDVIERIRQRRVSLEDITIYTQLTKRIKSYKSLEPHVVAAQKLKERGREVAPGMIIGYIITKGTKGISQRATPVEFARLEDYDPEYYIDNQILPAIQRIFEAIGYTRDYLKEGITQTSLSRWF

SEQ ID NO: 1878 - protein, 791 aa, unidentified; identical to SEQ ID NO: 1802
  REGION 1..791: note = Description of Unknown: Synthetic polypeptide

SEQ ID NO: 1879 - protein, 792 aa, unidentified
  REGION 1..792: note = Description of Unknown: Synthetic polypeptide
MPRILKGFLIDADFETVEGRALIRLFLRGEEGSFVVYDDSFSPYFYALPGDEPERVKERILASGAAEAIQKVEIEEKRLFGTPRVALRITVSHPQDVPRIRERIRRVEGVDLILEHDILFVRRYLIDRGIKPLTWLRLEVEERDGRALLRGVEQLEEEPPELRVAAVAIAVYNPKGAPRSSKDEIIMISVATSDGVEKVLTWREVQGLEQVEVLQDEKEMLLRFAELIKEGDYDVIVGYNTDSFDFPYIRDRLKKLGISLPLGRLDAELEVSRRGALPEARIRGRAHVDLYPIVRRHVKLNSYVLESVVEELLGIKKEKLDGERLFTYWDEGGEKRALLARYALEDARVTLALAEKFLPLYCELSTIVGQSLNDVARMTSGQLVEWLLMRYATPRGELIPNHPAGEEYAARARATYAGGYVREPKRGLVEHIAVFDFRSFGPSIIVSHNIDPSTLIVGNCEENRAPELEYCFSLEREGFIPAILKELIRRRAEIKRELKRSEGDRRRTLSFAEKALKILANSFYGYMGYPRARWYRRECAESVAAFARRYIKQVMRIAEEEFKLEVVYGDTDSLFVVIPPEKRELAQKFLQKVNESMPGIIELEFEGFYRRGLFVTKKRYALLSEDGKMVVKGLEFVRRDWAPIARETQKEVLRILLEEADPEKAARLVRDVIERIRQRRVSLEDITIYTQLTKRIKSYKSLEPHVVAAQKLKERGREVAPGMIIGYIITKGTKGISQRATPVEFARLEDYDPEYYIDNQILPAIQRIFEAIGYTRDYLKEGITQTSLSRWF

SEQ ID NO: 1880 - protein, 792 aa, unidentified
  REGION 1..792: note = Description of Unknown: Synthetic polypeptide
MPRILKGFLIDADFETVEGRALIRLFLRGEEGSFVVYDDSFSPYFYALPGDEPERVKERILASGAAEAIQKVEIEEKRLFGTPRVALRITVSHPQDVPRIRERIRRVEGVDLILEHDILFVRRYLIDRGIKPLTWLRLEVEERDGRALLRGVEQLEEEPPELRVAAVAIAVYNPKGAPRSSKDEIIMISVATSDGVEKVLTWREVQGLEQVEVLQDEKEMLLRFAELIKEGDYDVIVGYNTDSFDFPYIRDRLKKLGISLPLGRLDAELEVSRRGALPEARIRGRAHVDLYPIVRRHVKLNSYVLESVVEELLGIKKEKLDGERLFTYWDEGGEKRALLARYALEDARVTLALAEKFLPLYCELSTIVGQSLNDVARMTSGQLVEWLLMRYATPRGELIPNHPAGEEYAARARATYAGGYVREPKRGLVEHIAVFDFRSFGPSIIVSHNIDPSTLIVGNCEENRAPELEYCFSLEREGFIPAILKELIRRRAEIKRELKRSEGDRRRTLSFAEKALKILANSFYGYMGYPRARWYRRECAESVAAFARMYIKQVMRIAEEEFKLEVVYGDTDSLFVVIPPEKRELAQKFLQKVNESMPGIIELEFEGFYRRGLFVTKKRYALLSEDGKMVVKGLEFVRRDFAPIARETQKEVLRILLEEADPEKAARLVRDVIERIRQRRVSLEDITIYTQLTKRIKSYKSLEPHVVAAQKLKERGREVAPGMIIGYIITKGTKGISQRATPVEFARLEDYDPEYYIDNQILPAIQRIFEAIGYTRDYLKEGITQTSLSRWF

SEQ ID NO: 1881 - protein, 792 aa, unidentified
  REGION 1..792: note = Description of Unknown: Synthetic polypeptide
MPRILKGFLIDADFETVEGRALIRLFLRGEEGSFVVYDDSFSPYFYALPGDEPERVKERILASGAAEAIQKVEIEEKRLFGTPRVALRITVSHPQDVPRIRERIRRVEGVDLILEHDILFVRRYLIDRGIKPLTWLRLEVEERDGRALLRGVEQLEEEPPELRVAAVAIAVYNPKGAPRSSKDEIIMISVATSDGVEKVLTWREVQGLEQVEVLQDEKEMLLRFAELIKEGDYDVIVGYNTDSFDFPYIRDRLKKLGISLPLGRLDAELEVSRRGALPEARIRGRAHVDLYPIVRRHVKLNSYVLESVVEELLGIKKEKLDGERLFTYWDEGGEKRALLARYALEDARVTLALAEKFLPLYCELSTIVGQSLNDVARMTSGQLVEWLLMRYATPRGELIPNHPAGEEYAARARATYAGGYVREPKRGLVEHIAVFDFRSFGPSIIVSHNIDPSTLIVGNCEENRAPELEYCFSLEREGFIPAILKELIRRRAEIKRELKRSEGDRRRTLSFAEKALKILANSFYGYMGYPRARWYRRECAESVAAFARMYIKQVMRIAEEEFKLEVVYGDTDSLFVVIPPEKRELAQKFLQKVNESMPGIIELEFEGFYRRGLFVTKKRYALLSEDGKMVVKGLEFVRRDWAPIARETQKEVLRILLEEADPEKAARLVRDVIERIRQRRVSLEDITIYTQLTKRIKSYKSLEPHVVAAQKLKERGREVAPGMIIGYIITKGTKGISQRATPVEFARLEDYDPEYYIDNQILPAIQRIFEAVGYTRDYLKEGITQTSLSRWF

SEQ ID NO: 1882 - protein, 792 aa, unidentified
  REGION 1..792: note = Description of Unknown: Synthetic polypeptide
MPRILKGFLIDADFETVEGRALIRLFLRGEEGSFVVYDDSFSPYFYALPGDEPERVKERILASGAAEAIQKVEIEEKRLFGTPRVALRITVSHPQDVPRIRERIRRVEGVDLILEHDILFVRRYLIDRGIKPLTWLRLEVEERDGRALLRGVEQLEEEPPELRVAAVAIAVYNPKGAPRSSKDEIIMISVATSDGVEKVLTWREVQGLEQVEVLQDEKEMLLRFAELIKEGDYDVIVGYNTDSFDFPYIRDRLKKLGISLPLGRLDAELEVSRRGALPEARIRGRAHVDLYPIVRRHVKLNSYVLESVVEELLGIKKEKLDGERLYTYWDEGGEKRALLARYALEDARVTLALAEKFLLVYCELSTIVGQSLSDVARMTSGQLVEWLLMRYATPRGELIPNHPAGEEYAARARATYAGGYVREPKRGLVEHIAVFDFRSFGPSIIVSHNIDPSTLIVGNCEENRAPELEYCFSLEREGFIPAILKELIRRRAEIKRELKRSEGDRRRTLSFAEKALKILANSFYGYMGYPRARWYRRECAESVAAFARMYIKQVMRIAEEEFKLEVVYGDTDSLFVVIPPEKRELAQKFLQKVNESMPGIIELEFEGFYRRGLFVTKKRYALLSEDGKMVVKGLEFVRRDWAPIARETQKEVLRILLEEADPEKAARLVRDVIERIRQRRVSLEDITIYTQLTKRIKSYKSLEPHVVAAQKLKERGREVAPGMIIGYIITKGTKGISQRATPVEFARLEDYDPEYYIDNQILPAIQRIFEAIGYTRDYLKEGITQTSLSRWF

SEQ ID NO: 1883 - protein, 792 aa, unidentified
  REGION 1..792: note = Description of Unknown: Synthetic polypeptide
MPRILKGFLIDADFETVEGRALIRLFLRGEEGSFVVYDDSFSPYFYALPGDEPERVKERILASGAAEAIQKVEIEEKRLFGTPRVALRITVSHPQDVPRIRERIRRVEGVDLILEHDILFVRRYLIDRGIKPLTWLRLEVEERDGRALLRGVEQLEEEPPELRVAAVAIAVYNPKGAPRSSKDEIIMISVATSDGVEKVLTWREVQGLEQVEVLQDEKEMLLRFAELIKEGDYDVIVGYNTDSFDFPYIRDRLKKLGISLPLGRLDAELEVSRRGALPEARIRGRAHVDLYPIVRRHVKLNSYDLESVVEELLGIKKEKLDGERLFTYWDEGGEKRALLARYALEDARVTLALAEKFLPLYLELSTIVGQSLNDVARMTSGQLVEWLLMRYATPRGELIPNHPAGEEYAARARATYAGGYVREPKRGLVEHIAVFDFRSFGPSIIVSHNICPSTLIVGNCEENRAPELEYCFSLEREGFIPAILKELIRRRAEIKRELKRSEGDRRRTLSFAEKALKILANSFYGYMGYPRARWYRRECAESVAAFARMYIKQVMRIAEEEFKLEVVYGDTDSLFVVIPPEKRELAQKFLQKVNESMPGIIELEFEGFYRRGLFVTKKRYALLSEDGKMVVKGLEFVRRDWAPIARETQKEVLRILLEEADPEKAARLVRDVIERIRQRRVSLEDITIYTQLTKRIKSYKSLEPHVVAAQKLKERGREVAPGMIIGYIITKGTKGISQRATPVEFARLEDYDPEYYIDNQILPAIQRIFEAIGYTRDYLKEGITQTSLSRDF

SEQ ID NO: 1884 - protein, 792 aa, unidentified
  REGION 1..792: note = Description of Unknown: Synthetic polypeptide
MPRILKGFLIDADFETVEGRALIRLFLRGEEGSFVVYDDSFSPYFYALPGDEPERVKERILASGAAEAIQKVEIEEKRLFGTPRVALRITVSHPQDVPRIRERIRRVEGVDLDLEHDILFVRRYLIDRGIKPLTWLRLEVEERDGRALLRGVEQLEEEPPELRVAAVAIAVYNPKGAPRSSKDEIIMISVATSDGVEKVLTWREVQGLEQVEVLQDEKEMLLRFAELIKEGDYDVIVGYNTDSFDFPYIRDRLKKLGISLPLGRLDAELEVSRRGALPEARIRGRAHVDLYPIVRRHVKLNSYVLESVVEELLGIKKEKLDGERLFTYWDEGGEKRALLARYALEDARVTLALAEKFLPLYCELSTIVGQSLNDVARMTSGQLVEWLLMRYATPRGELIPNHPAGEEYAARARATYAGGYVREPKRGLVEHIAVFDFRSFGPSIIVSHNIDPSTLIVGNCEENRAPELEYCFSLEREGFIPAILKELIRRRAEIKRELKRSEGDRRRTLSFAEKALKILANSFYGYMGYPRARWYRRECAESVAAFARMYIKQVMRIAEEEFKLEVVYGDTDSLFVVIPPEKRELAQKFLQKVNESMPGIIELEFEGFYRRGLFVTKKRYALLSEDGKMVVKGLEFVRRDWAPIARETQKEVLRILLEEADPEKAARLVRDVIERIRQRRVSLEDITIYTQLTKRIKSYKSLEPHVVAAQKLKERGREVAPGMIIGYIITKGTKGISQRATPVEFARLEDYDPEYYIDNQILPAIQRIFEAIGYTRDYLKEGITQTSLSRWF

SEQ ID NO: 1885 - protein, 792 aa, unidentified
  REGION 1..792: note = Description of Unknown: Synthetic polypeptide
MPRILKGFLIDADFETVEGRALIRLFLRGEEGSFVVYDDSFSPYFYALPGDEPERVKERILASGAAEAIQKVEIEEKRLFGTPRVALRITVSHPQDVPRIRERIRRVEGVDLILEHDILFVRRYLIDRGIKPLTWLRLEVEERDGRALLRGVEQLEEEPPELRVAAVAIAVYNPKGAPRSSKDEIIAISVATSDGVEKVLTWREVQGLEQVEVLQDEKEMLLRFAELIKEGDYDVIVGYNTDSFDFPYIRDRLKKLGISLPLGRLDAELEVSRRGALPEARIRGRAHVDLYPIVRRHVKLNSYVLESVVEELLGIKKEKLDGERLFTYWDEGGEKRALLARYALEDARVTLALAEKFLPLYCELSTIVGQSLNDVARMTSGQLVEWLLMRYATPRGELIPNHPAGEEYAARARATYAGGYVREPKRGLVEHIAVFDFRSFGPSIIVSHNIDPSTLIVGNCEENRAPELEYCFSLEREGFIPAILKELIRRRAEIKRELKRSEGDRRRTLSFAEKALKILANSFYGYMGYPRARWYRRECAESVAAFARMYIKQVMRIAEEEFKLEVVYGDTDSLFVVIPPEKRELAQKFLQKVNESMPGIIELEFEGFYRRGLFVTKKRYALLSEDGKMVVKGLEFVRRDWAPIARETQKEVLRILLEEADPEKAARLVRDVIERIRQRRVSLEDITIYTQLTKRIKSYKSLEPHVVAAQKLKERGREVAPGMIIGYIITKGTKGISQRATPVEFARLEDYDPEYYIDNQILPAIQRIFEAIGYTRDYLKEGITQTSLSRWF

SEQ ID NO: 1886 - protein, 789 aa, unidentified
  REGION 1..789: note = Description of Unknown: Synthetic polypeptide
MPRILKGFLIDADFETVEGRALIRLFLRGEEGSFVVYDDSFSPYFYALPGDEPERVKERILASGAAEAIQKVEIEEKRLFGTPRVALRITVSHPQDVPRIHERIRRVEGVDLILEHDILFVRRYLIDRGIKPLTWLRLEVEERDGRALLRGVEQLEEEPPELRVAAVAIAVYNPKGAPRSSKDEIIMISVATSDGVEKVLTWREVQGLEQVEVLQDEKEMLLRFAELIKEGDYDVIVGYNTDSFDFPYIRDRLKKLGISLPLGRLDAELEVSRRGALPEARIRGRAHVDLYPIVRRHVKLNSYDLESVVEELLGIKKEKLDGERLFTYWDEGGEKRALLARYALEDARVTLALAEKFLPLYLELSTIVGQSLNDVARMTSGQLVEWLLMRYATPRGELIPNHPAGEEYAARARATYAGGYVREPKRGLVEHIAVFDFRSFGPSIIVSHNIDPSTLIVGNCEENRAPELEYCFSLEREGFIPAILKELIRRRAEIKRELKRSEGDRRRTLSFAEKALKILANSFYGYMGYPRARWYRRECAESVAAFARMYIKQVMRIAEEEFKLEVVYGDTDSLFVVIPPEKRELAQKFLQKVNESMPGIIELEFEGFYRRGLFVTKKRYALLSEDGKMVVKGLEFVRRDWAPIARETQKEVLRILLEEADPEKAARLVRDVIERIRQRRVSLEDITIYTQLTKRIKSYKSLEPHVVAAQKLKERGREVAPGMIIGYIITKGTKGISQRATPVEFARLEDYDPEYYIDNQILPAIQRIFEAIGYTRDYLKEGITQTSLS

SEQ ID NO: 1887 - protein, 792 aa, unidentified
  REGION 1..792: note = Description of Unknown: Synthetic polypeptide
MPRILKGFLIDADFETVEGRALIRLFLRGEEGSFVVYDDSFSPYFYALPGDEPERVKERILASGAAEAIQKVEIEEKRLFGTPRVALRITVSHPQDVPRIRERIRRVEGVDLILEHDILFVRRYLIDRGIKPLTWLRLEVEERDGRALLRGVEQLEEEPPELRVAAVAIAVYNPKGAPRSSKDEIIMISVATSDGVEKVLTWREVQGLEQVEVLQDEKEMLLRFAELIKEGDYDVIVGYNTDSFDFPYIRDRLKKLGISLPLGRLDAELEVSRRGALPEARIRGRAHVDLYPIVRRHVKLNSYVLESVVEELLGIKKVKLDGERLFTYWDEGGEKRALLARYALEDARVTLALAEKFLPLYCELSTIVGQSLNDVARMTSGQLVEWLLMRYATPRGELIPNHPAGEEYAARARATYAGGYVREPKRGLVEHIAVFDFRSFGPSIIVSHNIDPSTLIVGNCEENRAPELEYCFSLEREGFIPAILKELIRRRAEIKRELKRSEGDRRRTLSFAEKALKILANSFYGYMGYPRARWYRRECAESVAAFARMYIKQVMRIAEEEFKLEVVYGDTDSLFVVIPPEKRELAQKFLQKVNESMPGIIELEFEGFYRRGLFVTKKRYALLSEDGKMVVKGLEFVRRDWAPIARETQKEVLRILLEEADPEKAARLVRDVIERIRQRRVSLEDITIYTQLTKRIKSYKSLEPHVVAAQKLKERGREVAPGMIIGYIITKGTKGISQRATPVEFARLEDYDPEYYIDNQILPAIQRIFEAIGYTRDYLKEGITQTSLSRWF

SEQ ID NO: 1888 - protein, 792 aa, unidentified
  REGION 1..792: note = Description of Unknown: Synthetic polypeptide
MPRILKGFLIDADFETVEGRALIRLFLRGEEGSFVVYDDSFSPYFYALPGDEPERVKERILASGAAEAIQKVEIEEKRLFGTPRVALRITVSHPQDVPRIRERIRRVEGVDLILEHDILFVRRYLIDRGIKPLTWLRLEVEERDGRALLRGVEQLEEEPPELRVAAVAIAVYNPKGAPRSSKDEIIMISVATSDGVEKVLTWREVQGLEQVEVLQDEKEMLLRFAELIKEGDYDVIVGYNTDSFDFPYIRDRLKKLGISLPLGRLDAELEVSRRGALPEARIRGRAHVDLYPIVRRHVKLNSYVLESVVEELLGIKKEKLDGERLFTYWDEGGEKRALLARYALEDARVTLALAEKFLPLYCELSTIVGQSLNDVARMTSGQLVEWLLMRYATPRGELIPNHPAGEEYAARARATYAGGYVREPKRGLVEHIAVFDFRSFGPSIIVSHNIDPSTLIVGNCEENRAPELEYCFSLEREGFIPAILKELIRRRAEIKRELKRSEGDRRRTLSFAEKALKILANSFYGYMGYPRARWYRRECAESVAAFARMYIKQVMRIAEEEFKLEVVYGDTDSLFVVIPPEKRELAQKFLQKVNESMPGIIELEFEGFYRRGLFVTKKRYALLSEDGKMVVKGLEFVRRDWAPIARETQKEVLRILLEEADPEKAARLVRDVIERIRQRRVSLEDITIYNQLTKRIKSYKSLEPHVVAAQKLKERGREVAPGMIIGYIITKGTKGISQRATPVEFARLEDYDPEYYIDNQILPAIQRIFEAIGYTRDYLKEGITQTSLSRWF

SEQ ID NO: 1889 - protein, 792 aa, unidentified
  REGION 1..792: note = Description of Unknown: Synthetic polypeptide
MPDILKGFLIDADFETVEGRALIRLFLRGEEGSFVVYDDSFSPYFYALPGDEPERVKERILASGAAEAIQKVEIEEKRLFGTPRVALRITVSHPQDVPRIRERIRRVEGVDLILEHDILFVRRYLIDRGIKPLTWLRLEVEERDGRALLRGVEQLEEEPPELRVAAVAIAVYNPKGAPRSSKDEIIMISVATSDGVEKVLTWREVQGLEQVEVLQDEKEMLLRFAELIKEGDYDVIVGYNTDSFDFPYIRDRLKKLGISLPLGRLDAELEVSRRGALPEARIRGRAHVDLYPIVRRHVKLNSYVLESVVEELLGIKKEKLDGERLFTYWDEGGEKRALLARYALEDARVTLALAEKFLPLYCELSTIVGQSLNDVARMTSGQLVEWLLMRYATPRGELIPNHPAGEEYAARARATYAGGYVREPKRGLVEHIAVFDFRSFGPSIIVSHNIDPSTLIVGNCEENRAPELEYCFSLEREGFIPAILKELIRRRAEIKRELKRSEGDRRRTLSFAEKALKILANSFYGYMGYPRARWYRRECAESVAAFARMYIKQVMRIAEEEFKLEVVYGDTDSLFVVIPPEKRELAQKFLQKVNESMPGIIELEFEGFYRRGLFVTKKRYALLSEDGKMVVKGLEFVRRDWAPIARETQKEVLRILLEEADPEKAARLVRDVIERIRQRRVSLEDITIYTQLTKRIKSYKSLEPHVVAAQKLKERGREVAPGMIIGYIITKGTKGISQRATPVEFARLEDYDPEYYIDNQILPAIQRIFEAIGYTRDYLKEGITQTSLSRWF

SEQ ID NO: 1890 - protein, 791 aa, unidentified; identical to SEQ ID NO: 1802
  REGION 1..791: note = Description of Unknown: Synthetic polypeptide

SEQ ID NO: 1891 - protein, 792 aa, unidentified
  REGION 1..792: note = Description of Unknown: Synthetic polypeptide
MPRILKGFLIDADFETVEGRALIRLFLRGEEGSFVVYDDSFSPYFYALPGDEPERVKERILASGAAEAIQKVEIEEKRLFGTPRVALRITVSHPQDVPRIRERIRRVEGVDLILEHDILFVRRYLIDRGIKPLTWLRLEVEERDGRALLRGVEQLEEEPPELRVAAVAIAVYNPKGAPRSSKDEIIMISVATSDGVEKVLTWREVQGLEQVEVLQDEKEMLLRFAELIKEGDYDVIVGYNTDSFDFPYIRDRLKKLGISLPLGRLDAELEVSRRGALPEARIRGRAHVDLYPIVRRHVKLNSYDLESVVEELLGIKKEKLDGERRFTYWDEGGEKRALLARYALEDARVTLALAEKFLPLYCELSTIVGQSLNDVARMTSGQLVEWLLMRYATPRGELAPNHPAGEEYAARARATYAGGYVREPKRGLVEHIAVFDFRSFGPSIIVSHNIDPSTLIVGNCEENRAPELEYCFSLEREGFIPAILKELIRRRAEIKRELKRSEGDRRRTLSFAEKALKILANSFYGYMGYPRARWYRRECAESVAAFARMYIKQVMRIAEEEFKLEVVYGDTDSLFVVIPPEKRELAQKFLQKVNESMPGIIELEFEGFYRRGLFVTKKRYALLSEDGKMVVKGLEFVRRDWAPIARETQKEVLRILLEEADPEKAARLVRDVIERIRQRRVSLEDITIYTQLTKRIKSYKSLEPHVVAAQKLKERGREVAPGMIIGYIITKGTKGISQRATPVEFARLEDYDPEYYIDNQILPAIQRIFEAIGYTRDYLKEGITQTSLSRWF

SEQ ID NO: 1892 - protein, 792 aa, unidentified
  REGION 1..792: note = Description of Unknown: Synthetic polypeptide
MPRILKGFLIDADFETVEGRALIRLFLRGEEGSFVVYDDSFSPYFYALPGDEPERVKERILASGAAEAIQKVEIEEKRLFGTPRVALRITVSHPQDVPRIRERIRRVEGVDLILEHDILFVRRYLIDRGIKPLTWLRLEVEERDGRALLRGVEQLEEEPPELRVAAVAIAVYNPKGAPRSSKDEIIMISVATSDGVEKVLTWREVQGLEQVEVLQDEKEMLLRFAELIKEGDYDVIVGYNTDSFDFPYIRDRLKKLGISLPLGRLDAELEVSRRGALPEARIRGRAHVDLYPIVRRHVKLNSYDLESVVEELLGIKKEKLDGERLFTYWDEGGEKRALLARYALEDARVTLALAEKFLPLYCELSTIVGQSLNDVARMTSGQLVEWLLMRYATPRGELIPNHPAGEEYAARARATYAGGYVREPKRGLVEHIAVFDFRSFGPSIIVSHNIDPSRLIVGNCEENRAPELEYCFSLEREGFIPAILKELIRRRAEIKRELKRSEGDRRRTLSFAEKALKILANSFYGYMGYPRARWYRRECAESVAAFARMYIKQVMRIAEEEFKLEVVYGDTDSLFVVIPPEKRELAQKFLQKVNESMPGIIELEFEGFYRRGLFVTKKRYALLSEDGKMVVKGLEFVRRDWAPIARETQKEVLRILLEEADPEKAARLVRDVIERIRQRRVSLEDITIYTQLTKRIKSYKSLEPHVVAAQKLKERGREVAPGMIIGYIITKGTKGISQRATPVEFARLRDYDPEYYIDNQILPAIQRIFEAIGYTRDYLKEGITQTSLSRWF

SEQ ID NO: 1893 - protein, 792 aa, unidentified; identical to SEQ ID NO: 1753
  REGION 1..792: note = Description of Unknown: Synthetic polypeptide

SEQ ID NO: 1894 - protein, 792 aa, unidentified
  REGION 1..792: note = Description of Unknown: Synthetic polypeptide
MPRILKGFLIDADFETVEGRALIRLFLRGEEGSFVVYDDSFSPYFYALPGDEPERVKERILASGAAEAIQKVEIEEKRLFGTPRVALRITVSHPQDQPRIRERIRRVEGVDLILEHDILFVRRYLIDRGIKPLTWLRLEVEERDGRALLRGVEQLEEEPPELRVAAVAIAVYNPKGAPRSSKDEIIMISVATSDGVEKVLTWREVQGLEQVEVLQDEKEMLLRFAELIKEGDYDVIVGYNTDSFDFPYIRDRLKKLGISLPLGRLDAELEVSRRGALPEARIRGRAHVDLYPIVRRHVKLNSYVLESVVEELLGIKKEKLDGERLFTYWDEGGEKRALLARYALEDARVTLALAEKFLPLYCELSTIVGQSLNDVARMTSGQLVEWLLMRYATPRGELIPNHPAGEEYAARARATYAGGYVREPKRGLVEHIAVFDFRSFGPSIIVSHNIDPSTLIVGNCEENRAPELEYCFSLEREGFIPAILKELIRRRAEIKRELKRSEGDRRRTLSFAEKALKILANSFYGYMGYPRARWYRRECAESVAAFARMYIKQVMRIAEEEFKLEVVYGDTDSLFVVIPPEKRELAQKFLQKVNESMPGIIELEFEGFYRRGLFVTKKRYALLSEDGKMVVKGLEFVRRDWAPIARETQKEVLRILLEEADPEKAARLVRDVIERIRQRRVSLEDITIYTQLTKRIKSYKSLEPHVVAAQKLKERGREVAPGMIIGYIITKGTKGISQRATPVEFARLEDYDPEYYIDNQILPAIQRIFEAIGYTRDYLKEGITQTSLSRWF

SEQ ID NO: 1895 - protein, 792 aa, unidentified
  REGION 1..792: note = Description of Unknown: Synthetic polypeptide
MPRILKGFLIDADFETVEGRALIRLFLRGEEGSFVVYDDSFSPYFYALPGDEPERVKERILASGAAEAIQKVEIEEKRLFGTPRVALRITVSHPQDVPRIRERIRRVEGVDLILELDILFVRRYLIDRGIKPLTWLRLEVEERDGRALLRGVEQLEEEPPELRVAAVAIAVYNPKGAPRSSKDEIIMISVATSDGVEKVLTWREVQGLEQVEVLQDEKEMLLRFAELIKEGDYDVIVGYNTDSFDFPYIRDRLKKLGISLPLGRLDAELEVSRRGALPEARIRGRAHVDLYPIVRRHVKLNSYVLESVVEELLGIKKEKLDGERLFTYWDEGGEKRALLARYALEDARVTLALAEKFLPLYCELSTIVGQSLNDVARMTSGQLVEWLLMRYATPRGELAPNHPAGEEYAARARATYAGGYVREPKRGLVEHIAVFDFRSFGPSIIVSHNIDPSTLIVGNCEENRAPELEYCFSLEREGFIPAILKELIRRRAEIKRELKRSEGDRRRTLSFAEKALKILANSFYGYMGYPRARWYRRECAESVAAFARMYIKQVMRIAEEEFKLEVVYGDTDSLFVVIPPEKRELAQKFLQKVNESMPGIIELEFEGFYRRGLFVTKKRYALLSEDGKMVVKGLEFVRRDWAPIARETQKEVLRILLEEADPEKAARLVRDVIERIRQRRVSLEDITIYTQLTKRIKSYKSLEPHVVAAQKLKERGREVAPGMIIGYIITKGTKGISQRATPVEFARLEDYDPEYYIDNQILPAIQRIFEAIGYTRDYLKEGITQTSLSRWF

SEQ ID NO: 1896 - protein, 792 aa, unidentified
  REGION 1..792: note = Description of Unknown: Synthetic polypeptide
MPRILKGFLIDADFETVEGRALIRLFLRGEEGSFVVYDDSFSPYFYALPGDEPERVKERILASGAAEAIQKVEIEEKRLFGTPRVALRITVSHPQDVPRIRERIRRVEGVDLILEHDILFVSRYLIDRGIKPLTWLRLEVEERDGRALLRGVEQLEEEPPELRVAAVAIAVYNPKGAPRSSKDEIIMISVATSDGVEKVLTWREVQGLEQVEVLQDEKEMLLRFAELIKEGDYDVIVGYNTDSFDFPYIRDRLKKLGISLPLGRLDAELEVSRRGALPEARIRGRAHVDLYPIVRRHVKLNSYDLESVVEELLGIKKEKLDGERLFTYWDEGGEKRALLARYALEDARVTLALAEKFLPLYCELSTIVGQSLNDVARMTSGQLVEWLLMRYATPRGELIPNHPAGEEYAARARATYAGGYVREPKRGLVEHIAVFDFRSFGPSIIVSHNIDPSTLIVGNCEENRAPELEYCFSLEREGFIPAILKELIRRRAEIKRELKRSEGDRRRTLSFAEKALKILANSFYGYMGYPRARWYRRECAESVAAFARMYIKQVMRIAEEEFKLEVVYGDTDSLFVVIPPEKRELAQKFLQKVNESMPGIIELEFEGFYRRGLFVTKKRYALLSEDGKMVVKGLEFVRRDWAPIARETQKEVLRILLEEADPEKAARLVRDVIERIRQRRVSLEDITIYTQLTKRIKSYKSLEPHVVAAQKLKERGREVAPGMIIGYIITKGTKGISQRATPVEFARLEDYDPEYYIDNQILPAIQRIFEAIGYTRDYLKEGITQTSLSRWF

SEQ ID NO: 1897 - protein, 790 aa, unidentified
  REGION 1..790: note = Description of Unknown: Synthetic polypeptide
MPRILKGFLIDADFETVEGRALIRLFLRGEEGSFVVYDDSFSPYFYALPGDEPERVKERILASGAAEAIQKVEIEEKRLFGTPRVALRITVSHPQDVPRIRERIRRVEGVDLILEHDILFVRRYLIDRGIKPLTWLRLEVEERDGRALLRGVEQLEEEPPELRVAAVAIAVYNPKGAPRSSKDEIIMISVATSDGVEKVLTWREVQGLEQVEVLQDEKEMLLRFAELIKEGDYDVIVGYNTDSFDFPYIRDRLKKLGISLPLGRLDAELEVSRRGALPEARIRGRAHVDLYPIVRRHVKLNNYVLESVVEELLGIKKEKLDGERLFTYWDEGGEKRALLARYALEDARVTLALAEKFLPLYCELSTIVGQSLNDVARMTSGQLVEWLLMRYATPRGELIPNHPAGEEYAARARATYAGGYVREPKRGLVEHIAVFDFRSFGPSIIVSHNIDPSTLIVGNCEENRAPELEYCFSLEREGFIPAILKELIRRRAEIKRELKRSEGDRRRTLSFAEKALKILANSFYGYMGYPRARWYRRECAESVAAFARMYIKQVMRIAEEEFKLEVVYGDTDSLFVVIPPEKRELAQKFLQKVNESMPGIIELEFEGFYRRGLFVTKKRYALLSEDGKMVVKGLEFVRRDWAPIARETQKEVLRILLEEADPEKAARLVRDVIERIRQRRVSLEDITIYTQLTKRIKSYKSLEPHVVAAQKLKERGREVAPGMIIGYIITKGTKGISQRATPVEFARLEDYDPEYYIDNQILPAIQRIFEAIGYTRDYLKEGITQTSLSR

SEQ ID NO: 1898 - protein, 792 aa, unidentified
  REGION 1..792: note = Description of Unknown: Synthetic polypeptide
MPRILKGFLIDADFETVEGRALIRLFLRGEEGSFVVYDDSFSPYFYALPGDEPERVKERILASGAAEAIQKVEIEEKRLFGTPRVALRITVSHPQDVPRIRERIRRVEGVDLDLELDILFVRRYLIDRGIKPLTWLRLEVEERDGRALLRGVEQLEEEPPELRVAAVAIAVYNPKGAPRSSKDEIIMISVATSDGVEKVLTWREVQGLEQVEVLQDEKEMLLRFAELIKEGDYDVIVGYNTDSFDFPYIRDRLKKLGISLPLGRLDAELEVSRRGALPEARIRGRAHVDLYPIVRRHVKLNSYVLESVVEELLGIKKEKLDGERLFTYWDEGGEKRALLARYALEDARVTLALAEKFLPLYCELSTIVGQSLNDVARMTSGQLVEWLLMRYATPRGELIPNHPAGEEYAARARATYAGGYVREPKRGLVEHIAVFDFRSFGPSIIVSHNIDPSTLIVGNCEENRAPELEYCFSLEREGFIPAILKELIRRRAEIKRELKRSEGDRRRTLSFAEKALKILANSFYGYMGYPRARWYRRECAESVAAFARMYIKQVMRIAEEEFKLEVVYGDTDSLFVVIPPEKRELAQKFLQKVNESMPGIIELEFEGFYRRGLFVTKKRYALLSEDGKMVVKGLEFVRRDWAPIARETQKEVLRILLEEADPEKAARLVRDVIERIRQRRVSLEDITIYTQLTKRIKSYKSLEPHVVAAQKLKERGREVAPGMIIGYIITKGTKGISQRATPVEFARLEDYDPEYYIDNQILPAIQRIFEAIGYTRDYLKEGITQTSLSRWF

SEQ ID NO: 1899 - protein, 792 aa, unidentified
  REGION 1..792: note = Description of Unknown: Synthetic polypeptide
MPRILKGFLIDADFETVEGRALIRLFLRGEEGSFVVYDDSFSPYFYALPGDEPERVKERILASGAAEAIQKVEIEEKRLFGTPRVALRITVSHPQDVPRIRERIRRVEGVDLDLEHDILFVRRYLIDRGIKPLTWLRLEVEERDGRALLRGVEQLEEEPPELRVAAVAIAVYNPKGAPRSSKDEIIMISVATSDGVEKVLTWREVQGLEQVEVLQDEKEMLLRFAELIKEGDYDVIVGYNTDSFDFPYIRDRLKKLGISLPLGRLDAELEVSRRGALPEARIRGRAHVDLYPIVRRHVKLNSYVLESVVEELLGIKKEKLDGERLFTYWDEGGEKRALLARYALEDARVTLALAEKFLPLYCELSTIVGQSLNDVARMTSGQLVEWLLMRYATPRGELIPNHPAGEEYAARARATYAGGYVREPKRGLVEHIAVFDFRSFGPSIIVSHNIDPSTLIVGNCEENRAPELEYCFSLEREGFIPAILKELIRRRAEIKRELKRSEGDRRRTLSFAEKALKILANSFYGYMGYPRARWYRRECAESVAAFARMYIKQVMRIAEEEFKLEVVYGDTDSLFVVIPPEKRELAQKFLQKVNESMPGIIELEFEGFYRRGLFVTKKRYALLSEDGKMVVKGLEFVRRDWAPIARETQKEVLRILLEEADPEKAARLVRDVIERIRQRRVSLEDITIYTQLTKRIKSYKSLEPHVVAAQKLKERGREVAPGMIIGYIITKGTKGISQRATPVEFARLEDYDPEYYINNQILPAIQRIFEAIGYTRDYLKEGITQTSLSRWF

SEQ ID NO: 1900 - protein, 792 aa, unidentified
  REGION 1..792: note = Description of Unknown: Synthetic polypeptide
MPRILKGFLIDADFETVEGRALIRLFLRGEEGSFVVYDDSFSPYFYALPGDEPERVKERILASGAAEAIQKVEIEEKRLFGTPRVALRITVSHPQDVPRIRERIRRVEGVDLILEHDILFVRRYLIDRGIKPLTWLHLEVEERDGRALLRGVEQLEEEPPELRVAAVAIAVYNPKGAPRSSKDEIIMISVATSDGVEKVLTWREVQGLEQVEVLQDEKEMLLRFAELIKEGDYDVIVGYNTDSFDFPYIRDRLKKLGISLPLGRLDAELEVSRRGALPEARIRGRAHVDLYPIVRRHVKLNSYVLESVVEELLGIKKEKLDGERLFTYWDEGGEKRALLARYALEDARVTLALAEKFLPLYCELSTIVGQSLNDVARMTSGQLVEWLLMRYATPRGELIPNHPAGEEYAARARATYAGGYVREPKRGLVEHIAVFDFRSFGPSIIVSHNIDPSTLIVGNCEENRAPELEYCFSLEREGFIPAILKELIRRRAEIKRELKRSEGDRRRTLSFAEKALKILANSFYGYMGYPRARWYRRECAESVAAFARMYIKQVMRIAEEEFKLEVVYGDTDSLFVVIPPEKRELAQKFLQKVNESMPGIIELEFEGFYRRGLFVTKKRYALLSEDGKMVVKGLEFVRRDWAPIARETQKEVLRILLEEADPEKAARLVRDVIERIRQRRVSLEDITIYTQLTKRIKSYKSLEPHVVAAQKLKERGREVAPGMIIGYIITKGTKGISQRATPVEFARLEDYDPEYYIDNQILPAIQRIFEAIGYTRDYLKEGITQTSLSRWF

SEQ ID NO: 1901 - protein, 792 aa, unidentified
  REGION 1..792: note = Description of Unknown: Synthetic polypeptide
MPRILKGFLIDADFETVEGRALIRLFLRGEEGSFVVYDDSFSPYFYALPGDEPERVKERILASGAAEAIQKVEIEEKRLFGTPRVALRITVSHPQDVPRIRERIRRVEGVDLILEHDILFVRRYLIDRGIKPLTWLRLEVEERDGRALLRGVEQLEEEPPELRVAAVAIAVYNPKGAPRSSKDEIIMISVATSDGVEKVLTWREVQGLEQVEVLQDEKEMLLRFAELIKEGDYDVIVGYNTDSFDFPYIRDRLKKLGISLPLGRLDAELEVSRRGALPEARIRGRAHVDLYPIVRRHVKLNSYDLESVVEELLGIKKEKLDGERLFTYWDEGGELRALLARYALEDARVTLALAEKFLPLYCELSTIVGQSLNDVARMTSGQLVEWLLMRYATPRGELIPNHPAGEEYAARARATYAGGYVREPKRGLVEHIAVFDFRSFGPSIIVSHNIDPSTLIVGNCEENRAPELEYCFSLEREGFIPAILKELIRRRAEIKRELKRSEGDRRRTLSFAEKALKILANSFYGYMGYPRARWYRRECAESVAAFARMYIKQVMRIAEEEFKLEVVYGDTDSLFVVIPPEKRELAQKFLQKVNESMPGIIELEFEGFYRRGLFVTKKRYALLSEDGKMVVKGLEFVRRDWAPIARETQKEVLRILLEEADPEKAARLVRDVIERIRQRRVSLEDITIYTQLTKRIKSYKSLEPHVVAAQKLKERGREVAPGMIIGYIITKGTKGISQRATPVEFARLEDYDPEYYIDNQILPAIQRIFEAIGYTRDYLKEGITQTSLSRWF

SEQ ID NO: 1902 - protein, 792 aa, unidentified
  REGION 1..792: note = Description of Unknown: Synthetic polypeptide
MPRILKGFLIDADFETVEGRALIRLFLRGEEGSFVVYDDSFSPYFYALPGDEPERVKERILASGAAEAIQKVEIEEKRLFGTPRVALRITVSHPQDVPRIRERIRRVEGVDLILEHDILFVRRYLIDRGIKPLTWLRLEVEERDGRALLRGVEQLEEEPPELRVAAVAIAVYNPKGAPRSSKDEIIMISVATSDGVEKVLTWREVQGLEQVEVLQDEKEMLLRFAELIKEGDYDVIVGYNTDSFDFPYIRDRLKKLGISLPLGRLDAELEVSRRGALPEARIRGRAHVDLDPIVRRHVKLNSYVLESVVEELLGIKKEKLDGERLFTYWDEGGEKRALLARYALEDARVTLALAEKFLPLYCELSTIVGQSLNDVARMTSGQLVEWLLMRYATPRGELIPNHPAGEEYAARARATYAGGYVREPKRGLVEHIAVFDFRSFGPSIIVSHNIDPSTLIVGNCEENRAPELEYCFSLEREGFIPAILKELIRRRAEIKRELKRSEGDRRRTLSFAEKALKILANSFYGYMGYPRARWYRRECAESVAAFARMYIKQVMRIAEEEFKLEVVYGDTDSLFVVIPPEKRELAQKFLQKVNESMPGIIELEFEGFYRRGLFVTKKRYALLSEDGKMVVKGLEFVRRDWAPIARETQKEVLRILLEEADPEKAARLVRDVIERIRQRRVSLEDITIYTQLTKRIKSYKSLEPHVVAAQKLKERGREVAPGMIIGYIITKGTKGISQRATPVEFARLEDYDPEYYIDNQILPAIQRIFEAIGYTRDYLKEGITQTSLSRWF

SEQ ID NO: 1903 - protein, 792 aa, unidentified
  REGION 1..792: note = Description of Unknown: Synthetic polypeptide
MPRILKGFLIDADFETVEGRALIRLFLRGEEGSFVVYDDSFSPYFYALPGDEPERVKERILASGAAEAIQKVEIEEKRLFGTPRVALRITVSHPQDVPRIRERIRRVEGVDLILEHDILFVRRYLIDRGIKPLTWLRLEVEERDGRALLRGVEQLEEEPPELRVAAVAIAVYNPKGAPRSSKDEIIMISVATSDGVEKVLTWREVQGLEQVEVLQDEKEMLLRFAELIREGDYDVIVGYNTDSFDFPYIRDRLEKLGISLPLGRLDAELEVSRRGALPEARIRGRAHVNLYPIVRRHVKLNSYVLESVVEELLGIKKERLDGERLFTYWDGGGEKRALLARYALEDARVTLALAEKFLPLYCELSTFVGQSLNDVARMTSGQLVEWLLMRYATPRGELIPNHPAGEEYAARARATYAGGYVREPKRGLVEHIAVFDFRSFGPSIIVSHNIDPSTLIVGNCEENRAPELEYCFSLEREGFIPAILKELIRRRAEIKRELKRSEGDRRRTLSFAEKALKILANSFYGYMGYPRARWYRRECAESVAAFARMYIKQVMRIAEEEFKLEVVYGDTDSLFVVIPPEKRELAQKFLQKVNESMPGIIELEFEGFYRRGLFVTKKRYALLSEDGKMVVKGLEFVRRDWAPIARETQKEVLRILLEEADPEKAARLVRDVIERIRQRRVSLEDITIYTQLTKRIKSYKSLEPHVVAAQKLKERGREVAPGMIIGYIITKGTKGISQRATPVEFARLEDYDPEYYIDNQILPAIQRIFEAIGYTRDYLKEGITQTSLSRWF

SEQ ID NO: 1904 - protein, 792 aa, unidentified
  REGION 1..792: note = Description of Unknown: Synthetic polypeptide
MPRILKGFLIDADFETVEGRALIRLFLRGEEGSFVVYDDSFSPYFYALPGDEPERVKERILASGAAEAIQKVEIEEKRLFGTPRVALRITVSHPQDVPRIRERIRRVEGVDLILEHDILFVRRYLIDRGIKPLTWLRLEVEERDGRALLRGVEQLEEEPPELRVAAVAIAVYNPKGAPRSSKDEIIMISVATSDGVEKVLTWREVQGLEQVEVLQDEKEMLLRFAELIKEGDYDVIVGYNTDSFDFPYIRDRLKKLGISLPLGRLDAELEVSRRGALPEARIRGRAHVDLYPIVRRHVKLNSYDLESVVEELLGIKKEKLDGERLFTYDDEGGEKRALLARYALEDARVTLALAEKFLPLYCELSTIVGQSLNDVARMTSGQLVEWLLMRYATPRGELIPNHPAGEEYAARARATYAGGYVREPKRGLVEHIAVFDFRSFGPSIIVSHNIDPSTLIVGNCEENRAPELEYCFSLEREGFIPAILKELIRRRAEIKRELKRSEGDRRRTLSFAEKALKILANSFYGYMGYPRARWYRRECAESVAAFARMYIKQVMRIAEEEFKLEVVYGDTDSLFVVIPPEKRELAQKFLQKVNESMPGIIELEFEGFYRRGLFVTKKRYALLSEDGKMVVKGLEFVRRDWAPIARETQKEVLRILLEEADPEKAARLVRDVIERIRQRRVSLEDITIYTQLTKRIKSYKSLEPHVVAAQKLKERGREVAPGMIIGYIITKGTKGISQRATPVEFARLEDYDPEYYIDNQILPAIQRIFEAIGYTRDYLKEGITQTSLSRWF

SEQ ID NO: 1905 - protein, 792 aa, unidentified
  REGION 1..792: note = Description of Unknown: Synthetic polypeptide
MPRILKGFLIDADFETVEGRALIRLFLRGEEGSFVVYDDSFSPYFYALPGDEPERVKERILASGAAEAIQKVEIEEKRLFGTPRVALRITVSHPQDVPRIRERIRRVEGVDLILEHDILFVRRYLIDRGIKPLTWLRLEVEERDGRALLRGVEQLEEEPPELRVAAVAIAVYNPKGAPRSSKDEIIMISVATSDGVEKVLTWREVQGLEQVEVLQDEKEMLLRFAELIKEGDYDVIVGYNTDSFDFPYIRDRLKKLGISLPLGRLDAELEVSRRGALPEARIRGRAHVDLYPIVRRHVKLNSYVLESVVEELLGIKKEKLDGERLFTYWDEGGEKRALLARYALEDARVTLALAEKFLPLYCELSTIVGQSLNDVARMTSGQLVEWLLMRYATPRGELIPNHPAGEEYAARARATYAGGYVREPKRGLVEHIAVFDFRSFGPSIIVSHNIDPSTLIVGNCEENRAPELEYCFSLEREGFIPAILKELIRRRAEIKRELKRSEGDRRRTLSFAEKALKILANSFYGYMGYPRARWYRRECAESVAAFARMYIKQVMRIAEEEFKLEVVYGDTDSLFVVIPPEKRELAQKFLQKVNESMPGIIELEFEGFYRRGLFVTKKRYALLSEDGKMVVKGLEFVRRDWAPIARETQKRVLRILLEEADPEKAARLVRDVIERIRQRRVSLEDITIYTQLTKRIKSYKSLEPHVVAAQKLKERGREVAPGMIIGYIITKGTKGISQRATPVEFARLEDYDPEYYIDNQILPAIQRIFEAIGYTRDYLKEGITQTSLSRWF

SEQ ID NO: 1906 - protein, 792 aa, unidentified
  REGION 1..792: note = Description of Unknown: Synthetic polypeptide
MPRILKGFLIDADFETVEGRALIRLFLRGEEGSFVVYDDSFSPYFYALPGDEPERVKERILASGAAEAIQKVEIEEKRLFGTPRVALRITVSHPQDVPRIRERIRRVEGVDLILEHDILFVRRYLIDRGIKPLTWLRLEVEERDGRALLRGVEQLEEEPPELRVAAVAIAVRNPKGAPRSSKDEIIMISVATSDGVEKVLTWREVQGLEQVEVLQDEKEMLLRFAELIKEGDYDVIVGYNTDSFDFPYIRDRLKKLGISLPLGRLDAELEVSRRGALPEARIRGRAHVDLYPIVRRHVKLNNYDLESVVEELLGIKKEKLDGERLFTYWDEGGEKRALLARYALEDARVTLALAEKFLPLYCELSTIVGQSLNDVARMTSGQLVEWLLMRYATPRGELIPNHPAGEEYAARARATYAGGYVREPKRGLVEHIAVFDFRSFGPSIIVSHNIDPSTLIVGNCEENRAPELEYCFSLEREGFIPAILKELIRRRAEIKRELKRSEGDRRRTLSFAEKALKILANSFYGYMGYPRARWYRRECAESVAAFARMYIKQVMRIAEEEFKLEVVYGDTDSLFVVIPPEKRELAQKFLQKVNESMPGIIELEFEGFYRRGLFVTKKRYALLSEDGKMVVKGLEFVRRDWAPIARETQKEVLRILLEEADPEKAARLVRDVIERIRQRRVSLEDITIYTQLTKRIKSYKSLEPHVVAAQKLKERGREVAPGMIIGYIITKGTKGISQRATPVEFARLEDYDPEYYIDNQILPAIQRIFEAIGYTRDYLKEGITQTSLSRWF

SEQ ID NO: 1907 - protein, 792 aa, unidentified
  REGION 1..792: note = Description of Unknown: Synthetic polypeptide
MPRILKGFLIDADFETVEGRALIRLFLRGEEGSFVVYDDSFSPYFYALPGDEPERVKERILASGAAEAIQKVEIEEKRLFGTPRVALRITVSHPQDVPRIRERIRRVEGVDLILEHDILFVRRYLIDRGIKPLTWLRLEVEERDGRALLRGVEQLEEEPPELRVAAVAIAVYNPKGAPRSSKDEIIMISVATSDGVEKVLTWREVQGLEQVEVLQDEKEMLLRFAELIKEGDYDVIVGYNTDSFDFPYIRDRLKKLGISLPLGRLDAELEVSRRGALPEARIRGRAHVDLYPIVRRHVKLNSYVLESVVEELLGIKKEKLDGERLFTYWDEGGEKRALLARYALEDARVTLALAEKFLPLYCELSTIVGQSLNDVARMTSGQLVEWLLMRYATPRGELIPNHPAGEEYAARARATYAGGYVREPKRGLVEHIAVFDRRSFGPSIIVSHNIDPSTLIVGNCEENRAPELEYCFSLEREGFIPAILKELIRRRAEIKRELKRSEGDRRRTLSFAEKALKILANSFYGYMGYPRARWYRRECAESVAAFARMYIKQVMRIAEEEFKLEVVYGDTDSLFVVIPPEKRELAQKFLQKVNESMPGIIELEFEGFYRRGLFVTKKRYALLSEDGKMVVKGLEFVRRDWAPIARETQKEVLRILLEEADPEKAARLVRDVIERIRQRRVSLEDITIYTQLTKRIKSYKSLEPHVVAAQKLKERGREVAPGMIIGYIITKGTKGISQRATPVEFARLEDYDPEYYIDNQILPAIQRIFEAIGYTRDYLKEGITQTSLSRWF

SEQ ID NO: 1908 - protein, 792 aa, unidentified
  REGION 1..792: note = Description of Unknown: Synthetic polypeptide
MPRILKGFLIDADFETVEGRALIRLFLRGEEGSFVVYDDSFSPYFYALPGDEPERVKERILASGAAEAIQKVEIEEKRLFGTPRVALRITVSHPQDVPRIRERIRRVEGVDLILEHDILFVRRYLIDRGIKPLTWLRLEVEERDGRALLRGVEQLEEEPPELRVAAVAIAVYNPKGAPRSSKDEIISISVATSDGVEKVLTWREVQGLEQVEVLQDEKEMLLRFAELIKEGDYDVIVGYNTDSFDFPYIRDRLKKLGISLPLGRLDAELEVSRRGALPEARIRGRAHVDLYPIVRRHVKLNSYDLESVVEELLGIKKEKLDGERLFTYWDEGGEKRALLARYALEDARVTLALAEKFLPLYCELSTIVGQSLNDVARMTSGQLVEWLLMRYATPRGELIPNHPAGEEYAARARATYAGGYVREPKRGLVEHIAVFDFRSFGPSIIVSHNIDPSTLIVGNCEENRAPELEYCFSLEREGFIPAILKELIRRRAEIKRELKRSEGDRRRTLSFAEKALKILANSFYGYMGYPRARWYRRECAESVAAFARMYIKQVMRIAEEEFKLEVVYGDTDSLFVVIPPEKRELAQKFLQKVNESMPGIIELEFEGFYRRGLFVTKKRYALLSEDGKMVVKGLEFVRRDWAPIARETQKEVLRILLEEADPEKAARLVRDVIERIRQRRVSLEDITIYTQLTKRIKSYKSLEPHVVAAQKLKERGREVAPGMIIGYIITKGTKGISQRATPVEFARLEDYDPEYYIDNQILPAIQRIFEAIGYTRDYLKEGITQTSLSRWF

SEQ ID NO: 1909 - protein, 792 aa, unidentified
  REGION 1..792: note = Description of Unknown: Synthetic polypeptide
MPRILKGFLIDADFEAVEGRALIRLFLRGEEGSFVVYDDSFSPYFYALPGDEPERVKERILASGAAEAIQKVEIEEKRLFGTPRVALRITVSHPQDVPRIRERIRRVEGVDLILEHDILFVRRYLIDRGIKPLTWLRLEVEERDGRALLRGVEQLEEEPPELRVAAVAIAVYNPKGAPRSSKDEIIMISVATSDGVEKVLTWREVQGLEQVEVLQDEKEMLLRFAELIKEGDYDVIVGYNTDSFDFPYIRDRLKKLGISLPLGRLDAELEVSRRGALPEARIRGRAHVDLYPIVRRHVKLNSYVLESVVEELLGIKKEKLDGERLFTYWDEGGEKRALLARYALEDARVTLALAEKFLPLYCELSTIVGQSLNDVARMTSGQLVEWLLMRYATPRGELIPNHPAGEEYAARARATYAGGYVREPKRGLVEHIAVFDFRSFGPSIIVSHNIDPSTLIVGNCEENRAPELEYCFSLEREGFIPAILKELIRRRAEIKRELKRSEGDRRRTLSFAEKALKILANSFYGYMGYPRARWYRRECAESVAAFARMYIKQVMRIAEEEFKLEVVYGDTDSLFVVIPPEKRELAQKFLQKVNESMPGIIELEFEGFYRRGLFVTKKRYALLSEDGKMVVKGLEFVRRDWAPIARETQKEVLRILLEEADPEKAARLVRDVIERIRQRRVSLEDITIYTQLTKRIKSYKSLEPHVVAAQKLKERGREVAPGMIIGYIITKGTKGISQRATPVEFARLEDYDPEYYIDNQILPAIQRIFEAIGYTRDYLKEGITQTSLSRWF

SEQ ID NO: 1910 - protein, 792 aa, unidentified
  REGION 1..792: note = Description of Unknown: Synthetic polypeptide
MPRILKGFLIDADFETVEGRALIRLFLRGEEGSFVVYDDSFSPYFYALPGDEPERVKERILASGAAEAIQKVEIEEKRLFGTPRVALRITVSHPQDVPRIRERIRRVEGVDLILEHDILFVRRYLIDRGIKPLTWLRLEVEERDGRALLRGVEQLEEEPPELRVAAVAIAVYNPKGAPRSSKDEIIMISVATSDGVEKVLTWREVQGLEQVEVLQDEKEMLLRFAELIKEGDYDVIVGYNTDSFDFPYIRDRLKKLGISLPLGRLDAELEVSRRGALPEARIRGRAHVDLYPIVRRHVKLNSYVLESVVEELLGIKKEKLDGERLFTYWDEGGEKRALLARYALEDARVTLALAEKFLPLYCELSTIVGQSLNDVARMTSGQLVEWLLMRYATPRGELIPNHPAGEEYAARARATYAGGYVREPKRGLVEHIAVFDFRSFGPSIIVSHNIDPSTLIVGNCEENRAPELEYCFSLEREGFIPAILKELIRRRAEIKRELKRSEGDRRRTLSFAEKALKILANSFYGYMGYPRARWYRRECAESVAAFARMYIKQVMRIAEEEFKLEVVYGDTDSLFVVIPPEKRELAQKFLQKVNESMPGIIELEFEGFYRRGLFVTKKRYALLSEDGKMVVYGLEFVRRDWAPIARETQKEVLRILLEEADPEKAARLVRDVIERIRQRRVSLEDITIYTQLTKRIKSYKSLEPHVVAAQKLKERGREVAPGMIIGYIITKGTKGISQRATPVEFARLEDYDPEYYIDNQILPAIQRIFEAIGYTRDYLKEGITQTSLSRWF

SEQ ID NO: 1911 - protein, 792 aa, unidentified
  REGION 1..792: note = Description of Unknown: Synthetic polypeptide
MPRILKGFLIDADFETVEGRALIRLFLRGEEGSFVVYDDSFSPYFYALPGDEPERVKERILASGAAEAIQKVEIEEKRLFGTPRVALRITVSHPQDVPRIRERIRRVEGVDLILEHDILFVRRYLIDRGIKPLTWLRLEVEERDGRALLRGVEQLEEEPPELRVAAVAIAVYNPKGAPRSSKDEIIMISVATSDGVEKVLTWREVQGLEQVEVLQDEKEMLLRFAELIKEGDYDVIVGYNTDSFDFPYIRDRLKKLGISLPLGRLDAELEVSRRGALPEARIRGRAHVDLYPIVRRHVKLNSYVLESVVEELLGIKKEKLDGERLFTYWDEGGEKRALLARYALEDARVTLALAEKFLPLYCELSTIVGQSLNDVARMTSGQLVEWLLMRYATPRGELIPNHPAGEEYAARARATYAGGYVREPKRGLVEHIAVFDFRSFGPSIIVSHNIDPSTLIVGNCEENRAPELEYCFSLEREGFIPAILKELIRRRAEIKRELKRSEGDRRRTLSFAEKALKILANSFYGYMGYPRARWYRRECAESVAAFARTYIKQVMRIAEEEFKLEVVYGDTDSLFVVIPPEKRELAQKFLQKVNESMPGIIELEFEGFYRRGLFVTKKRYALLSEDGKMVVKGLEFVRRDWAPIARETQKEVLRILLEEADPEKAARLVRDVIERIRQRRVSLEDITIYTQLTKRIKSYKSLEPHVVAAQKLKERGREVAPGMIIGYIITKGTKGISQRATPVEFARLEDYDPEYYIDNQILPAIQRIFEAIGYTRDYLKEGITQTSLSRWF

SEQ ID NO: 1912 - protein, 792 aa, unidentified
  REGION 1..792: note = Description of Unknown: Synthetic polypeptide
MPRILKGFLIDADFETVEGRALIRLFLRGEEGSFVVYDDSFSPYFYALPGDEPERVKERILASGAAEAIQKVEIEEKRLFGTPRVALRITVSHPQDVPRIRERIRRVEGVDLILEHDILFVRRYLIDRGIKPLTWLRLEVEERDGRALLRGVEQLEEEPPELRVAAVAILVYNPKGAPRSSKDEIIMISVATSDGVEKVLTWREVQGLEQVEVLQDEKEMLLRFAELIKEGDYDVIVGYNTDSFDFPYIRDRLKKLGISLPLGRLDAELEVSRRGALPEARIRGRAHVDLYPIVRRHVKLNSYVLESVVEELLGIKKEKLDGERLFTYWDEGGEKRALLARYALEDARVTLALAEKFLPLYVELSTIVGQSLNDVARMTSGQLVEWLLMRYATPRGELIPNHPAGEEYAARARATYAGGYVREPKRGLVEHIAVFDFRSFGPSIIVSHNIDPSTLIVGNCEENRAPELEYCFSLEREGFIPAILKELIRRRAEIKRELKRSEGDRRRTLSFAEKALKILANSFYGYMGYPRARWYRRESAESVAAFARMYIKQVMRIAEEEFKLEVVYGDTDSLFVVIPPEKRELAQKFLQKVNESMPGIIELEFEGFYRRGLFVTKKRYALLSEDGKMVVKGLEFVRRDWAPIARETQKEVLRILLEEADPEKAARLVRDVIERIRQRRVSLEDITIYTQLTKRIKSYKSLEPHVVAAQKLKERGREVAPGMIIGYIITKGTKGISQRATPVEFARLEDYDPEYYIDNQILPAIQRIFEAIGYTRDYLKEGITQTSLSRWF

SEQ ID NO: 1913 - protein, 792 aa, unidentified
  REGION 1..792: note = Description of Unknown: Synthetic polypeptide
MPRILKGFLIDADFETVEGRALIRLFLRGEEGSFVVYDDSFSPYFYALPGDEPERVKERILASGAAEAIQKVEIEEKRLFGTPRVALRITVSHPQDVPRIDERIRRVEGVDLILEHDILFVRRYLIDRGIKPLTWLRLEVEERDGRALLRGVEQLEEEPPELRVAAVAIAVYNPKGAPRSSKDEIIMISVATSDGVEKVLTWREVQGLEQVEVLQDEKEMLLRFAELIKEGDYDVIVGYNTDSFDFPYIRDRLKKLGISLPLGRLDAELEVSRRGALPEARIRGRAHVDLYPIVRRHVKLNSYVLESVVEELLGIKKEKLDGERLFTYWDEGGEKRALLARYALEDARVTLALAEKFLPLYCELSTIVGQSLNDVARMTSGQLVEWLLMRYATPRGELIPNHPAGEEYAARARATYAGGYVREPKRGLVEHIAVFDFRSFGPSIIVSHNIDPSTLIVGNCEENRAPELEYCFSLEREGFIPAILKELIRRRAEIKRELKRSEGDRRRTLSFAEKALKILANSFYGYMGYPRARWYRRECAESVAAFARMYIKQVMRIAEEEFKLEVVYGDTDSLFVVIPPEKRELAQKFLQKVNESMPGIIELEFEGFYRRGLFVTKKRYALLSEDGKMVVKGLEFVRRDWAPIARETQKEVLRILLEEADPEKAARLVRDVIERIRQRRVSLEDITIYTQLTKRIKSYKSLEPHVVAAQKLKERGREVAPGMIIGYIITKGTKGISQRATPVEFARLEDYDPEYYIDNQILPAIQRIFEAIGYTRDYLKEGITQTSLSRWF

SEQ ID NO: 1914 - protein, 792 aa, unidentified
  REGION 1..792: note = Description of Unknown: Synthetic polypeptide
MPRILKGFLIDADFETVEGRALIRLFLRGEEGSFVVYDDSFSPYFYALPGDEPERVKERILASGAAEAIQKVEIEEKRLFGTPRVALRITVSHPQDVPRIRERIRRVEGVDLILEHDILFVRRYLIDRGIKPLTWLRLEVEERDGRALLRGVEQLEEEPPELRVAAVAIAVYNPKGAPRSSKDEIIMISVATSDGVEKVLTWREVQGLEQVEVLQDEKEMLLRFAELIKEGDYDVIVGYNTDSFDFPYIRDRLKKLGISLPLGRLDAELEVSRRGALPEARIRGRAHVDLYPIVRRHVKLNSYVLESVVEELLGIKKEKLDGERLFTYWDEGGEKRALLARYALEAARVTLALAEKFLPLYCELSTIVGQSLNDVARMTSGQLVEWLLMRYATPRGELIPNHPAGEEYAARARATYAGGYVREPKRGLVEHIAVFDFRSFGPSIIVSHNIDPSTLIVGNCEENRAPELEYCFSLEREGFIPAILKELIRRRAEIKRELKRSEGDRRRTLSFAEKALKILANSFYGYMGYPRARWYRRECAESVAAFARMYIKQVMRIAEEEFKLEVVYGDTDSLFVVIPPEKRELAQKFLQKVNESMPGIIELEFEGFYRRGLFVTKKRYALLSEDGKMVVKGLEFVRRDWAPIARETQKEVLRILLEEADPEKAARLVRDVIERIRQRRVSLEDITIYTQLTKRIKSYKSLEPHVVAAQKLKERGREVAPGMIIGYIITKGTKGISQRATPVEFARLEDYDPEYYINNQILPAIQRIFEAIGYTRDYLKEGITQTSLSRWF

SEQ ID NO: 1915 - protein, 792 aa, unidentified
  REGION 1..792: note = Description of Unknown: Synthetic polypeptide
MPRILKGFLIDADFETVEGRALIRLFLRGEEGSFVVYDDSFSPYFYALPGDEPERVKERILASGAAEAIQKVEIEEKRLFGTPRVALRITVSHPQDVPRIRERIRRVEGVDLILEHDILFVRRYLIDRGIKPLTWLRLEVEERDGRALLRGVEQLEEEPPELRVAAVAIAVYNPKGAPRSSKDEIIMISVATSDGVEKVLTWREVQGLEQVEVLQDEKEMLLRFAELIKEGDYDVIVGYNTDSFDFPYIRDRLKKLGISLPLGRLDAELEVSRRGALPEARIRGRAHVDLYPIVRRHVKLNSYVLESVVEELLGIKKEKLDGERLFTYWDEGGEKRALLARYALEDARVTLALAEKFLPLYCELSTIVGQSLNDVARMTSGQLVEWLLMRYATPRGELIPNHPAGEEYAARARATYAGGYVREPKRGLVEHIAVFDFRSFGPSIIVSHNIDPSTLIVGNCEENRAPELEYCFSLEREGFIPAILKELIRRRAEIKRELKRSEGDRRRTLSFAEKALKILANSFYGYMGYPRARWYRRECAESVAAFARMYIKQVMRIAEEEFKLEVVYGDTDSLFVVIPPEKRELAQQFLQKVNESMPGIIELEFEGFYRRGLFVTKKRYALLSEDGKMVVKGLEFVRRDWAPIARETQKEVLRILLEEADPEKAARLVRDVIERIRQRRVSLEDITIYTQLTKRIKSYKSLEPHVVAAQKLKERGREVAPGMIIGYIITKGTKGISQRATPVEFARLEDYDPEYYIDNQILPAIQRIFEAIGYTRDYLKEGITQTSLSRWF

SEQ ID NO: 1916 - protein, 792 aa, unidentified
  REGION 1..792: note = Description of Unknown: Synthetic polypeptide
MPRILKGFLIDADFETVEGRALIRLFLRGEEGSFVVYDDSFSPYFYALPGDEPERVKERILASGAAEAIQKVEIEEKRLFGTPRVALRITVSHPQDVPRIRERIRRVEGVDLILEHDILFVRRYLIDRGIKPLTWLRLEVEERDGRALLRGVEQLEEEPPELRVAAVAIAVYNPKGAPRSSKDEIIMISVATSDGVEKVLTWREVQGLEQVEVLQDEKEMLLRFAELIKEGDYDVIVGYNTDSFDFPYIRDRLKKLGISLPLGRLDAELEVSRRGALPEARIRGRAHVDLYPIVRRHVKLNSYVLESVVEELLGIKKEKLDGERLFTYWDEGGEKRALLARYALEDARVTLALAEKFLPLYCELSTIVGQSLNDVARMTSGQLVEWLLMRYATPRGELIPNHPAGEEYAARARATYAGGYVREPKRGLVEHIAVFDFRSFGPSIIVSHNIDPSTLIVGNCEENRAPELEYCFSLEREGFIPAILKELIRRRAEIKRELKRSEGDRRRTLSFAEKALKILANSFYGYMGYPRARWYRRECAESVAAFARMYIKQVMRIAEEEFKLEVVYGDTDSLFVVIPPEKRELAQKFLQKVNESMPGIIELEFEGFYRRGLFVTKKRYALLSEDGKMVVKGLEFVRRDWAPIARETQKEVLRILLEEADPEKAARLVRDVIERIRQRRVSLEDITIDTQLTKRIKSYKSLEPHVVAAQKLKERGREVAPGMIIGYIITKGTKGISQRATPVEFARLEDYDPEYYIDNQILPAIQRIFEAIGYTRDYLKEGITQTSLSRWF

SEQ ID NO: 1917 - protein, 792 aa, unidentified
  REGION 1..792: note = Description of Unknown: Synthetic polypeptide
MPRILKGFLIDADFETVEGRALIRLFLRGEEGSFVVYDDSFSPYFYALPGDEPERVKERILASGAAEAIQKVEIEEKRLFGTPRVALRITVSHPQDVPRIRERIRRVEGVDLILEHDILFVRRYLIDRGIKPLTWLRLEVEERDGRALLRGVEQLEEEPPELRVAAIAIAVYNPKGAPRSSKDEIIMISVATSDGVEKVLTWREVQGLEQVEVLQDEKEMLLRFAELIKEGDYDVIVGYNTDSFDFPYIRDRLKKLGISLPLGRLDAELEVSRRGALPEARIRGRAHVDLYPIVRRHVKLNSYVLESVVEELLGIKKEKLDGERLFTYWDEGGEKRALLARYALEDARVTLALAEKFLPLYCELSTIVGQSLNDVARMTSGQLVEWLLMRYATPRGELIPNHPAGEEYAARARATYAGGYVREPKRGLVEHIAVFDFRSFGPSIIVSHNIDPSTLIVGNCEENRAPELEYCFSLEREGFIPAILKELIRRRAEIKRELKRSEGDRRRTLSFAEKALKILANSFYGYMGYPRARWYRRECAESVAAFARMYIKQVMRIAEEEFKLEVVYGDTDSLFVVIPPEKRELAQKFLQKVNESMPGIIELEFEGFYRRGLFVTKKRYALLSEDGKMVVKGLEFVRRDWAPIARETQKEVLRILLEEADPEKAARLVRDVIERIRQRRVSLEDITIYTQLTKRIKSYKSLEPHVVAAQKLKERGREVAPGMIIGYIITKGTKGISQRATPVEFARLEDYDPEYYIDNQILPAIQRIFEAIGYTRDYLKEGITQTSLSRWF

SEQ ID NO: 1918 - protein, 792 aa, unidentified
  REGION 1..792: note = Description of Unknown: Synthetic polypeptide
MPRILKGFLIDADFETVEGRALIRLFLRGEEGSFVVYDDSFSPYFYALPGDEPERVKERILASGAAEAIQKVEIEEKRLFGTPRVALRITVSHPQDVPRIRERIRRVEGVDLILEHDILFVRRYLIDRGIKPLTWLRLEVEERDGRALLRGVEQLEEEPPELRVAAVAIAVYNPKGAPRSSKDEIIMISVATSDGVEKVLTWREVQGLEQVEVLQDEKEMLLRFAELIKEGDYDVIVGYNTDSFDFPYIRDRLKKLGISLPLGRLDAELEVSRRGALPEARIRGRAHVDLYPIVRRHVKLNSYVLESVVEELLEIKKEKLDGERLFTYWDEGGEKRALLARYALEDARVTLALAEKFLPLYCELSTIVGQSLNDVARMTSGQLVEWLLMRYATPRGELIPNHPAGEEYAARARATYAGGYVREPKRGLVEHIAVFDFRSFGPSIIVSHNIDPSTLIVGNCEENRAPELEYCFSLEREGFIPAILKELIRRRAEIKRELKRSEGDRRRTLSFAEKALKILANSFYGYMGYPRARWYRRECAESVAAFARMYIKQVMRIAEEEFKLEVVYGDTDSLFVVIPPEKRELAQKFLQKVNESMPGIIELEFEGFYRRGLFVTKKRYALLSEDGKMVVKGLEFVRRDWAPIARETQKEVLRILLEEADPEKAARLVRDVIERIRQRRVSLEDITIYTQLTKRIKSYKSLEPHVVAAQKLKERGREVAPGMIIGYIITKGTKGISQRATPVEFARLEDYDPEYYIDNQILPAIQRIFEAIGYTRDYLKEGITQTSLSRWF

SEQ ID NO: 1919 - protein, 792 aa, unidentified
  REGION 1..792: note = Description of Unknown: Synthetic polypeptide
MPRILKGFLIDADFETVEGRALIRLFLRGEEGSFVVYDDSFSPYFYALPGDEPERVKERILASGAAEAIQKVEIEEKRLFGTPRVALRITVSHPQDVPRIRERIRRVEGVDLILEHDILFVRRYLIDRGIKPLTWLRLEVEERDGRALLRGVEQLEEEPPELRVAAVAIAVYNPKGAPRSSKDEIIMISVATSDGVEKVLTWREVQGLEQVEVLQDEKEMLLRFAELIKEGDYDVIVGYNTDSFDFPYIRDRLKKLGISLPLGRLDAELEVSRRGALPEARIRGRAHVDLYPIVRRHVKLNSYVLESVVEELLGIKKEKLDGERLFTYWDEGGEKRALLARYALEDARVTLALAEKFLPLYLELSTIVGQSLNDVARMTSGQLVEWLLMRYATPRGELIPNHPAGEEYAARARATYAGGYVREPKRGLVEHIAVFDFRSFGPSIIVSHNIDPSTLIVGNCEENRAPELEYCFSLEREGFIPAILKELIRRRAEIKRELKRSEGDRRRTLSFAEKALKILANSFYGYMGYPRARWYRRECAESVAAFARMYIKQVMRIAEEEFKLEVVYGDTDSLFVVIPPEKRELAQKFLQKVNESMPGIIELEFEGFYRRGLFVTKKRYALLSEDGKMVVKGLEFVRRDWAPIARETQKEVLRILLEEADPEKAARLVRDVIERIRQRRVSLEDITIYTQLTKRIKSYKSLEPHVVAAQKLKERGREVAPGMIIGYIITKGTKGISQRATPVEFARLEDYDPEYYIDNQILPAIQRIFEAIGYTRDYLKEGITQTSLSRDF

SEQ ID NO: 1920 - protein, 792 aa, unidentified
  REGION 1..792: note = Description of Unknown: Synthetic polypeptide
MPRILKGFLIDADFETVEGRALICLFLRGEEGSFVVYDDSFSPYFYALPGDEPERVKERILASGAAEAIQKVEIEEKRLFGTPRVALRITVSHPQDVPRIRERIRRVEGVDLILEHDILFVRRYLIDRGIKPLTWLRLEVEERDGRALLRGVEQLEEEPPELRVAAVAIAVYNPKGAPRSSKDEIIMISVATSDGVEKVLTWREVQGLEQVEVLQDEKEMLLRFAELIKEGDYDVIVGYNTDSFDFPYIRDRLKKLGISLPLGRLDAELEVSRRGALPEARIRGRAHVDLYPIVRRHVKLNSYVLESVVEELLGIKKEKLDGERLFTYWDEGGEKRALLARYALEDARVTLALAEKFLPLYCELSTIVGQSLNDVARMTSGQLVEWLLMRYATPRGELIPNHPAGEEYAARARATYAGGYVREPKRGLVEHIAVFDFRSFGPSIIVSHNIDPSTLIVGNCEENRAPELEYCFSLEREGFIPAILKELIRRRAEIKRELKRSEGDRRRTLSFAEKALKILANSFYGYMGYPRARWYRRECAESVAAFARMYIKQVMRIAEEEFKLEVVYGDTDSLFVVIPPEKRELAQKFLQKVNESMPGIIELEFEGFYRRGLFVTKKRYALLSEDGKMVVKGLEFVRRDWAPIARETQKEVLRILLEEADPEKAARLVRDVIERIRQRRVSLEDITIYTQLTKRIKSYKSLEPHVVAAQKLKERGREVAPGMIIGYIITKGTKGISQRATPVEFARLEDYDPEYYIDNQILPAIQRIFEAIGYTRDYLKEGITQTSLSRWF

SEQ ID NO: 1921 - protein, 792 aa, unidentified
  REGION 1..792: note = Description of Unknown: Synthetic polypeptide
MPRILKGFLIDADFETVEGRALIRLFLRGEEGSFVVYDDSFSPYFYALPGDEPERVKERILASGAAEAIQKVEIEEKRLFGTPRVALRITVSHPQDVPRIRERIRRVEGVDLILEHDILFVRRYLIDRGIKPLTWLRLEVEERDGRALLRGVEQLEEEPPELRVAAVAIAVYNPKGAPRSSKDEIIMISVATSDGVEKVLTWREVQGLEQVEVLQDEKEMLLRFAELIKEGDYDVIVGYNTDSFDFPYIRDRLKKLGISLPLGRLDAELEVSRRGALPEARIRGRAHVDLYPIVRRHVKLNSYVLESVVEELLGIKKEKLDDERLFTYWDEGGEKRALLARYALEDARVTLALAEKFLPLYCELSTIVGQSLNDVARMTSGQLVEWLLMRYATPRGELIPNHPAGEEYAARARATYAGGYVREPKRGLVEHIAVFDFRSFGPSIIVSHNIDPSTLIVGNCEENRAPELEYCFSLEREGFIPAILKELIRRRAEIKRELKRSEGDRRRTLSFAEKALKILANSFYGYMGYPRARWYRRECAESVAAFARMYIKQVMRIAEEEFKLEVVYGDTDSLFVVIPPEKRELAQKFLQKVNESMPGIIELEFEGFYRRGLFVTKKRYALLSEDGKMVVKGLEFVRRDWAPIARETQKEVLRILLEEADPEKAARLVRDVIERIRQRRVSLEDITIYTQLTKRIKSYKSLEPHVVAAQKLKERGREVAPGMIIGYIITKGTKGISQRATPVEFARLEDYDPEYYIDNQILPAIQRIFEAIGYTRDYLKEGITQTSLSRWF

SEQ ID NO: 1922 - protein, 792 aa, unidentified
  REGION 1..792: note = Description of Unknown: Synthetic polypeptide
MPRILKGFLIDADFETVEGRALIRLFLRGEEGSFVVYDDSFSPYFYALPGDEPERVKERILASGAAEAIQKVEIEEKRLFGTPRVALRITVSHPQDVPRIRERIRRVEGVDLILEHDILFVRRYLIDRGIKPLTWLRLEVEERDGRALLRGVEQLEEEPPELRVAAVAIAVYNPKGAPRSSKDEIIMISVATSDGVEKVLTWREVQGLEQVEVLQDEKEMLLRFAELIKEGDYDVIVGYNTDSFDFPYIRDRLKKLGISLPLGRLDAELEVSRRGALPEARIRGRAHVDLYPIVRRHVKLNSYVLESVVEELLGIKKEKLDGERLFTYWDEGGEKRALLARYALEDARVTLALAEKFLPLYCELSTIVGQSLNDVARMTSGQLVEWLLMRYATPRGELIPNHPAGEEYAARARATYAGGYVREPKRGLVEHIAVFDFRSFGPSIIVSHNIDPSTLIVGNCEENRAPELEYCFSLEREGFIPAILKELIRRRAEIKRELKRSEGDRRRTLSFAEKALKILANSFYGYMGYPRARWYRRECAESVAAFARMYIKQVMRIAEEEFKLEVVYGDTDSLFVVIPPEKRELAQKFLQKVNESMPGIIELEFEGFYRRGLFVTKKRYALLSEDGKMVVKGLEFVRRDWAPIARETQKEVLRILLEEADPEKAARLVRDVIERIRQRRVSLEDITIYTQLTKRIKSYKSLKPHVVAAQKLKERGREVAPGMIIGYIITKGTKGISQRATPVEFARLEDYDPEYYIDNQILPAIQRIFEAIGYTRDYLKEGITQTSLSRWF

SEQ ID NO: 1923 - protein, 792 aa, unidentified
  REGION 1..792: note = Description of Unknown: Synthetic polypeptide
MPRILKGFLIDADFETVEGRALIRLFLRGEEGSFVVYDDSFSPYFYALPGDEPERVKERILASGAAEAIQKVEIEEKRLFGTPRVALRITVSHPQDVPRIRERIRRVEGVDLILEHDILFVRRYLIDRGIKPLTWLRLEVEERDGRALLRGVEQLEEEPPELRVAAVAIAVYNPKGAPRSSKDEIIYISVATSDGVEKVLTWREVQGLEQVEVLQDEKEMLLRFAELIKEGDYDVIVGYNTDSFDFPYIRDRLKKLGISLPLGRLDAELEVSRRGALPEARIRGRAHVDLYPIVRRHVKLNSYVLESVVEELLGIKKEKLDGERLFTYWDEGGEKRALLARYALEDARVTLALAEKFLPLYCELSTIVGQSLNDVARMTSGQLVEWLLMRYATPRGELIPNHPAGEEYAARARATYAGGYVREPKRGLVEHIAVFDFRSFGPSIIVSHNIDPSTLIVGNCEENRAPELEYCFSLEREGFIPAILKELIRRRAEIKRELKRSEGDRRRTLSFAEKALKILANSFYGYMGYPRARWYRRECAESVAAFARMYIKQVMRIAEEEFKLEVVYGDTDSLFVVIPPEKRELAQKFLQKVNESMPGIIELEFEGFYRRGLFVTKKRYALLSEDGKMVVKGLEFVRRDWAPIARETQKEVLRILLEEADPEKAARLVRDVIERIRQRRVSLEDITIYTQLTKRIKSYKSLEPHVVAAQKLKERGREVAPGMIIGYIITKGTKGISQRATPVEFARLEDYDPEYYIDNQILPAIQRIFEAIGYTRDYLKEGITQTSLSRWF

SEQ ID NO: 1924 - protein, 792 aa, unidentified; identical to SEQ ID NO: 1721
  REGION 1..792: note = Description of Unknown: Synthetic polypeptide

SEQ ID NO: 1925 - protein, 790 aa, unidentified
  REGION 1..790: note = Description of Unknown: Synthetic polypeptide
MPRILKGFLIDADFETVEGRALIRLFLRGEEGSFVVYDDSFSPYFYALPGDEPERVKERILASGAAEAIQKVEIEEKRLFGTPRVALRITVSHPQDVPRIRERIRRVEGVDLILEHDILFVRRYLIDRGIKPLTWLRLEVEERDGRALLRGVEQLEEEPPELRVAAVAIAVYNPKGAPRSSKDEIIMISVATSDGVEKVLTWREVQGLEQVEVLQDEKEMLLRFAELIKEGDYDVIVGYNTDSFDFPYIRDRLKKLGISLPLGRLDAELEVSRRGALPEARIRGRAHVDLYPIVRRHVKLNSYVLESVVEELLGIKKEKLDGERRFTYWDEGGEKRALLARYALEDARVTLALAEKFLPLYCELSTIVGQSLNDVARMTSGQLVEWLLMRYATPRGELIPNHPAGEEYAARARATYAGGYVREPKRGLVEHIAVFDFRSFGPSIIVSHNIDPSTLIVGNCEENRAPELEYCFSLEREGFIPAILKELIRRRAEIKRELKRSEGDRRRTLSFAEKALKILANSFYGYMGYPRARWYRRECAESVAAFARMYIKQVMRIAEEEFKLEVVYGDTDSLFVVIPPEKRELAQKFLQKVNESMPGIIELEFEGFYRRGLFVTKKRYALLSEDGKMVVKGLEFVRRDWAPIARETQKEVLRILLEEADPEKAARLVRDVIERIRQRRVSLEDITIYTQLTKRIKSYKSLEPHVVAAQKLKERGREVAPGMIIGYIITKGTKGISQRATPVEFARLEDYDPEYYIDNQILPAIQRIFEAIGYTRDYLKEGITQTSLSR

SEQ ID NO: 1926 - protein, 792 aa, unidentified
  REGION 1..792: note = Description of Unknown: Synthetic polypeptide
MPRILKGFLIDADFETVEGRALIRLFLRGEEGSFVVYDDSFSPYFYALPGDEPERVKERILASGAAEAIQKVEIEEKRLFGTPRVALRITVSHPQDVPRIRERIRRVEGVDLILEHDILFVRRYLIDRGIKPLTWLRLEVEERDGRALLRGVEQLEEEPPELRVAAVAIAVYNPKGAPRSSKDEIIMISVATSDGVEKVLTWREVQGLEQVEVLQDEKEMLLRFAELIKEGDYDVIVGYNTDSFDFPYIRDRLKKLGISLPLGRLDAELEVSRRGALPEARIRGRAHVDLYPIVRRHVKLNSYVLESVVEELLGIKKEKLDGERLFTYWDEGGEKRALLARYALEDARVTLALAEKFLPLYCELSTIVGQSLNDVARMTSGQLVEWLLMRYATPRGELIHNHPAGEEYAARARATYAGGYVREPKRGLVEHIAVFDFRSFGPSIIVSHNIDPSTLIVGNCEENRAPELEYCFSLEREGFIPAILKELIRRRAEIKRELKRSEGDRRRTLSFAEKALKILANSFYGYMGYPRARWYRRECAESVAAFARMYIKQVMRIAEEEFKLEVVYGDTDSLFVVIPPEKRELAQKFLQKVNESMPGIIELEFEGFYRRGLFVTKKRYALLSEDGKMVVKGLEFVRRDWAPIARETQKEVLRILLEEADPEKAARLVRDVIERIRQRRVSLEDITIYTQLTKRIKSYKSLEPHVVAAQKLKERGREVAPGMIIGYIITKGTKGISQRATPVEFARLEDYDPEYYIDNQILPAIQRIFEAIGYTRDYLKEGITQTSLSRWF

SEQ ID NO: 1927 - protein, 792 aa, unidentified
  REGION 1..792: note = Description of Unknown: Synthetic polypeptide
MPRILKGFLIDADFETVEGRALIRLFLRGEEGSFVVYDDSFSPYFYALPGDEPERVKERILASGAAEAIQKVEIEEKRLFGTPRVALRITVSHPQDVPRIRERIRRVEGVDLILEHDILFVRRHLIDRGIKPLTWLRLEVEERDGRALLRGVEQLEEEPPELRVAAVAIAVYNPKGAPRSSKDEIIMISVATSDGVEKVLTWREVQGLEQVEVLQDEKEMLLRFAELIKEGDYDVIVGYNTDSFDFPYIRDRLKKLGISLPLGRLDAELEVSRRGALPEARIRGRAHVDLYPIVRRHVKLNSYVLESVVEELLGIKKEKLDGERLFTYWDEGGEKRALLARYALEDARVTLALAEKFLPLYCELSTIVGQSLNDVARMTSGQLVEWLLMRYATPRGELIPNHPAGEEYAARARATYAGGYVREPKRGLVEHIAVFDFRSFGPSIIVSHNIDPSTLIVGNCEENRAPELEYCFSLEREGFIPAILKELIRRRAEIKRELKRSEGDRRRTLSFAEKALKILANSFYGYMGYPRARWYRRECAESVAAFARMYIKQVMRIAEEEFKLEVVYGDTDSLFVVIPPEKRELAQKFLQKVNESMPGIIELEFEGFYRRGLFVTKKRYALLSEDGKMVVKGLEFVRRDWAPIARETQKEVLRILLEEADPEKAARLVRDVIERIRQRRVSLEDITIYTQLTKRIKSYKSLEPHVVAAQKLKERGREVAPGMIIGYIITKGTKGISQRATPVEFARLEDYDPEYYIDNQILPAIQRIFEAIGYTRDYLKEGITQTSLSRWF

SEQ ID NO: 1928 - protein, 792 aa, unidentified
  REGION 1..792: note = Description of Unknown: Synthetic polypeptide
MPRILKGFLIDADFETVEGRALIRLFLRGEEGSFVVYDDSFSPYFYALPGDEPERVKERILASGAAEAIQKVEIEEKRLFGTPRVALRITVSHPQDVPRIRERIRRVEGVDLILEHDILFVRRYLIDRGIKPLTWLRLEVEERDGRALLRGVEQLEEEPPELRVAAVAIAVYNPKGAPRSSKDEIIMISVATSDGVEKVLTWREVQGLEQVEVLQDEKEMLLRFAELIKEGDYDVIVGYNTDSFDFPYIRDRLKKLGISLPLGRLDAELEVSRRGALPEARIRGRAHVDLYPIVRRHVKLNSYVLESVVEELLGIKKEKLDGERLFTYWDEGGEKRALLARYALEDARVTLALAEKFLPLYCELSTIVGQSLNDVARMTSGQLVEWLLMRYATPRGELIPNHPAGYEYAARARATYAGGYVREPKRGLVEHIAVFDFRSFGPSIIVSHNIDPSTLIVGNCEENRAPELEYCFSLEREGFIPAILKELIRRRAEIKRELKRSEGDRRRTLSFAEKALKILANSFYGYMGYPRARWYRRECAESVAAFARMYIKQVMRIAEEEFKLEVVYGDTDSLFVVIPPEKRELAQKFLQKVNESMPGIIELEFEGFYRRGLFVTKKRYALLSEDGKMVVKGLEFVRRDWAPIARETQKEVLRILLEEADPEKAARLVRDVIERIRQRRVSLEDITIYTQLTKRIKSYKSLEPHVVAAQKLKERGREVAPGMIIGYIITKGTKGISQRATPVEFARLEDYDPEYYIDNQILPAIQRIFEAIGYTRDYLKEGITQTSLSRWF

SEQ ID NO: 1929 - protein, 792 aa, unidentified
  REGION 1..792: note = Description of Unknown: Synthetic polypeptide
MPRILKGFLIDADFETVEGRALIRLFLRGEEGSFVVYDDSFSPYFYALPGDEPERVKERILASGAAEAIQKVEIEEKRLFGTPRVALRITVSHPQDVPRIRERIRRVEGVDLILEHDILFVRRYLIDRGIKPLTWLRLEVEERDGRALLRGVEQLEEEPPELRVAAVAIAVYNPKGAPRSSKDEIIMISVATSDGVEKVLTWREVQGLEQVEVLQDEKEMLLRFAELIKEGDYDVIVGYNTDSFDFPYIRDRLKKLGISLPLGRLDAELEVSRRGALPEARIRGRAHVDLYPIVRRHVKLNSYDLESVVEELLGIKKEKLDGERLFTYWDEGSEKRALLARYALEDARVTLALAEKFLPLYCELSTIVGQSLNDVARMTSGQLVEWLLMRYATPRGELIPNHPAGEEYAARARATYAGGYVREPKRGLVEHIAVFDFRSFGPSIIVSHNIDPSRLIVGNCEENRAPELEYCFSLEREGFIPAILKELIRRRAEIKRELKRSEGDRRRTLSFAEKALKILANSFYGYMGYPRARWYRRECAESVAAFARMYIKQVMRIAEEEFKLEVVYGDTDSLFVVIPPEKRELAQKFLQKVNESMPGIIELEFEGFYRRGLFVTKKRYALLSEDGKMVVKGLEFVRRDWAPIARETQKEVLRILLEEADPEKAARLVRDVIERIRQRRVSLEDITIYTQLTKRIKSYKSLEPHVVAAQKLKERGREVAPGMIIGYIITKGTKGISQRATPVEFARLEDYDPEYYIDNQILPAIQRIFEAIGYTRDYLKEGITQTSLSRDF

SEQ ID NO: 1930 - protein, 789 aa, unidentified
  REGION 1..789: note = Description of Unknown: Synthetic polypeptide
MPRILKGFLIDADDETVEGRALIRLFLRGEEGSFVVYDDSFSPYFYALPGDEPERVKERILASGAAEAIQKVEIEEKRLFGTPRVALRITVSHPQDVPRIRERIRRVEGVDLILEHDILFVRRYLIDRGIKPLTWLRLEVEERDGRALLRGVEQLEEEPPELRVAAVAIAVYNPKGAPRSSKDEIIMISVATSDGVEKVLTWREVQGLEQVEVLQDEKEMLLRFAELIKEGDYDVIVGYNTDSFDFPYIRDRLKKLGISLPLGRLDAELEVSRRGALPEARIRGRAHVDLYPIVRRHVKLNSYDLESVVEELLGIKKEKLDGERLFTYWDEGGEKRALLARYALEDARVTLALAEKFLPLYLELSTIVGQSLNDVARMTSGQLVEWLLMRYATPRGELIPNHPAGEEYAARARATYAGGYVREPKRGLVEHIAVFDFRSFGPSIIVSHNIDPSTLIVGNCEENRAPELEYCFSLEREGFIPAILKELIRRRAEIKRELKRSEGDRRRTLSFAEKALKILANSFYGYMGYPRARWYRRECAESVAAFARMYIKQVMRIAEEEFKLEVVYGDTDSLFVVIPPEKRELAQKFLQKVNESMPGIIELEFEGFYRRGLFVTKKRYALLSEDGKMVVKGLEFVRRDWAPIARETQKEVLRILLEEADPEKAARLVRDVIERIRQRRVSLEDITIYTQLTKRIKSYKSLEPHVVAAQKLKERGREVAPGMIIGYIITKGTKGISQRATPVEFARLEDYDPEYYIDNQILPAIQRIFEAIGYTRDYLKEGITQTSLS

SEQ ID NO: 1931 - protein, 792 aa, unidentified
  REGION 1..792: note = Description of Unknown: Synthetic polypeptide
MPRILKGFLIDADFETVEGRALIRLFLRGEEGSFVVYDDSFSPYFYALPGDEPERVKERILASGAAVAIQKVEIEEKRLFGTPRVALRITVSHPQDVPRIRERIRRVEGVDLILEHDILFVRRYLIDRGIKPLTWLRLEVEERDGRALLRGVEQLEEEPPELRVAAVAIAVYNPKGAPRSSKDEIIMISVATSDGVEKVLTWREVQGLEQVEVLQDEKEMLLRFAELIKEGDYDVIVGYNTDSFDFPYIRDRLKKLGISLPLGRLDAELEVSRRGALPEARIRGRAHVDLYPIVRRHVKLNSYVLESVVEELLGIKKEKLDGERLFTYWDEGGEKRALLARYALEAARVTLALAEKFLPLYCELSTIVGQSLNDVARMTSGQLVEWLLMRYATPRGELIPNHPAGEEYAARARATYAGGYVREPKRGLVEHIAVFDFRSFGPSIIVSHNIDPSTLIVGNCEENRAPELEYCFSLEREGFIPAILKELIRRRAEIKRELKRSEGDRRRTLSFAEKALKILANSFYGYMGYPRARWYRRECAESVAAFARMYIKQVMRIAEEEFKLEVVYGDTDSLFVVIPPEKRELAQKFLQKVNESMPGIIELEFEGFYRRGLFVTKKRYALLSEDGKMVVKGLEFVRRDWAPIARETQKEVLRILLEEADPEKAARLVRDVIERIRQRRVSLEDITIYTQLTKRIKSYKSLEPHVVAAQKLKERGREVAPGMIIGYIITKGTKGISQRATPVEFARLEDYDPEYYIDNQILPAIQRIFEAIGYTRDYLKEGITQTSLSRWF

SEQ ID NO: 1932 - protein, 792 aa, unidentified
  REGION 1..792: note = Description of Unknown: Synthetic polypeptide
MPRILKGFLIDADFETVEGRALIRLFLRGEEGSFVVYDDSFSPYFYALPGDEPERVKERILASGAAEAIQKVEIEEKRLFGTPRVALRITVSHPQDVPRIRERIRRVEGVDLILEHDILFVRRYLIDRGIKPLTWLRLEVEERDGRALLRGVEQLEEEPPELRVAAVKINVYNPKGAPRSSKDEIIMISVATSDGVEKVLTWREVQGLEQVEVLQDEKEMLLRFAELIKEGDYDVIVGYNTDSFDFPYIRDRLKKLGISLPLGRLDAELEVSRRGALPEARIRGRAHVDLYPIVRRHVKLNSYVLESVVEELLGIKKEKLDGERLFTYWDEGGEKRALLARYALEDARVTLALAEKFLPLYCELSTIVGQSLNDVARMTSGQLVEWLLMRYATPRGELIPNHPAGEEYAARARATYAGGYVREPKRGLVEHIAVFDFRSFGPSIIVSHNIDPSTLIVGNCEENRAPELEYCFSLEREGFIPAILKELIRRRAEIKRELKRSEGDRRRTLSFAEKALKILANSFYGYMGYPRARWYRRECAESVAAFARMYIKQVMRIAEEEFKLEVVYGDTDSLFVVIPPEKRELAQKFLQKVNESMPGIIELEFEGFYRRGLFVTKKRYALLSEDGKMVVKGLEFVRRDWAPIARETQKEVLRILLEEADPEKAARLVRDVIERIRQRRVSLEDITIYTQLTKRIKSYKSLEPHVVAAQKLKERGREVAPGMIIGYIITKGTKGISQRATPVEFARLEDYDPEYYIDNQILPAIQRIFEAIGYTRDYLKEGITQTSLSRWF

SEQ ID NO: 1933 - protein, 792 aa, unidentified
  REGION 1..792: note = Description of Unknown: Synthetic polypeptide
MPRILKGFLIDADFETVEGRALIRLFLRGEEGSFVVYDDSFSPYFYALPGDEPERVKERILASGAAEAIQKVEIEEKRLFGTPRVALRITVSHPQDVPRIRERIRRVEGVDLILEHDILFVRRYLIDRGIKPLTWLRLEVEERDGRALLRGVEQLEEEPPELRVAAVAIAVYNPKGAPRSSKDEIIMISVATSDGVEKVLTWREVQGLEQVEVLQDEKEMLLRFAELIKEGDYDVIVGYNTDSFDFPYIRDRLKKLGISLPLGRLDAELEVSRRGALPEARIRGRAHVDLYPIVRRHVKLNSYVLESVVEELLGIKKEKLDGERLFTYWDEGGEKRALLARYALEDARVTLALAEKFLPLYCELSTIVGQSLNDVARMTSGQLVEWLLMRYATPRGELIPNHPAGEEYAARARATYAGGYVREPKRGLVEHIAVFDFRSFGPSIIVSHNIDPNTLIVGNCEENRAPELEYCFSLEREGFIPAILKELIRRRAEIKRELKRSEGDRRRTLSFAEKALKILANSFYGYMGYPRARWYRRECAESVAAFARMYIKQVMRIAEEEFKLEVVYGDTDSLFVVIPPEKRELAQKFLQKVNESMPGIIELEFEGFYRRGLFVTKKRYALLSEDGKMVVKGLEFVRRDWAPIARETQKEVLRILLEEADPEKAARLVRDVIERIRQRRVSLEDITIYTQLTKRIKSYKSLEPHVVAAQKLKERGREVAPGMIIGYIITKGTKGISQRATPVEFARLEDYDPEYYIDNQILPAIQRIFEAIGYTRDYLKEGITQTSLSRWF

SEQ ID NO: 1934 - protein, 792 aa, unidentified
  REGION 1..792: note = Description of Unknown: Synthetic polypeptide
MPRILKGFLIDADFETVEGRALIRLFLRGEEGSFVVYDDSFSPYFYALPGDEPERVKERILASGAAEAIQKVEIEEKRLFGTPRVALRITVSHPQDVPRIRERIRRVEGVDLILEHDILFVRRYLIDRGIKPLTWLRLEVEERDGRALLRGVEQLEEEPPELRVAAVAIAVYNPKGAPRSSKDEIIMISVATSDGVEKVLTWREVQGLEQVEVLQDEKEMLLRFAELIKEGDYDVIVGYNTDSFDFPYIRDRLKKLGISLPLGRLDAELEVSRRGALPEARIRGRAHVDLYPIVRRHVKLNSYVLESVVEELLGIKKEKLDGERLFTYWDEGGEKRALLARYALEDARVTLALAEKFLPLYCELSTIVGQSLNDVARMTSGQLVEWLLMRYATPRGELIPNHPAGEEYAARARATYAGGYVREPKRGLVEHIAVFDFRSFGPSIIVSHNIDPSTLIVGNCEENRAPELEYCFSLEREGFIPAILKELIRRRAEIKRELKRSEGDRRRTLSFAEKALKILANSFYGYMGYPRARWYRRECAESVAAFARMYIQQVMRIAEEEFKLEVVYGDTDSLFVVIPPEKRELAQKFLQKVNESMPGIIELEFEGFYRRGLFVTKKRYALLSEDGKMVVKGLEFVRRDWAPIARETQKEVLRILLEEADPEKAARLVRDVIERIRQRRVSLEDITIYTQLTKRIKSYKSLEPHVVAAQKLKERGREVAPGMIIGYIITKGTKGISQRATPVEFARLEDYDPEYYIDNQILPAIQRIFEAIGYTRDYLKEGITQTSLSRWF

SEQ ID NO: 1935 - protein, 792 aa, unidentified
  REGION 1..792: note = Description of Unknown: Synthetic polypeptide
MPRILKGFLIDADFETVEGRALIRLFLRGEEGSFVVYDDSFSPYFYALPGDEPERVKERILASGAAEAIQKVEIEEKRLFGTPRVALRITVSHPQDVPRIRERIRRVEGVDLILEHDILFVRRYLIDRGIKPLTWLRLEVEERDGRALLRGVEQLEEEPPELRVAAVAIAVYNPKGAPRSSKDEIIMISVATSDGVEKVLTWREVQGLEQVEVLQDEKEMLLRFAELIKEGDYDVIVGYNTDSFDFPYIRDRLKKLGISLPLGRLDAELEVSRRGALPEARIRGRAHVDLYPIVRRHVKLNSYDLESVVEELLGIKKEKLDGERLFTYWDEGGEKRALLARYALEDARVTLALAEKFLPLYCELSTIVGQSLNDVARMTSGQLVEWLLYRYATPRGELIPNHPAGEEYAARARATYAGGYVREPKRGLVEHIAVFDFRSFGPSIIVSHNIDPSTLIVGNCEENRAPELEYCFSLEREGFIPAILKELIRRRAEIKRELKRSEGDRRRTLSFAEKALKILANSFYGYMGYPRARWYRRECAESVAAFARMYIKQVMRIAEEEFKLEVVYGDTDSLFVVIPPEKRELAQKFLQKVNESMPGIIELEFEGFYRRGLFVTKKRYALLSEDGKMVVKGLEFVRRDWAPIARETQKEVLRILLEEADPEKAARLVRDVIERIRQRRVSLEDITIYTQLTKRIKSYKSLEPHVVAAQKLKERGREVAPGMIIGYIITKGTKGISQRATPVEFARLEDYDPEYYIDNQILPAIQRIFEAIGYTRDYLKEGITQTSLSRWF

SEQ ID NO: 1936 - protein, 792 aa, unidentified
  REGION 1..792: note = Description of Unknown: Synthetic polypeptide
MPRILKGFLIDADFETVEGRALIRLFLRGEEGSFVVYDDSFSPYFYALPGDEPERVKERILASGAAEAIQKVEIEEKRLFGTPRVALRITVSHPQDVPRIRERIRRVEGVDLILEHDILFVRRYLIDRGIKPLTWLRLEVEERDGRALLRGVEQLEEEPPELRVAAVAIKVYNPKGAPRSSKDEIIMISVATSDGVEKVLTWREVQGLEQVEVLQDEKEMLLRFAELIKEGDYDVIVGYNTDSFDFPYIRDRLKKLGISLPLGRLDAELEVSRRGALPEARIRGRAHVDLYPIVRRHVKLNSYVLESVVEELLGIKKEKLDGERLFTYWDEGGEKRALLARYALEDARVTLALAEKFLPLYCELSTIVGQSLNDVARMTSGQLVEWLLMRYATPRGELIPNHPAGEEYAARARATYAGGYVREPKRGLVEHIAVFDFRSFGPSIIVSHNIDPSTLIVGNCEENRAPELEYCFSLEREGFIPAILKELIRRRAEIKRELKRSEGDRRRTLSFAEKALKILANSFYGYMGYPRARWYRRECAESVAAFARMYIKQVMRIAEEEFKLEVVYGDTDSLFVVIPPEKRELAQKFLQKVNESMPGIIELEFEGFYRRGLFVTKKRYALLSEDGKMVVKGLEFVRRDWAPIARETQKEVLRILLEEADPEKAARLVRDVIERIRQRRVSLEDITIYTQLTKRIKSYKSLEPHVVAAQKLKERGREVAPGMIIGYIITKGTKGISQRATPVEFARLEDYDPEYYIDNQILPAIQRIFEAIGYTRDYLKEGITQTSLSRWF

SEQ ID NO: 1937 - protein, 792 aa, unidentified
  REGION 1..792: note = Description of Unknown: Synthetic polypeptide
MPRILKGFLIDADFETVEGRALIRLFLRGEEGSFVVYDDSFSPYFYALPGDEPERVKERILASGAAEAIQKVEIEEKRLFGTPRVALRITVSHPQDVPRIRERIRRVEGVDLILEHDILFVRRYLIDRGIKPLTWLRLEVEERDGRALLRGVEQLEEEPPELRVAAVAIAVYNPKGAPRSSKDEIIMISVATSDGVEKVLTWREVQGLEQVEVLQDEKEMLLRFAELIKEGDYDVIVGYNTDSFDFPYIRDRLKKLGISLPLGRLDAELEVSRRGALPEARIRGRAHVDLYPIVRRHVKLNSYVLESVVEELLGIKKEKLDGERLFTYWDEGGEKRALLARYALEDARVTLALAEKFLPLYCELSTIVGQSLNDVARMTSGQLVEWLLMRYATPRGELIPNHPAGEEYAARARATYAGGYVREPKRGLVEHIAVFDFRSFGPSIIVSHNIDPSTLIVGNCEENRAPELEYCFSLEREGFIPAILKELIRRRAEIKRELKRSEGDRRRTLSFAEKALKILANSFYGYMGYPRARWYRRECAESVAAFARMYIKQVMRIAEEEFKLEVVYGDTDSLFVVIPPEKRELAQKFLQKVNESMPGIIELEFEGFYRRGLFVTKKRYALLSEDGKRVVKGLEFVRRDWAPIARETQKEVLRILLEEADPEKAARLVRDVIERIRQRRVSLEDITIYTQLTKRIKSYKSLEPHVVAAQKLKERGREVAPGMIIGYIITKGTKGISQRATPVEFARLEDYDPEYYIDNQILPAIQRIFEAIGYTRDYLKEGITQTSLSRWF

SEQ ID NO: 1938 - protein, 792 aa, unidentified
  REGION 1..792: note = Description of Unknown: Synthetic polypeptide
MPRILKGFLIDADFETVEGRALIRLFLRGEEGSFVVYDDSFSPYFYALPGDEPERVKERILASGAAEAIQKVEIEEKRLFGTPRVALRITVSHPQDVPRIRERIRRVEGVDLILEHDILFVRRYLIDRGIKPLTWLRLEVEERDGRALLRGVEQLEEEPPELRVAAVAIAVYNPKGAPRSSKDEIIMISVATSDGVEKVLTWREVQGLEQVEVLQDEKEMLLRFAELIKEGDYDVIVGYNTDSFDFPYIRDRLKKLGISLPLGRLDAELEVSRRGALPEARIRGRAHVDLYPIVRRHVKLNSYDLESVVEELLGIKKEKLDGERLFTYWDEGGERRALLARYALEDARVTLALAEKFLPLYCELSTIVGQSLNDVARMTSGQLVEWLLMRYATPRGELIPNHPAGEEYAARARATYAGGYVREPKRGLVEHIAVFDFRSFGPSIIVSHNIDPSTLIVGNCEENRAPELEYCFSLEREGFIPAILKELIRRRAEIKRELKRSEGDRRRTLSFAEKALKILANSFYGYMGYPRARWYRRECAESVAAFARMYIKQVMRIAEEEFKLEVVYGDTDSLFVVIPPEKRELAQKFLQKVNESMPGIIELEFEGFYRRGLFVTKKRYALLSEDGKMVVKGLEFVRRDWAPIARETQKEVLRILLEEADPEKAARLVRDVIERIRQRRVSLEDITIYTQLTKRIKSYKSLEPHVVAAQKLKERGREVAPGMIIGYIITKGTKGISQRATPVEFARLEDYDPEYYIDNQILPAIQRIFEAIGYTRDYLKEGITQTSLSRWF

SEQ ID NO: 1939 - protein, 792 aa, unidentified
  REGION 1..792: note = Description of Unknown: Synthetic polypeptide
MPRILKGFLIDADFETVEGRALIRLFLRGEEGSFVVYDDSFSPYFYALPGDEPERVKERILASGAAEAIQKVEIEEKRLFGTPRVALRITVSHPQDVPRIRERIRRVEGVDLILEHDILFVRRYLIDRGIKPLTWLRLEVEERDGRALLRGVEQLEEEPPELRVAAVAIAVYNPKGAPRSSKDEIIMISVATSDGVEKVLTWREVQGLEQVEVLQDEKEMLLRFAELIKEGDYDVIVGYNTDSFDFPYIRDRLKKLGISLPLGRLDAELEVSRRGALPEARIRGRAHVDLYPIVRRHVKLNSYVLESVVEELLGIKKEKLDGERLFTYWDEGGEKRALLARYALEDARVTLALAEKFLPLYSELSTIVGQSLNDVARMTSGQLVEWLLMRYATPRGELIPNHPAGEEYAARARATYAGGYVREPKRGLVEHIAVFDFRSFGPSIIVSHNIDPSTLIVGNCEENRAPELEYCFSLEREGFIPAILKELIRRRAEIKRELKRSEGDRRRTLSFAEKALKILANSFYGYMGYPRARWYRREVAESVAAFARMYIKQVMRIAEEEFKLEVVYGDTDSLFVVIPPEKRELAQKFLQKVNESMPGIIELEFEGFYRRGLFVTKKRYALLSEDGKMVVKGLEFVRRDWAPIARETQKEVLRILLEEADPEKAARLVRDVIERIRQRRVSLEDITIYTQLTKRIKSYKSLEPHVVAAQKLKERGREVAPGMIIGYIITKGTKGISQRATPVEFARLEDYDPEYYIDNQILPAIQRIFEAIGYTRDYLKEGITQTSLSRWF

SEQ ID NO: 1940 - protein, 792 aa, unidentified
  REGION 1..792: note = Description of Unknown: Synthetic polypeptide
MPRILKGFLIDADFETVEGRALIRLFLRGEEGSFVVYDDSFSPYFYALPGDEPERVKERILASGAAEAIQKVEIEEKRLFGTPRVALRITVSHPQDVPRIRERIRRVEGVDLILEHDILFVRRYLIDRGIKPLTWLRLEVEERDGRALLRGVEQLEEEPPELRVAAVAIAVYNPKGAPRSSKDEIIMISVATSDGVEKVLTWREVQGLEQVEVLQDEKEMLLRFAELIKEGDYDVIVGYNTDSFDFPYIRDRLKKLGISLPLGRLDAELEVSRRGALPEARIRGRAHVDLYPIVRRHVKLNSYVLESVVEELLGIKKEKLDGERLFTYWDEGGEKRALLARYALEDARVTLALAEKFLPLYCELSTIVGQSLNDVARMTSGQLVEWLLYRYATPRGELIPNHPAGEEYAARARATYAGGYVREPKRGLVEHIAVFDFRSFGPSIIVSHNIDPSTLIVGNCEENRAPELEYCFSLEREGFIPAILKELIRRRAEIKRELKRSEGDRRRTLSFAEKALKILANSFYGYMGYPRARWYRRECAESVAAFARMYIKQVMRIAEEEFKLEVVYGDTDSLFVVIPPEKRELAQKFLQKVNESMPGIIELEFEGFYRRGLFVTKKRYALLSEDGKMVVKGLEFVRRDWAPIARETQKEVLRILLEEADPEKAARLVRDVIERIRQRRVSLEDITIYTQLTKRIKSYKSLEPHVVAAQKLKERGREVAPGMIIGYIITKGTKGISQRATPVEFARLEDYDPEYYIDNQILPAIQRIFEAIGYTRDYLKEGITQTSLSRWF

SEQ ID NO: 1941 - protein, 792 aa, unidentified
  REGION 1..792: note = Description of Unknown: Synthetic polypeptide
MPRILKGFLIDADFETVEGRALIRLFLRGEEGSFVVYDDSFSPYFYALPGDEPERVKERILASGAAEAIQKVEIEEKRLFGTPRVALRITVSHPQDVPRIRERIRRVEGVDLILEHDILFVRRYLIDRGIKPLTWLRLEVEERDGRALLRGVEQLEEEPPELRVAAVAIAVYNPKGAPRSSKDEIIMISVATSDGVEKVLTWREVQGLEQVEVLQDEKEMLLRFAELIKEGDYDVIVGYNTDSFDFPYIRDRLKKLGISLPLGRLDAELEVSRRGALPEARIRGRAHVDLYPIVRRHVKLNSYVLESVVEELLGIKKEKLDGERLFTYWDEGGEKRALLARYALEAARVTLALAEKFLPLYCELSTIVGQSLNDVARMTSGQLVEWLLMRYATPRGELIPNHPAGEEYAARARATYAGGYVREPKRGLVEHIAVFDFRSFGPSIIVSHNIDPSTLIVGNCEENRAPELEYCFSLEREGFIPAILKELIRRRAEIKRELKRSEGDRRRTLSFAEKALKILANSFYGYMGYPRARWYRRECAESVAAFARMYIKQVMRIAEEEFKLEVVYGDTDSLFVVIPPEKRELAQKFLQKVNESMPGIIELEFEGFYRRGLFVTKKRYALLSEDGKMVVKGLEFVRRDWAPIARETQKEVLRILLEEADPEKAARLVRDVIERIRQRRVSLEDITIYTQLTKRIKSYKSLEPHVVAAQKLKERGREVAPGMIIGYIITKGTKGISQRATPVEFARLEDYDPEYYIDNQILPAIQRIFEAIGYTRDYLKEGITQTSLSRWF

SEQ ID NO: 1942 - protein, 789 aa, unidentified
  REGION 1..789: note = Description of Unknown: Synthetic polypeptide
MPRILKGFLIDADFETVEGRALIRLFLRGEEGSFVVYDDSFSPYFYALPGDEPERVKERILASGAAEAIQKVEIEEKRLFGTPRVALRITVSHPQDVPRIRERIRRVEGVDLILEHDILFVRRYLIDRGIKPLTWLRLEVEERDGRALLRGVEQLEEEPPELRVAAVAIAVYNPKGAPRSSKDEIIMISVATSDGVEKVLTWREVQGLEQVEVLQDEKEMLLRFAELIKEGDYDVIVGYNTDSFDFPYIRDRLKKLGISLPLGRLDAELEVSRRGALPEARIRGRAHVDLYPIVRRHVKLNSYDLESVVEELLGIKKEKLDGERRFTYWDEGGEKRALLARYALEDARVTLALAEKFLPLYLELSTIVGQSLNDVARMTSGQLVEWLLMRYATPRGELIPNHPAGEEYAARARATYAGGYVREPKRGLVEHIAVFDFRSFGPSIIVSHNIDPSTLIVGNCEENRAPELEYCFSLEREGFIPAILKELIRRRAEIKRELKRSEGDRRRTLSFAEKALKILANSFYGYMGYPRARWYRRECAESVAAFARMYIKQVMRIAEEEFKLEVVYGDTDSLFVVIPPEKRELAQKFLQKVNESMPGIIELEFEGFYRRGLFVTKKRYALLSEDGKMVVKGLEFVRRDWAPIARETQKEVLRILLEEADPEKAARLVRDVIERIRQRRVSLEDITIYTQLTKRIKSYKSLEPHVVAAQKLKERGREVAPGMIIGYIITKGTKGISQRATPVEFARLEDYDPEYYIDNQILPAIQRIFEAIGYTRDYLKEGITQTSLS

SEQ ID NO: 1943 - protein, 792 aa, unidentified
  REGION 1..792: note = Description of Unknown: Synthetic polypeptide
MPRILKGFLIDADFETVEGRALIRLFLRGEEGSFVVYDDSFSPYFYALPGDEPERVKERILASGAAEAIQKVEIEEKRLFGTPRVALRITVSHPQDVPRIRERIRRVEGVDLILEHDILFVRRYLIDRGIKPLTWLRLEVEERDGRALLRGVEQLEEEPPELRVAAVAIAVYNPKGAPRSSKDEIIMISVATSDGVEKVLTWREVQGLEQVEVLQDEKEMLLRFAELIKEGDYDVIVGYNTDSFDFPYIRDRLKKLGISLPLGRLDAELEVSRRGALPEARIRGRAHVDLYPIVRRHVKLNSYVLESVVEELLGIKKEKLDGERLFTYWDEGGEKRALLARYALEDARVTLALAEKFLPLYCELSTIVGQSLNDVARMTSGQLVEWLLMRYATPRGELIPNHPAGEEYAARARATYAGGYVREPKRGLVEHIAVFDFRSFGPSIIVSHNIDPSTLIVGNCEENRAPELEYCFSLEREGFIPAILKELIRRRAEIKRELKRSEGDRRRTLSFAEKALKILANSFYGYMGYPRARWYRRECAESVAAFARMYIKQVMRIAEEEFKLEVVYGDTDSLFVVIPPEKRELAQKFLQKVNESMPGIIELEFEGFYRRGLFVTKKRYALLSEDGKMVVKGLEFVRRDWAPIARETQKEVLRILLEEADPEKAARLVRDVIERIRQRRVSLEDITIYTQLTKRIKSYKSLEPHVVAAQKLKERGREVAPGLIIGYIITKGTKGISQRATPVEFARLEDYDPEYYIDNQILPAIQRIFEAIGYTRDYLKEGITQTSLSRWF

SEQ ID NO: 1944 - protein, 792 aa, unidentified
  REGION 1..792: note = Description of Unknown: Synthetic polypeptide
MPRILKGFLIDADFETVEGRALIRLFLRGEEGSFVVYDDSFSPYFYALPGDEPERVKERILASGAAEAIQKVEIEEKRLFGTPRVALRITVSHPQDVPRIRERIRRVEGVDLILEHDILFVRRYLIDRGIKPLTWLRLEVEERDGRALLRGVEQLEEEPPELRVAAVAIAVYNPKGAPRSSKDEIIMISVATSDGVEKVLTWREVQGLEQVEVLQDEKEMLLRFAELIKEGDYDVIVGYNTDSFDFPYIRDRLEKLGISLPLGRLDAELEVSRRGALPEARIRGRAHVDLYPIVRRHVKLNSYVLESVVEELLGIKKEKLDGERLFTYWDEGGEKRALLARYALEDARVTLALAEKFLPLYCELSTIVGQSLNDVARMTSGQLVEWLLMRYATPRGELIPNHPAGEEYAARARATYAGGYVREPKRGLVEHIAVFDFRSFGPSIIVSHNIDPSTLIVGNCEENRAPELEYCFSLEREGFIPAILKELIRRRAEIKRELKRSEGDRRRTLSFAEKALKILANSFYGYMGYPRARWYRRECAESVAAFARMYIKQVMRIAEEEFKLEVVYGDTDSLFVVIPPEKRELAQKFLQKVNESMPGIIELEFEGFYRRGLFVTKKRYALLSEDGKMVVKGLEFVRRDWAPIARETQKEVLRILLEEADPEKAARLVRDVIERIRQRRVSLEDITIYTQLTKRIKSYKSLEPHVVAAQKLKERGREVAPGMIIGYIITKGTKGISQRATPVEFARLEDYDPEYYIDNQILPAIQRIFEAIGYTRDYLKEGITQTSLSRWF

SEQ ID NO: 1945 - protein, 792 aa, unidentified
  REGION 1..792: note = Description of Unknown: Synthetic polypeptide
MPRILKGFLIDADFETVEGRALIRLFLRGEEGSFVVYDDSFSPYFYALPGDEPERVKERILASGAAEAIQKVEIEEKRLFGTPRVALRITVSHPQDVPRIRERIRRVEGVDLILEHDILFVRRYLIDRGIKPLTWLRLEVEERDGRALLRGVEQLEEEPPELRVAAVAIAVYNPKGAPRSSKDEIIMISVATSDGVEKVLTWREVQGLEQVEVLQDEKEMLLRFAELIKEGDYDVIVGYNTDSFDFPYIRDRLKKLGISLPLGRLDAELEVSRRGALPEARIRGRAHVDLYPIVRRHVKLNSYDLESVVEELLGIKKEKLDGERLFTYWDEGGEKRALLARYALEDARVTLALAEKFLPLYCELSTIVGQSLNDVARMTSGQLVEWLLMRYATPRGELAPNHPAGEEYAARARATYAGGYVREPKRGLVEHIAVFDFRSFGPSIIVSHNIDPSTLIVGNCEENRAPELEYCFSLEREGFIPAILKELIRRRAEIKRELKRSEGDRRRTLSFAEKALKILANSFYGYMGYPRARWYRRECAESVAAFARMYIKQVMRIAEEEFKLEVVYGDTDSLFVVIPPEKRELAQKFLQKVNESMPGIIELEFEGFYRRGLFVTKKRYALLSEDGKMVVKGLEFVRRDWAPIARETQKEVLRILLEEADPEKAARLVRDVIERIRQRRVSLEDITIYTQLTKRIKSYKSLEPHVVAAQKLKERGREVAPGMIIGYIITKGTKGISQRATPVEFARLEDYDPEYYIDNQILPAIQRIFEAIGYTRDYLKEGITQTSLSRWF

SEQ ID NO: 1946 - protein, 792 aa, unidentified
  REGION 1..792: note = Description of Unknown: Synthetic polypeptide
MPRILKGFLIDADFETVEGRALIRLFLRGEEGSFVVYDDSFSPYFYALPGDEPERVKERILASGAAEAIQKVEIEEKRLFGTPRVALRITVSHPQDVPRIRERIRRVEGVDLILEHDILFVRRYLIDRGIKPLTWLRLEVEERDGRALLRGVEQLEEEPPELRVAAVAILVYNPKGAPRSSKDEIIMISVATSDGVEKVLTWREVQGLEQVEVLQDEKEMLLRFAELIKEGDYDVIVGYNTDSFDFPYIRDRLKKLGISLPLGRLDAELEVSRRGALPEARIRGRAHVDLYPIVRRHVKLNSYVLESVVEELLGIKKEKLDGERLFTYWDEGGEKRALLARYALEDARVTLALAEKFLPLYSELSTIVGQSLNDVARMTSGQLVEWLLMRYATPRGELIPNHPAGEEYAARARATYAGGYVREPKRGLVEHIAVFDFRSFGPSIIVSHNIDPSTLIVGNCEENRAPELEYCFSLEREGFIPAILKELIRRRAEIKRELKRSEGDRRRTLSFAEKALKILANSFYGYMGYPRARWYRRECAESVAAFARMYIKQVMRIAEEEFKLEVVYGDTDSLFVVIPPEKRELAQKFLQKVNESMPGIIELEFEGFYRRGLFVTKKRYALLSEDGKMVVKGLEFVRRDWAPIARETQKEVLRILLEEADPEKAARLVRDVIERIRQRRVSLEDITIYTQLTKRIKSYKSLEPHVVAAQKLKERGREVAPGMIIGYIITKGTKGISQRATPVEFARLEDYDPEYYIDNQILPAIQRIFEAIGYTRDYLKEGITQTSLSRWF

SEQ ID NO: 1947 - protein, 792 aa, unidentified
  REGION 1..792: note = Description of Unknown: Synthetic polypeptide
MPRILKGFLIDADFETVEGRALIRLFLRGEEGSFVVYDDSFSPYFYALPGDEPERVKERILASGAAEAIQKVEIEEKRLFGTPRVALRITVSHPQDVPRIRERIRRVEGVDLILEHDILFVRRYLIDRGIKPLTWLRLEVEERDGRALLRGVEQLEEEPPELRVAAVAIAVYNPKGAPRSSKDEIIMISVATSDGVEKVLTWREVQGLEQVEVLQDEKEMLLRFAELIKEGDYDVIVGYNTDSFDFPYIRDRLKKLGISLPLGRLDAELEVSRRGALPEARIRGRAHVDLYPIVRRHVKLNSYDLESVVEELLGIKKEKLDGERLFTYWDEGGEKRALLARYALEDARVTLALAEKFLPLYCELSTIVGQSLNDVARMTSGQLVEWLLMRYATPRGELIPNHPAGEEYAARARATYAGGYVREPKRGLVEHIAVFDFRSFGPSIIVSHNIDPSTLIVGNCEENRAPELEYCFSLEREGFIPAILKELIRRRAEIKRELKRSEGDRRRTLSFAEKALKILANSFYGYMGYPRARWYRRECAESVAAFARMYIKQVMRIAEEEFKLEVVYGDTDSLFVVIPPEKRELAQKFLQKVNESMPGIIELEFEGFYRRGLFVTKKRYALLSERGKMVVKGLEFVRRDWAPIARETQKEVLRILLEEADPEKAARLVRDVIERIRQRRVSLEDITIYTQLTKRIKSYKSLEPHVVAAQKLKERGREVAPGMIIGYIITKGTKGISQRATPVEFARLEDYDPEYYIDNQILPAIQRIFEAIGYTRDYLKEGITQTSLSRWF

SEQ ID NO: 1948 - protein, 792 aa, unidentified
  REGION 1..792: note = Description of Unknown: Synthetic polypeptide
MPRILKGFLIDADFETVEGRALIRLFLRGEEGSFVVYDDSFSPYFYALPGDEPERVKERILASGAAEAIQKVEIEEKRLFGTPRVALRITVSHPQDVPRIRERIRRVEGVDQILEHDILFVRRYLIDRGIKPLTWLRLEVEERDGRALLRGVEQLEEEPPELRVAAVAIAVYNPKGAPRSSKDEIIMISVATSDGVEKVLTWREVQGLEQVEVLQDEKEMLLRFAELIKEGDYDVIVGYNTDSFDFPYIRDRLKKLGISLPLGRLDAELEVSRRGALPEARIRGRAHVDLYPIVRRHVKLNSYVLESVVEELLGIKKEKLDGERLFTYWDEGGEKRALLARYALEDARVTLALAEKFLPLYCELSTIVGQSLNDVARMTSGQLVEWLLMRYATPRGELIPNHPAGEEYAARARATYAGGYVREPKRGLVEHIAVFDFRSFGPSIIVSHNIDPSTLIVGNCEENRAPELEYCFSLEREGFIPAILKELIRRRAEIKRELKRSEGDRRRTLSFAEKALKILANSFYGYMGYPRARWYRRECAESVAAFARMYIKQVMRIAEEEFKLEVVYGDTDSLFVVIPPEKRELAQKFLQKVNESMPGIIELEFEGFYRRGLFVTKKRYALLSEDGKMVVKGLEFVRRDWAPIARETQKEVLRILLEEADPEKAARLVRDVIERIRQRRVSLEDITIYTQLTKRIKSYKSLEPHVVAAQKLKERGREVAPGMIIGYIITKGTKGISQRATPVEFARLEDYDPEYYIDNQILPAIQRIFEAIGYTRDYLKEGITQTSLSRWF

SEQ ID NO: 1949 - protein, 792 aa, unidentified
  REGION 1..792: note = Description of Unknown: Synthetic polypeptide
MPRILKGFLIDADFETVEGRALIRLFLRGEEGSFVVYDDSFSPYFYALPGDEPERVKERILASGAAEAIQKVEIEEKRLFGTPRVALRITVSHPQDVPRIRERIRRVEGVDLILEHDILFVRRYLIDRGIKPLTWLRLEVEERDGRALLRGVEQLEEEPPELRVAAVAIAVYNPKGAPRSSKDEIIMISVATSDGVEKVLTWREVQGLEQVEVLQDEKEMLLRFAELIKEGDYDVIVGYNTDSFDFPYIRDRLKKLGISLPLGRLDAELEVSRRGALPEARIRGRAHVDLYPIVRRHVKLNSYVLESVVEELLGIKKEKLDGERLFTYWDEGGEKRALLARYALEDARVTLALAEKFLPLYCELSTIVGQSLNDVARMSSGQLVEWLLMRYATPRGELIPNHPAGEEYAARARATYAGGYVREPKRGLVEHIAVFDFRSFGPSIIVSHNIDPSTLIVGNCEENRAPELEYCFSLEREGFIPAILKELIRRRAEIKRELKRSEGDRRRTLSFAEKALKILANSFYGYMGYPRARWYRRECAESVAAFARMYIKQVMRIAEEEFKLEVVYGDTDSLFVVIPPEKRELAQKFLQKVNESMPGIIELEFEGFYRRGLFVTKKRYALLSEDGKMVVKGLEFVRRDWAPIARETQKEVLRILLEEADPEKAARLVRDVIERIRQRRVSLEDITIYTQLTKRIKSYKSLEPHVVAAQKLKERGREVAPGMIIGYIITKGTKGISQRATPVEFARLEDYDPEYYIDNQILPAIQRIFEAIGYTRDYLKEGITQTSLSRWF

SEQ ID NO: 1950 - protein, 792 aa, unidentified
  REGION 1..792: note = Description of Unknown: Synthetic polypeptide
MPRILKGFLIDADFETVEGRALIRLFLRGEEGSFVVYDDSFSPYFYALPGDEPERVKERILASGAAEAIQKVEIEEKRLFGTPRVALRITVSHPQDVPRIRERIRRVEGVDLILEHDILFVRRYLIDRGIKPLTWLRLEVEERDGRALLRGVEQLEEEPPELRVAAVAIAVYNPKGAPRSSKDEIIMISVATSDGVEKVLTWREVQGLEQVEVLQDEKEMLLRFAELIKEGDYDVIVGYNTDSFDFPYIRDRLKKLGISLPLGRLDAELEVSRRGALPEARIRGRAHVDLYPIVRRHVKLNSYVLESVVEELLGIKKEKLDGERLFTYWDEGGEKRALLARYALEDARVTLALAEKFLPLYCELSTIVGQSLNDVARMTSGQLVEWLLMRYATPRGELIPNHPAGEEYAARARATYAGGYVREPKRGLVEHIAVFDFRSFGPSIIVSHNIDPSTLIVGNCEENRAPELEYCFSLEREGFIPAILKELIRRRAEIKRELKRSEGDRRRTLSFAEKALKILANSFYGYMGYPRARWYRRECAESVAAFARMYIKQVMRIAEEEFKLEVVYGDTDSLFVVRPPEKRELAQKFLQKVNESMPGIIELEFEGFYRRGLFVTKKRYALLSEDGKMVVKGLEFVRRDWAPIARETQKEVLRILLEEADPEKAARLVRDVIERIRQRRVSLEDITIYTQLTKRIKSYKSLEPHVVAAQKLKERGREVAPGMIIGYIITKGTKGISQRATPVEFARLEDYDPEYYIDNQILPAIQRIFEAIGYTRDYLKEGITQTSLSRWF

SEQ ID NO: 1951 - protein, 792 aa, unidentified
  REGION 1..792: note = Description of Unknown: Synthetic polypeptide
MPRILKGFLIDADFETVEGRALIRLFLRGEEGSFVVYDDSFSPYFYALPGDEPERVKERILASGAAEAIQKVEIEEKRLFGTPRVALRITVSHPQDVPRIRERIRRVEGVDLILEHDILFVRRYLIDRGIKPLTWLRLEVEERDGRALLRGVEQLEEEPPELRVAAVAIAVYNPKGAPRSSKDEIIMISVATSDGVEKVLTWREVQGLEQVEVLQDEKEMLLRFAELIKEGDYDVIVGYNTDSFDFPYIRDRLKKLGISLPLGRLDAELEVSRRGALPEARIRGRAHVDLYPIVRRHVKLNSYVLESVVEELLGIKKEKLDGERLFTYWDEGGEKRALLARYALERARVTLALAEKFLPLYCELSTIVGQSLNDVARMTSGQLVEWLLMRYATPRGELIPNHPAGEEYAARARATYAGGYVREPKRGLVEHIAVFDFRSFGPSIIVSHNIDPSTLIVGNCEENRAPELEYCFSLEREGFIPAILKELIRRRAEIKRELKRSEGDRRRTLSFAEKALKILANSFYGYMGYPRARWYRRECAESVAAFARMYIKQVMRIAEEEFKLEVVYGDTDSLFVVIPPEKRELAQKFLQKVNESMPGIIELEFEGFYRRGLFVTKKRYALLSEDGKMVVKGLEFVRRDWAPIARETQKEVLRILLEEADPEKAARLVRDVIERIRQRRVSLEDITIYTQLTKRIKSYKSLEPHVVAAQKLKERGREVAPGMIIGYIITKGTKGISQRATPVEFARLEDYDPEYYIDNQILPAIQRIFEAIGYTRDYLKEGITQTSLSRWF

SEQ ID NO: 1952 - protein, 792 aa, unidentified
  REGION 1..792: note = Description of Unknown: Synthetic polypeptide
MPRILKGFLIDADFETVEGRALIRLFLRGEEGSFVVYDDSFSPYFYALPGDEPERVKERILASGAAEAIQKVEIEEKRLFGTPRVALRITVSHPQDVPRIRERIRRVEGVDLILEHDILFVRRYLIDRGIKPLTWLRLEVEERDGRALLRGVEQLEEEPPELRVAAVAIAVYNPKGAPRSSKDEIIMISVATSDGVEKVLTWREVQGLEQVEVLQDEKEMLLRFAELIKEGDYDVIVGYNTDSFDFPYIRDRLKKLGISLPLGRLDAELEVSRRGALPEARIRGRAHVDLYPIVRRHVKLNSYVLESVVEELLGIKKEKLDGERLFTYWDEGGEKRALLARYALEDARVTLALAEKFLPLYCELSTIVGQSLNDVARMTSGQLVEWLLMRYATPRGELIPNHPAGEEYAARARATYAGGYVREPKRGLVEHIAVFDFRSFGPSIIVSHNIDPSTLIVGNCEENRAPELEYCFSLEREGFIPAILKELIRRRAEIKRELKRSEGDRRRTLSFAEKALKILANSFYGYMGYPRARWYRRECAESVAAFARMYIKQVMRIAEEEFKLEVVYGDTDSLFVVIPPEKRELAQKFLQKVNESMPGIIELEFEGFYRRGLFVTKKRYALLSEDGKMVVKGLEFVRRDWAPIARETQKEVLRILLEEADPEKAARLVRDVIERIRQRRVSLEDITIYTQLTKRIKSYKSLEPHVVAAQKLKERGREVAPGMIIGYIITKGTKGISQRATPVEFARLEDYDPGYYIDNQILPAIQRIFEAIGYTRDYLKEGITQTSLSRWF

SEQ ID NO: 1953 - protein, 792 aa, unidentified
  REGION 1..792: note = Description of Unknown: Synthetic polypeptide
MPRILKGFLIDADFETVEGRALIRLFLRGEEGSFVVYDDSFSPYFYALPGDEPERVKERILASGAAEAIQKVEIEEKRLFGTPRVALRITVSHPQDVPRIRERIRRVEGVDLILEHDILFVRRYLIDRGIKPLTWLRLEVEERDGRALLRGVEQLEEEPPELRVAAVAIAVYNPKGAPRSSKDEIIMISVATSDGVEKVLTWREVQGLEQVEVLQDEKEMLLRFAELIKEGDYDVIVGYNTDSFDFPYIRDRLKKLGISLPLGRLDAELEVSRRGALPEARIRGRAHVDLYPIVRRHVKLNSYDLESVVEELLGIKKEKLDGERLFTYWDEGGEKRALLARYALEDARVTLALAEKFLPLYCELSTIVGQSLNDVARMTSGQLVEWLLMRYATPRGELIPNHPAGEEYAARARATYAGGYVREPKRGLVEHIAVFDFRSFGPSIIVSHNIDPSTLIVGNCEENRAPELEYCFTLEREGFIPAILKELIRRRAEIKRELKRSEGDRRRTLSFAEKALKILANSFYGYMGYPRARWYRRECAESVAAFARMYIKQVMRIAEEEFKLEVVYGDTDSLFVVIPPEKRELAQKFLQKVNESMPGIIELEFEGFYRRGLFVTKKRYALLSEDGKMVVKGLEFVRRDWAPIARETQKEVLRILLEEADPEKAARLVRDVIERIRQRRVSLEDITIYTQLTKRIKSYKSLEPHVVAAQKLKERGREVAPGMIIGYIITKGTKGISQRATPVEFARLEDYDPEYYIDNQILPAIQRIFEAIGYTRDYLKEGITQTSLSRWF

SEQ ID NO: 1954 - protein, 792 aa, unidentified
  REGION 1..792: note = Description of Unknown: Synthetic polypeptide
MPRILKGFLIDADFETVEGRALIRLFLRGEEGSFVVYDDSFSPYFYALPGDEPERVKERILASGAAEAIQKVEIEEKRLFGTPRVALRITVSHPQDVPRIRERIRRVEGVDLILEHDILFVRRYLIDRGIKPLTWLRLEVEERDGRALLRGVEQLEEEPPELRVAAVAIAVYNPKGAPRSSKDEIIMISVATSDGVEKVLTWREVQGLEQVEVLQDEKEMLLRFAELIKEGDYDVIVGYNTDSFDFPYIRDRLKKLGISLPLGRLDAELEVSRRGALPEARIRGRAHVDLYPIVRRHVKLNSYDLESVVEELLGIKKEKLDGERLFTYWDEGGEKRALLARYALEDARVTLALAEKFLPLYCELSTIVGQSLNDVARMTSGQLVEWLLVRYATPRGELIPNHPAGEEYAARARATYAGGYVREPKRGLVEHIAVFDFRSFGPSIIVSHNIDPSTLIVGNCEENRAPELEYCFSLEREGFIPAILKELIRRRAEIKRELKRSEGDRRRTLSFAEKALKILANSFYGYMGYPRARWYRRECAESVAAFARMYIKQVMRIAEEEFKLEVVYGDTDSLFVVIPPEKRELAQKFLQKVNESMPGIIELEFEGFYRRGLFVTKKRYALLSEDGKMVVKGLEFVRRDWAPIARETQKEVLRILLEEADPEKAARLVRDVIERIRQRRVSLEDITIYTQLTKRIKSYKSLEPHVVAAQKLKERGREVAPGMIIGYIITKGTKGISQRATPVEFARLEDYDPEYYIDNQILPAIQRIFEAIGYTRDYLKEGITQTSLSRWF

SEQ ID NO: 1955 - protein, 792 aa, unidentified
  REGION 1..792: note = Description of Unknown: Synthetic polypeptide
MPRILKGFLIDADFETVEGRALIRLFLRGEEGSFVVYDDSFSPYFYALPGDEPERVKERILASGAAEAIQKVEIEEKRLFGTPRVALRITVSHPQDVPRIRERIRRVEGVDLILEHDILFVRRYLIDRGIKPLTWLRLEVEERDGRALLRGVEQLEEEPPELRVAAVAIAVYNPKGAPRSSKDEIIMISVATSDGVEKVLTWREVQGLEQVEVLQDEKEMLLRFAELIKEGDYDVIVGYNTDSFDFPYIRDRLKKLGISLPLGRLDAELEVSRRGALPEARIRGRAHVDLYPIVRRHVKLNSYVLESVVEELLGIKKEKLDGERLFTYWDEGGEKRALLARYALEDARVTLALAEKFLPLYCELSTIVGQSLNDVARMTSGQLVEWLLMRYATPRGELIPNHPAGEEYAARARATYAGGYVREPKRGLVEHIAVFDFRSFGPSIIVSHNIDPSTLIVGNCEENRAPELEYCFSLEREGFIPAILKELIRRRAEIKRELKRSEGDRRRTLSLAEKALKILANSFYGYMGYPRARWYRRECAESVAAFARMYIKQVMRIAEEEFKLEVVYGDTDSLFVVIPPEKRELAQKFLQKVNESMPGIIELEFEGFYRRGLFVTKKRYALLSEDGKMVVKGLEFVRRDWAPIARETQKEVLRILLEEADPEKAARLVRDVIERIRQRRVSLEDITIYTQLTKRIKSYKSLEPHVVAAQKLKERGREVAPGMIIGYIITKGTKGISQRATPVEFARLEDYDPEYYIDNQILPAIQRIFEAIGYTRDYLKEGITQTSLSRWF

SEQ ID NO: 1956 - protein, 792 aa, unidentified
  REGION 1..792: note = Description of Unknown: Synthetic polypeptide
MPRILKGFLIDADFETVEGRALIRLFLRGEEGSFVVYDDSFSPYFYALPGDEPERVKERILASGAAEAIQKVEIEEKRLFGTPRVALRITVSHPQDVPRIRERIRRVEGVDLILEHDILFVRRYLIDRGIKPLTWLRLEVEERDGRALLRGVEQLEEEPPELRVAAVAIAVYNPKGAPRSSKDEIIMISVATSDGVEKVLTWREVQGLEQVEVLQDEKEMLLRFAELIKEGDYDVIVGYNTDSFDFPYIRDRLKKLGISLPLGRLDAELEVSRRGALPEARIRGRAHVDLYPIVRRHVKLNSYVLESVVEELLGIKKEKLDGERLFTYWDEGGEKRALLARYALEDARVTLALAEKFLPLYCELSTIVGQSLNDVARMTSGQLVEWLLMRYATPRGELIPNHPAGEEYAARARATYAGGYVREPKRGLVEHIAVFDFRSFGPSIIVSHNIDPSTLIVGNCEENRAPELEYCFSLEREGFIPAILKELIRRRAEIKRELKRSEGDRRRTLSFARKALKILANSFYGYMGYPRARWYRRECAESVAAFARMYIKQVMRIAEEEFKLEVVYGDTDSLFVVIPPEKRELAQKFLQKVNESMPGIIELEFEGFYRRGLFVTKKRYALLSEDGKMVVKGLEFVRRDWAPIARETQKEVLRILLEEADPEKAARLVRDVIERIRQRRVSLEDITIYTQLTKRIKSYKSLEPHVVAAQKLKERGREVAPGMIIGYIITKGTKGISQRATPVEFARLEDYDPEYYIDNQILPAIQRIFEAIGYTRDYLKEGITQTSLSRWF

SEQ ID NO: 1957 - protein, 792 aa, unidentified
  REGION 1..792: note = Description of Unknown: Synthetic polypeptide
MPRILKGFLIDADFETVEGRALIRLFLRGEEGSFVVYDDSFSPYFYALPGDEPERVKERILASGAAEAIQKVEIEEKRLFGTPRVALRITVSHPQDVPRIRERIRRVEGVDLILEHDILFVRRYLIDRGIKPLTWLRLEVEERDGRALLRGVEQLEEEPPELRVAAVAILVYNPKGAPRSSKDEIIMISVATSDGVEKVLTWREVQGLEQVEVLQDEKEMLLRFAELIKEGDYDVIVGYNTDSFDFPYIRDRLKKLGISLPLGRLDAELEVSRRGALPEARIRGRAHVDLYPIVRRHVKLNSYVLESVVEELLGIKKEKLDGERLFTYWDEGGEKRALLARYALEDARVTLALAEKFLPLYIELSTIVGQSLNDVARMTSGQLVEWLLMRYATPRGELIPNHPAGEEYAARARATYAGGYVREPKRGLVEHIAVFDFRSFGPSIIVSHNIDPSTLIVGNCEENRAPELEYCFSLEREGFIPAILKELIRRRAEIKRELKRSEGDRRRTLSFAEKALKILANSFYGYMGYPRARWYRRECAESVAAFARMYIKQVMRIAEEEFKLEVVYGDTDSLFVVIPPEKRELAQKFLQKVNESMPGIIELEFEGFYRRGLFVTKKRYALLSEDGKMVVKGLEFVRRDWAPIARETQKEVLRILLEEADPEKAARLVRDVIERIRQRRVSLEDITIYTQLTKRIKSYKSLEPHVVAAQKLKERGREVAPGMIIGYIITKGTKGISQRATPVEFARLEDYDPEYYIDNQILPAIQRIFEAIGYTRDYLKEGITQTSLSRWF

SEQ ID NO: 1958 - protein, 792 aa, unidentified
  REGION 1..792: note = Description of Unknown: Synthetic polypeptide
MPRILKGFLIDADFETVEGRALIRLFLRGEEGSFVVYDDSFSPYFYALPGDEPERVKERILASGAAEAIQKVEIEEKRLFGTPRVALRITVSHPQDVPRIRERIRRVEGVDLILEHDILFVRRYLIDRGIKPLTWLRLEVEERDGRALLRGVEQLEEEPPELRVAAVAIAVYNPKGAPRSSKDEIIMISVATSDGVEKVLTWREVQGLEQVEVLQDEKEMLLRFAELIKEGDYDVIVGYNTDSFDFPYIRDRLKKLGISLPLGRLDAELEVSRRGALPEARIRGRAHVDLYPIVRRHVKLNSYDLESVVEELLGIKKEKLDGERLFTYWDEGGEKRALLARYALEDARVTLALAEKFLPLYCELSTIVGQSLNDVARMTSGQLVEWLLMRYATPRGELIPNHPAGEEYAARARATYAGGYVREPKRGLVEHIAVFDFRSFGPSIIVSHNIDPSTLIVGNCEENRAPELEYCFSLEREGFIPAILKELIRRRAEIKRELKRSEGDRRRTLSFAEKALKILANSFYGYMGYPRARWYRRECAESVAAFARMYIKQVMRIAEEEFKLEVVYGDTDSLFVVIPPEKRELAQKFLQKVNESMPGIIELEFEGFYRRGLFVTKKRYALLSEDGKMVVKGLEFVRRDWAPIARETQKEVLRILLEEADPEKAARLVRDVIERIRQRRVSLEDITIYTQLTKRIKSYKSLEPHVVAAQKLKEEGREVAPGMIIGYIITKGTKGISQRATPVEFARLEDYDPEYYIDNQILPAIQRIFEAIGYTRDYLKEGITQTSLSRWF

SEQ ID NO: 1959 - protein, 792 aa, unidentified
  REGION 1..792: note = Description of Unknown: Synthetic polypeptide
MPRILKGFLIDADFETVEGRALIRLFLRGEEGSFVVYDDSFSPYFYALPGDEPERVKERILASGAAEAIQKVEIEEKRLFGTPRVALRITVSHPQDVPRIRERIRRVEGVDLILEHDILFVRRYLIDRGIKPLTWLRLEVEERDGRALLRGVEQLEEEPPELRVAAVAIAVYNPKGAPRSSKDEIIMISVATSDGVEKVLTWREVQGLEQVEVLQDEKEMLLRFAELIKEGDYDVIVGYNTDSFDFPYIRDRLKDLGISLPLGRLDAELEVSRRGALPEARIRGRAHVDLYPIVRRHVKLNSYVLESVVEELLGIKKEKLDGERLFTYWDEGGEKRALLARYALEDARVTLALAEKFLPLYCELSTIVGQSLNDVARMTSGQLVEWLLMRYATPRGELIPNHPAGEEYAARARATYAGGYVREPKRGLVEHIAVFDFRSFGPSIIVSHNIDPSTLIVGNCEENRAPELEYCFSLEREGFIPAILKELIRRRAEIKRELKRSEGDRRRTLSFAEKALKILANSFYGYMGYPRARWYRRECAESVAAFARMYIKQVMRIAEEEFKLEVVYGDTDSLFVVIPPEKRELAQKFLQKVNESMPGIIELEFEGFYRRGLFVTKKRYALLSEDGKMVVKGLEFVRRDWAPIARETQKEVLRILLEEADPEKAARLVRDVIERIRQRRVSLEDITIYTQLTKRIKSYKSLEPHVVAAQKLKERGREVAPGMIIGYIITKGTKGISQRATPVEFARLEDYDPEYYIDNQILPAIQRIFEAIGYTRDYLKEGITQTSLSRWF

SEQ ID NO: 1960 - protein, 792 aa, unidentified; identical to SEQ ID NO: 1843
  REGION 1..792: note = Description of Unknown: Synthetic polypeptide

SEQ ID NO: 1961 - protein, 792 aa, unidentified
  REGION 1..792: note = Description of Unknown: Synthetic polypeptide
MPRILKGFLIDADFETVEGRALIRLFLRGEEGSFVVYDDSFSPYFYALPGDEPERVKERILASGAAEAIQKVEIEEKRLFGTPRVALRITVSHPQDVPRIRERIRRVEGVDLILEHDILFVRRYLIDRGIKPLTWLRLEVEERDGRALLRGVEQLEEEPPELRVAAVAIAVYNPKGAPRSSKDEIIMISVATSDGVEKVLTWREVQGLEQVEVLQDEKEMLLRFAELIKEGDYDVIVGYNTDSFDFPYIRDRLKKLGISLPLGRLDAELEVSRRGALPEARIRGRAHVDLYPIVRRHVKLNSYVLESVVEELLGIKKEKLDGERLFTYWDEGGEKRALLARYALEDARVTLALAEKFLPLYCELSTIVGQSLNDVARMTSGQLVEWLLMRYATPRGELIPNHPAGWEYAARARATYAGGYVREPKRGLVEHIAVFDFRSFGPSIIVSHNIDPSTLIVGNCEENRAPELEYCFSLEREGFIPAILKELIRRRAEIKRELKRSEGDRRRTLSFAEKALKILANSFYGYMGYPRARWYRRECAESVAAFARMYIKQVMRIAEEEFKLEVVYGDTDSLFVVIPPEKRELAQKFLQKVNESMPGIIELEFEGFYRRGLFVTKKRYALLSEDGKMVVKGLEFVRRDWAPIARETQKEVLRILLEEADPEKAARLVRDVIERIRQRRVSLEDITIYTQLTKRIKSYKSLEPHVVAAQKLKERGREVAPGMIIGYIITKGTKGISQRATPVEFARLEDYDPEYYIDNQILPAIQRIFEAIGYTRDYLKEGITQTSLSRWF

SEQ ID NO: 1962 - protein, 792 aa, unidentified
  REGION 1..792: note = Description of Unknown: Synthetic polypeptide
MPRILKGFLIDADFETVEGRALIRLFLRGEEGSFVVYDDSFSPYFYALPGDEPERVKERILASGAAEAIQKVEIEEKRLFGTPRVALRITVSHPQDVPRIRERIRRVEGVDLILEHDILFVRRYLIDRGIKPLTWLRLEVEERDGRALLRGVEQLEEEPPELRVAAVAIAVYNPKGAPRSSKDEIIMISVATSDGVEKVLTWREVQGLEQVEVLQDEKEMLLRFAELIKEGDYDVIVGYNTDSFDFPYIRDRLKKLGISLPLGRLDAELEVSRRGALPEARIRGRAHVDLYPIVRRHVKLNSYVLESVVEELLGIKKEKLDGERLFTYWDEGGEKRALLARYALEDARVTLALAEKFLPLYCELSTIVGQSLNDVARMTSGQLVEWLLMRYATPRGELIPNHPAGEEYAARARATYAGGYVREPKRGLVEHIAVFDFRSFGPSIIVSHNIDPSTLIVGNCEENRAPELEYCFSLEREGFIPAILKELIRRRAEIKRELKRSEGDRRRTLSFAEKALKILANSFYGYAGYPRARWYRRECAESVAAFARMYIKQVMRIAEEEFKLEVVYGDTDSLFVVIPPEKRELAQKFLQKVNESMPGIIELEFEGFYRRGLFVTKKRYALLSEDGKMVVKGLEFVRRDWAPIARETQKEVLRILLEEADPEKAARLVRDVIERIRQRRVSLEDITIYTQLTKRIKSYKSLEPHVVAAQKLKERGREVAPGMIIGYIITKGTKGISQRATPVEFARLEDYDPEYYIDNQILPAIQRIFEAIGYTRDYLKEGITQTSLSRWF

SEQ ID NO: 1963 - protein, 792 aa, unidentified
  REGION 1..792: note = Description of Unknown: Synthetic polypeptide
MPRILKGFLIDADFETVEGRALIRLFLRGEEGSFVVYDDSFSPYFYALPGDEPERVKERILASGAAEAIQKVEIEEKRLFGTPRVALRITVSHPQDVPRIRERIRRVEGVDLILEHDILFVRRYLIDRGIKPLTWLRLEVEERDGRALLRGVEQLEEEPPELRVAAVAIAVYNPKGAPRSSKDEIIMISVATSDGVEKVLTWREVQGLEQVEVLQDEKEMLLRFAELIKEGDYDVIVGYNTDSFDFPYIRDRLKKLGISLPLGRLDAELEVSRRGALPEARIRGRAHVDLYPIVRRHVKLNSYDLESVVEELLGIKKEKLDGERLFTYWDEGGEKRALLARYALEDARVTLALAEKFLPLYCELSTIVGQSLNDVARMTSGQLVEWLLMRYATPRGELIPNHPAGEEYAARARATYAGGYVREPKRGLVEHIAVFDFRSFGPSIIVSHNIDPSTLIVGNCEENRAPELEYCFSLEREGFIPAILKELIRRRAEIKRELKRSEGDRRRTLSFAEKALKILANSFYGYAGYPRARWYRRECAESVAAFARMYIKQVMRIAEEEFKLEVVYGDTDSLFVVIPPEKRELAQKFLQKVNESMPGIIELEFEGFYRRGLFVTKKRYALLSEDGKMVVKGLEFVRRDWAPIARETQKEVLRILLEEADPEKAARLVRDVIERIRQRRVSLEDITIYTQLTKRIKSYKSLEPHVVAAQKLKERGREVAPGMIIGYIITKGTKGISQRATPVEFARLEDYDPEYYIDNQILPAIQRIFEAIGYTRDYLKEGITQTSLSRWF

SEQ ID NO: 1964 - protein, 790 aa, unidentified
  REGION 1..790: note = Description of Unknown: Synthetic polypeptide
MPRILKGFLIDADFETVEGRALIRLFLRGEEGSFVVYDDSFSPYFYALPGDEPERVKERILASGAAEAIQKVEIEEKRLFGTPRVALRITVSHPQDVPRIRERIRRVEGVDLILEHDILFVRRYLIDRGIKPLTWLRLEVEERDGRALLRGVEQLEEEPPELRVAAVAIAVYNPKGAPRSSKDEIIMISVATSDGVEKVLTWREVQGLEQVEVLQDEKEMLLRFAELIKEGDYDVIVGYNTDSFDFPYIRDRLKKLGISLPLGRLDAELEVSRRGALPEARIRGRAHVDLYPIVRRHVKLNSYDLESVVEELLGIKKEKLDGERLFTYWDEGGEKRALLARYALEDARVTLALAEKFLPLYCELSTIVGQSLNDVARMTSGQLVEWLLMRYATPRGELIPNHPAGEEYAARARATYAGGYVREPKRGLVEHIAVFDFRSFGPSIIVSHNIDPSTLIVGNCEENRAPELEYCFSLEREGFIPAILKELIRRRAEIKRELKRSEGDRRRTLSFAEKALKILANSFYGYMGYPRARWYRRECAESVAAFARMYIKQVMRIAEEEFKLEVVYGDTDSLFVVIPPEKRELAQKFLQKVNESMPGIIELEFEGFYRRGLFVTKKRYALLSEDGKMVVKGLEFVRRDWAPIARETQKEVLRILLEEADPEKAARLVRDVIERIRQRRVSLEDITIYTQLTKRIKSYKSLEPHVVAAQKLKERGREVAPGMIIGYIITKGTKGISQRATPVEFARLEDYDPEYYIDNQILPAIQRIFEAIGYTRDYLKEGITQTSLSR

SEQ ID NO: 1965 - protein, 792 aa, unidentified
  REGION 1..792: note = Description of Unknown: Synthetic polypeptide
MPRILKGFLIDADFETVEGRALIRLFLRGEEGSFVVYDDSFSPYFYALPGDEPERVKERILASGAAEAIQKVEIEEKRLFGTPRVALRITVSHPQDVPRIRERIRRVEGVDLILEHDILFVRRYLIDRGIKPLTWLRLEVEERDGRALLRGVEQLEEEPPELRVAAVAILVYNPKGAPRSSKDEIIMISVATSDGVEKVLTWREVQGLEQVEVLQDEKEMLLRFAELIKEGDYDVIVGYNTDSFDFPYIRDRLKKLGISLPLGRLDAELEVSRRGALPEARIRGRAHVDLYPIVRRHVKLNSYVLESVVEELLGIKKEKLDGERLFTYWDEGGEKRALLARYALEDARVTLALAEKFLPLYAELSTIVGQSLNDVARMTSGQLVEWLLMRYATPRGELIPNHPAGEEYAARARATYAGGYVREPKRGLVEHIAVFDFRSFGPSIIVSHNIDPSTLIVGNCEENRAPELEYCFSLEREGFIPAILKELIRRRAEIKRELKRSEGDRRRTLSFAEKALKILANSFYGYMGYPRARWYRREVAESVAAFARMYIKQVMRIAEEEFKLEVVYGDTDSLFVVIPPEKRELAQKFLQKVNESMPGIIELEFEGFYRRGLFVTKKRYALLSEDGKMVVKGLEFVRRDWAPIARETQKEVLRILLEEADPEKAARLVRDVIERIRQRRVSLEDITIYTQLTKRIKSYKSLEPHVVAAQKLKERGREVAPGMIIGYIITKGTKGISQRATPVEFARLEDYDPEYYIDNQILPAIQRIFEAIGYTRDYLKEGITQTSLSRWF

SEQ ID NO: 1966 - protein, 792 aa, unidentified; identical to SEQ ID NO: 1745
  REGION 1..792: note = Description of Unknown: Synthetic polypeptide

SEQ ID NO: 1967 - protein, 792 aa, unidentified
  REGION 1..792: note = Description of Unknown: Synthetic polypeptide
MPRILKGFLIDADFETVEGRALIRLFLRGEEGSFVVYDDSFSPYFYALPGDEPERVKERILASGAAEAIQKVEIEEKRLFGTPRVALRITVSHPQDVPRIRERIRRVEGVDLILEHDILFVRRYLIDRGIKPLTWLRLEVEERDGRALLRGVEQLEEEPPELRVAAVAIAVYNPKGAPRSSKDEIIMISVATSDGVEKVLTWREVQGLEQVEVLQDEKEMLLRFAELIKEGDYDVIVGYNTDSFDFPYIRDRLKKLGISLPLGRLDAELEVSRRGALPEARIRGRAHVDLYPIVRRHVKLNSYVLESVVEELLGIKKEKLDGERLFTYWDEGGEKRALLARYALEDARVTLALAEKFLPLYCELSTIVGQSLNDVARMTSGQLVEWLLMRYATPRGELIPNHPAGEEYAARARATYAGGYVREPKRGLVEHIAVFDFRSFGPSIIVSHNIDPSTLIVGNCEENRAPELEYCFSLEREGFIPAILKELIRRRAEIKRELKRSEGDRRRTLSFAEKALKILANSFYGYMGYPRARWYRRECAESVAAFARMYIKQVMRIAEEEFKLEVVYGDTDSLFVVIPPEKRELAQKFLQKVNESMPGIIELEFEGFYRRGLFVTKKRYALLSEDGKMVVKGLEFVRRDWAPIARETQKEVLRILLEEADPEKAARLVRDVIERIRQRRVSLEDITIYTQLTKRIKSYKSLEPHVVAAQKLKERGREVAPGMIIGYIITKGTKGISQRATPVEFARLRDYDPEYYIDNQILPAIQRIFEAIGYTRDYLKEGITQTSLSRWF

SEQ ID NO: 1968 - protein, 790 aa, unidentified
  REGION 1..790: note = Description of Unknown: Synthetic polypeptide
MPRILKGFLIDADFETVEGRALIRLFLRGEEGSFVVYDDSFSPYFYALPGDEPERVKERILASGAAEAIQKVEIEEKRLFGTPRVALRITVSHPQDVPRIRERIRRVEGVDLILEHDILFVRRYLIDRGIKPLTWLRLEVEERDGRALLRGVEQLEEEPPELRVAAVAIAVYNPKGAPRSSKDEIIMISVATSDGVEKVLTWREVQGLEQVEVLQDEKEMLLRFAELIKEGDYDVIVGYNTDSFDFPYIRDRLKKLGISLPLGRLDAELEVSRRGALPEARIRGRAHVDLYPIVRRHVKLNSYDLESVVEELLGIKKEKLDGERLFTYWDEGGEKRALLARYALEDARVTLALAEKFLPLYCELSTIVGQSLNDVARMTSGQLVEWLLMRYATPRGELAPNHPAGEEYAARARATYAGGYVREPKRGLVEHIAVFDFRSFGPSIIVSHNIDPSTLIVGNCEENRAPELEYCFSLEREGFIPAILKELIRRRAEIKRELKRSEGDRRRTLSFAEKALKILANSFYGYMGYPRARWYRRECAESVAAFARMYIKQVMRIAEEEFKLEVVYGDTDSLFVVIPPEKRELAQKFLQKVNESMPGIIELEFEGFYRRGLFVTKKRYALLSEDGKMVVKGLEFVRRDWAPIARETQKEVLRILLEEADPEKAARLVRDVIERIRQRRVSLEDITIYTQLTKRIKSYKSLEPHVVAAQKLKERGREVAPGMIIGYIITKGTKGISQRATPVEFARLEDYDPEYYIDNQILPAIQRIFEAIGYTRDYLKEGITQTSLSR

SEQ ID NO: 1969 - protein, 792 aa, unidentified
  REGION 1..792: note = Description of Unknown: Synthetic polypeptide
MPRILKGFLIDADFETVEGRALIRLFLRGEEGSFVVYDDSFSPYFYALPGDEPERVKERILASGAAEAIQKVEIEEKRLFGTPRVALRITVSHPQDVPRIRERIRRVEGVDLILEHDILFVRRYLIDRGIKPLTWLRLEVEERDGRALLRGVEQLEEEPPELRVAAVAIAVYNPKGAPRSSKDEIIMISVATSDGVEKVLTWREVQGLEQVEVLQDEKEMLLRFAELIKEGDYDVIVGYNTDSFDFPYIRDRLKKLGISLPLGRLDAELEVSRRGALPEARIRGRAHVDLYPIVRRHVKLNSYVLESVVEELLGIKKEKLDGERLFTYWDEGGEKRALLARYALEDARVTLALAEKFLPLYCELSTIVGQSLNDVARMTSGQLVEWLLMRYATPRGELIPNHPAGEEYAARARATYAGGYVREPKRGLVEHIAVFDFRSFGPSIIVSHNIDPSTLIVGNCEENRAPELEYCFSLEDEGFIPAILKELIRRRAEIKRELKRSEGDRRRTLSFAEKALKILANSFYGYMGYPRARWYRRECAESVAAFARMYIKQVMRIAEEEFKLEVVYGDTDSLFVVIPPEKRELAQKFLQKVNESMPGIIELEFEGFYRRGLFVTKKRYALLSEDGKMVVKGLEFVRRDWAPIARETQKEVLRILLEEADPEKAARLVRDVIERIRQRRVSLEDITIYTQLTKRIKSYKSLEPHVVAAQKLKERGREVAPGMIIGYIITKGTKGISQRATPVEFARLEDYDPEYYIDNQILPAIQRIFEAIGYTRDYLKEGITQTSLSRWF

SEQ ID NO: 1970 - protein, 792 aa, unidentified
  REGION 1..792: note = Description of Unknown: Synthetic polypeptide
MPRILKGFLIDADFETVEGRALIRLFLRGEEGSFVVYDDSFSPYFYALPGDEPERVKERILASGAAEAIQKVEIEEKRLFGTPRVALRITVSHPQDVPRIRERIRRVEGVDLILEHDILFVRRYLIDRGIKPLTWLRLEVEERDGRALLRGVEQLEEEPPELRVAAVAIAVYNPKGAPRSSKDEIIMISVATSDGVEKVLTWREVQGLEQVEVLQDEKEMLLRFAELIKEGDYDVIVGYNTDSFDFPYIRDRLKKLGISLPLGRLDAELEVSRRGALPEARIRGRAHVDLYPIVRRHVKLNSYVLESVVEELLGIKKEKLDGERLFTYWDEGGEKRALLARYALEDARVTLALAEKFLPLYCELSTIVGQSLNDVARMTSGQLVEWLLMRYATPRGELIPNHPAGEEYAARARATYAGGYVREPKRGLVEHIAVFDFRSFGPSIIVSHNIDPDTLIVGNCEENRAPELEYCFSLEREGFIPAILKELIRRRAEIKRELKRSEGDRRRTLSFAEKALKILANSFYGYMGYPRARWYRRECAESVAAFARMYIKQVMRIAEEEFKLEVVYGDTDSLFVVIPPEKRELAQKFLQKVNESMPGIIELEFEGFYRRGLFVTKKRYALLSEDGKMVVKGLEFVRRDWAPIARETQKEVLRILLEEADPEKAARLVRDVIERIRQRRVSLEDITIYTQLTKRIKSYKSLEPHVVAAQKLKERGREVAPGMIIGYIITKGTKGISQRATPVEFARLEDYDPEYYIDNQILPAIQRIFEAIGYTRDYLKEGITQTSLSRWF

SEQ ID NO: 1971 - protein, 789 aa, unidentified
  REGION 1..789: note = Description of Unknown: Synthetic polypeptide
MPRILKGFLIDADFETVEGRALIRLFLRGEEGSFVVYDDSFSPYFYALPGDEPERVKERILASGAAEAIQKVEIEEKRLFGTPRVALRITVSHPQDVPRIRERIRRVEGVDLILEHDILFVRRYLIDRGIKPLTWLRLEVEERDGRALLRGVEQLEEEPPELRVAAVAIAVYNPKGAPRSSKDEIIMISVATSDGVEKVLTWREVQGLEQVEVLQDEKEMLLRFAELIKEGDYDVIVGYNTDSFDFPYIRDRLKKLGISLPLGRLDAELEVSRRGALPEARIRGRAHVDLYPIVRRHVKLNSYDLESVVEELLGIKKEKLDGERLFTYWDEGGEKRALLARYALEDARVTLALAEKFLPLYCELSTIVGQSLNDVARMTSGQLVEWLLMRYATPRGELIPNHPAGEEYAARARATYAGGYVREPKRGLVEHIAVFDFRSFGPSIIVSHNIDPSRLIVGNCEENRAPELEYCFSLEREGFIPAILKELIRRRAEIKRELKRSEGDRRRTLSFAEKALKILANSFYGYMGYPRARWYRRECAESVAAFARMYIKQVMRIAEEEFKLEVVYGDTDSLFVVIPPEKRELAQKFLQKVNESMPGIIELEFEGFYRRGLFVTKKRYALLSEDGKMVVKGLEFVRRDWAPIARETQKEVLRILLEEADPEKAARLVRDVIERIRQRRVSLEDITIYTQLTKRIKSYKSLEPHVVAAQKLKERGREVAPGMIIGYIITKGTKGISQRATPVEFARLEDYDPEYYIDNQILPAIQRIFEAIGYTRDYLKEGITQTSLS

SEQ ID NO: 1972 - protein, 792 aa, unidentified
  REGION 1..792: note = Description of Unknown: Synthetic polypeptide
MPRILKGFLIDAEFETVEGRALIRLFLRGEEGSFVVYDDSFSPYFYALPGDEPERVKERILASGAAEAIQKVEIEEKRLFGTPRVALRITVSHPQDVPRIRERIRRVEGVDLILEHDILFVRRYLIDRGIKPLTWLRLEVEERDGRALLRGVEQLEEEPPELRVAAVAIAVYNPKGAPRSSKDEIIMISVATSDGVEKVLTWREVQGLEQVEVLQDEKEMLLRFAELIKEGDYDVIVGYNTDSFDFPYIRDRLKKLGISLPLGRLDAELEVSRRGALPEARIRGRAHVDLYPIVRRHVKLNSYVLESVVEELLGIKKEKLDGERLFTYWDEGGEKRALLARYALEDARVTLALAEKFLPLYCELSTIVGQSLNDVARMTSGQLVEWLLMRYATPRGELIPNHPAGEEYAARARATYAGGYVREPKRGLVEHIAVFDFRSFGPSIIVSHNIDPSTLIVGNCEENRAPELEYCFSLEREGFIPAILKELIRRRAEIKRELKRSEGDRRRTLSFAEKALKILANSFYGYMGYPRARWYRRECAESVAAFARMYIKQVMRIAEEEFKLEVVYGDTDSLFVVIPPEKRELAQKFLQKVNESMPGIIELEFEGFYRRGLFVTKKRYALLSEDGKMVVKGLEFVRRDWAPIARETQKEVLRILLEEADPEKAARLVRDVIERIRQRRVSLEDITIYTQLTKRIKSYKSLEPHVVAAQKLKERGREVAPGMIIGYIITKGTKGISQRATPVEFARLEDYDPEYYIDNQILPAIQRIFEAIGYTRDYLKEGITQTSLSRWF

SEQ ID NO: 1973 - protein, 792 aa, unidentified
  REGION 1..792: note = Description of Unknown: Synthetic polypeptide
MPRILKGFLIDADFETVEGRALIRLFLRGEEGSFVVYDDSFSPYFYALPGDEPERVKERILASGAAEAIQKVEIEEKRLFGTPRVALRITVSHPQDVPRIRERIRRVEGVDLILEHDILFVRRYLIDRGIKPLTWLRLEVEERDGRALLRGVEQLEEEPPELRVAAVAIAVYNPKGAPRSSKDEIIMISVATSDGVEKVLTWREVQGLEQVEVLQDEKEMLLRFAELIKEGDYDVIVGYNTDSFDFPYIRDRLKKLGISLPLGRLDAELEVSRRGALPEARIRGRAHVDLYPIVRRHVKLNSYDLESVVEELLGIKKEKLDGERLFTYWDEGGEKRALLARYALEDARVTLALAEKFLPLYCELSTIVGQSLNDVARMTSGQLVEWLLMRYATPRGELIPNHPAGEEYAARARATYAGGYVREPKRGLVEHIAVFDFRSFGPSIIVSHNIDPSTLIVGNCEENRAPELEYCFSLEREGFIPAILKELIRRRAEIKRELKRSEGDRRRTLSFAEKALKILANSFYGYMGYPRARWYRRECAESVAAFARMYIKQVMRIAEEEFKLEVVYGDTDSLFVVIPPEKRELAQKFLQKVNESMPGIIELEFEGFYRRGLFVTKKRYALLSEDGKMVVKGLEFVRRDWAPIARETQKEVLRILLEEADPEKAARLVRDVIERIRQRRVSLEDITIYTQLTKRIKSYKSLEPHVVAAQRLKERGREVAPGMIIGYIITKGTKGISQRATPVEFARLEDYDPEYYIDNQILPAIQRIFEAIGYTRDYLKEGITQTSLSRWF

SEQ ID NO: 1974 - protein, 792 aa, unidentified
  REGION 1..792: note = Description of Unknown: Synthetic polypeptide
MPRILKGFLIDADFETVEGRALIRLFLRGEEGSFVVYDDSFSPYFYALPGDEPERVKERILASGAAEAIQKVEIEEKRLFGTPRVALRITVSHPQDVPRIRERIRRVEGVDLILEHDILFVRRYLIDRGIKPLTWLRLEVEERDGRALLRGVEQLEEEPPELRVAAVAIAVYNPKGAPRSSKDEIIMISVATSDGVEKVLTWREVQGLEQVEVLQDEKEMLLRFAELIKEGDYDVIVGYNTDSFDFPYIRDRLKKLGISLPLGRLDAELEVSRRGALPEARIRGRAHVDLYPIVRRHVKLNSYVLESVVEELLGIKKEKLDGERLFTYWDEGGEKRALLARYALEDARVTLALAEKFLPLYCELSTIVGQSLNDVARMTSGQLVEWLLMRYATPRGELIPNHPAGEEYAARARATYAGGYVREPKRGLVEHIAVFDFRSFGPSIIVSHNIDPSTLIVGNCEENRAPELEYCFSLEREGFIPAILKELIRRRAEIKRELKRSEGDRRRTLSFAEKALKILANSFYGYMGYPRARWYRRECAESVAAFARMYIKQVMRIAEEEFKLEVVYGDTDSLFVVIPPEKRELAQKFLQKVNESMPGIIELEFEGFYRRGLFVTKKRYALLSEDGKMVVKGLEFVRRDLAPIARETQKEVLRILLEEADPEKAARLVRDVIERIRQRRVSLEDITIYTQLTKRIKSYKSLEPHVVAAQKLKERGREVAPGMIIGYIITKGTKGISQRATPVEFARLEDYDPEYYIDNQILPAIQRIFEAIGYTRDYLKEGITQTSLSRWF

SEQ ID NO: 1975 - protein, 789 aa, unidentified
  REGION 1..789: note = Description of Unknown: Synthetic polypeptide
MPRILKGFLIDADFETVEGRALIRLFLRGEEGSFVVYDDSFSPYFYALPGDEPERVKERILASGAAEAIQKVEIEEKRLFGTPRVALRITVSHPQDVPRIRERIRRVEGVDLILEHDILFVRRYLIDRGIKPLTWLRLEVEERDGRALLRGVEQLEEEPPELRVAAVAIAVYNPKGAPRSSKDEIIMISVATSDGVEKVLTWREVQGLEQVEVLQDEKEMLLRFAELIKEGDYDVIVGYNTDSFDFPYIRDRLKKLGISLPLGRLDAELEVSRRGALPEARIRGRAHVDLYPIVRRHVKLNSYDLESVVEELLGIKKEKLDGERLFTYWDEGGEKRALLARYALEDARVTLALAEKFLPLYLELSTIVGQSLNDVARMTSGQLVEWLLMRYATPRGELIPNLPAGEEYAARARATYAGGYVREPKRGLVEHIAVFDFRSFGPSIIVSHNIDPSTLIVGNCEENRAPELEYCFSLEREGFIPAILKELIRRRAEIKRELKRSEGDRRRTLSFAEKALKILANSFYGYMGYPRARWYRRECAESVAAFARMYIKQVMRIAEEEFKLEVVYGDTDSLFVVIPPEKRELAQKFLQKVNESMPGIIELEFEGFYRRGLFVTKKRYALLSEDGKMVVKGLEFVRRDWAPIARETQKEVLRILLEEADPEKAARLVRDVIERIRQRRVSLEDITIYTQLTKRIKSYKSLEPHVVAAQKLKERGREVAPGMIIGYIITKGTKGISQRATPVEFARLEDYDPEYYIDNQILPAIQRIFEAIGYTRDYLKEGITQTSLS

SEQ ID NO: 1976 - protein, 792 aa, unidentified
  REGION 1..792: note = Description of Unknown: Synthetic polypeptide
MPRILKGFLIDADFETVEGRALIRLFLRGEEGSFVVYDDSFSPYFYALPGDEPERVKERILASGAAEAIQKVEIEEKRLFGTPRVALRITVSHPQDVPRIRERIRRVEGVDLILEHDILFVRRYLIDRGIKPLTFLRLEVEERDGRALLRGVEQLEEEPPELRVAAVAIAVYNPKGAPRSSKDEIIMISVATSDGVEKVLTWREVQGLEQVEVLQDEKEMLLRFAELIKEGDYDVIVGYNTDSFDFPYIRDRLKKLGISLPLGRLDAELEVSRRGALPEARIRGRAHVDLYPIVRRHVKLNSYDLESVVEELLGIKKEKLDGERLFTYWDEGGEKRALLARYALEDARVTLALAEKFLPLYCELSTIVGQSLNDVARMTSGQLVEWLLMRYATPRGELIPNHPAGEEYAARARATYAGGYVREPKRGLVEHIAVFDFRSFGPSIIVSHNIDPSTLIVGNCEENRAPELEYCFSLEREGFIPAILKELIRRRAEIKRELKRSEGDRRRTLSFAEKALKILANSFYGYMGYPRARWYRRECAESVAAFARMYIKQVMRIAEEEFKLEVVYGDTDSLFVVIPPEKRELAQKFLQKVNESMPGIIELEFEGFYRRGLFVTKKRYALLSEDGKMVVKGLEFVRRDWAPIARETQKEVLRILLEEADPEKAARLVRDVIERIRQRRVSLEDITIYTQLTKRIKSYKSLEPHVVAAQKLKERGREVAPGMIIGYIITKGTKGISQRATPVEFARLEDYDPEYYIDNQILPAIQRIFEAIGYTRDYLKEGITQTSLSRWF

SEQ ID NO: 1977 - protein, 792 aa, unidentified
  REGION 1..792: note = Description of Unknown: Synthetic polypeptide
MPRILKGFLIDADFETVEGRALIRLFLRGEEGSFVVYDDSFSPYFYALPGDEPERVKERILASGAAEAIQKVEIEEKRLFGTPRVALRITVSHPQDVPRIRERIRRVEGVDLILEHDILFVRRYLIDRGIKPLTWLRLEVEERDGRALLRGVEQLEEEPPELRVAAVAIAVYNPKGAPRSSKDEIRMISVATSDGVEKVLTWREVQGLEQVEVLQDEKEMLLRFAELIKEGDYDVIVGYNTDSFDFPYIRDRLKKLGISLPLGRLDAELEVSRRGALPEARIRGRAHVDLYPIVRRHVKLNNYVLESVVEELLGIKKEKLDGERLFTYWDEGGEKRALLARYALEDARVTLALAEKFLPLYCELSTIVGQSLNDVARMTSGQLVEWLLMRYATPRGELIPNHPAGEEYAARARATYAGGYVREPKRGLVEHIAVFDFRSFGPSIIVSHNIDPSTLIVGNCEENRAPELEYCFSLEREGFIPAILKELIRRRAEIKRELKRSEGDRRRTLSFAEKALKILANSFYGYMGYPRARWYRRECAESVAAFARMYIKQVMRIAEEEFKLEVVYGDTDSLFVVIPPEKRELAQKFLQKVNESMPGIIELEFEGFYRRGLFVTKKRYALLSEDGKMVVKGLEFVRRDWAPIARETQKEVLRILLEEADPEKAARLVRDVIERIRQRRVSLEDITIYTQLTKRIKSYKSLEPHVVAAQKLKERGREVAPGMIIGYIITKGTKGISQRATPVEFARLEDYDPEYYIDNQILPAIQRIFEAIGYTRDYLKEGITQTSLSRWF

SEQ ID NO: 1978 - protein, 792 aa, unidentified
  REGION 1..792: note = Description of Unknown: Synthetic polypeptide
MPRILKGFLIDADFETVEGRALIRLFLRGEEGSFVVYDDSFSPYFYALPGDEPERVKERILASGAAEAIQKVEIEEKRLFGTPRVALRITVSHPQDVPRIRERIRRVEGVDLILEHDILFVRRRLIDRGIKPLTWLRLEVEERDGRALLRGVEQLEEEPPELRVAAVAIAVYNPKGAPRSSKDEIIMISVATSDGVEKVLTWREVQGLEQVEVLQDEKEMLLRFAELIKEGDYDVIVGYNTDSFDFPYIRDRLKKLGISLPLGRLDAELEVSRRGALPEARIRGRAHVDLYPIVRRHVKLNSYDLESVVEELLGIKKEKLDGERLFTYWDEGGEKRALLARYALEDARVTLALAEKFLPLYCELSTIVGQSLNDVARMTSGQLVEWLLMRYATPRGELIPNHPAGEEYAARARATYAGGYVREPKRGLVEHIAVFDFRSFGPSIIVSHNIDPSTLIVGNCEENRAPELEYCFSLEREGFIPAILKELIRRRAEIKRELKRSEGDRRRTLSFAEKALKILANSFYGYMGYPRARWYRRECAESVAAFARMYIKQVMRIAEEEFKLEVVYGDTDSLFVVIPPEKRELAQKFLQKVNESMPGIIELEFEGFYRRGLFVTKKRYALLSEDGKMVVKGLEFVRRDWAPIARETQKEVLRILLEEADPEKAARLVRDVIERIRQRRVSLEDITIYTQLTKRIKSYKSLEPHVVAAQKLKERGREVAPGMIIGYIITKGTKGISQRATPVEFARLEDYDPEYYIDNQILPAIQRIFEAIGYTRDYLKEGITQTSLSRWF

SEQ ID NO: 1979 - protein, 792 aa, unidentified
  REGION 1..792: note = Description of Unknown: Synthetic polypeptide
MPRILKGFLIDADFETVEGRALIRLFLRGEEGSFVVYDDSFSPYFYALPGDEPERVKERILASGAAEAIQKVEIEEKRLFGTPRVALRITVSHPQDVPRIRERIRRVEGVDLILEHDILFVRRYLIDRGIKPLTWLRLEVEERDGRALLRGVEQLEEEPPELRVAAVAIAVYNPKGAPRSSKDEIIMISVATSDGVEKVLTWREVQGLEQVEVLQDEKEMLLRFAELIKEGDYDVIVGYNTDSFDFPYIRDRLKKLGISLPLGRLDAELEVSRRGALPEARIRGRAHVDLYPIVRRHVKLNSYDLESVVEELLGIKKEKLDGERLFTYWDEGGEKRALLARYALEDARVTLALAEKFLPLYCELSTIVGQSLNDVARMTSGQLVEWLLMRYATPRGELIPNHPAGEEYAARARATYAGGYVREPKRGLVEHIAVFDFRSFGPSIIVSHNIDPSTLIVGNCEENRAPELEYCFSLEREGFIPAILKELIRRRAEIKRELKRSEGDRRRTLSFAEKALKILADSFYGYMGYPRARWYRRECAESVAAFARMYIKQVMRIAEEEFKLEVVYGDTDSLFVVIPPEKRELAQKFLQKVNESMPGIIELEFEGFYRRGLFVTKKRYALLSEDGKMVVKGLEFVRRDWAPIARETQKEVLRILLEEADPEKAARLVRDVIERIRQRRVSLEDITIYTQLTKRIKSYKSLEPHVVAAQKLKERGREVAPGMIIGYIITKGTKGISQRATPVEFARLEDYDPEYYIDNQILPAIQRIFEAIGYTRDYLKEGITQTSLSRWF

SEQ ID NO: 1980 - protein, 792 aa, unidentified
  REGION 1..792: note = Description of Unknown: Synthetic polypeptide
MPRILKGFLIDADFETVEGRALIRLFLRGEEGSFVVYDDSFSPYFYALPGDEPERVKERILASGAAEAIQKVEIEEKRLFGTPRVALRITVSHPQDVPRIRERIRRVEGVDLILELDILFVRRYLIDRGIKPLTWLRLEVEERDGRALLRGVEQLEEEPPELRVAAVAIAVYNPKGAPRSSKDEIIMISVATSDGVEKVLTWREVQGLEQVEVLQDEKEMLLRFAELIKEGDYDVIVGYNTDSFDFPYIRDRLKKLGISLPLGRLDAELEVSRRGALPEARIRGRAHVDLYPIVRRHVKLNSYDLESVVEELLGIKKEKLDGERLFTYWDEGGEKRALLARYALEDARVTLALAEKFLPLYCELSTIVGQSLNDVARMTSGQLVEWLLMRYATPRGELIPNHPAGEEYAARARATYAGGYVREPKRGLVEHIAVFDFRSFGPSIIVSHNIDPSTLIVGNCEENRAPELEYCFSLEREGFIPAILKELIRRRAEIKRELKRSEGDRRRTLSFAEKALKILANSFYGYMGYPRARWYRRECAESVAAFARMYIKQVMRIAEEEFKLEVVYGDTDSLFVVIPPEKRELAQKFLQKVNESMPGIIELEFEGFYRRGLFVTKKRYALLSEDGKMVVKGLEFVRRDWAPIARETQKEVLRILLEEADPEKAARLVRDVIERIRQRRVSLEDITIYTQLTKRIKSYKSLEPHVVAAQKLKERGREVAPGMIIGYIITKGTKGISQRATPVEFARLEDYDPEYYIDNQILPAIQRIFEAIGYTRDYLKEGITQTSLSRWF

SEQ ID NO: 1981 - protein, 792 aa, unidentified
  REGION 1..792: note = Description of Unknown: Synthetic polypeptide
MPRILKGFLIDADFETVEGRALIRLFLRGEEGSFVVYDDSFSPYFYALPGDEPERVKERILASGAAEAIQKVEIEEKRLFGTPRVALRITVSHPQDVPRIRERIRRVEGVDLILEHDILFVRRYLIDRGIKPLTWLRLEVEERDGRALLRGVEQLEEEPPELRVAAVAIAVYNPKGAPRSSKDEIIMISVATSDGVEKVLTWREVQGLEQVEVLQDEKEMLLRFAELIKEGDYDVIVGYNTDSFDFPYIRDRLKKLGISLPLGRLDAELEVSRRGALPEARIRGRAHVDLYPIVRRHVKLNSYDLESVVEELLGIKKEKLDGERLFTYWDEGGEKRALLARYALEDARVTLALAEKFLPLYLELSTIVGQSLNDVARMTSGQLVEWLLMRYATPRGELIPNHPAGEEYAARARATYAGGYVREPKRGLVEHIAVFDFRSFGPSIIVSHNIDPSRLIVGNCEENRAPELEYCFSLEREGFIPAILKELIRRRAEIKRELKRSEGDRRRTLSFAEKALKILANSFYGYMGYPRARWYRRECAESVAAFARMYIKQVMRIAEEEFKLEVVYGDTDSLFVVIPPEKRELAQKFLQKVNESMPGIIELEFEGFYRRGLFVTKKRYALLSEDGKMVVKGLEFVRRDWAPIARETQKEVLRILLEEADPEKAARLVRDVIERIRQRRVSLEDITIYTQLTKRIKSYKSLEPHVVAAQKLKERGREVAPGMIIGYIITKGTKGISQRATPVEFARLEDYDPEYYIDNQILPAIQRIFEAIGYTRDYLKEGITQTSLSRDF

SEQ ID NO: 1982 - protein, 792 aa, unidentified
  REGION 1..792: note = Description of Unknown: Synthetic polypeptide
MPRILKGFLIDADFETVEGRALIRLFLRGEEGSFVVYDDSFSPYFYALPGDEPERVKERILASGAAEAIQKVEIEEKRLFGTPRVALRITVSHPQDVPRIRERIRRVEGVDLILEHDILFVRRYLIDRGIKPLTWLRLEVEERDGRALLRGVEQLEEEPPELRVAAVNINVYNPKGAPRSSKDEIIMISVATSDGVEKVLTWREVQGLEQVEVLQDEKEMLLRFAELIKEGDYDVIVGYNTDSFDFPYIRDRLKKLGISLPLGRLDAELEVSRRGALPEARIRGRAHVDLYPIVRRHVKLNSYVLESVVEELLGIKKEKLDGERLFTYWDEGGEKRALLARYALEDARVTLALAEKFLPLYVELSTIVGQSLNDVARMTSGQLVEWLLMRYATPRGELIPNHPAGEEYAARARATYAGGYVREPKRGLVEHIAVFDFRSFGPSIIVSHNIDPSTLIVGNCEENRAPELEYCFSLEREGFIPAILKELIRRRAEIKRELKRSEGDRRRTLSFAEKALKILANSFYGYMGYPRARWYRREVAESVAAFARMYIKQVMRIAEEEFKLEVVYGDTDSLFVVIPPEKRELAQKFLQKVNESMPGIIELEFEGFYRRGLFVTKKRYALLSEDGKMVVKGLEFVRRDWAPIARETQKEVLRILLEEADPEKAARLVRDVIERIRQRRVSLEDITIYTQLTKRIKSYKSLEPHVVAAQKLKERGREVAPGMIIGYIITKGTKGISQRATPVEFARLEDYDPEYYIDNQILPAIQRIFEAIGYTRDYLKEGITQTSLSRWF

SEQ ID NO: 1983 - protein, 792 aa, unidentified
  REGION 1..792: note = Description of Unknown: Synthetic polypeptide
MPRILKGFLIDADFETVEGRALIRLFLRGEEGSFVVYDDSFSPYFYALPGDEPERVKERILASGAAEAIQKVEIEEKRLFGTPRVALRITVSHPQDVPRIRERIRRVEGVDLILEHDILFVRRYLIDRGIKPLTWLRLEVEERDGRALLRGVEQLEEEPPELRVAAVAIAVYNPKGAPRSSKDEIIMISVATSDGVEKVLTWREVQGLEQVEVLQDEKEMLLRFAELIKEGDYDVIVGYNTDSFDFPYIRDRLKKLGISLPLGRLDAELEVSRRGALPEARIRGRAHVDLYPIVRRHVKLNSYVLESVVEELLGIKKEKLDGERLFTYWDEGGEKRALLARYALEDARVTLALAEKFLPLYLELSTIVGQSLNDVARMTSGQLVEWLLMRYATPRGELIPNHPAGEEYAARARATYAGGYVREPKRGLVEHIAVFDFRSFGPSIIVSHNIDPSTLIVGNCEENRAPELEYCFSLEREGFIPAILKELIRRRAEIKRELKRSEGDRRRTLSFAEKALKILANSFYGYMGYPRARWYRRECAESVAAFARMYIKQVMRIAEEEFKLEVVYGDTDSLFVVIPPEKREQAQKFLQKVNESMPGIIELEFEGFYRRGLFVTKKRYALLSEDGKMVVKGLEFVRRDWAPIARETQKEVLRILLEEADPEKAARLVRDVIERIRQRRVSLEDITIYTQLTKRIKSYKSLEPHVVAAQKLKERGREVAPGMIIGYIITKGTKGISQRATPVEFARLEDYDPEYYIDNQILPAIQRIFEAIGYTRDYLKEGITQTSLSRWF

SEQ ID NO: 1984 - protein, 792 aa, unidentified
  REGION 1..792: note = Description of Unknown: Synthetic polypeptide
MPRILKGFLIDADFETVEGRALIRLFLRGEEGSFVVYDDSFSPYFYALPGDEPERVKERILASGAAEAIQKVEIEEKRLFGTPRVALRITVSHPQDVPRIRERIRRVEGVDLILEHDILFVRRYLIDRGIKPLTWLRLEVEERDGRALLRGVEQLEEEPPELRVAAVAIAVYNPKGAPRSSKDEIIMISVATSDGVEKVLTWREVQGLEQVEVLQDEKEMLLRFAELIKEGDYDVIVGYNTDSFDFPYIRDRLKKLGISLPLGRLDAELEVSRRGALPEARIRGRAHVDLYPIVRRHVKLNSYVLESVVEELLGIKKEKLDGERLFTYWDEGGEKRALLARYALEDARVTLALAEKFLPLYCELSTIVGQSLNDVARMTSGQLVEWLLMRYATPRGELIPNHPAGEEYAARARATYAGGYVREPKRGLVEHIAVFDFRSFGPSIIVSHNIDPSTLIVGNCEENRAPELEYCFSLEREGFIPAILKELIRRRAEIKRELKRSEGDRRRTLSFAEKALKILANSFYGYMGYPRARWYRRECAESVAAFARMYIKQVMRIAEEEFKLEVVYGDTDSLFVVIPPEKRELAQKFLQKVNESMPGIIELEFEGFYRRGLFVTKKRYALLSEDGKMVVKGLEFVRRDWAPIARETQKEVLRILLEEADPEKAARFVRDVIERIRQRRVSLEDITIYTQLTKRIKSYKSLEPHVVAAQKLKERGREVAPGMIIGYIITKGTKGISQRATPVEFARLEDYDPEYYIDNQILPAIQRIFEAIGYTRDYLKEGITQTSLSRWF

SEQ ID NO: 1985 - protein, 792 aa, unidentified
  REGION 1..792: note = Description of Unknown: Synthetic polypeptide
MPRILKGFLIDADFETVEGRALIRLFLRGEEGSFVVYDDSNSPYFYALPGDEPERVKERILASGAAEAIQKVEIEEKRLFGTPRVALRITVSHPQDVPRIRERIRRVEGVDLILEHDILFVRRYLIDRGIKPLTWLRLEVEERDGRALLRGVEQLEEEPPELRVAAVAIAVYNPKGAPRSSKDEIIMISVATSDGVEKVLTWREVQGLEQVEVLQDEKEMLLRFAELIKEGDYDVIVGYNTDSFDFPYIRDRLKKLGISLPLGRLDAELEVSRRGALPEARIRGRAHVDLYPIVRRHVKLNSYVLESVVEELLGIKKEKLDGERLFTYWDEGGEKRALLARYALEDARVTLALAEKFLPLYCELSTIVGQSLNDVARMTSGQLVEWLLMRYATPRGELIPNHPAGEEYAARARATYAGGYVREPKRGLVEHIAVFDFRSFGPSIIVSHNIDPSTLIVGNCEENRAPELEYCFSLEREGFIPAILKELIRRRAEIKRELKRSEGDRRRTLSFAEKALKILANSFYGYMGYPRARWYRRECAESVAAFARMYIKQVMRIAEEEFKLEVVYGDTDSLFVVIPPEKRELAQKFLQKVNESMPGIIELEFEGFYRRGLFVTKKRYALLSEDGKMVVKGLEFVRRDWAPIARETQKEVLRILLEEADPEKAARLVRDVIERIRQRRVSLEDITIYTQLTKRIKSYKSLEPHVVAAQKLKERGREVAPGMIIGYIITKGTKGISQRATPVEFARLEDYDPEYYIDNQILPAIQRIFEAIGYTRDYLKEGITQTSLSRWF

SEQ ID NO: 1986 - protein, 792 aa, unidentified
  REGION 1..792: note = Description of Unknown: Synthetic polypeptide
MPRILKGFLIDADFETVEGRALIRLFLRGEEGSFVVYDDSFSPYFYALPGDEPERVKERILASGAAEAIQKVEIEEKRLFGTPRVALRITVSHPQDVPRIRERIRRVEGVDLILEHDILFVRRYLIDRGIKPLTWLRLEVEERDGRALLRGVEQLEEEPPELRVAAVAIAVYNPKGAPRSSKDEIIMISVATSDGVEKVLTWREVQGLEQVEVLQDEKEMLLRFAELIKEGDYDVIVGYNTDSFDFPYIRDRLKKLGISLPLGRLDAELEVSRRGALPEARIRGRAHVDLYPIVRRHVKLNSYDLESVVEELLGIKKEKLDGERLFTYWDEGGEKRALLARYALEDARVTLALAEKFLPLYCELSTIVGQSLNDVARMTSGQLVEWLLMRYATPRGELIPNHPAGEEYAARARATYAGGYVREPKRGLVEHIAVFDFRSFGPSIIVSHNIDPSTLIVGNCEENRAPELEYCFSLEREGFIPAILKELIRRRAEIKRELKRSEGDRRRTLSFAEKALKILANSFYGYMGYPRARWYRRECAESVAAFARMYIKQVMRIAEEEFKLEVVYGDTDSLFVVIPPEKRELAQKFLQKVNESMPGIIELEFEGFYRRGLFVTKKRYALLSEDGKMVVKGLEFVRRDWAPIARETQKEVLRILLEEADPEKAARLVRDVIERIRQRRVSLEDITIYTQLTKRIKSYKSLEPHVVAAQKLKERGREVAPGMIIGYIITKGTKGISQRATPVEFARLEDYDPEYYIDNQILPAIQRIFEAIGYTRDYLKEGITQTSLSRDF

SEQ ID NO: 1987 - protein, 792 aa, unidentified
  REGION 1..792: note = Description of Unknown: Synthetic polypeptide
MPRILKGFLIDADFETVEGRALIRLFLRGEEGSFVVYDDSFSPYFYALPGDEPERVKERILASGAAEAIQKVEIEEKRLFGTPRVALRITVSHPQDVPRIRERIRRVEGVDLILEHDILFVRRYLIDRGIKPLTWLRLEVEERDGRALLRGVEQLEEEPPELRVAAVAIAVYNPKGAPRSSKDEIIMISVATSDGVEKVLTWREVQGLEQVEVLQDEKEMLLRFAELIKEGDYDVIVGYNTDSFDFPYIRDRLKKLGISLPLGRLDAELEVSRRGALPEARIRGRAHVDLYPIVRRHVKLNSYDLESVVEELLGIKKEKLDGERLFTYWDEGGEKRALLARYALEDARVTLALAEKFLPLYCELSTIVGQSLNDVARMTSGQLVEWLLMRYATPRGELIPNHPAGEEYAARARATYAGGYVREPKRGLVEHIAVFDFRSFGPSIIVSHNIDPSTLIVGNCEENRAPELEYCFSLEREGFIPAILKELIRRRAEIKRELKRSEGDRRRTLSFAEKALKILANSFYGYMGYPRARWYRRECAESVAAFARMYIKQVMRIAEEEFKLEVVYGDTDSLFVVIPPEKRELAQKFLQKVNESMPGIIELEFEGFYRRGLFVTKKRYALLSEDGKMVVKGLEFVRRDWAPIARETQREVLRILLEEADPEKAARLVRDVIERIRQRRVSLEDITIYTQLTKRIKSYKSLEPHVVAAQKLKERGREVAPGMIIGYIITKGTKGISQRATPVEFARLEDYDPEYYIDNQILPAIQRIFEAIGYTRDYLKEGITQTSLSRWF

SEQ ID NO: 1988 - protein, 789 aa, unidentified
  REGION 1..789: note = Description of Unknown: Synthetic polypeptide
MPRILKGFLIDADFETVEGRALIRLFLRGEEGSFVVYDDSFSPYFYALPGDEPERVKERILASGAAEAIQKVEIEEKRLFGTPRVALRITVSHPQDVPRIRERIRRVEGVDLILEHDILFVRRYLIDRGIKPLTWLRLEVEERDGRALLRGVEQLEEEPPELRVAAVAIAVYNPKGAPRSSKDEIIMISVATSDGVEKVLTWREVQGLEQVEVLQDEKEMLLRFAELIKEGDYDVIVGYNTDSFDFPYIRDRLKKLGISLPLGRLDAELEVSRRGALPEARIRGRAHVDLYPIVRRHVKLNSYDLESVVEELLGIKKEKLDGERLFTYWDEGGEKRALLARYALEDARVTLALAEKFLPLYLELSTIVGQSLNDVARMTSGQLVEWLLMRYATPRGELIPNHPAGEEYAARARATYAGGYVREPKRGLVEHIAVFDFRSFGPSIIVSHNIDPSRLIVGNCEENRAPELEYCFSLEREGFIPAILKELIRRRAEIKRELKRSEGDRRRTLSFAEKALKILANSFYGYMGYPRARWYRRECAESVAAFARMYIKQVMRIAEEEFKLEVVYGDTDSLFVVIPPEKRELAQKFLQKVNESMPGIIELEFEGFYRRGLFVTKKRYALLSEDGKMVVKGLEFVRRDWAPIARETQKEVLRILLEEADPEKAARLVRDVIERIRQRRVSLEDITIYTQLTKRIKSYKSLEPHVVAAQKLKERGREVAPGMIIGYIITKGTKGISQRATPVEFARLEDYDPEYYIDNQILPAIQRIFEAIGYTRDYLKEGITQTSLS

SEQ ID NO: 1989 - protein, 792 aa, unidentified
  REGION 1..792: note = Description of Unknown: Synthetic polypeptide
MPRILKGFLIDADFETVEGRALIRLFLRGEEGSFVVYDDSFSPYFYALPGDEPERVKERILASGAAEAIQKVEIEEKRLFGTPRVALRITVSHPQDVPRIRERIRRVEGVDLILEHDILFVRRYLIDRGIKPLTWLRLEVEERDGRALLRGVEQLEEEPPELRVAAVAIAVYNPKGAPRSSKDEIIMISVATSDGVEKVLTWREVQGLEQVEVLQDEKEMLLRFAELIKEGDYDVIVGYNTDSFDFPYIRDRLKKLGISLPLGRLDAELEVSRRGALPEARIRGRAHVDLYPIVRRHVKLNSYDLESVVEELLGIKKEKLDGERLFTYWHEGGEKRALLARYALEDARVTLALAEKFLPLYCELSTIVGQSLNDVARMTSGQLVEWLLMRYATPRGELIPNHPAGEEYAARARATYAGGYVREPKRGLVEHIAVFDFRSFGPSIIVSHNIDPSTLIVGNCEENRAPELEYCFSLEREGFIPAILKELIRRRAEIKRELKRSEGDRRRTLSFAEKALKILANSFYGYMGYPRARWYRRECAESVAAFARMYIKQVMRIAEEEFKLEVVYGDTDSLFVVIPPEKRELAQKFLQKVNESMPGIIELEFEGFYRRGLFVTKKRYALLSEDGKMVVKGLEFVRRDWAPIARETQKEVLRILLEEADPEKAARLVRDVIERIRQRRVSLEDITIYTQLTKRIKSYKSLEPHVVAAQKLKERGREVAPGMIIGYIITKGTKGISQRATPVEFARLEDYDPEYYIDNQILPAIQRIFEAIGYTRDYLKEGITQTSLSRWF

SEQ ID NO: 1990 - protein, 792 aa, unidentified
  REGION 1..792: note = Description of Unknown: Synthetic polypeptide
MPRILKGFLIDADFETVEGRALIRLFLRGEEGSFVVYDDSFSPYFYALPGDEPERVKERILASGAAEAIQKVEIEEKRLFGTPRVALRITVSHPQDVPRIRERIRRVEGVDLILEHDILFVRRYLIDRGIKPLTWLRLEVEERDGRALLRGVEQLEEEPPELRVAAVAIAVYNPKGAPRSSKDEIIMISVATSDGVEKVLTWREVQGLEQVEVLQDEKEMLLRFAELIKEGDYDVIVGYNTDSFDFPYIRDRLKKLGISLPLGRLDAELEVSRRGALPEARIRGRAHVDLYPIVRRHVKLNSYDLESVVEELLGIKKEKLDGERLFTYWDEGGEKRALLARYALEDARVTLALAEKFLPLYCELSTIVGQSLNDVARMTSGQLVEWLLMRYATPRGELIPNHPAGEEYAARARATYAGGYVREPKRGLVEHIAVFDFRSFGPSIIVSHNIDPSTLIVGNCEENRAPELEYCFSLEREGFIPAILKELIRRRAEIKRELKRSEGDRRRTLSFAEKALKILANSFYGYMGYPRARWYRRECAESVAAFARMYIKQVMRIAEEEFKLEVVYGDTDSLFVVIPPEKRELAQKFLQKVNESMPGIIELEFEGFYRRGLFVTKKRYALLSEDGKMVVKGLEFVRRDWAPIARETQKEVLRILLEEADPEKAARLVRDVIERIRQRRVSLEDITIYTQLTKRIKSYKSLEPHVVAAQKLKERGREVAPGSIIGYIITKGTKGISQRATPVEFARLEDYDPEYYIDNQILPAIQRIFEAIGYTRDYLKEGITQTSLSRWF

SEQ ID NO: 1991 - protein, 792 aa, unidentified
  REGION 1..792: note = Description of Unknown: Synthetic polypeptide
MPRILKGFLIDADFETVEGRALIRLFLRGEEGSFVVYDDSFSPYFYALPGDEPERVKERILASGAAEAIQKVEIEEKRLFGTPRVALRITVSHPQDVPRIRERIRRVEGVDLTLEHDILFVRRYLIDRGIKPLTWLRLEVEERDGRALLRGVEQLEEEPPELRVAAVAIAVYNPKGAPRSSKDEIIMISVATSDGVEKVLTWREVQGLEQVEVLQDEKEMLLRFAELIKEGDYDVIVGYNTDSFDFPYIRDRLKKLGISLPLGRLDAELEVSRRGALPEARIRGRAHVDLYPIVRRHVKLNSYVLESVVEELLGIKKEKLDGERLFTYWDEGGEKRALLARYALEDARVTLALAEKFLPLYCELSTIVGQSLNDVARMTSGQLVEWLLMRYATPRGELIPNHPAGEEYAARARATYAGGYVREPKRGLVEHIAVFDFRSFGPSIIVSHNIDPSTLIVGNCEENRAPELEYCFSLEREGFIPAILKELIRRRAEIKRELKRSEGDRRRTLSFAEKALKILANSFYGYMGYPRARWYRRECAESVAAFARMYIKQVMRIAEEEFKLEVVYGDTDSLFVVIPPEKRELAQKFLQKVNESMPGIIELEFEGFYRRGLFVTKKRYALLSEDGKMVVKGLEFVRRDWAPIARETQKEVLRILLEEADPEKAARLVRDVIERIRQRRVSLEDITIYTQLTKRIKSYKSLEPHVVAAQKLKERGREVAPGMIIGYIITKGTKGISQRATPVEFARLEDYDPEYYIDNQILPAIQRIFEAIGYTRDYLKEGITQTSLSRWF

SEQ ID NO: 1992 - protein, 792 aa, unidentified
  REGION 1..792: note = Description of Unknown: Synthetic polypeptide
MPRILKGFLIDADFETVEGRALIRLFLRGEEGSFVVYDDSFSPYFYALPGDEPERVKERILASGAAEAIQKVEIEEKRLFGTPRVALRITVSHPQDVPRIRERIRRVEGVDLILEHDILFVRRYLIDRGIKPLTWLRLEVEERDGRALLRGVEQLEEEPPELRVAAVAIAVYNPKGAPRSSKDEIIMISVATSDGVEKVLTWREVQGLEQVEVLQDEKEMLLRFAELIKEGDYDVIVGYNTDSFDFPYIRDRLKKLGISLPLGRLDAELEVSRRGALPEARIRGRAHVDLYPIVRRHVKLNSYVLESVVEELLGIKKEKLDGERLFTYWDEGGEKRALLARYALEAARVTLALAEKFLPLYCDLSTIVGQSLNDVARMTSGQLVEWLLMRYATPRGELIPNHPAGEEYAARARATYAGGYVREPKRGLVEHIAVFDFRSFGPSIIVSHNIDPSTLIVGNCEENRAPELEYCFSLEREGFIPAILKELIRRRAEIKRELKRSEGDRRRTLSFAEKALKILANSFYGYMGYPRARWYRRECAESVAAFARMYIKQVMRIAEEEFKLEVVYGDTDSLFVVIPPEKRELAQKFLQKVNESMPGIIELEFEGFYRRGLFVTKKRYALLSEDGKMVVKGLEFVRRDWAPIARETQKEVLRILLEEADPEKAARLVRDVIERIRQRRVSLEDITIYTQLTKRIKSYKSLEPHVVAAQKLKERGREVAPGMIIGYIITKGTKGISQRATPVEFARLEDYDPEYYIDNQILPAIQRIFEAIGYTRDYLKEGITQTSLSRWF

SEQ ID NO: 1993 - protein, 792 aa, unidentified
  REGION 1..792: note = Description of Unknown: Synthetic polypeptide
MPRILKGFLIDADFETVEGRALIRLFLRGEEGSFVVYDDSFSPYFYALPGDEPERVKERILASGAAEAIQKVEIEEKRLFGTPRVALRITVSHPQDVPRIRERIRRVEGVDLILEHDILFVRRYLIDRGIKPLTWLRLEVEERDGRALLRGVEQLEEEPPELRVAAVAIAVYNPKGAPRSSKDEIIMISVATSDGVEKVLTWREVQGLEQVEVLQDEKEMLLRFAELIKEGDYDVIVGYNTDSFDFPYIRDRLKKLGISLPLGRLDAELEVSRRGALPEARIRGRAHVDLYPIVRRHVKLNSYVLESVVEELLGIKKEKLDGERLFTYWDEGGEKRALLARYALEAARVTLALAEKFLPLYLELSTIVGQSLNDVARMTSGQLVEWLLMRYATPRGELIPNHPAGEEYAARARATYAGGYVREPKRGLVEHIAVFDFRSFGPSIIVSHNIDPSTLIVGNCEENRAPELEYCFSLEREGFIPAILKELIRRRAEIKRELKRSEGDRRRTLSFAEKALKILANSFYGYMGYPRARWYRRECAESVAAFARMYIKQVMRIAEEEFKLEVVYGDTDSLFVVIPPEKRELAQKFLQKVNESMPGIIELEFEGFYRRGLFVTKKRYALLSEDGKMVVKGLEFVRRDWAPIARETQKEVLRILLEEADPEKAARLVRDVIERIRQRRVSLEDITIYTQLTKRIKSYKSLEPHVVAAQKLKERGREVAPGMIIGYIITKGTKGISQRATPVEFARLEDYDPEYYINNQILPAIQRIFEAIGYTRDYLKEGITQTSLSRWF

SEQ ID NO: 1994 - protein, 792 aa, unidentified
  REGION 1..792: note = Description of Unknown: Synthetic polypeptide
MPRILKGFLIDADFETVEGRALIRLFLRGEEGSFVVYDDSFSPYFYALPGDEPERVKERILASGAAEAIQKVEIEEKRLFGTPRVALRITVSHPQDVPRIRERIRRVEGVDLILEHDILFVRRYLIDRGIKPLTWLRLEVEERDGRALLRGVEQLEEEPPELRVAAVAIAVYNPKGAPRSSKDEIIMISVATSDGVEKVLTWREVQGLEQVEVLQDEKEMLLRFAELIKEGDYDVIVGYNTDSFDFPYIRDRLKKLGISLPLGRLDAELEVSRRGALPEARIRGRAHVDLYPIVRRHVKLNSYVLESVVEELLGIKKEKLDGERLFTYWDEGGEKRALLARYALEDARVTLALAEKFLPLYCELSTIVGQSLNDVARMTSGQLVEWLLMRYATPRGELIPNHPAGEEYAARARATYAGGYVREPKRGLVEHIAVFDFRSFGPSIIVSHNIDPSTLIVGNCEENRAPELEYCFSLEREGFIPAILKELIRRRAEIKRELKRSEGDRRRTLSFAEKALKILANSFYGYMGYPRARWYRRECAESVAAFARMYIKQVMRIAEEEFKLEVVYGDTDSLFVVIPPEKRELAQKFLQKVNESMPGIIELEFEGFYRRGLFVTKKRYALLSEDGKMVVKGLEFVRRDWAPIARETQKEVLRILLEEADPEKAARLVRDVIERIRQRRVSLEDITIYTQLTKRIKSYKSLEPHVVAAQKLKERGREVAPGMIIGYIITKGTKGISQRATPVEFAGLEDYDPEYYIDNQILPAIQRIFEAIGYTRDYLKEGITQTSLSRWF

SEQ ID NO: 1995 - protein, 792 aa, unidentified
  REGION 1..792: note = Description of Unknown: Synthetic polypeptide
MPRILKGFLIDADFETVEGRALIRLFLRGEEGSFVVYDDSFSPYFYALPGDEPERVKERILASGAAEAIQKVEIEEKRLFGTPRVALRITVSHPQDVPRIRERIRRVEGVDLILEHDILFVRRYLIDRGIKPLTWLRLEVEERDGRALLRGVEQLEEEPPELRVAAVAIAVYNPKGAPRSSKDEIIMISVATSDGVEKVLTWREVQGLEQVEVLQDEKEMLLRFAELIKEGDYDVIVGYNTDSFDFPYIRDRLKKLGISLPLGRLDAELEVSRRGALPEARIRGRAHVDLYPIVRRHVKLNSYVLESVVEELLGIKKEKLDGERLFTYWDEGGEKRALLARYALEDARVTLALAEKFLPLYCELSTIVGQSLNDVARMTSGQLVEWLLMRYATPRGELIPNHPAGEEYAARARATYAGGYVREPKRGLVEHIAVFDFRSFGPSIIVSHNIDPSTLIVGNCEENRAPELEYCFSLEREGFIPAILKELIRRRAEIKRELKRSEGDRRRTLSFAEKALKILANSFYGYMGYPRARWYRRECAESVAAFARMYIKQVMRIAEEEFKLEVVYGDTDSLFVVIPPEKRELAQKFLQKVNESMPGIIELEFEGFYRRGLFVTKKRYALLSEDGKMVVKGLEFVRRDWAPIARETQKEVLRILLEEADPEKAARLVRDVIERIRQRRVSLEDITIYTQLTKRIKSYKSLEPHVVAAQKLKERGREVAPGMIIGYIITKGTKGISQRATPVEDARLEDYDPEYYIDNQILPAIQRIFEAIGYTRDYLKEGITQTSLSRWF

SEQ ID NO: 1996 - protein, 792 aa, unidentified
  REGION 1..792: note = Description of Unknown: Synthetic polypeptide
MPRILKGFLIDADFETVEGRALIRLFLRGEEGSFVVYDDSFSPYFYALPGDEPERVKERILASGAAEAIQKVEIEEKRLFGTPRVALRITVSHPQDVPRIRERIRRVEGVDLILEHDILFVRRYLIDRGIKPLTWLRLEVEERDGRALLRGVEQLEEEPPELRVAAVAIAVYNPKGAPRSSKDEIIMISVATSDGVEKVLTWREVQGLEQVEVLQDEKEMLLRFAELIKEGDYDVIVGYNTDSFDFPYIRDRLKKLGISLPLGRLDAELEVSRRGALPEARIRGRAHVDLYPIVRRHVKLNSYVLESVVEELLGIKKEKLDGERLFTYWDEGGEKRALLARYALEDARVTLALAEKFLPLYCELSTIVGQSLNDVARMTSGQLVEWLLMRYATPRGELIPNHPAGEEYAARARATYAGGYVREPKRGLVEHIAVFDFRSFGPSIIVSHNIDPSTLIVGNCEENRAPELEYCFSLEREGFIPAILKELIRRRAEIKRELKRSEGDRRRTLSFAEKALKILANSFYGYMGYPRARWYRRECAESVAAFARMYIAQVMRIAEEEFKLEVVYGDTDSLFVVIPPEKRELAQKFLQKVNESMPGIIELEFEGFYRRGLFVTKKRYALLSEDGKMVVKGLEFVRRDWAPIARETQKEVLRILLEEADPEKAARLVRDVIERIRQRRVSLEDITIYTQLTKRIKSYKSLEPHVVAAQKLKERGREVAPGMIIGYIITKGTKGISQRATPVEFARLEDYDPEYYIDNQILPAIQRIFEAIGYTRDYLKEGITQTSLSRWF

SEQ ID NO: 1997 - protein, 792 aa, unidentified
  REGION 1..792: note = Description of Unknown: Synthetic polypeptide
MPRILKGFLIDADFETVEGRALIRLFLRGEEGSFVVYDDSFSPYFYALPGDEPERVKERILASGAAEAIQKVEIEEKRLFGTPRVALRITVSHPQDVPRIRERIRRVEGVDLILEHDILFVRRYLIDRGIKPLTVLRLEVEERDGRALLRGVEQLEEEPPELRVAAVAIAVYNPKGAPRSSKDEIIMISVATSDGVEKVLTWREVQGLEQVEVLQDEKEMLLRFAELIKEGDYDVIVGYNTDSFDFPYIRDRLKKLGISLPLGRLDAELEVSRRGALPEARIRGRAHVDLYPIVRRHVKLNSYVLESVVEELLGIKKEKLDGERLFTYWDEGGEKRALLARYALEDARVTLALAEKFLPLYCELSTIVGQSLNDVARMTSGQLVEWLLMRYATPRGELIPNHPAGEEYAARARATYAGGYVREPKRGLVEHIAVFDFRSFGPSIIVSHNIDPSTLIVGNCEENRAPELEYCFSLEREGFIPAILKELIRRRAEIKRELKRSEGDRRRTLSFAEKALKILANSFYGYMGYPRARWYRRECAESVAAFARMYIKQVMRIAEEEFKLEVVYGDTDSLFVVIPPEKRELAQKFLQKVNESMPGIIELEFEGFYRRGLFVTKKRYALLSEDGKMVVKGLEFVRRDWAPIARETQKEVLRILLEEADPEKAARLVRDVIERIRQRRVSLEDITIYTQLTKRIKSYKSLEPHVVAAQKLKERGREVAPGMIIGYIITKGTKGISQRATPVEFARLEDYDPEYYIDNQILPAIQRIFEAIGYTRDYLKEGITQTSLSRWF

SEQ ID NO: 1998 - protein, 792 aa, unidentified
  REGION 1..792: note = Description of Unknown: Synthetic polypeptide
MPRILKGFLIDADFETVEGRALIRLFLRGEEGSFVVYDDSFSPYFYALPGDEPERVKERILASGAAEAIQKVEIEEKRLFGTPRVALRITVSHPQDVPRIRERIRRVEGVDLILEHDILFVRRYLIDRGIKPLTWLRLEVEERDGRALLRGVEQLEEEPPELRVAAVAIAVYNPKGAPRSSKDEIIMISVATSDGVEKVLTWREVQGLEQVEVLQDEKEMLLRFAELIKEGDYDVIVGYNTDSFDFPYIRDRLKKLGISLPLGRLDAELEVSRRGALPEARIRGRAHVDLYPIVRRHVKLNSYVLESVVEELLGIKKEKLDGERLFTYWDEGGEKRALLARYALEGARVTLALAEKFLPLYCELSTIVGQSLNDVARMTSGQLVEWLLMRYATPRGELIPNHPAGEEYAARARATYAGGYVREPKRGLVEHIAVFDFRSFGPSIIVSHNIDPSTLIVGNCEENRAPELEYCFSLEREGFIPAILKELIRRRAEIKRELKRSEGDRRRTLSFAEKALKILANSFYGYMGYPRARWYRRECAESVAAFARMYIKQVMRIAEEEFKLEVVYGDTDSLFVVIPPEKRELAQKFLQKVNESMPGIIELEFEGFYRRGLFVTKKRYALLSEDGKMVVKGLEFVRRDWAPIARETQKEVLRILLEEADPEKAARLVRDVIERIRQRRVSLEDITIYTQLTKRIKSYKSLEPHVVAAQKLKERGREVAPGMIIGYIITKGTKGISQRATPVEFARLEDYDPEYYIDNQILPAIQRIFEAIGYTRDYLKEGITQTSLSRWF

SEQ ID NO: 1999 - protein, 792 aa, unidentified
  REGION 1..792: note = Description of Unknown: Synthetic polypeptide
MPRILKGFLIDADFETVEGRALIRLFLRGEEGSFVVYDDSFSPYFYALPGDEPERVKERILASGAAEAIQKVEIEEKRLFGTPRVALRITVSHPQDVPRIRERIRRVEGVDLILEHDILFVRRYLIDRGIKPLTWLRLEVEERDGRALLRGVEQLEEEPPELRVAAVAIAVYNPKGAPRSSKDEIIMISVATSDGVEKVLTWREVQGLEQVEVLQDEKEMLLRFAELIKEGDYDVIVGYNTDSFDFPYIRDRLKKLGISLPLGRLDAELEVSRRGALPEARIRGRAHVDLYPIVRRHVKLNSYVLESVVEELLGIKKEKLDGERLFTYWDEGGEKRALLARYALEDARVTLALAEKFLPLYCELSTIVGQSLNDVARMTSGQLVEWLLMRYATPRGELIPNHPAGEEYAARARATYAGGYVREPKRGLVEHIAVFDFRSFGPSIIVSHNIDPSTLIVGNCEENRAPELEYCFSLEREGFIPAILKELIRRRAEIKRELKRSEGDRRRTLSFAEKALKILANSFYGYMGYPRARWYRRECAESVAAFARVYIKQVMRIAEEEFKLEVVYGDTDSLFVVIPPEKRELAQKFLQKVNESMPGIIELEFEGFYRRGLFVTKKRYALLSEDGKMVVKGLEFVRRDWAPIARETQKEVLRILLEEADPEKAARLVRDVIERIRQRRVSLEDITIYTQLTKRIKSYKSLEPHVVAAQKLKERGREVAPGMIIGYIITKGTKGISQRATPVEFARLEDYDPEYYIDNQILPAIQRIFEAIGYTRDYLKEGITQTSLSRWF

SEQ ID NO: 2000 - protein, 792 aa, unidentified
  REGION 1..792: note = Description of Unknown: Synthetic polypeptide
MPRILKGFLIDADFETVEGRALIRLFLRGEEGSFVVYDDSFSPYFYALPGDEPERVKERILASGAAEAIQKVEIEEKRLFGTPRVALRITVSHPQDMPRIRERIRRVEGVDLILEHDILFVRRYLIDRGIKPLTWLRLKVEERDGRALLRGVEQLEEEPPELRVAAVAIAVYNPKGAPRSSKDEIIMISVATSDGVEKVLTWREVQGLEQVEVLQDEKEMLLRFAELIKEGDYDVIVGYNTDSFDFPYIRDRLKKLGISLPLGRLDAELEVSRRGALPEARIRGRAHVDLYPIVRRHVKLNSYVLESVVEELLGIKKEKLDGERLFTYWDEGGEKRALLARYALEDARVTLALAEKFLPLYCELSTIVGQSLNDVARMTSGQLVEWLLMRYATPRGELIPNHPAGEEYAARARATYAGGYVREPKRGLVEHIAVFDFRSFGPSIIVSHNIDPSTLIVGNCEENRAPELEYCFSLEREGFIPAILKELIRRRAEIKRELKRSEGDRRRTLSFAEKALKILANSFYGYMGYPRARWYRRECAESVAAFARMYIKQVMRIAEEEFKLEVVYGDTDSLFVVIPPEKRELAQKFLQKVNESMPGIIELEFEGFYRRGLFVTKKRYALLSEDGKMVVKGLEFVRRDWAPIARETQKEVLRILLEEADPEKAARLVRDVIERIRQRRVSLEDITIYTQLTKRIKSYKSLEPHVVAAQKLKERGREVAPGMIIGYIITKGTKGISQRATPVEFARLEDYDPEYYIDNQILPAIQRIFEAIGYTRDYLKEGITQTSLSRWF

SEQ ID NO: 2001 - protein, 792 aa, unidentified
  REGION 1..792: note = Description of Unknown: Synthetic polypeptide
MPRILKGFLIDADFETVEGRALIRLFLRGEEGSFVVYDDSFSPYFYALPGDEPERVKERILASGAAEAIQKVEIEEKRLFGTPRVALRITVSHPQDVPRIRERIRRVEGVDLILEHDILFVRRYLIDRGIKPLTWLRLEVEERDGRALLRGVEQLEEEPPELRVAAVAIAVYNPKGAPRSSKDEIIMISVATSDGVEKVLTWREVQGLEQVEVLQDEKEMLLRFAELIKEGDYDVIVGYNTDSFDFPYIRDRLKKLGISLPLGRLDAELEVSRRGALPEARIRGRAHVDLYPIVRRHVKLNSYVLESVVEELLGIKKEKLDGERLFTYWDEGGEKRALLARYALEDARVTLALAEKFLPLYCELSTIVGQSLNDVARMTSGQLVEWLLMRYATPRGELIPNHPAGEEYAARARATYAGGYVREPKRGLVEHIAVFDFRSFGPSIIVSHNICPSTLIVGNCEENRAPELEYCFSLEREGFIPAILKELIRRRAEIKRELKRSEGDRRRTLSFAEKALKILANSFYGYMGYPRARWYRRECAESVAAFARMYIKQVMRIAEEEFKLEVVYGDTDSLFVVIPPEKRELAQKFLQKVNESMPGIIELEFEGFYRRGLFVTKKRYALLSEDGKMVVKGLEFVRRDWAPIARETQKEVLRILLEEADPEKAARLVRDVIERIRQRRVSLEDITIYTQLTKRIKSYKSLEPHVVAAQKLKERGREVAPGMIIGYIITKGTKGISQRATPVEFARLEDYDPEYYIDNQILPAIQRIFEAIGYTRDYLKEGITQTSLSRWF

SEQ ID NO: 2002 - protein, 792 aa, unidentified
  REGION 1..792: note = Description of Unknown: Synthetic polypeptide
MPRILKGFLIDADFETVEGRALIRLFLRGEEGSFVVYDDSFSPYFYALPGDEPERVKERILASGAAEAIQKVEIEEKRLFGTPRVALRITVSHPQDVPRIRERIRRVEGVDLILEHDILFVRRYLIDRGIKPLTWLRLEVEERDGRALLRGVEQLEEEPPELRVAAVAIAVYNPKGAPRSSKDEIIMISVATSDGVEKVLTWREVQGLEQVEVLQDEKEMLLRFAELIKEGDYDVIVGYNTDSFDFPYIRDRLKKLGISLPLGRLDAELEVSRRGALPEARIRGRAHVDLYPIVRRHVKLNSYVLESVVEELLGIKKEKLDGERLFTYWDEGGEKRALLARYALEDARVTLALAEKFLPLYLELSTIVGQSLNDVARMTSGQLVEWLLMRYATPRGELIPNHPAGEEYAARARATYAGGYVREPKRGLVEHIAVFDFRSFGPSIIVSHNIDPSTLIVGNCEENRAPELEYCFSLEREGFIPAILKELIRRRAEIKRELKRSEGDRRRTLSFAEKALKILANSFYGYMGYPRARWYRRECAESVAAFARMYIKQVMRIAEEEFKLEVVYGDTDSLFVVIPPEKRERAQKFLQKVNESMPGIIELEFEGFYRRGLFVTKKRYALLSEDGKMVVKGLEFVRRDWAPIARETQKEVLRILLEEADPEKAARLVRDVIERIRQRRVSLEDITIYTQLTKRIKSYKSLEPHVVAAQKLKERGREVAPGMIIGYIITKGTKGISQRATPVEFARLEDYDPEYYIDNQILPAIQRIFEAIGYTRDYLKEGITQTSLSRWF

SEQ ID NO: 2003 - protein, 792 aa, unidentified
  REGION 1..792: note = Description of Unknown: Synthetic polypeptide
MPKILKGFLIDVDFETVEGRALIRLFLRGEEGSFVVYDDSFSPYFYALPGDEPERVKERILASGAAEAIQNVEIEEKRLFGTPRVALRITVSHPQDVPRIRERIRRVEGVDLILEHDILFVRRYLIDRGIKPLTWLRLEVEERDGRALLRGVEQLEEEPPELRVAAVAIAVYNPKGAPRSSKDEIIMISVATSDGVEKVLTWREVQGLEQVEVLQDEKEMLLRFAELIKEGDYDVIVGYNTDSFDFPYIRDRLKKLGISLPLGRLDAELEVSRRGALPEARIRGRAHVDLYPIVRRHVKLNSYVLESVVEELLGIKKEKLDGERLFTYWDEGGEKRALLARYALEDARVTLALAEKFLPLYCELSTIVGQSLNDVARMTSGQLVEWLLMRYATPRGELIPNHPAGEEYAARARATYAGGYVREPKRGLVEHIAVFDFRSFGPSIIVSHNIDPSTLIVGNCEENRAPELEYCFSLEREGFIPAILKELIRRRAEIKRELKRSEGDRRRTLSFAEKALKILANSFYGYMGYPRARWYRRECAESVAAFARMYIKQVMRIAEEEFKLEVVYGDTDSLFVVIPPEKRELAQKFLQKVNESMPGIIELEFEGFYRRGLFVTKKRYALLSEDGKMVVKGLEFVRRDWAPIARETQKEVLRILLEEADPEKAARLVRDVIERIRQRRVSLEDITIYTQLTKRIKSYKSLEPHVVAAQKLKERGREVAPGMIIGYIITKGTKGISQRATPVEFARLEDYDPEYYIDNQILPAIQRIFEAIGYTRDYLKEGITQTSLSRWF

SEQ ID NO: 2004 - protein, 792 aa, unidentified
  REGION 1..792: note = Description of Unknown: Synthetic polypeptide
MPRILKGFLIDADFETVEGRALIRLFLRGEEGSFVVYDDSFSPYFYALPGDEPERVKERILASGAAEAIQKVEIEEKRLFGTPRVALRITVSHPQDVPRIRERIRRVEGVDLILEHDILFVRRYLIDRGIKPLTWLRLEVEERDGRALLRGVEQLEEEPPELRVAAVAILVYNPKGAPRSSKDEIIMISVATSDGVEKVLTWREVQGLEQVEVLQDEKEMLLRFAELIKEGDYDVIVGYNTDSFDFPYIRDRLKKLGISLPLGRLDAELEVSRRGALPEARIRGRAHVDLYPIVRRHVKLNSYVLESVVEELLGIKKEKLDGERLFTYWDEGGEKRALLARYALEDARVTLALAEKFLPLYAELSTIVGQSLNDVARMTSGQLVEWLLMRYATPRGELIPNHPAGEEYAARARATYAGGYVREPKRGLVEHIAVFDFRSFGPSIIVSHNIDPSTLIVGNCEENRAPELEYCFSLEREGFIPAILKELIRRRAEIKRELKRSEGDRRRTLSFAEKALKILANSFYGYMGYPRARWYRRESAESVAAFARMYIKQVMRIAEEEFKLEVVYGDTDSLFVVIPPEKRELAQKFLQKVNESMPGIIELEFEGFYRRGLFVTKKRYALLSEDGKMVVKGLEFVRRDWAPIARETQKEVLRILLEEADPEKAARLVRDVIERIRQRRVSLEDITIYTQLTKRIKSYKSLEPHVVAAQKLKERGREVAPGMIIGYIITKGTKGISQRATPVEFARLEDYDPEYYIDNQILPAIQRIFEAIGYTRDYLKEGITQTSLSRWF

SEQ ID NO: 2005 - protein, 792 aa, unidentified
  REGION 1..792: note = Description of Unknown: Synthetic polypeptide
MPRILKGFLIDADYETVEGRALIRLFLRGEEGSFVVYDDSFRPYFYALPGDEPERVKERILASGAAEAIQKVEIEEKRLFGTPRVALRITVSHPQDVPRIRERIRRVEGVDLILEHDILFVRRYLIDRGIKPLTWLRLEVEERDGRALLRGVEQLEEEPPELRVAAVAIAVYNPKGAPRSSKDEIIMISVATSDGVEKVLTWREVQGLEQVEVLQDEKEMLLRFAELIKEGDYDVIVGYNTDSFDFPYIRDRLKKLGISLPLGRLDAELEVSRRGALPEARIRGRAHVDLYPIVRRHVKLNSYVLESVVEELLGIKKEKLDGERLFTYWDEGGEKRALLARYALEDARVTLALAEKFLPLYCELSTIVGQSLNDVARMTSGQLVEWLLMRYATPRGELIPNHPAGEEYAARARATYAGGYVREPKRGLVEHIAVFDFRSFGPSIIVSHNIDPSTLIVGNCEENRAPELEYCFSLEREGFIPAILKELIRRRAEIKRELKRSEGDRRRTLSFAEKALKILANSFYGYMGYPRARWYRRECAESVAAFARMYIKQVMRIAEEEFKLEVVYGDTDSLFVVIPPEKRELAQKFLQKVNESMPGIIELEFEGFYRRGLFVTKKRYALLSEDGKMVVKGLEFVRRDWAPIARETQKEVLRILLEEADPEKAARLVRDVIERIRQRRVSLEDITIYTQLTKRIKSYKSLEPHVVAAQKLKERGREVAPGMIIGYIITKGTKGISQRATPVEFARLEDYDPEYYIDNQILPAIQRIFEAIGYTRDYLKEGITQTSLSRWF

SEQ ID NO: 2006 - protein, 792 aa, unidentified
  REGION 1..792: note = Description of Unknown: Synthetic polypeptide
MPRILKGFLIDADFETVEGRALIRLFLRGEEGSFVVYDDSFSPYFYALPGDEPERVKERILASGAAEAIQKVEIEEKRLFGTPRVALRITVSHPQDVPRIRERIRRVEGVDLILEHDILFVRRYLIDRGIKPLTWLRLEVEERDGRALLRGVEQLEEEPPELRVAAVAIAVYNPKGAPRSSKDEIIMISVATSDGVEKVLTWREVQGLEQVEVLQDEKEMLLRFAELIKEGDYDVIVGYNTDSFDFPYIRDRLKKLGISLPLGRLDAELEVSRRGALPEARIRGRAHVDLYPIVRRHVKLNSYVLESVVEELLGIKKEKLDGERLFTYWDEGGEKRALLARYALEDARVTLALAEKFLPLYCELSTIVGQSLNDVARMTSGQLVEWLLMRYATPRGELISNHPAGEEYAARARATYAGGYVREPKRGLVEHIAVFDFRSFGPSIIVSHNIDPSTLIVGNCEENRAPELEYCFSLEREGFIPAILKELIRRRAEIKRELKRSEGDRRRTLSFAEKALKILANSFYGYMGYPRARWYRRECAESVAAFARMYIKQVMRIAEEEFKLEVVYGDTDSLFVVIPPEKRELAQKFLQKVNESMPGIIELEFEGFYRRGLFVTKKRYALLSEDGKMVVKGLEFVRRDWAPIARETQKEVLRILLEEADPEKAARLVRDVIERIRQRRVSLEDITIYTQLTKRIKSYKSLEPHVVAAQKLKERGREVAPGMIIGYIITKGTKGISQRATPVEFARLEDYDPEYYIDNQILPAIQRIFEAIGYTRDYLKEGITQTSLSRWF

SEQ ID NO: 2007 - protein, 792 aa, unidentified
  REGION 1..792: note = Description of Unknown: Synthetic polypeptide
MPRILKGFLIDADFETVEGRALIRLFLRGEEGSFVVYDDSFSPYFYALPGDEPERVKERILASGAAEAIQKVEIEEKRLFGTPRVALRITVSHPQDVPRIRERIRRVEGVDLILEHDILFVRRYLIDRGIKPLTWLRLEVEERDGRALLRGVEQLEEEPPELRVAAVAIAVYNPKGAPRSSKDEIIMISVATSDGVEKVLTWREVQGLEQVEVLQDEKEMLLRFAELIKEGDYDVIVGYNTDSFDFPYIRDRLKKLDISLPLGRLDAELEVSRRGALPEARIRGRAHVDLYPIVRRHVKLNSYVLESVVEELLGIKKEKLDGERLFTYWDEGGEKRALLARYAPEDARVTLALAEKFLPLYCVLSTIVGLSLNDVARMTSGQLVEWLLMRYATPRGELIPNHPAGEEYAARARATYAGGYVREPKRGLVEHIAVFDFRSFGPSIIVSHNIDPSTLIVGNCEENRAPELEYCFSLEREGFIPAILKELIRRRAEIKRELKRSEGDRRRTLSFAEKALKILANSFYGYMGYPRARWYRRECAESVAAFARMYIKQVMRIAEEEFKLEVVYGDTDSLFVVIPPEKRELAQKFLQKVNESMPGIIELEFEGFYRRGLFVTKKRYALLSEDGKMVVKGLEFVRRDWAPIARETQKEVLRILLEEADPEKAARLVRDVIERIRQRRVSLEDITIYTQLTKRIKSYKSLEPHVVAAQKLKERGREVAPGMIIGYIITKGTKGISQRATPVEFARLEDYDPEYYIDNQILPAIQRIFEAIGYTRDYLKEGITQTSLSRWF

SEQ ID NO: 2008 - protein, 792 aa, unidentified
  REGION 1..792: note = Description of Unknown: Synthetic polypeptide
MPRILKGFLIDADFETVEGRALIRLFLRGEEGSFVVYDDSFSPYFYALPGDEPERVKERILASGAAEAIQKVEIEEKRLFGTPRVALRITVSHPQDVPRIRERIRRVEGVDLILEHDILFVRRYLIDRGIKPLTWLRLEVEERDGRALLRGVEQLEEEPPELRVAAVAIAVYNPKGAPRSSKDEIIMISVATSDGVEKVLTWREVQGLEQVEVLQDEKEMLLRFAELIKEGDYDVIVGYNTDSFDFPYIRDRLKKLGISLPLGRLDAELEVSRRGALPEARIRGRAHVDLYPIVRRHVKLNSYVLESVVEELLGIKKEKLDGERLFTYADEGGEKRALLARYALEDARVTLALAEKFLPLYCELSTIVGQSLNDVARMTSGQLVEWLLMRYATPRGELIPNHPAGEEYAARARATYAGGYVREPKRGLVEHIAVFDFRSFGPSIIVSHNIDPSTLIVGNCEENRAPELEYCFSLEREGFIPAILKELIRRRAEIKRELKRSEGDRRRTLSFAEKALKILANSFYGYMGYPRARWYRRECAESVAAFARMYIKQVMRIAEEEFKLEVVYGDTDSLFVVIPPEKRELAQKFLQKVNESMPGIIELEFEGFYRRGLFVTKKRYALLSEDGKMVVKGLEFVRRDWAPIARETQKEVLRILLEEADPEKAARLVRDVIERIRQRRVSLEDITIYTQLTKRIKSYKSLEPHVVAAQKLKERGREVAPGMIIGYIITKGTKGISQRATPVEFARLEDYDPEYYIDNQILPAIQRIFEAIGYTRDYLKEGITQTSLSRWF

SEQ ID NO: 2009 - protein, 792 aa, unidentified
  REGION 1..792: note = Description of Unknown: Synthetic polypeptide
MPRILKGFLIDADFETVEGRALIRLFLRGEEGSFVVYDDSFSPYFYALPGDEPERVKERILASGAAEAIQKVEIEEKRLFGTPRVALRITVSHPQDVPRIRERIRRVEGVDLILEHDILFVRRYLIDRGIKPLTWLRLEVEERDGRALLRGVEQLEEEPPELRVAAVAIAVYNPKGAPRSSKDEIIMISVATSDGVEKVLTWREVQGLEQVEVLQDEKEMLLRFAELIKEGDYDVIVGYNTDSFDFPYIRDRLKKLGISLPLGRLDAELEVSRRGALPEARIRGRAHVDLYPIVRRHVKLNSYVLESVVEELLGIKKEKLDGERLFTYWDEGGEKRALLARYALEDARVILALAEKFLPLYCELSTIVGQSLNDVARMTSGQLVEWLLMRYATPRGELIPNHPAGEEYAARARATYAGGYVREPKRGLVEHIAVFDFRSFGPSIIVSHNIDPSTLIVGNCEENRAPELEYCFSLEREGFIPAILKELIRRRAEIKRELKRSEGDRRRTLSFAEKALKILANSFYGYMGYPRARWYRRECAESVAAFARMYIKQVMRIAEEEFKLEVVYGDTDSLFVVIPPEKRELAQKFLQKVNESMPGIIELEFEGFYRRGLFVTKKRYALLSEDGKMVVKGLEFVRRDWAPIARETQKEVLRILLEEADPEKAARLVRDVIERIRQRRVSLEDITIYTQLTKRIKSYKSLEPHVVAAQKLKERGREVAPGMIIGYIITKGTKGISQRATPVEFARLEDYDPEYYIDNQILPAIQRIFEAIGYTRDYLKEGITQTSLSRWF

SEQ ID NO: 2010 - protein, 792 aa, unidentified
  REGION 1..792: note = Description of Unknown: Synthetic polypeptide
MPRILKGFLIDADFETVEGRALIRLFLRGEEGSFVVYDDSFSPYFYALPGDEPERVKERILASGAAEAIQKVEIEEKRLFGTPRVALRITVSHPQDVPRIRERIRRVEGVDLILEHDILFVRRYLIDRGIKPLTWLRLEVEERDGRALLRGVEQLEEEPPELRVAAVAIAVYNPKGAPRSSKDEIIMISVATSDGVEKVLTWREVQGLEQVEVLQDEKEMLLRFAELIEEGDYDVIVGYNTDSFDFPYIRDRLKKLGISLPLGRLDAELEVSRRGALPEARIRGRAHVDLYPIVRRHVKLNSYVLESVVEELLGIKKEKLDGERLFTYWDEGGEKRALLARYALEDARVTLALAEKFLPLYCELSTIVGQSLNDVARMTSGQLVEWLLMRYATPRGELIPNHPAGEEYAARARATYAGGYVREPKRGLVEHIAVFDFRSFGPSIIVSHNIDPSTLIVGNCEENRAPELEYCFSLEREGFIPAILKELIRRRAEIKRELKRSEGDRRRTLSFAEKALKILANSFYGYMGYPRARWYRRECAESVAAFARMYIKQVMRIAEEEFKLEVVYGDTDSLFVVIPPEKRELAQKFLQKVNESMPGIIELEFEGFYRRGLFVTKKRYALLSEDGKMVVKGLEFVRRDWAPIARETQKEVLRILLEEADPEKAARLVRDVIERIRQRRVSLEDITIYTQLTKRIKSYKSLEPHVVAAQKLKERGREVAPGMIIGYIITKGTKGISQRATPVEFARLEDYDPEYYIDNQILPAIQRIFEAIGYTRDYLKEGITQTSLSRWF

SEQ ID NO: 2011 - protein, 792 aa, unidentified
  REGION 1..792: note = Description of Unknown: Synthetic polypeptide
MPRILKGFLIDADFETVEGRALIRLFLRGEEGSFVVYDDSFSPYFYALPGDEPERVKERILASGAAVAIQKVEIEEKRLFGTPRVALRITVSHPQDVPRIRERIRRVEGVDLILELDILFVRRYLIDRGIKPLTWLRLEVEERDSRALLRGVEQLEEEPPELRVAAVAIAVYNPKGAPRSSKDEIIMISVATSDGVEKVLTWREVQGLEQVEVLQDEKEMLLRFAELIKEGDYDVIVGYNTDSFDFPYIRDRLKKLGISLPLGRLDAELEVSRRGALPEARIRGRAHVDLYPIVRRHVKLNSYVLESVVEELLGIKKEKLDGERLFTYWDEGGEKRALLARYALEDARVTLALAEKFLPLYCELSTIVGQSLNDVARMTSGQLVEWLLMRYATPRGELIPNHPAGEEYAARARATYAGGYVREPKRGLVEHIAVFDFRSFGPSIIVSHNIDPSTLIVGNCEENRAPELEYCFSLEREGFIPAILKELIRRRAEIKRELKRSEGDRRRTLSFAEKALKILANSFYGYMGYPRARWYRRECAESVAAFARMYIKQVMRIAEEEFKLEVVYGDTDSLFVVIPPEKRELAQKFLQKVNESMPGIIELEFEGFYRRGLFVTKKRYALLSEDGKMVVKGLEFVRRDWAPIARETQKEVLRILLEEADPEKAARLVRDVIERIRQRRVSLEDITIYTQLTKRIKSYKSLEPHVVAAQKLKERGREVAPGMIIGYIITKGTKGISQRATPVEFARLEDYDPEYYIDNQILPAIQRIFEAIGYTRDYLKEGITQTSLSRWF

SEQ ID NO: 2012 - protein, 792 aa, unidentified
  REGION 1..792: note = Description of Unknown: Synthetic polypeptide
MPRILKGFLIDADFETVEGRALIRLFLRGEEGSFVVYDDSFSPYFYALPGDEPERVKERILASGAAEAIQKVEIEEKRLFGTPRVALRITVSHPQDVPRIRERIRRVEGVDLILEHDILFVRRYLIDRGIKPLTWLRLEVEERDGRALLRGVEQLEEEPPELRVAAVAIAVYNPKGAPRSSKDEIIMISVATSDGVEKVLTWREVQGLEQVEVLLDENEMLLRFAELIKEGDYDVIVGYNTDSFDFPYIRDRLKKLGISLPLGRLDAELEVSRRGALPEARIRGRAHVDLYPIVRRHVKLNSYVLESVVEELLGIKKEKLDGERLFTYWDEGGEKRALLARYALEDARVTLALAEKFLPQYCELSSIVGQSLNDVARMTSGQLVEWLLMRYATPRGELIPNHPAGEEYAARARATYAGGYVREPKRGLVEHIAVFDFRSFGPSIIVSHNIDPSTLIVGNCEENRAPELEYCFSLEREGFIPAILKELIRRRAEIKRELKRSEGDRRRTLSFAEKALKILANSFYGYMGYPRARWYRRECAESVAAFARMYIKQVMRIAEEEFKLEVVYGDTDSLFVVIPPEKRELAQKFLQKVNESMPGIIELEFEGFYRRGLFVTKKRYALLSEDGKMVVKGLEFVRRDWAPIARETQKEVLRILLEEADPEKAARLVRDVIERIRQRRVSLEDITIYTQLTKRIKSYKSLEPHVVAAQKLKERGREVAPGMIIGYIITKGTKGISQRATPVEFARLEDYDPEYYIDNQILPAIQRIFEAIGYTRDYLKEGITQTSLSRWF

SEQ ID NO: 2013 - protein, 792 aa, unidentified
  REGION 1..792: note = Description of Unknown: Synthetic polypeptide
MPRILKGFLIDADFETVEGRALIRLFLRGEEGSFVVYDDSFSPYFYALPGDEPERVKERILASGAAEAIQKVEIEEKRLFGTPRVALRITVSHPQDVPRIRERIRRVEGVDLILEHDILFVRRYLIDRGIKPLTWLRLEVEERDGRALLRGVEQLEEEPPELRVAAVAIAVYNPKGAPRSSKDEIIMISVATSDGVEKVLTWREVQGLEQVEVLQDEKEMLLRFAELIKEGDYDVIVGYNTDSFDFPYIRDRLKKLGISLPLGRLDAELEVSRRGALPEARIRGRAHVDLYPIVRRHVKLNSYVLESVVEELLGIKKEKLDGERLFTYWDEGGEKRALLARYALEDARVTLALAEKFLPLYCELSTIVGQSLNDVARMTSGQLVEWLLERYATPRGELIPNHPAGEEYAARARATYAGGYVREPKRGLVEHIAVFDFRSFGPSIIVSHNIDPSTLIVGNCEENRAPELEYCFSLEREGFIPAILKELIRRRAEIKRELKRSEGDRRRTLSFAEKALKILANSFYGYMGYPRARWYRRECAESVAAFARMYIKQVMRIAEEEFKLEVVYGDTDSLFVVIPPEKRELAQKFLQKVNESMPGIIELEFEGFYRRGLFVTKKRYALLSEDGKMVVKGLEFVRRDWAPIARETQKEVLRILLEEADPEKAARLVRDVIERIRQRRVSLEDITIYTQLTKRIKSYKSLEPHVVAAQKLKERGREVAPGMIIGYIITKGTKGISQRATPVEFARLEDYDPEYYIDNQILPAIQRIFEAIGYTRDYLKEGITQTSLSRWF

SEQ ID NO: 2014 - protein, 792 aa, unidentified
  REGION 1..792: note = Description of Unknown: Synthetic polypeptide
MPRILKGFLIDADFETVEGRALIRLFLRGEEGSFVVYDDSFSPYFYALPGDEPERVKERILASGAAEAIQKVEIEEKRLFGTPRVALRITVSHPQDVPRIRERIRRVEGVDLILEHDILFVRRYLIDRGIKPLTWLRLEVEERDGRALLRGVEQLEEEPPELRVAAVAILVYNPKGAPRSSKDEIIMISVATSDGVEKVLTWREVQGLEQVEVLQDEKEMLLRFAELIKEGDYDVIVGYNTDSFDFPYIRDRLKKLGISLPLGRLDAELEVSRRGALPEARIRGRAHVDLYPIVRRHVKLNSYVLESVVEELLGIKKEKLDGERLFTYWDEGGEKRALLARYALEDARVTLALAEKFLPLYSELSTIVGQSLNDVARMTSGQLVEWLLMRYATPRGELIPNHPAGEEYAARARATYAGGYVREPKRGLVEHIAVFDFRSFGPSIIVSHNIDPSTLIVGNCEENRAPELEYCFSLEREGFIPAILKELIRRRAEIKRELKRSEGDRRRTLSFAEKALKILANSFYGYMGYPRARWYRRESAESVAAFARMYIKQVMRIAEEEFKLEVVYGDTDSLFVVIPPEKRELAQKFLQKVNESMPGIIELEFEGFYRRGLFVTKKRYALLSEDGKMVVKGLEFVRRDWAPIARETQKEVLRILLEEADPEKAARLVRDVIERIRQRRVSLEDITIYTQLTKRIKSYKSLEPHVVAAQKLKERGREVAPGMIIGYIITKGTKGISQRATPVEFARLEDYDPEYYIDNQILPAIQRIFEAIGYTRDYLKEGITQTSLSRWF

SEQ ID NO: 2015 - protein, 789 aa, unidentified
  REGION 1..789: note = Description of Unknown: Synthetic polypeptide
MPRILKGFLIDADFETVEGRALIRLFLRGEEGSFVVYDDSFSPYFYALPGDEPERVKERILASGAAVAIQKVEIEEKRLFGTPRVALRITVSHPQDVPRIRERIRRVEGVDLILEHDILFVRRYLIDRGIKPLTWLRLEVEERDGRALLRGVEQLEEEPPELRVAAVAIAVYNPKGAPRSSKDEIIMISVATSDGVEKVLTWREVQGLEQVEVLQDEKEMLLRFAELIKEGDYDVIVGYNTDSFDFPYIRDRLKKLGISLPLGRLDAELEVSRRGALPEARIRGRAHVDLYPIVRRHVKLNSYDLESVVEELLGIKKEKLDGERLFTYWDEGGEKRALLARYALEDARVTLALAEKFLPLYLELSTIVGQSLNDVARMTSGQLVEWLLMRYATPRGELIPNHPAGEEYAARARATYAGGYVREPKRGLVEHIAVFDFRSFGPSIIVSHNIDPSTLIVGNCEENRAPELEYCFSLEREGFIPAILKELIRRRAEIKRELKRSEGDRRRTLSFAEKALKILANSFYGYMGYPRARWYRRECAESVAAFARMYIKQVMRIAEEEFKLEVVYGDTDSLFVVIPPEKRELAQKFLQKVNESMPGIIELEFEGFYRRGLFVTKKRYALLSEDGKMVVKGLEFVRRDWAPIARETQKEVLRILLEEADPEKAARLVRDVIERIRQRRVSLEDITIYTQLTKRIKSYKSLEPHVVAAQKLKERGREVAPGMIIGYIITKGTKGISQRATPVEFARLEDYDPEYYIDNQILPAIQRIFEAIGYTRDYLKEGITQTSLS

SEQ ID NO: 2016 - protein, 789 aa, unidentified
  REGION 1..789: note = Description of Unknown: Synthetic polypeptide
MPRILKGFLIDADFETVEGRALIRLFLRGEEGSFVVYDDSFSPYFYALPGDEPERVKERILASGAAEAIQKVEIEEKRLFGTPRVALRITVSHPQDVPRIRERIRRVEGVDLILEHDILFVRRYLIDRGIKPLTWLRLEVEERDGRALLRGVEQLEEEPPELRVAAVAIAVYNPKGAPRSSKDEIIMISVATSDGVEKVLTWREVQGLEQVEVLQDEKEMLLRFAELIKEGDYDVIVGYNTDSFDFPYIRDRLKKLGISLPLGRLDAELEVSRRGALPEARIRGRAHVDLYPIVRRHVKLNSYDLESVVEELLGIKKEKLDGERLFTYWDEGGEKRALLARYALEDARVTLALAEKFLPLYCELSTIVGQSLNDVARMTSGQLVEWLLMRYATPRGELIPNHPAGEEYAARARATYAGGYVREPKRGLVEHIAVFDFRSFGPSIIVSHNICPSTLIVGNCEENRAPELEYCFSLEREGFIPAILKELIRRRAEIKRELKRSEGDRRRTLSFAEKALKILANSFYGYMGYPRARWYRRECAESVAAFARMYIKQVMRIAEEEFKLEVVYGDTDSLFVVIPPEKRELAQKFLQKVNESMPGIIELEFEGFYRRGLFVTKKRYALLSEDGKMVVKGLEFVRRDWAPIARETQKEVLRILLEEADPEKAARLVRDVIERIRQRRVSLEDITIYTQLTKRIKSYKSLEPHVVAAQKLKERGREVAPGMIIGYIITKGTKGISQRATPVEFARLEDYDPEYYIDNQILPAIQRIFEAIGYTRDYLKEGITQTSLS

SEQ ID NO: 2017 - protein, 792 aa, unidentified
  REGION 1..792: note = Description of Unknown: Synthetic polypeptide
MPRILKGFLIDADFETVEGRALIRLFLRGEEGSFVVYDDSFSPYFYALPGDEPERVKERILASGAAEAIQKVEIEEKRLFGTPRVALRITVSHPQDVPRIRERIRRVEGVDLILEHDILFVRRYLIDRGIKPLTWLRLEVEERDGRALLRGVEQLEEEPPELRVAAVAIAVYNPKGAPRSSKDEIIIISVATSDGVEKVLTWREVQGLEQVEVLQDEKEMLLRFAELIKEGDYDVIVGYNTDSFDFPYIRDRLKKLGISLPLGRLDAELEVSRRGALPEARIRGRAHVDLYPIVRRHVKLNSYDLESVVEELLGIKKEKLDGERLFTYWDEGGEKRALLARYALEDARVTLALAEKFLPLYCELSTIVGQSLNDVARMTSGQLVEWLLMRYATPRGELIPNHPAGEEYAARARATYAGGYVREPKRGLVEHIAVFDFRSFGPSIIVSHNIDPSTLIVGNCEENRAPELEYCFSLEREGFIPAILKELIRRRAEIKRELKRSEGDRRRTLSFAEKALKILANSFYGYMGYPRARWYRRECAESVAAFARMYIKQVMRIAEEEFKLEVVYGDTDSLFVVIPPEKRELAQKFLQKVNESMPGIIELEFEGFYRRGLFVTKKRYALLSEDGKMVVKGLEFVRRDWAPIARETQKEVLRILLEEADPEKAARLVRDVIERIRQRRVSLEDITIYTQLTKRIKSYKSLEPHVVAAQKLKERGREVAPGMIIGYIITKGTKGISQRATPVEFARLEDYDPEYYIDNQILPAIQRIFEAIGYTRDYLKEGITQTSLSRWF

SEQ ID NO: 2018 - protein, 791 aa, unidentified; identical to SEQ ID NO: 1802
  REGION 1..791: note = Description of Unknown: Synthetic polypeptide

SEQ ID NO: 2019 - protein, 789 aa, unidentified; identical to SEQ ID NO: 1857
  REGION 1..789: note = Description of Unknown: Synthetic polypeptide

SEQ ID NO: 2020 - protein, 792 aa, unidentified
  REGION 1..792: note = Description of Unknown: Synthetic polypeptide
MPRILKGFLIDADFETVEGRALIRLFLRGEEGSFVVYDDSFSPYFYALPGDEPERVKERILASGAAEAIQKVEIEEKRLFGTPRVALRITVSHPQDVPRIRERIRRVEGVDLILEHDILFVRRYLIDRGIKPLTWLRLEVEERDGRALLRGVEQLEEEPPELRVAAVAIAVYNPKGAPRSSKDEIIMISVATSDGVEKVLTWREVQGLEQVEVLQDEKEMLLRFAELIKEGDYDVIVGYNTDSFDFPYIRDRLKKLGISLPLGRLDAELEVSRRGALPEARIRGRAHVDLYPIVRRHVKLNSYVLESVVEELLGIKKEKLDGERLFTYWDEGGEKRALLARYALEDARVTLALAEKFLPLYCELSTIVGQSLNDVARMTSGQLVEWLLMRYATPRGELIPNHPAGEEYAARARATYAGGYVREPKRGLVEHIAVFDFRSFGPSIIVSHNIDPSTLIVGNCEENRAPELEYCFSLEREGFIPAILKELIRRRAEIKRELKRSEGDRRRTLSFAEKALKILANSFYGYMGYPRARWYRRECAESVAAFARMYIKQVMRIAEEEFKLEVVYGDTDSLFVVIPPEKRELAQKFLQKVNESMPGIIELEFEGFYRRGLFVTKKRYALLSEDGKMVVKGLEFVRRRWAPIARETQKEVLRILLEEADPEKAARLVRDVIERIRQRRVSLEDITIYTQLTKRIKSYKSLEPHVVAAQKLKERGREVAPGMIIGYIITKGTKGISQRATPVEFARLEDYDPEYYIDNQILPAIQRIFEAIGYTRDYLKEGITQTSLSRWF

SEQ ID NO: 2021 - protein, 791 aa, unidentified; identical to SEQ ID NO: 1802
  REGION 1..791: note = Description of Unknown: Synthetic polypeptide

SEQ ID NO: 2022 - protein, 792 aa, unidentified
  REGION 1..792: note = Description of Unknown: Synthetic polypeptide
MPRILKGFLIDADFETVEGRALIRLFLRGEEGSFVVYDDSFSPYFYALPGDEPERVKERILASGAAEAIQKVEIEEKRLFGTPRVALRITVSHPQDVPRIRERIRRVEGVDLILEHDILFVRRYLIDRGIKPLTWLRLEVEERDGRALLRGVEQLEEEPPELRVAAVAIAVYNPKGAPRSSKDEIIMISVATSDGVEKVLTWREVQGLEQVEVLQDEKEMLLRFAELIKEGDYDVIVGYNTDSFDFPYIRDRLKKLGISLPLGRLDAELEVSRRGALPEARIRGRAHVDLYPIVRRHVKLNSYDLESVVEELLGIKKEKLDGERLFTYWDEGGEKRALLARYALEDARVTLALAEKFLPLYLELSTIVGQSLNDVARMTSGQLVEWLLMRYATPRGELIPNHPAGEEYAARARATYAGGYVREPKRGLVEHIAVFDFRSFGPSIIVSHNIDPSTLIVGNCEENRAPELEYCFSLEDEGFIPAILKELIRRRAEIKRELKRSEGDRRRTLSFAEKALKILANSFYGYMGYPRARWYRRECAESVAAFARMYIKQVMRIAEEEFKLEVVYGDTDSLFVVIPPEKRELAQKFLQKVNESMPGIIELEFEGFYRRGLFVTKKRYALLSEDGKMVVKGLEFVRRDWAPIARETQKEVLRILLEEADPEKAARLVRDVIERIRQRRVSLEDITIYTQLTKRIKSYKSLEPHVVAAQKLKERGREVAPGMIIGYIITKGTKGISQRATPVEFARLRDYDPEYYIDNQILPAIQRIFEAIGYTRDYLKEGITQTSLSRWF

SEQ ID NO: 2023 - protein, 789 aa, unidentified
  REGION 1..789: note = Description of Unknown: Synthetic polypeptide
MPRILKGFLIDADFETVEGRALIRLFLRGEEGSFVVYDDSFSPYFYALPGDEPERVKERILASGAAEAIQKVEIEEKRLFGTPRVALRITVSHPQDVPRIRERIRRVEGVDLILEHDILFVRRYLIDRGIKPLTWLRLEVEERDGRALLRGVEQLEEEPPELRVAAVAIAVYNPKGAPRSSKDEIIMISVATSDGVEKVLTWREVQGLEQVEVLQDEKEMLLRFAELIKEGDYDVIVGYNTDSFDFPYIRDRLKKLGISLPLGRLDAELEVSRRGALPEARIRGRAHVDLYPIVRRHVKLNSYDLESVVEELLGIKKVKLDGERLFTYWDEGGEKRALLARYALEDARVTLALAEKFLPLYCELSTIVGQSLNDVARMTSGQLVEWLLMRYATPRGELIPNHPAGEEYAARARATYAGGYVREPKRGLVEHIAVFDFRSFGPSIIVSHNIDPSTLIVGNCEENRAPELEYCFSLEREGFIPAILKELIRRRAEIKRELKRSEGDRRRTLSFAEKALKILANSFYGYMGYPRARWYRRECAESVAAFARMYIKQVMRIAEEEFKLEVVYGDTDSLFVVIPPEKRELAQKFLQKVNESMPGIIELEFEGFYRRGLFVTKKRYALLSEDGKMVVKGLEFVRRDWAPIARETQKEVLRILLEEADPEKAARLVRDVIERIRQRRVSLEDITIYTQLTKRIKSYKSLEPHVVAAQKLKERGREVAPGMIIGYIITKGTKGISQRATPVEFARLEDYDPEYYIDNQILPAIQRIFEAIGYTRDYLKEGITQTSLS

SEQ ID NO: 2024 - protein, 792 aa, unidentified
  REGION 1..792: note = Description of Unknown: Synthetic polypeptide
MPRILKGFLIDADFETVEGRALIRLFLRGEEGSFVVYDDSFSPYFYALPGDEPERVKERILASGAAEAIQKVEIEEKRLFGTPRVALRITVSHPQDVPRIRERIRRVEGVDLILEHDILFVRRYLIDRGIKPLTWLRLEVEERDGRALLRGVEQLEEEPPELRVAAVAIAVYNPKGAPRSSKDEIIMISVATSDGVEKVLTWREVQGLEQVEVLQDEKEMLLRFAELIKEGDYDVIVGYNTDSFDFPYIRDRLKKLGISLPLGRLDAELEVSRRGALPEARIRGRAHVDLYPIVRRHVKLNSYVLESVVEELLGIKKEKLDGERLFTYWDEGGEKRALLARYALEDARVTLALAEKFLPLYCELSTIVGQSLNDVARMTSGQLVEWLLMRYATPRGELIPNHPAGEEYAARARATYAGGYVREPKRGLVEHIAVFDFRSFGPSIIVSHNIDPSTLIVGNCEENRAPELEYCFSLEREGFIPAILKELIRRRAEIKRELKRSEGDRRRTLSFAYKALKILANSFYGYMGYPRARWYRRECAESVAAFARMYIKQVMRIAEEEFKLEVVYGDTDSLFVVIPPEKRELAQKFLQKVNESMPGIIELEFEGFYRRGLFVTKKRYALLSEDGKMVVKGLEFVRRDWAPIARETQKEVLRILLEEADPEKAARLVRDVIERIRQRRVSLEDITIYTQLTKRIKSYKSLEPHVVAAQKLKERGREVAPGMIIGYIITKGTKGISQRATPVEFARLEDYDPEYYIDNQILPAIQRIFEAIGYTRDYLKEGITQTSLSRWF

SEQ ID NO: 2025 - protein, 792 aa, unidentified
  REGION 1..792: note = Description of Unknown: Synthetic polypeptide
MPRILKGFLIDADFETVEGRALIRLFLRGEEGSFVVYDDSFSPYFYALPGDEPERVKERILASGAAEAIQKVEIEEKRLFGTPRVALRITVSHPQDVPRIRYRIRRVEGVDLILEHDILFVRRYLIDRGIKPLTWLRLEVEERDGRALLRGVEQLEEEPPELRVAAVAIAVYNPKGAPRSSKDEIIMISVATSDGVEKVLTWREVQGLEQVEVLQDEKEMLLRFAELIKEGDYDVIVGYNTDSFDFPYIRDRLKKLGISLPLGRLDAELEVSRRGALPEARIRGRAHVDLYPIVRRHVKLNSYVLESVVEELLGIKKEKLDGERLFTYWDEGGEKRALLARYALEDARVTLALAEKFLPLYCELSTIVGQSLNDVARMTSGQLVEWLLMRYATPRGELIPNHPAGEEYAARARATYAGGYVREPKRGLVEHIAVFDFRSFGPSIIVSHNIDPSTLIVGNCEENRAPELEYCFSLEREGFIPAILKELIRRRAEIKRELKRSEGDRRRTLSFAEKALKILANSFYGYMGYPRARWYRRECAESVAAFARMYIKQVMRIAEEEFKLEVVYGDTDSLFVVIPPEKRELAQKFLQKVNESMPGIIELEFEGFYRRGLFVTKKRYALLSEDGKMVVKGLEFVRRDWAPIARETQKEVLRILLEEADPEKAARLVRDVIERIRQRRVSLEDITIYTQLTKRIKSYKSLEPHVVAAQKLKERGREVAPGMIIGYIITKGTKGISQRATPVEFARLEDYDPEYYIDNQILPAIQRIFEAIGYTRDYLKEGITQTSLSRWF

SEQ ID NO: 2026 - protein, 792 aa, unidentified
  REGION 1..792: note = Description of Unknown: Synthetic polypeptide
MPRILKGFLIDADFGTVEGRALIRLFLRGEEGSFVVYDDSFSPYFYALPGDEPERVKERILASGAAEAIQKVEIEEKRLFGTPRVALRITVSHPQDVPRIRERIRRVEGVDLILEHDILFVRRYLIDRGIKPLTWLRLEVEERDGRALLRGVEQLEEEPPELRVAAVAIAVYNPKGAPRSSKDEIIMISVATSDGVEKVLTWREVQGLEQVEVLQDEKEMLLRFAELIKEGDYDVIVGYNTDSFDFPYIRDRLKKLGISLPLGRLDAELEVSRRGALPEARIRGRAHVDLYPIVRRHVKLNSYVLESVVEELLGIKKEKLDGERLFTYWDEGGEKRALLARYALEDARVTLALAEKFLPLYCELSTIVGQSLNDVARMTSGQLVEWLLMRYATPRGELIPNHPAGEEYAARARATYAGGYVREPKRGLVEHIAVFDFRSFGPSIIVSHNIDPSTLIVGNCEENRAPELEYCFSLEREGFIPAILKELIRRRAEIKRELKRSEGDRRRTLSFAEKALKILANSFYGYMGYPRARWYRRECAESVAAFARMYIKQVMRIAEEEFKLEVVYGDTDSLFVVIPPEKRELAQKFLQKVNESMPGIIELEFEGFYRRGLFVTKKRYALLSEDGKMVVKGLEFVRRDWAPIARETQKEVLRILLEEADPEKAARLVRDVIERIRQRRVSLEDITIYTQLTKRIKSYKSLEPHVVAAQKLKERGREVAPGMIIGYIITKGTKGISQRATPVEFARLEDYDPEYYIDNQILPAIQRIFEAIGYTRDYLKEGITQTSLSRWF

SEQ ID NO: 2027 - protein, 792 aa, unidentified; identical to SEQ ID NO: 1981
  REGION 1..792: note = Description of Unknown: Synthetic polypeptide

SEQ ID NO: 2028 - protein, 792 aa, unidentified
  REGION 1..792: note = Description of Unknown: Synthetic polypeptide
MPRILKGFLIDADFETVEGRALIRLFLRGEEGSFVVYDDSFSPYFYALPGDEPERVKERILASGAAEAIQKVEIEEKRLFGTPRVALRITVSHPQDVPRIRERIRRVEGVDLILEHDILFVRRYLIDRGIKPLTWLRLEVEERDGRALLRGVEQLEEEPPELRVAAVAIAVYNPKGAPRSSKDEIIMISVATSDGVEKVLTWREVQGLEQVEVLQDEKEMLLRFAELIKEGDYDVIVGYNTDSFDFPYIRDRLKKLGISLPLGRLDAELEVSRRGALPEARIRGRAHVDLYPIVRRHVKLNSYVLESVVEELLGIKKEKLDGERLFTYWDEGGEKRALLARYALEDARVTLALAEKFLPLYCELSTIVGQSLNDVARMTSGQLVEWLLMRYATPRGELIPNHPAGEEYAARARATYAGGYVREPKRGLVEHIAVFDFRSFGPSIIVSHNIDPSTLIVGNCEENRAPELEYCFSLEREGFIPAILKELIRRRAEIKRELKRSEGDRRRTLSFAEKALKILANSFYGYMGYPRARWYRRECAESVAAFARMYIKQVMRIAEEEFKLEVVYGDTDSLFVVIPPEKRELAQKFLQKVNESMPGIIELEFEGFYRRGLFVTKKRYALLSEDGKMVVKGLEFVRRDWAPIARETQSEVLRILLEEADPEKAARLVRDVIERIRQRRVSLEDITIYTQLTKRIKSYKSLEPHVVAAQKLKERGREVAPGMIIGYIITKGTKGISQRATPVEFARLEDYDPEYYIDNQILPAIQRIFEAIGYTRDYLKEGITQTSLSRWF

SEQ ID NO: 2029 - protein, 792 aa, unidentified
  REGION 1..792: note = Description of Unknown: Synthetic polypeptide
MPRILKGFLIDADFETVEGRALIRLFLRGEEGSFVVYDDSFSPYFYALPGDEPERVKERILASGAAEAIQKVEIEEKRLFGTPRVALRITVSHPQDVPRIRERIRRVEGVDLILEHDILFVRRYLIDRGIKPLTWLRLEVEERDGRALLRGVEQLEEEPPELRVAAVAIAVYNPKGAPRSSKDEIIMISVATSDGVEKVLTWREVQGLEQVEVLQDEKEMLLRFAELIKEGDYDVIVGYNTDSFDFPYIRDRLKKLGISLPLGRLDAELEVSRRGALPEARIRGRAHVDLYPIVRRHVKLNSYDLESVVEELLGIKKEKLDGERLFTYWDEGGEKRALLARYALEDARVTLALAEKFLPLYCELSTIVGQSLNDVARMTSGQLVEWLLMRYATPRGELIPNHPAGEEYAARARATYAGGYVREPKRGLVEHIAVFDFRSFGPSIIVSHNIDPSTLIVGNCEENRAPELEYCFSLEREGFIPAILKELIRRRAEIKRELKRSEGDRRRTLSFAEKALKILANSFYGYMGYPRARWYRRECAESVAAFARMYIKQVMRIAEEEFKLEVVYGDTDSLFVVIPPEKRELAQKFLQKVNESMPGIIELEFEGFYRRGLFVTKKRYALLSEDGKAVVKGLEFVRRDWAPIARETQKEVLRILLEEADPEKAARLVRDVIERIRQRRVSLEDITIYTQLTKRIKSYKSLEPHVVAAQKLKERGREVAPGMIIGYIITKGTKGISQRATPVEFARLEDYDPEYYIDNQILPAIQRIFEAIGYTRDYLKEGITQTSLSRWF

SEQ ID NO: 2030 - protein, 792 aa, unidentified
  REGION 1..792: note = Description of Unknown: Synthetic polypeptide
MPRILKGFLIDADFETVEGRALIRLFLRGEEGSFVVYDDSFSPYFYALPGDEPERVKERILASGAAEAIQKVEIEEKRLFGTPRVALRITVSHPQDVPRIRERIRRVEGVDLILEHDILFVRRYLIDRGIKPLTWLRLEVEERDGRALLRGVEQLEEEPPELRVAAVAIAVYNPKGAPRSSKDEIIMISVATSDGVEKVLTWREVQGLEQVEVLQDEKEMLLRFAELIKEGDYDVIVGYNTDSFDFPYIRDRLKKLGISLPLGRLDAELEVSRRGALPEARIRGRAHVDLYPIVRRHVKLNSYVLESVVEELLGIKKEKLDGERLFTYWDEGGEKRALLARYALEDARVTLALAEKFLPLYCELSTIVGQSLNDVARMTSGQLVEWLLMRYATPRGELIPNHPAGEEYAARARATYAGGYVREPKRGLVEHIAVFDFRSFGPSIIVSHNIDPSTLIVGNCEENRAPELEYCFSLEREGFIPAILKELIRRRAEIKRELKRSEGDRRRTLSFAEKALKILANSFYGYMGYPRARWYRRECAESVAAFARMYIKQVMRIAEEEFKLEVVYGDTDSLFVVIPPEKRELAQKFLQKVNESMPGIIELEFEGFYRRGLFVTKKRYALLSEDGKMVVKGLEFRRRDWAPIARETQKEVLRILLEEADPEKAARLVRDVIERIRQRRVSLEDITIYTQLTKRIKSYKSLEPHVVAAQKLKERGREVAPGMIIGYIITKGTKGISQRATPVEFARLEDYDPEYYIDNQILPAIQRIFEAIGYTRDYLKEGITQTSLSRWF

SEQ ID NO: 2031 - protein, 792 aa, unidentified
  REGION 1..792: note = Description of Unknown: Synthetic polypeptide
MPRILKGFLIDADFETVEGRALIRLFLRGEEGSFVVYDDSFSPYFYALPGDEPERVKERILASGAAEAIQKVEIEEKRLFGTPRVALRITVSHPQDVPRIHERIRRVEGVDLILEHDILFVRRYLIDRGIKPLTWLRLEVEERDGRALLRGVEQLEEEPPELRVAAVAIAVYNPKGAPRSSKDEIIMISVATSDGVEKVLTWREVQGLEQVEVLQDEKEMLLRFAELIKEGDYDVIVGYNTDSFDFPYIRDRLKKLGISLPLGRLDAELEVSRRGALPEARIRGRAHVDLYPIVRRHVKLNSYDLESVVEELLGIKKEKLDGERLFTYWDEGGEKRALLARYALEDARVTLALAEKFLPLYCELSTIVGQSLNDVARMTSGQLVEWLLMRYATPRGELIPNHPAGEEYAARARATYAGGYVREPKRGLVEHIAVFDFRSFGPSIIVSHNIDPSTLIVGNCEENRAPELEYCFSLEREGFIPAILKELIRRRAEIKRELKRSEGDRRRTLSFAEKALKILANSFYGYMGYPRARWYRRECAESVAAFARMYIKQVMRIAEEEFKLEVVYGDTDSLFVVIPPEKRELAQKFLQKVNESMPGIIELEFEGFYRRGLFVTKKRYALLSEDGKMVVKGLEFVRRDWAPIARETQKEVLRILLEEADPEKAARLVRDVIERIRQRRVSLEDITIYTQLTKRIKSYKSLEPHVVAAQKLKERGREVAPGMIIGYIITKGTKGISQRATPVEFARLEDYDPEYYIDNQILPAIQRIFEAIGYTRDYLKEGITQTSLSRWF

SEQ ID NO: 2032 - protein, 792 aa, unidentified; identical to SEQ ID NO: 1805
  REGION 1..792: note = Description of Unknown: Synthetic polypeptide

SEQ ID NO: 2033 - protein, 792 aa, unidentified
  REGION 1..792: note = Description of Unknown: Synthetic polypeptide
MPRILKGFLIDADFETVEGRALIRLFLRGEEGSFVVYDDSFSPYFYALPGDEPERVKERILASGAAEAIQKVEIEEKRLFGTPRVALRITVSHPQDVPRIRERIRRVEGVDLILEHDILFVRRYLIDRGIKPLTWLRLEVEERDGRALLRGVEQLEEEPPELRVAAVAIAVYNPKGAPRSSKDEIIMISVATSDGVEKVLTWREVQGLEQVEVLQDEKEMLLRFAELIKEGDYDVIVGYNTDSFDFPYIRDRLKKLGISLPLGRLDAELEVSRRGALPEARIRGRAHVDLYPIVRRHVKLNSYVLESVVEELLGIKKEKLDGERLFTYWDEGGEKRALLARYALEDARVTLALAEKFLPLYCELSTIVGQSLNDVARMTSGQLVEWLLMRYATPRGELIPNHPAGEEYAARARATYAGGYVREPKRGLVEHIAVFDFRSFGPSIIVSHNIDPSTLIVGNCEENRAPELEYCFSLEREGFIPAILKELIRRRAEIKRELKRSEGDRRRTLSFAEKALKILANSFYGYMGYPRARWYRRECAESVAAFARMYIKQVMRIAEEEFKLEVVYGDTDSLFVVTPPEKRELAQKFLQKVNESMPGIIELEFEGFYRRGLFVTKKRYALLSEDGKMVVKGLEFVRRDWAPIARETQKEVLRILLEEADPEKAARLVRDVIERIRQRRVSLEDITIYTQLTKRIKSYKSLEPHVVAAQKLKERGREVAPGMIIGYIITKGTKGISQRATPVEFARLEDYDPEYYIDNQILPAIQRIFEAIGYTRDYLKEGITQTSLSRWF

SEQ ID NO: 2034 - protein, 792 aa, unidentified
  REGION 1..792: note = Description of Unknown: Synthetic polypeptide
MPRILKGFLIDADFETVEGRALIRLFLRGEEGSFVVYDDSFSPYFYALPGDEPERVKERILASGAAEAIQKVEIEEKRLFGTPRVALRITVSHPQDVPRIRERIRRVEGVDLILEHDILFVRRYLIDRGIKPLTWLRLEVEERDGRALLRGVEQLEEEPPELRVAAVAIAVYNPKGAPRSSKDEIIMISVATSDGVEKVLTWREVQGLEQVEVLQDEKEMLLRFAELIKEGDYDVIVGYNTDSFDFPYIRDRLKKLGISLPLGRLDAELEVSRRGALPEARIRGRAHVDLYPIVRRHVKLNSYVLESVVEELLGIKKEKLDGERLFTYWDEGGEKRALLARYALEDARVTLALAEKFLPLYCELSTIVGQSLNDVARMTSGQLVEWLLMRYATPRGELIPNHPAGEEYAARARATYAGGYVREPKRGLVEHIAVFDFRSFGPSIIVSHNIDPSTLIVGNCEENRAPELEYCFSLEREGFIPAILKELIRRRAEIKRELKRSEGDRRRTLSFAEKALKILANSFYGYMGYPRARWYRRECAESVAAFARMYIKQVMRIAEEEFKLEVVYGDTDSLFVVIPPEKRELAQKFLQKVNESMPGIIELEFEGFYRRGLFVTKKRYALLSEDGKMVVKGLEFVRRDWAPIARETQKEVLRILLEEADPEKAARLVRDVIERIRQRRVSLEDITIYTQLTKRIKSYKSLEPHVVAAQKLKERGREVAPGRIIGYIITKGTKGISQRATPVEFARLEDYDPEYYIDNQILPAIQRIFEAIGYTRDYLKEGITQTSLSRWF

SEQ ID NO: 2035 - protein, 789 aa, unidentified; identical to SEQ ID NO: 1971
  REGION 1..789: note = Description of Unknown: Synthetic polypeptide

SEQ ID NO: 2036 - protein, 792 aa, unidentified
  REGION 1..792: note = Description of Unknown: Synthetic polypeptide
MPRILKGFLIDADFETVEGRALIRLFLRGEEGSFVVYDDSFSPYFYALPGDEPERVKERILASGAAEAIQKVEIEEKRLFGTPRVALRITVSHPQDVPRIRERIRRVEGVDLILEHDILFVRRYLIDRGIKPLTWLRLEVEERDGRALLRGVEQLEEEPPELRVAAVAIAVYNPKGAPRSSKDEIIMISVATSDGVEKVLTWREVQGLEQVEVLQDEKEMLLRFAELIKEGDYDVIVGYNTDSFDFPYIRDRLKKLGISLPLGRLDAELEVSRRGALPEARIRGRAHVDLYPIVRRHVKLNSYDLESVVEELLGIKKEKLDGERLFTYWDEGGESRALLARYALEDARVTLALAEKFLPLYCELSTIVGQSLNDVARMTSGQLVEWLLMRYATPRGELIPNHPAGEEYAARARATYAGGYVREPKRGLVEHIAVFDFRSFGPSIIVSHNIDPSTLIVGNCEENRAPELEYCFSLEREGFIPAILKELIRRRAEIKRELKRSEGDRRRTLSFAEKALKILANSFYGYMGYPRARWYRRECAESVAAFARMYIKQVMRIAEEEFKLEVVYGDTDSLFVVIPPEKRELAQKFLQKVNESMPGIIELEFEGFYRRGLFVTKKRYALLSEDGKMVVKGLEFVRRDWAPIARETQKEVLRILLEEADPEKAARLVRDVIERIRQRRVSLEDITIYTQLTKRIKSYKSLEPHVVAAQKLKERGREVAPGMIIGYIITKGTKGISQRATPVEFARLEDYDPEYYIDNQILPAIQRIFEAIGYTRDYLKEGITQTSLSRWF

SEQ ID NO: 2037 - protein, 791 aa, unidentified; identical to SEQ ID NO: 1802
  REGION 1..791: note = Description of Unknown: Synthetic polypeptide

SEQ ID NO: 2038 - protein, 789 aa, unidentified
  REGION 1..789: note = Description of Unknown: Synthetic polypeptide
MPRILKGFLIDADFETVEGRALIRLFLRGEEGSFVVYDDSFSPYFYALPGDEPERVKERILASGAAEAIQKVEIEEKRLFGTPRVALRITVSHPQDVPRIRERIRRVEGVDLILEHDILFVRRYLIDRGIKPLTWLRLEVEERDGRALLRGVEQLEEEPPELRVAAVAIAVYNPKGAPRSSKDEIIMISVATSDGVEKVLTWREVQGLEQVEVLQDEKEMLLRFAELIKEGDYDVIVGYNTDSFDFPYIRDRLKKLGISLPLGRLDAELEVSRRGALPEARIRGRAHVDLYPIVRRHVKLNSYDLESVVEELLGIKKEKLDGERLFTYWDEGGEKRALLARYALEDARVTLALAEKFLPLYLDLSTIVGQSLNDVARMTSGQLVEWLLMRYATPRGELIPNHPAGEEYAARARATYAGGYVREPKRGLVEHIAVFDFRSFGPSIIVSHNIDPSTLIVGNCEENRAPELEYCFSLEREGFIPAILKELIRRRAEIKRELKRSEGDRRRTLSFAEKALKILANSFYGYMGYPRARWYRRECAESVAAFARMYIKQVMRIAEEEFKLEVVYGDTDSLFVVIPPEKRELAQKFLQKVNESMPGIIELEFEGFYRRGLFVTKKRYALLSEDGKMVVKGLEFVRRDWAPIARETQKEVLRILLEEADPEKAARLVRDVIERIRQRRVSLEDITIYTQLTKRIKSYKSLEPHVVAAQKLKERGREVAPGMIIGYIITKGTKGISQRATPVEFARLEDYDPEYYIDNQILPAIQRIFEAIGYTRDYLKEGITQTSLS

SEQ ID NO: 2039 - protein, 792 aa, unidentified
  REGION 1..792: note = Description of Unknown: Synthetic polypeptide
MPRILKGFLIDADFETVEGRALIRLFLRGEEGSFVVYDDSFSPYFYALPGDEPERVKERILASGAAEAIQKVEIEEKRLFGTPRVALRITVSHPQDVPRIRERIRRVEGVDLILEHDILFVRRYLIDRGIKPLTWLRLEVEERDGRALLRGVEQLEEEPPELRVAAVAIAVYNPKGAPRSSKDEIIMISVATSDGVEKVLTWREVQGLEQVEVLQDEKEMLLRFAELIKEGDYDVIVGYNTDSFDFPYIRDRLKKLGISLPLGRLDAELEVSRRGALPEARIRGRAHVDLYPIVRRHVKLNSYVLESVVEELLGIKKEKLDGERLFTYWDEGGEKRALLARYALEDARVTLALAEKFLPLYCELSTIVGQSLNDVARMTSGQLVEWLLMRYATPRGELIPNHPAGQEYAARARATYAGGYVREPKRGLVEHIAVFDFRSFGPSIIVSHNIDPSTLIVGNCEENRAPELEYCFSLEREGFIPAILKELIRRRAEIKRELKRSEGDRRRTLSFAEKALKILANSFYGYMGYPRARWYRRECAESVAAFARMYIKQVMRIAEEEFKLEVVYGDTDSLFVVIPPEKRELAQKFLQKVNESMPGIIELEFEGFYRRGLFVTKKRYALLSEDGKMVVKGLEFVRRDWAPIARETQKEVLRILLEEADPEKAARLVRDVIERIRQRRVSLEDITIYTQLTKRIKSYKSLEPHVVAAQKLKERGREVAPGMIIGYIITKGTKGISQRATPVEFARLEDYDPEYYIDNQILPAIQRIFEAIGYTRDYLKEGITQTSLSRWF

SEQ ID NO: 2040 - protein, 792 aa, unidentified
  REGION 1..792: note = Description of Unknown: Synthetic polypeptide
MPRILKGFLIDADFETVEGRALIRLFLRGEEGSFVVYDDSFSPYFYALPGDEPERVKERILASGAAEAIQKVEIEEKRLFGTPRVALRITVSHPQDVPRIRERIRRVEGVDLILEHDILFVRRYLIDRGIKPLTWLRLEVEERDGRALLRGVEQLEEEPPELRVAAVAIAVYNPKGAPRSSKDEIIMISVATSDGVEKVLTWREVQGLEQVEVLQDEKEMLLRFAELIKEGDYDVIVGYNTDSFDFPYIRDRLKKLGISLPLGRLDAELEVSRRGALPEARIRGRAHVDLYPIVRRHVKLNSYVLESVVEELLGIKKEKLDGERLFTYWDEGGEKRALLARYALEDARVTLALAEKFLPLYCELSTIVGQSLNDVARMDSGQLVEWLLMRYATPRGELIPNHPAGEEYAARARATYAGGYVREPKRGLVEHIAVFDFRSFGPSIIVSHNIDPSTLIVGNCEENRAPELEYCFSLEREGFIPAILKELIRRRAEIKRELKRSEGDRRRTLSFAEKALKILANSFYGYMGYPRARWYRRECAESVAAFARMYIKQVMRIAEEEFKLEVVYGDTDSLFVVIPPEKRELAQKFLQKVNESMPGIIELEFEGFYRRGLFVTKKRYALLSEDGKMVVKGLEFVRRDWAPIARETQKEVLRILLEEADPEKAARLVRDVIERIRQRRVSLEDITIYTQLTKRIKSYKSLEPHVVAAQKLKERGREVAPGMIIGYIITKGTKGISQRATPVEFARLEDYDPEYYIDNQILPAIQRIFEAIGYTRDYLKEGITQTSLSRWF

SEQ ID NO: 2041 - protein, 792 aa, unidentified
  REGION 1..792: note = Description of Unknown: Synthetic polypeptide
MPRILKGFLIDADFETVEGRALIRLFLRGEEGSFVVYDDSFSPYFYALPGDEPERVKERILASGAAEAIQKVEIEEKRLFGTPRVALRITVSHPQDVPRIRERIRRVEGVDLILEHDILFVRRYLIDRGIKPLTWLRLEVEERDGRALLRGVEQLEEEPPELRVAAVAIAVYNPKGAPRSSKDEIIMISVATSDGVEKVLTWREVQGLEQVEVLQDEKEMLLRFAELIKEGDYDVIVGYNTDSFDFPYIRDRLKKLGISLPLGRLDAELEVSRRGALPEARIRGRAHVDLYPIVRRHVKLNSYVLESVVEELLGIKKEKLDGERLFTYWDEGGEKRALLARYALEDARVTLALAEKFLPLYCELSTIVGQSLNDVARMTSGQLVEWLLMRYATPRGELIPNHPAGEEYAARARATYAGGYVREPKRGLVEHIAVFTFRSFGPSIIVSHNIDPSTLIVGNCEENRAPELEYCFSLEREGFIPAILKELIRRRAEIKRELKRSEGDRRRTLSFAEKALKILANSFYGYMGYPRARWYRRECAESVAAFARMYIKQVMRIAEEEFKLEVVYGDTDSLFVVIPPEKRELAQKFLQKVNESMPGIIELEFEGFYRRGLFVTKKRYALLSEDGKMVVKGLEFVRRDWAPIARETQKEVLRILLEEADPEKAARLVRDVIERIRQRRVSLEDITIYTQLTKRIKSYKSLEPHVVAAQKLKERGREVAPGMIIGYIITKGTKGISQRATPVEFARLEDYDPEYYIDNQILPAIQRIFEAIGYTRDYLKEGITQTSLSRWF

SEQ ID NO: 2042 - protein, 791 aa, unidentified
  REGION 1..791: note = Description of Unknown: Synthetic polypeptide
MPRILKGFLIDADFETVEGRALIRLFLRGEEGSFVVYDDSFSPYFYALPGDEPERVKERILASGAAEAIQKVEIEEKRLFGTPRVALRITVSHPQDVPRIRERIRRVEGVDLILEHDILFVRRYLIDRGIKPLTWLRLEVEERDGRALLRGVEQLEEEPPELRVAAVAIAVRNPKGAPRSSKDEIIMISVATSDGVEKVLTWREVQGLEQVEVLQDEKEMLLRFAELIKEGDYDVIVGYNTDSFDFPYIRDRLKKLGISLPLGRLDAELEVSRRGALPEARIRGRAHVDLYPIVRRHVKLNSYVLESVVEELLGIKKEKLDGERLFTYWDEGGEKRALLARYALEDARVTLALAEKFLPLYLELSTIVGQSLNDVARMTSGQLVEWLLMRYATPRGELIPNHPAGEEYAARARATYAGGYVREPKRGLVEHIAVFDFRSFGPSIIVSHNIDPSTLIVGNCEENRAPELEYCFSLEREGFIPAILKELIRRRAEIKRELKRSEGDRRRTLSFAEKALKILANSFYGYMGYPRARWYRRECAESVAAFARMYIKQVMRIAEEEFKLEVVYGDTDSLFVVIPPEKRELAQKFLQKVNESMPGIIELEFEGFYRRGLFVTKKRYALLSEDGKMVVKGLEFVRRDWAPIARETQKEVLRILLEEADPEKAARLVRDVIERIRQRRVSLEDITIYTQLTKRIKSYKSLEPHVVAAQKLKERGREVAPGMIIGYIITKGTKGISQRATPVEFARLEDYDPEYYIDNQILPAIQRIFEAIGYTRDYLKEGITQTSLSRR

SEQ ID NO: 2043 - protein, 792 aa, unidentified
  REGION 1..792: note = Description of Unknown: Synthetic polypeptide
MPRILKGFLIDADFETVEGRALIRLFLRGEEGSFVVYDDSFSPYFYALPGDEPERVKERILASGAAEAIQKVEIEEKRLFGTPRVALRITVSHPQDVPRIRERIRRVEGVDLILEHDILFVRRYLIDRGIKPLTWLRLEVEERDGRALLRGVEQLEEEPPELRVAAVAIAVYNPKGAPRSSKDEIIMISVATSDGVEKVLTWREVQGLEQVEVLQDEKEMLLRFAELIKEGDYDVIVGYNTDSFDFPYIRDRLKKLGISLPLGRLDAELEVSRRGALPEARIRGRAHVDLYPIVRRHVKLNSYDLESVVEELLGIKKEKLDGERLFTYWDEGGEKRALLARYALEDARVTLALAEKFLPLYCELSTIVGQSLNDVARMTSGQLVEWLLMRYATPRGELIPNHPAGEEYAARARATYAGGYVREPKRGLVEHIAVFDFRSFGPSIIVSHNICPSTLIVGNCEENRAPELEYCFSLEREGFIPAILKELIRRRAEIKRELKRSEGDRRRTLSFAEKALKILANSFYGYMGYPRARWYRRECAESVAAFARMYIKQVMRIAEEEFKLEVVYGDTDSLFVVIPPEKRELAQKFLQKVNESMPGIIELEFEGFYRRGLFVTKKRYALLSEDGKMVVKGLEFVRRDWAPIARETQKEVLRILLEEADPEKAARLVRDVIERIRQRRVSLEDITIYTQLTKRIKSYKSLEPHVVAAQKLKERGREVAPGMIIGYIITKGTKGISQRATPVEFARLEDYDPEYYIDNQILPAIQRIFEAIGYTRDYLKEGITQTSLSRWF

SEQ ID NO: 2044 - protein, 792 aa, unidentified
  REGION 1..792: note = Description of Unknown: Synthetic polypeptide
MPRILKGFLIDADNETVEGRALIRLFLRGEEGSFVVYDDSFSPYFYALPGDEPERVKERILASGAAEAIQKVEIEEKRLFGTPRVALRITVSHPQDVPRIRERIRRVEGVDLILEHDILFVRRYLIDRGIKPLTWLRLEVEERDGRALLRGVEQLEEEPPELRVAAVAIAVYNPKGAPRSSKDEIIMISVATSDGVEKVLTWREVQGLEQVEVLQDEKEMLLRFAELIKEGDYDVIVGYNTDSFDFPYIRDRLKKLGISLPLGRLDAELEVSRRGALPEARIRGRAHVDLYPIVRRHVKLNSYDLESVVEELLGIKKEKLDGERLFTYWDEGGEKRALLARYALEDARVTLALAEKFLPLYCELSTIVGQSLNDVARMTSGQLVEWLLMRYATPRGELIPNHPAGEEYAARARATYAGGYVREPKRGLVEHIAVFDFRSFGPSIIVSHNIDPSTLIVGNCEENRAPELEYCFSLEREGFIPAILKELIRRRAEIKRELKRSEGDRRRTLSFAEKALKILANSFYGYMGYPRARWYRRECAESVAAFARMYIKQVMRIAEEEFKLEVVYGDTDSLFVVIPPEKRELAQKFLQKVNESMPGIIELEFEGFYRRGLFVTKKRYALLSEDGKMVVKGLEFVRRDWAPIARETQKEVLRILLEEADPEKAARLVRDVIERIRQRRVSLEDITIYTQLTKRIKSYKSLEPHVVAAQKLKERGREVAPGMIIGYIITKGTKGISQRATPVEFARLEDYDPEYYIDNQILPAIQRIFEAIGYTRDYLKEGITQTSLSRWF

SEQ ID NO: 2045 - protein, 792 aa, unidentified
  REGION 1..792: note = Description of Unknown: Synthetic polypeptide
MPRILKGFLIDADFETVEGRALIRLFLRGEEGSFVVYDDSFSPYFYALPGDEPERVKERILASGAAEAIQKVEIEEKRLFGTPRVALRITVSHPQDVPRIRERIRRVEGVDLILEHDILFVRRYLIDRGIKPLTWLRLEVEERDGRALLRGVEQLEEEPPELRVAAVAIAVYNPKGAPRSSKDEIIMISVATSDGVEKVLTWREVQGLEQVEVLQDEKEMLLRFAELIKEGDYDVIVGYNTDSFDFPYIRDRLKKLGISLPLGRLDAELEVSRRGALPEARIRGRAHVDLYPIVRRHVKLNSYDLESVVEELLGIKKEKLDGERLFTYWDEGGEKRALLARYALEDARVTLALAEKFLPLYCELSTIVGQSLNDVARMTSGQLVEWLLMRYATPRGELIPNHPAGEEYAARARATYAGGYVREPKRGLVEHIAVFDFRSFGPSIIVSHNIDPSTLIVGNCEENRAPELEYCFSLEREGFIPAILKELIRRRAEIKRELKRSEGDRRRTLSFAEKALKILANSFYGYMGYPRARWYRRECAESVAAFARMYIKQVMRIAEEEFKLEVVYGDTDSLFVVIPPEKRELAQKFLQKVNESMPGIIELEFEGFYRRGLFVTKKRYALLSEDGKMVVKGLEFVRRDWAPIARETQKEVLRILLEEADPEKAARLVRDVIEDIRQRRVSLEDITIYTQLTKRIKSYKSLEPHVVAAQKLKERGREVAPGMIIGYIITKGTKGISQRATPVEFARLEDYDPEYYIDNQILPAIQRIFEAIGYTRDYLKEGITQTSLSRWF

SEQ ID NO: 2046 - protein, 792 aa, unidentified
  REGION 1..792: note = Description of Unknown: Synthetic polypeptide
MPRILKGFLIDADFGTVEGRALIRLFLRGEEGSFVVYDDSFSPYFYALPGDEPERVKERILASGAAEAIQKVEIEEKRLFGTPRVALRITVSHPRDVPRIRERIRRVEGVDLILEHDILFVRRYLIDRGIKPLTWLRLEVEERDGRALLRGVEQLEEEPPELRVAAVAIAVYNPKGAPRSSKDEIIMISVATSDGVEKVLTWREVQGLEQVEVLQDEKEMLLRFAELIKEGDYDVIVGYNTDSFDFPYIRDRLKKLGISLPLGRLDAELEVSRRGALPEARIRGRAHVDLYPIVRRHVKLNSYVLESVVEELLGIKKEKLDGERLFTYWDEGGEKRALLARYALEDARVTLALAEKFLPLYCELSTIVGQSLNDVARMTSGQLVEWLLMRYATPRGELIPNHPAGEEYAARARATYAGGYVREPKRGLVEHIAVFDFRSFGPSIIVSHNIDPSTLIVGNCEENRAPELEYCFSLEREGFIPAILKELIRRRAEIKRELKRSEGDRRRTLSFAEKALKILANSFYGYMGYPRARWYRRECAESVAAFARMYIKQVMRIAEEEFKLEVVYGDTDSLFVVIPPEKRELAQKFLQKVNESMPGIIELEFEGFYRRGLFVTKKRYALLSEDGKMVVKGLEFVRRDWAPIARETQKEVLRILLEEADPEKAARLVRDVIERIRQRRVSLEDITIYTQLTKRIKSYKSLEPHVVAAQKLKERGREVAPGMIIGYIITKGTKGISQRATPVEFARLEDYDPEYYIDNQILPAIQRIFEAIGYTRDYLKEGITQTSLSRWF

SEQ ID NO: 2047 - protein, 792 aa, unidentified
  REGION 1..792: note = Description of Unknown: Synthetic polypeptide
MPRILKGFLIDADFETVEGRALIRLFLRGEEGSFVVYDDSFSPYFYALPGDEPERVKERILASGAAEAIQKVEIEEKRLFGTPRVALRITVSHPQDVPRIRERIRRVEGVDLILEHDILFVRRYLIDRGIKPLTWLRLEVEERDGRALLRGVEQLEEEPPELRVAAVAIAVYNPKGAPRSSKDEIIMISVATSDGVEKVLTWREVQGLEQVEVLQDEKEMLLRFAELIKEGDYDVIVGYNTDSFDFPYIRDYLKKLGISLPLDRLDAELEVSRRGALPEARIRGRAHVDLYPIVRRHVKLNSYVLESVVEELLGIKKEKLDGERLFTYRDEGGEKRALLARYALEDARVTLALAEKFLPLYCELSTIVGQSLNDVARMTSGQLVEWLLMRYATPRGELIPNHPAGEEYAARARATYAGGYVREPKRGLVEHIAVFDFRSFGPSIIVSHNIDPSTLIVGNCEENRAPELEYCFSLEREGFIPAILKELIRRRAEIKRELKRSEGDRRRTLSFAEKALKILANSFYGYMGYPRARWYRRECAESVAAFARMYIKQVMRIAEEEFKLEVVYGDTDSLFVVIPPEKRELAQKFLQKVNESMPGIIELEFEGFYRRGLFVTKKRYALLSEDGKMVVKGLEFVRRDWAPIARETQKEVLRILLEEADPEKAARLVRDVIERIRQRRVSLEDITIYTQLTKRIKSYKSLEPHVVAAQKLKERGREVAPGMIIGYIITKGTKGISQRATPVEFARLEDYDPEYYIDNQILPAIQRIFEAIGYTRDYLKEGITQTSLSRWF

SEQ ID NO: 2048 - protein, 792 aa, unidentified
  REGION 1..792: note = Description of Unknown: Synthetic polypeptide
MPRILKGFLIDADFETVEGRALIRLFLRGEEGSFVVYDDSFSPYFYALPGDEPERVKERILASGAAEAIQKVEIEEKRLFGTPRVALRITVSHPQDVPRIRERIRRVEGVDLILEHDILFVRRYLIDRGIKPLTWLRLEVEERDGRALLRGVEQLEEEPPELRVAAVAIAVYNPKGAPRSSKDEIIMISVATSDGVEKVLTWREVQGLEQVEVLQDEKEMLLRFAELIKEGDYDVIVGYNTDSFDFPYIRDRLKKLGISLPLGRLDAELEVSRRGALPEARIRGRAHVDLYPIVRRHVKLNSYVLESVVEELLGIKKEKLDGERLFTYWDEGGEKRALLARYALEDARVTLALAEKFLPLYCELSTIVGQSLNDVARMTSGQLVEWLLMRYATPRGELIPNHPAGEEYAARARATYAGGYVREPKRGLVEHIAVFDFRSFGPSIIVSHNIDPSTLIVGNCEENRAPELEYCFSLEREGFIPAILKELIRRRAEIKRELKRSEGDRRRTLSFAEKALKILANSFYGYDGYPRARWYRRECAESVAAFARMYIKQVMRIAEEEFKLEVVYGDTDSLFVVIPPEKRELAQKFLQKVNESMPGIIELEFEGFYRRGLFVTKKRYALLSEDGKMVVKGLEFVRRDWAPIARETQKEVLRILLEEADPEKAARLVRDVIERIRQRRVSLEDITIYTQLTKRIKSYKSLEPHVVAAQKLKERGREVAPGMIIGYIITKGTKGISQRATPVEFARLEDYDPEYYIDNQILPAIQRIFEAIGYTRDYLKEGITQTSLSRWF

SEQ ID NO: 2049 - protein, 792 aa, unidentified
  REGION 1..792: note = Description of Unknown: Synthetic polypeptide
MPRILKGFLIDADFETVEGRALIRLFLRGEEGSFVVYDDSFSPYFYALPGDEPERVKERILASGAAEAIQKVEIEEKRLFGTPRVALRITVSHPQDVPRIRERIRRVEGVDLILEHDILFVRRYLIDRGIKPLTWLRLEVEERDGRALLRGVEQLEEEPPELRVAAVAIAVYNPKGAPRSSKDEIIMISVATSDGVEKVLTWREVQGLEQVEVLQDEKEMLLRFAELIKEGDYDVIVGYGTDSFDFPYIRDRLKKLGISLPLGRLDAELEVSRRGALPEARIRGRAHVDLYPIVRRHVKLNSYVLESVVEELLGIKKEKLDGERLFTYWDEGGEKRALLARYALEDARVTLALAEKFLPLYCELSTIVGQSLNDVARMTSGQLVEWLLMRYATPRGELIPNHPAGEEYAARARATYAGGYVREPKRGLVEHIAVFDFRSFGPSIIVSHNIDPSTLIVGNCEENRAPELEYCFSLEREGFIPAILKELIRRRAEIKRELKRSEGDRRRTLSFAEKALKILANSFYGYMGYPRARWYRRECAESVAAFARMYIKQVMRIAEEEFKLEVVYGDTDSLFVVIPPEKRELAQKFLQKVNESMPGIIELEFEGFYRRGLFVTKKRYALLSEDGKMVVKGLEFVRRDWAPIARETQKEVLRILLEEADPEKAARLVRDVIERIRQRRVSLEDITIYTQLTKRIKSYKSLEPHVVAAQKLKERGREVAPGMIIGYIITKGTKGISQRATPVEFARLEDYDPEYYIDNQILPAIQRIFEAIGYTRDYLKEGITQTSLSRWF

SEQ ID NO: 2050 - protein, 792 aa, unidentified
  REGION 1..792: note = Description of Unknown: Synthetic polypeptide
MPRILKGFLIDADFETVEGRALIRLFLRGEEGSFVVYDDSFSPYFYALPGDEPERVKERILASGAAEAIQKVEIEEKRLFGTPRVALRITVSHPQDVPRIRERIRRVEGVDLILEHDILFVRRYLIDRGIKPLTWLRLEVEERDGRALLRGVEQLEEEPPELRVAAVAIAVYNPKGAPRSSKDEIIMISVATSDGVEKVLTWREVQGLEQVEVLQDEKEMLLRFAELIKEGDYDVIVGYNTDSFDFPYIRDRLKKLGISLPLGRLDAELEVSRRGALPEARIRGRAHVDLYPIVRRHVKLNSYVLESVVEELLGIKKEKLDGERLFTYWDEGGEKRALLARYALEDARVTLALAEKFLPLYCELSTIVGQSLNDVARMTSGQLVEWLLMRYATPRGELIPNHPAGEEYAARARATYAGGYVREPKRGLVEHIAVFDFRSFGPSIIVSHNIDPSTLIVGNCEENRAPELEYCFSLEREGFIPAILKELIRRRAEIKRELKRSEGDRRRTLSFAEKALKILANSFYGYMGYPRARWYRRECAESVAAFARMYIKQVMRIAEEEFKLEVVYGDTDSLFVVIPPEKRELAQKFLQRVNESMPGIIELEFEGFYRRGLFVTKKRYALLSEDGKMVVKGLEFVRRDWAPIARETQKEVLRILLEEADPEKAARLVRDVIERIRQRRVSLEDITIYTQLTKRIKSYKSLEPHVVAAQKLKERGREVAPGMIIGYIITKGTKGISQRATPVEFARLEDYDPEYYIDNQILPAIQRIFEAIGYTRDYLKEGITQTSLSRWF

SEQ ID NO: 2051 - protein, 792 aa, unidentified
  REGION 1..792: note = Description of Unknown: Synthetic polypeptide
MPRILKGFLIDADFETVEGRALIRLFLRGEEGSFVVYDDSFSPYFYALPGDEPERVKERILASGAAEAIQKVEIEEKRLFGTPRVALRITVSHPQDVPRIRERIRRVEGVDLILEHDILFVRRYLIDRGIKPLTWLRLEVEERDGRALLRGVEQLEEEPPELRVAAVAIAVYNPKGAPRSSKDEIIMISVATSDGVEKVLTWREVQGLEQVEVLQDEKEMLLRFAELIKEGDYDVIVGYNTDSFDFPYIRDRLKKLGISLPLGRLDAELEVSRRGALPEARIRGRAHVDLYPIVRRHVKLNSYVLESVVEELLGIKKEKLDGERLFTYWDEGGEKRALLARNALEDARVTLALAEKFLPLYCELSTIVGQSLNDVARMTSGQLVEWLLMRYATPRGELIPNHPAGEEYAARARATYAGGYVREPKRGLVEHIAVFDFRSFGPSIIVSHNIDPSTLIVGNCEENRAPELEYCFSLEREGFIPAILKELIRRRAEIKRELKRSEGDRRRTLSFAEKALKILANSFYGYMGYPRARWYRRECAESVAAFARMYIKQVMRIAEEEFKLEVVYGDTDSLFVVIPPEKRELAQKFLQKVNESMPGIIELEFEGFYRRGLFVTKKRYALLSEDGKMVVKGLEFVRRDWAPIARETQKEVLRILLEEADPEKAARLVRDVIERIRQRRVSLEDITIYTQLTKRIKSYKSLEPHVVAAQKLKERGREVAPGMIIGYIITKGTKGISQRATPVEFARLEDYDPEYYIDNQILPAIQRIFEAIGYTRDYLKEGITQTSLSRWF

SEQ ID NO: 2052 - protein, 792 aa, unidentified; identical to SEQ ID NO: 1790
  REGION 1..792: note = Description of Unknown: Synthetic polypeptide

SEQ ID NO: 2053 - protein, 792 aa, unidentified
  REGION 1..792: note = Description of Unknown: Synthetic polypeptide
MPRILKGFLIDADFETVEGRALIRLFLRGEEGSFVVYDDSFSPYFYALPGDEPERVKERILASGAAEAIQKVEIEEKRLFGTPRVALRITVSHPQDVPRIRERIRRVEGVDLILEHDILFVRRYLIDRGIKPLTWLRLEVEERDGRALLRGVEQLEEEPPELRVAAVAIAVYNPKGAPRSSKDEIIYISVATSDGVEKVLTWREVQGLEQVEVLQDEKEMLLRFAELIKEGDYDVIVGYNTDSFDFPYIRDRLKKLGISLPLGRLDAELEVSRRGALPEARIRGRAHVDLYPIVRRHVKLNSYDLESVVEELLGIKKEKLDGERLFTYWDEGGEKRALLARYALEDARVTLALAEKFLPLYCELSTIVGQSLNDVARMTSGQLVEWLLMRYATPRGELIPNHPAGEEYAARARATYAGGYVREPKRGLVEHIAVFDFRSFGPSIIVSHNIDPSTLIVGNCEENRAPELEYCFSLEREGFIPAILKELIRRRAEIKRELKRSEGDRRRTLSFAEKALKILANSFYGYMGYPRARWYRRECAESVAAFARMYIKQVMRIAEEEFKLEVVYGDTDSLFVVIPPEKRELAQKFLQKVNESMPGIIELEFEGFYRRGLFVTKKRYALLSEDGKMVVKGLEFVRRDWAPIARETQKEVLRILLEEADPEKAARLVRDVIERIRQRRVSLEDITIYTQLTKRIKSYKSLEPHVVAAQKLKERGREVAPGMIIGYIITKGTKGISQRATPVEFARLEDYDPEYYIDNQILPAIQRIFEAIGYTRDYLKEGITQTSLSRWF

SEQ ID NO: 2054 - protein, 792 aa, unidentified
  REGION 1..792: note = Description of Unknown: Synthetic polypeptide
MPRILKGFLIDADFETVEGRALIRLFLRGEEGSFVVYDDSFSPYFYALPGDEPERVKERILASGAAEAIQKVEIEEKRLFGTPRVALRITVSHPQDVPRIRERIRRVEGVDLILEHDILFVRRYLIDRGIKPLTWLRLEVEERDGRALLRGVEQLEEEPPELRVAAVARAVYNPKGAPRSSKDEIIMISVATSDGVEKVLTWREVQGLEQVEVLQDEKEMLLRFAELIKEGDYDVIVGYNTDSFDFPYIRDRLKKLGISLPLGRLDAELEVSRRGALPEARIRGRAHVDLYPIVRRHVKLNSYVLESVVEELLGIKKEKLDGERLFTYWDEGGEKRALLARYALEDARVTLALAEKFLPLYCELSTIVGQSLNDVARMTSGQLVEWLLMRYATPRGELIPNHPAGEEYAARARATYAGGYVREPKRGLVEHIAVFDFRSFGPSIIVSHNIDPSTLIVGNCEENRAPELEYCFSLEREGFIPAILKELIRRRAEIKRELKRSEGDRRRTLSFAEKALKILANSFYGYMGYPRARWYRRECAESVAAFARMYIKQVMRIAEEEFKLEVVYGDTDSLFVVIPPEKRELAQKFLQKVNESMPGIIELEFEGFYRRGLFVTKKRYALLSEDGKMVVKGLEFVRRDWAPIARETQKEVLRILLEEADPEKAARLVRDVIERIRQRRVSLEDITIYTQLTKRIKSYKSLEPHVVAAQKLKERGREVAPGMIIGYIITKGTKGISQRATPVEFARLEDYDPEYYIDNQILPAIQRIFEAIGYTRDYLKEGITQTSLSRWF

SEQ ID NO: 2055 - protein, 792 aa, unidentified; identical to SEQ ID NO: 1753
  REGION 1..792: note = Description of Unknown: Synthetic polypeptide

SEQ ID NO: 2056 - protein, 792 aa, unidentified; identical to SEQ ID NO: 1753
  REGION 1..792: note = Description of Unknown: Synthetic polypeptide

SEQ ID NO: 2057 - protein, 792 aa, unidentified
  REGION 1..792: note = Description of Unknown: Synthetic polypeptide
MPRILKGFLIDADFETVEGRALIRLFLRGEEGSFVVYDDSFSPYFYALPGDEPERVKERILASGAAVAIQKVEIEEKRLFGTPRVALRITVSHPQDVPRIRERIRRVEGVDLILEHDILFVRRYLIDRGIKPLTWLRLEVEERDGRALLRGVEQLEEEPPELRVAAVAIAVYNPKGAPRSSKDEIIMISVATSDGVEKVLTWREVQGLEQVEVLQDEKEMLLRFAELIKEGDYDVIVGYNTDSFDFPYIRDRLKKLGISLPLGRLDAELEVSRRGALPEARIRGRAHVDLYPIVRRHVKLNSYDLESVVEELLGIKKEKLDGERLFTYWDEGGEKRALLARYALEDARVTLALAEKFLPLYLELSTIVGQSLNDVARMTSGQLVEWLLMRYATPRGELIPNHPAGEEYAARARATYAGGYVREPKRGLVEHIAVFDFRSFGPSIIVSHNIDPSTLIVGNCEENRAPELEYCFSLEREGFIPAILKELIRRRAEIKRELKRSEGDRRRTLSFAEKALKILANSFYGYMGYPRARWYRRECAESVAAFARMYIKQVMRIAEEEFKLEVVYGDTDSLFVVIPPEKRELAQKFLQKVNESMPGIIELEFEGFYRRGLFVTKKRYALLSEDGKMVVKGLEFVRRDWAPIARETQKEVLRILLEEADPEKAARLVRDVIERIRQRRVSLEDITIYTQLTKRIKSYKSLEPHVVAAQKLKERGREVAPGMIIGYIITKGTKGISQRATPVEFARLEDYDPEYYIDNQILPAIQRIFEAIGYTRDYLKEGITQTSLSRWF

SEQ ID NO: 2058 - protein, 792 aa, unidentified
  REGION 1..792: note = Description of Unknown: Synthetic polypeptide
MPRILKGFLIDADFETVEGRALIRLFLRGEEGSFVVYDDSFSPYFYALPGDEPERVKERILASGAAEAIQKVEIEEKRLFGTPRVALRITVSHPQDVPRIRERIRRVEGVDLILEHDILFVRRYLIDRGIKPLTWLRLEVEERDGRALLRGVEQLEEEPPELRVAAVAIAVYNPKGAPRSSKDEIIMISVATSDGVEKVLTWREVQGLEQVEVLQDEKEMLLRFAELIKEGDYDVIVGYNTDSFDFPYIRDRLKKLGISLPLGRLDAELEVSRRGALPEARIRGRAHVDLYPIVRRHVKLNSYVLESVVEELLGIKKEKLDGERLFTYWDEGGEKRALLARYALEDARVTLALAEKFLPLYCELSTIVGQSLNDVARMTSGQLVEWLLMRYATPRGELIPNHPAGEEYAARARATYAGGYVREPKRGLVEHIAVFDFRSFGPSIIVSHNIDPSTLIVGNCEENRAPELEYCFSLEREGFIPAILKELIRRRAEIKRELKRSEGDRRRTLSFAEKALKILANSFYGYMGYPRARWYRRECAESVAAFARMYIKQVMRIAEEEFKLEVVYGDTDSLFVVIPPEKRELAQKFLQKVNESMPGIIELEFEGFYRRGLFVTKKRYALLSEDGKMVVKGLEFVRRDWAPIARETQKEVLRILLEETDPEKAARLVRDVIERIRQRRVSLEDITIYTQLTKRIKSYKSLEPHVVAAQKLKERGREVAPGMIIGYIITKGTKGVSQRATPVEFARLEDYDPEYYIDNQILPAIQRIFEAIGYTRDYLKEGITQTSLSRWF

SEQ ID NO: 2059 - protein, 792 aa, unidentified
  REGION 1..792: note = Description of Unknown: Synthetic polypeptide
MPRILKGFLIDADFETVEGRALIRLFLRGEEGSFVVYDDSFSPYFYALPGDEPERVKERILASGAAEAIQKVEIEEKRLFGTPRVALRITVSHPQDVPRIRERIRRVEGVDLILEHDILFVRRYLIDRGIKPLTWLRLEVEERDGRALLRGVEQLEEEPPELRVAAVAIAVYNPKGAPRSSKDEIIMISVATSDGVEKVLTWREVQGLEQVEVLQDEKEMLLRFAELIKEGDYDVIVGYNTDSFDFPYIRDRLKKLGISLPLGRLDAELEVSRRGALPEARIRGRAHVDLYPIVRRHVKLNSYVLESVVEELLGIKKEKLDGERLFTYWDEGGEKRALLARYALEDARVTLALAEKFLPLYCELSTIVGQSLNDVARMTSGQLVEWLLMRYATPRGELIPNHPAGEEYAARARATYAGGYVREPKRGLVEHIAVFDFRSFGPSIIVSHNIDPSTLIVGNCEENRAPELEYCFSLEREGFIPAILKELIRRRAEIKRELKRSEGDRRRTLSFAEKALKILAESFYGYMGYPRARWYRRECAESVAAFARMYIKQVMRIAEEEFKLEVVYGDTDSLFVVIPPEKRELAQKFLQKVNESMPGIIELEFEGFYRRGLFVTKKRYALLSEDGKMVVKGLEFVRRDWAPIARETQKEVLRILLEEADPEKAARLVRDVIERIRQRRVSLEDITIYTQLTKRIKSYKSLEPHVVAAQKLKERGREVAPGMIIGYIITKGTKGISQRATPVEFARLEDYDPEYYIDNQILPAIQRIFEAIGYTRDYLKEGITQTSLSRWF

SEQ ID NO: 2060 - protein, 789 aa, unidentified
  REGION 1..789: note = Description of Unknown: Synthetic polypeptide
MPRILKGFLIDADFETVEGRALIRLFLRGEEGSFVVYDDSFSPYFYALPGDEPERVKERILASGAAEAIQKVEIEEKRLFGTPRVALRITVSHPQDVPRIRERIRRVEGVDLILEHDILFVRRYLIDRGIKPLTWLRLEVEERDGRALLRGVEQLEEEPPELRVAAVAIAVRNPKGAPRSSKDEIIMISVATSDGVEKVLTWREVQGLEQVEVLQDEKEMLLRFAELIKEGDYDVIVGYNTDSFDFPYIRDRLKKLGISLPLGRLDAELEVSRRGALPEARIRGRAHVDLYPIVRRHVKLNSYVLESVVEELLGIKKEKLDGERLFTYWDEGGEKRALLARYALEDARVTLALAEKFLPLYLELSTIVGQSLNDVARMTSGQLVEWLLMRYATPRGELIPNHPAGEEYAARARATYAGGYVREPKRGLVEHIAVFDFRSFGPSIIVSHNIDPSTLIVGNCEENRAPELEYCFSLEREGFIPAILKELIRRRAEIKRELKRSEGDRRRTLSFAEKALKILANSFYGYMGYPRARWYRRECAESVAAFARMYIKQVMRIAEEEFKLEVVYGDTDSLFVVIPPEKRELAQKFLQKVNESMPGIIELEFEGFYRRGLFVTKKRYALLSEDGKMVVKGLEFVRRDWAPIARETQKEVLRILLEEADPEKAARLVRDVIERIRQRRVSLEDITIYTQLTKRIKSYKSLEPHVVAAQKLKERGREVAPGMIIGYIITKGTKGISQRATPVEFARLEDYDPEYYIDNQILPAIQRIFEAIGYTRDYLKEGITQTSLS

SEQ ID NO: 2061 - protein, 792 aa, unidentified
  REGION 1..792: note = Description of Unknown: Synthetic polypeptide
MPRILKGFLIDADFETVEGRALIRLFLRGEEGSFVVYDDSFSPYFYALPGDEPERVKERILASGAAEAIQKVEIEEKRLFGTPRVALRITVSHPQDVPRIRERIRRVEGVDLILEHDILFVRRYLIDRGIKPLTWLRLEVEERDGRALLRGVEQLEEEPPELRVAAVAIAVYNPKGAPRSSKDEIIMISVATSDGVEKVLTWREVQGLEQVEVLQDEKEMLLRFAELIKEGDYDVIVGYNTDSFDFPYIRDRLKKLGISLPLGRLDAELEVSRRGALPEARIRGRAHVDLYPIVRRHVKLYSYVLESVVEELLGIKKEKLDGERLFTYWDEGGEKRALLARYALEDARVTLALAEKFLPLYCELSTIVGQSLNDVARMTSGQLVEWLLMRYATPRGELIPNHPAGEEYAARARATYAGGYVREPKRGLVEHIAVFDFRSFGPSIIVSHNIDPSTLIVGNCEENRAPELEYCFSLEREGFIPAILKELIRRRAEIKRELKRSEGDRRRTLSFAEKALKILANSFYGYMGYPRARWYRRECAESVAAFARMYIKQVMRIAEEEFKLEVVYGDTDSLFVVIPPEKRELAQKFLQKVNESMPGIIELEFEGFYRRGLFVTKKRYALLSEDGKMVVKGLEFVRRDWAPIARETQKEVLRILLEEADPEKAARLVRDVIERIRQRRVSLEDITIYTQLTKRIKSYKSLEPHVVAAQKLKERGREVAPGMIIGYIITKGTKGISQRATPVEFARLEDYDPEYYIDNQILPAIQRIFEAIGYTRDYLKEGITQTSLSRWF

SEQ ID NO: 2062 - protein, 792 aa, unidentified
  REGION 1..792: note = Description of Unknown: Synthetic polypeptide
MPRILKGFLIDADFETVEGRALIRLFLRGEEGSFVVYDDSFSPYFYALPGDEPERVKERILASGAAEAIQKVEIEEKRLFGTPRVALRITVSHPQDVPRIRERIRRVEGVDLILEHDILFVRRYLIDRGIKPLTWLRLEVEERDGRALLRGVEQLEEEPPELRVAAVAIAVYNPKGAPRSSKDEIIMISVATSDGVEKVLTWREVQGLEQVEVLQDEKEMLLRFAELIKEGDYDVIVGYNTDSFDFPYIRDRLKKLGISLPLGRLDAELEVSRRGALPEARIRGRAHVDLYPIVRRHVKLNSYVLESVVEELLGIKKEKLDGERLFTYWDEGGEKRALLARYALEDARVTLALAEKFLPLYCELSTIVGQSLNDVARMTSGQLVEWLLMRYATPRGELIPNHPAGEEYAARARATYAGGYVREPKRGLVEHIAVFDFRSFGPSIIVSHNIDPSTLIVGNCEENRAPELEYCFSLEREGFIPAILKELIRRRAEIKRELKRSEGDRRRTLSFAEKALKILANSFYGYMGYPRARWYRRECAESVAAFARMYIKQVMRIAEEEFKLEVVYGDTDSLFVVIPPEKRETAQKFLQKVNESMPGIIELEFEGFYRRGLFVTKKRYALLSEDGKMVVKGLEFVRRDWAPIARETQKEVLRILLEEADPEKAARLVRDVIERIRQRRVSLEDITIYTQLTKRIKSYKSLEPHVVAAQKLKERGREVAPGMIIGYIITKGTKGISQRATPVEFARLEDYDPEYYIDNQILPAIQRIFEAIGYTRDYLKEGITQTSLSRWF

SEQ ID NO: 2063 - protein, 792 aa, unidentified
  REGION 1..792: note = Description of Unknown: Synthetic polypeptide
MPRILKGFLIDADFETVEGRALIRLFLRGEEGSFVVYDDSFSPYFYALPGDEPERVKERILASGAAEAIQKVEIEEKRLFGTPRVALRITVSHPQDVPRIRERIRRVEGVDLILEHDILFVRRYLIDRGIKPLTWLRLEVEERDGRALLRGVEQLEEEPPELRVAAVAILVYNPKGAPRSSKDEIIMISVATSDGVEKVLTWREVQGLEQVEVLQDEKEMLLRFAELIKEGDYDVIVGYNTDSFDFPYIRDRLKKLGISLPLGRLDAELEVSRRGALPEARIRGRAHVDLYPIVRRHVKLNSYVLESVVEELLGIKKEKLDGERLFTYWDEGGEKRALLARYALEDARVTLALAEKFLPLYCELSTIVGQSLNDVARMTSGQLVEWLLMRYATPRGELIPNHPAGEEYAARARATYAGGYVREPKRGLVEHIAVFDFRSFGPSIIVSHNIDPSTLIVGNCEENRAPELEYCFSLEREGFIPAILKELIRRRAEIKRELKRSEGDRRRTLSFAEKALKILANSFYGYMGYPRARWYRRECAESVAAFARMYIKQVMRIAEEEFKLEVVYGDTDSLFVVIPPEKRELAQKFLQKVNESMPGIIELEFEGFYRRGLFVTKKRYALLSEDGKMVVKGLEFVRRDWAPIARETQKEVLRILLEEADPEKAARLVRDVIERIRQRRVSLEDITIYTQLTKRIKSYKSLEPHVVAAQKLKERGREVAPGMIIGYIITKGTKGISQRATPVEFARLEDYDPEYYIDNQILPAIQRIFEAIGYTRDYLKEGITQTSLSRWF

SEQ ID NO: 2064 - protein, 792 aa, unidentified
  REGION 1..792: note = Description of Unknown: Synthetic polypeptide
MPRILKGFLIDADFETVEGRALIRLFLRGEEGSFVVYDDSFSPYFYALPGDEPERVKERILASGAAEAIQKVEIEEKRLFGTPRVALRITVSHPQDVPRIRERIRRVEGVDLILEHDILFVRRYLIDRGIKPLTWLRLEVEERDGRALLRGVEQLEEEPPELRVAAVAIAVYNPKGAPRSSKDEIIMISVATSDGVEKVLTWREVQGLEQVEVLQDEKEMLLRFAELIKEGDYDVIVGYNTDSFDFPYIRDRLKKLGISLPLGRLDAELEVSRRGALPEARIRGRAHVDLYPIVRRHVKLNSYDLESVVEELLGIKKEKLDGERRFTYWDEGGEKRALLARYALEDARVTLALAEKFLPLYCELSTIVGQSLNDVARMTSGQLVEWLLMRYATPRGELIPNHPAGEEYAARARATYAGGYVREPKRGLVEHIAVFDFRSFGPSIIVSHNIDPSTLIVGNCEENRAPELEYCFSLEREGFIPAILKELIRRRAEIKRELKRSEGDRRRTLSFAEKALKILANSFYGYMGYPRARWYRRECAESVAAFARMYIKQVMRIAEEEFKLEVVYGDTDSLFVVIPPEKRELAQKFLQKVNESMPGIIELEFEGFYRRGLFVTKKRYALLSEDGKMVVKGLEFVRRDWAPIARETQKEVLRILLEEADPEKAARLVRDVIERIRQRRVSLEDITIYTQLTKRIKSYKSLEPHVVAAQKLKERGREVAPGMIIGYIITKGTKGISQRATPVEFARLEDYDPEYYIDNQILPAIQRIFEAIGYTRDYLKEGITQTSLSRWF

SEQ ID NO: 2065 - protein, 792 aa, unidentified
  REGION 1..792: note = Description of Unknown: Synthetic polypeptide
MPRILKGFLIDADFETVEGRALIRLFLRGEEGSFVVYDDSFSPYFYALPGDEPERVKERILASGAAEAIQKVEIEEKRLFGTPRVALRITVSHPQDVPRIRERIRRVEGVDLILEHDILFVRRYLIDRGIKPLTWLRLEVEERDGRALLRGVEQLEEEPPELRVAAVAIAVYNPKGAPRSSKDEIIMISVATSDGVEKVLTWREVQGLEQVEVLQDEKEMLLRFAELIKEGDYDVIVGYNTDSFDFPYIRDRLKKLGISLPLGRLDAELEVSRRGALPEARIRGRAHVDLYPIVRRHVKLNSYDLESVVEELLGIKKEKLDGERLFTYWDEGGEKRALLARYALEDARVTLALAEKFLPLYCELSTIVGQSLNDVARMTSGQLVEWLLMRYATPRGELIPNHPAGEEYAARARATYAGGYVREPKRGLVEHIAVFDFRSFGPSIIVSHNIDPSTLIVGNCEENRAPELERCFSLEREGFIPAILKELIRRRAEIKRELKRSEGDRRRTLSFAEKALKILANSFYGYMGYPRARWYRRECAESVAAFARMYIKQVMRIAEEEFKLEVVYGDTDSLFVVIPPEKRELAQKFLQKVNESMPGIIELEFEGFYRRGLFVTKKRYALLSEDGKMVVKGLEFVRRDWAPIARETQKEVLRILLEEADPEKAARLVRDVIERIRQRRVSLEDITIYTQLTKRIKSYKSLEPHVVAAQKLKERGREVAPGMIIGYIITKGTKGISQRATPVEFARLEDYDPEYYIDNQILPAIQRIFEAIGYTRDYLKEGITQTSLSRWF

SEQ ID NO: 2066 - protein, 792 aa, unidentified
  REGION 1..792: note = Description of Unknown: Synthetic polypeptide
MPRILKGFLIDADFETVEGRALIRLFLRGEEGSFVVYDDSFSPYFYALPGDEPERVKERILASGAAEAIQKVEIEEKRLFGTPRVALRITVSHPQDVPRIRERIRRVEGVDLILEHDILFVRRYLIDRGIKPLTWLRLEVEERDGRALLRGVEQLEEEPPELRVAAVAIAVYNPKGAPRSSKDEIIMISVATSDGVEKVLTWREVQGLEQVEVLQDEKEMLLRFAELIKEGDYDVIVGYNTDSFDFPYIRDRLKKLGISLPLGRLDAELEVSRRGWLPEARIRGRAHVDLYPIVRRHVKLNSYVLESVVEELLGIKKEKLDGERLFTYWDEGGEKRALLARYALEDARVTLALAEKFLPLYCELSTIVGQSLNDVARMTSGQLVEWLLMRYATPRGELIPNHPAGEEYAARARATYAGGYVREPKRGLVEHIAVFDFRSFGPSIIVSHNIDPSTLIVGNCEENRAPELEYCFSLEREGFIPAILKELIRRRAEIKRELKRSEGDRRRTLSFAEKALKILANSFYGYMGYPRARWYRRECAESVAAFARMYIKQVMRIAEEEFKLEVVYGDTDSLFVVIPPEKRELAQKFLQKVNESMPGIIELEFEGFYRRGLFVTKKRYALLSEDGKMVVKGLEFVRRDWAPIARETQKEVLRILLEEADPEKAARLVRDVIERIRQRRVSLEDITIYTQLTKRIKSYKSLEPHVVAAQKLKERGREVAPGMIIGYIITKGTKGISQRATPVEFARLEDYDPEYYIDNQILPAIQRIFEAIGYTRDYLKEGITQTSLSRWF

SEQ ID NO: 2067 - protein, 792 aa, unidentified
  REGION 1..792: note = Description of Unknown: Synthetic polypeptide
MPRILKGFLIDADFETVEGRALIRLFLRGEEGSFVVYDDSFSPYFYALPGDEPERVKERILASGAAEAIQKVEIEEKRLFGTPRVALRITVSHPQDVPRIRERIRRVEGVDLILEHDILFVRRYLIDRGIKPLTWLRLEVEERDGRALLRGVEQLEEEPPELRVAAVAIAVYNPKGAPRSSKDEIILISVATSDGVEKVLTWREVQGLEQVEVLQDEKEMLLRFAELIKEGDYDVIVGYNTDSFDFPYIRDRLKKLGISLPLGRLDAELEVSRRGALPEARIRGRAHVDLYPIVRRHVKLNSYVLESVVEELLGIKKEKLDGERLFTYWDEGGEKRALLARYALEDARVTLALAEKFLPLYCELSTIVGQSLNDVARMTSGQLVEWLLMRYATPRGELIPNHPAGEEYAARARATYAGGYVREPKRGLVEHIAVFDFRSFGPSIIVSHNIDPSTLIVGNCEENRAPELEYCFSLEREGFIPAILKELIRRRAEIKRELKRSEGDRRRTLSFAEKALKILANSFYGYMGYPRARWYRRECAESVAAFARMYIKQVMRIAEEEFKLEVVYGDTDSLFVVIPPEKRELAQKFLQKVNESMPGIIELEFEGFYRRGLFVTKKRYALLSEDGKMVVKGLEFVRRDWAPIARETQKEVLRILLEEADPEKAARLVRDVIERIRQRRVSLEDITIYTQLTKRIKSYKSLEPHVVAAQKLKERGREVAPGMIIGYIITKGTKGISQRATPVEFARLEDYDPEYYIDNQILPAIQRIFEAIGYTRDYLKEGITQTSLSRWF

SEQ ID NO: 2068 - protein, 792 aa, unidentified
  REGION 1..792: note = Description of Unknown: Synthetic polypeptide
MPRILKGFLIDADFETVEGRALIRLFLRGEEGSFVVYDDSFSPYFYALPGDEPERVKERILASGAAEAIQKVEIEEKRLFGTPRVALRITVSHPQDVPRIRERIRRVEGVDLILEHDILFVRRYLIDRGIKPLTWLRLEVEERDGRALLRGVEQLEEEPPELRVAAVAIAVYNPKGAPRSSKDEIIMISVATSDGVEKVLTWREVQGLEQVEVLQDEKEMLLRFAELIKEGDYDVIVGYNTDSFDFPYIRDRLKKLGISLPLGRLDAELEVSRRGALPEARIRGRAHVDLYPIVRRHVKLNSYVLESVVEELLGIKKEKLDGERQFTYWDEGGEKRALLARYALEDARVTLALAEKLLPLYCELSTIVGQSLNDVARMTSGQLVEWLLMRYATPRGELIPNHPAGEEYAARARATYAGGYVREPKRGLVEHIAVFDFRSFGPSIIVSHNIDPSTLIVGNCEENRAPELEYCFSLEREGFIPAILKELIRRRAEIKRELKRSEGDRRRTLSFAEKALKILANSFYGYMGYPRARWYRRECAESVAAFARMYIKQVMRIAEEEFKLEVVYGDTDSLFVVIPPEKRELAQKFLQKVNESMPGIIELEFEGFYRRGLFVTKKRYALLSEDGKMVVKGLEFVRRDWAPIARETQKEVLRILLEEADPEKAARLVRDVIERIRQRRVSLEDITIYTQLTKRIKSYKSLEPHVVAAQKLKERGREVAPGMIIGYIITKGTKGISQRATPVEFARLEDYDPEYYIDNQILPAIQRIFEAIGYTRDYLKEGITQTSLSRWF

SEQ ID NO: 2069 - protein, 792 aa, unidentified
  REGION 1..792: note = Description of Unknown: Synthetic polypeptide
MPRILKGFLIDADFETVEGRALIRLFLRGEEGSFVVYDDSFSPYFYALPGDEPERVKERILASGAAEAIQKVEIEEKRLFGTPRVALRITVSHPQDVPRIRERIRRVEGVDLILEHDILFVRRYLIDRGIKPLTWLRLEVEERDGRALLRGVEQLEEEPPELRVAAVAIAVYNPKGAPRSSKDEIIMISVATSDGVEKVLTWREVQGLEQVEVLQDEKEMLLRFAELIKEGDYDVIVGYNTDSFDFPYIRDRLKKLGISLPLGRLDAELEVSRRGALPEARIRGRAHVDLYPIVRRHVKLNSYVLESVVEELLGIKKEKLDGERRFTYWDEGGEKRALLARYALEDARVTLALAEKFLPLYLELSTIVGQSLNDVARMTSGQLVEWLLMRYATPRGELIPNHPAGEEYAARARATYAGGYVREPKRGLVEHIAVFDFRSFGPSIIVSHNIDPSTLIVGNCEENRAPELEYCFSLEREGFIPAILKELIRRRAEIKRELKRSEGDRRRTLSFAEKALKILANSFYGYMGYPRARWYRRECAESVAAFARMYIKQVMRIAEEEFKLEVVYGDTDSLFVVIPPEKRELAQKFLQKVNESMPGIIELEFEGFYRRGLFVTKKRYALLSEDGKMVVKGLEFVRRDWAPIARETQKEVLRILLEEADPEKAARLVRDVIERIRQRRVSLEDITIYTQLTKRIKSYKSLEPHVVAAQKLKERGREVAPGMIIGYIITKGTKGISQRATPVEFARLEDYDPEYYIDNQILPAIQRIFEAIGYTRDYLKEGITQTSLSRWF

SEQ ID NO: 2070 - protein, 792 aa, unidentified
  REGION 1..792: note = Description of Unknown: Synthetic polypeptide
MPRILKGFLIDADFETVEGRALIRLFLRGEEGSFVVYDDSFSPYFYALPGDEPERVKERILASGAAEAIQKVEIEEKRLFGTPRVALRITVSHPQDVPRIRERIRRVEGVDLDLEHDILFVRRYLIDRGIKPLTWLRLEVEERDGRALLRGVEQLEEEPPELRVAAVAIAVYNPKGAPRSSKDEIIMISVATSDGVEKVLTWREVQGLEQVEVLQDEKEMLLRFAELIKEGDYDVIVGYNTDSFDFPYIRDRLKKLGISLPLGRLDAELEVSRRGALPEARIRGRAHVDLYPIVRRHVKLNSYVLESVVEELLGIKKEKLDGERLFTYWDEGGEKRALLARYALEDARVTLALAEKFLPLYCELSTIVGQSLNDVARMTSGQLVEWLLMRYATPRGELAPNHPAGEEYAARARATYAGGYVREPKRGLVEHIAVFDFRSFGPSIIVSHNIDPSTLIVGNCEENRAPELEYCFSLEREGFIPAILKELIRRRAEIKRELKRSEGDRRRTLSFAEKALKILANSFYGYMGYPRARWYRRECAESVAAFARMYIKQVMRIAEEEFKLEVVYGDTDSLFVVIPPEKRELAQKFLQKVNESMPGIIELEFEGFYRRGLFVTKKRYALLSEDGKMVVKGLEFVRRDWAPIARETQKEVLRILLEEADPEKAARLVRDVIERIRQRRVSLEDITIYTQLTKRIKSYKSLEPHVVAAQKLKERGREVAPGMIIGYIITKGTKGISQRATPVEFARLEDYDPEYYIDNQILPAIQRIFEAIGYTRDYLKEGITQTSLSRWF

SEQ ID NO: 2071 - protein, 792 aa, unidentified
  REGION 1..792: note = Description of Unknown: Synthetic polypeptide
MPRILKGFLIDADFETVEGRALIRLFLRGEEGSFVVYDDSFSPYFYALPGDEPERVKERILASGAAEAIQKVEIEEKRLFGTPRVALRITVSHPQDVPRIRERIRRVEGVDLILEHDILFVRRYLIDRGIKPLTWLRLEVEERDGRALLRGVEQLEEEPPELRVAAVAIAVYNPKGAPRSSKDEIIMISVATSDGVEKVLTWREVQGLEQVEVLQDEKEMLLRFAELIKEGDYDVIVGYNTDSFDFPYIRDRLKKLGISLPLGRLDAELEVSRRGALPEARIRGRAHVDLYPIVRRHVKLNSYVLESVVEELLGIKKEKLDGERLFTYWDEGGEKRALLARYALEDARVTLALAEKFLPLYCELSTIVGQSLNDVARMTSGQLVEWLLMRYATPRGELIPNHPAGEEYAARARATYAGGYVREPKRGLVEHIAVFDFRSFGPSIIVSHNIDPSTLIVGNCEENRAPELEYCFSLEREGFIPAILKELIRRRAEIKRELKRSEGDRRRTLSFAEKALKILANSFYGYMGYPRARWYRRECAESVAAFARMYIKQVMRIAEEEFKLEVVYGDTDSLFVVIPPEKRELAQKFLQKVNESMPGIIELEFEGFYRRGLFVTKKRYALLSEDGKMVVKGLEFVRRDWAPIARETQKEVLRILLEEADPEKAARLVRDVIERIRQRRVSLEDITIYTQLTKRIKSYKSLEPHVVAAQKLKERGRRVAPGMIIGYIITKGTKGISQRATPVEFARLEDYDPEYYIDNQILPAIQRIFEAIGYTRDYLKEGITQTSLSRWF

SEQ ID NO: 2072 - protein, 792 aa, unidentified
  REGION 1..792: note = Description of Unknown: Synthetic polypeptide
MPRILKGFLIDADFETVEGRALIRLFLRGEEGSFVVYDDSFSPYFYALPGDEPERVKERILASGAAEAIQKVEIEEKRLFGTPRVALRITVSHPQDVPRIRERIRRVEGVDLILEHDILFVRRYLIDRGIKPLTWLRLEVEERDGRALLRGVEQLEEEPPELRVAAVAIAVYNPKGAPRSSKDEIIMISVATSDGVEKVLTWREVQGLEQVEVLQDEKEMLLRFAELIKEGDYDVIVGYNTDSFDFPYIRDRLKKLGISLPLGRLDAELEVSRRGALPEARIRGRAHVDLYPIVRRHVKLNSYDLESVVEELLGIKKEKLDGERLFTYWDEGGEKRALLARYALEDARVTLALAEKFLPLYCELSTIVGQSLNDVARMTSGQLVEWLLMRYATPRGELIPNHPAGEEYAARARANYAGGYVREPKRGLVEHIAVFDFRSFGPSIIVSHNIDPSTLIVGNCEENRAPELEYCFSLEREGFIPAILKELIRRRAEIKRELKRSEGDRRRTLSFAEKALKILANSFYGYMGYPRARWYRRECAESVAAFARMYIKQVMRIAEEEFKLEVVYGDTDSLFVVIPPEKRELAQKFLQKVNESMPGIIELEFEGFYRRGLFVTKKRYALLSEDGKMVVKGLEFVRRDWAPIARETQKEVLRILLEEADPEKAARLVRDVIERIRQRRVSLEDITIYTQLTKRIKSYKSLEPHVVAAQKLKERGREVAPGMIIGYIITKGTKGISQRATPVEFARLEDYDPEYYIDNQILPAIQRIFEAIGYTRDYLKEGITQTSLSRWF

SEQ ID NO: 2073 - protein, 792 aa, unidentified
  REGION 1..792: note = Description of Unknown: Synthetic polypeptide
MPRILKGFLIDADFETVEGRALIRLFLRGEEGSFVVYDDSFSPYFYALPGDEPERVKERILASGAAEAIQKVEIEEKRLFGTPRVALRITVSHPQDVPRIRERIRRVEGVDLILEHDILFVRRYLIDRGIKPLTSLRLEVEERDGRALLRGVEQLEEEPPELRVAAVAIAVYNPKGAPRSSKDEIIMISVATSDGVEKVLTWREVQGLEQVEVLQDEKEMLLRFAELIKEGDYDVIVGYNTDSFDFPYIRDRLKKLGISLPLGRLDAELEVSRRGALPEARIRGRAHVDLYPIVRRHVKLNSYDLESVVEELLGIKKEKLDGERLFTYWDEGGEKRALLARYALEDARVTLALAEKFLPLYCELSTIVGQSLNDVARMTSGQLVEWLLMRYATPRGELIPNHPAGEEYAARARATYAGGYVREPKRGLVEHIAVFDFRSFGPSIIVSHNIDPSTLIVGNCEENRAPELEYCFSLEREGFIPAILKELIRRRAEIKRELKRSEGDRRRTLSFAEKALKILANSFYGYMGYPRARWYRRECAESVAAFARMYIKQVMRIAEEEFKLEVVYGDTDSLFVVIPPEKRELAQKFLQKVNESMPGIIELEFEGFYRRGLFVTKKRYALLSEDGKMVVKGLEFVRRDWAPIARETQKEVLRILLEEADPEKAARLVRDVIERIRQRRVSLEDITIYTQLTKRIKSYKSLEPHVVAAQKLKERGREVAPGMIIGYIITKGTKGISQRATPVEFARLEDYDPEYYIDNQILPAIQRIFEAIGYTRDYLKEGITQTSLSRWF

SEQ ID NO: 2074 - protein, 792 aa, unidentified; identical to SEQ ID NO: 1892
  REGION 1..792: note = Description of Unknown: Synthetic polypeptide

SEQ ID NO: 2075 - protein, 790 aa, unidentified
  REGION 1..790: note = Description of Unknown: Synthetic polypeptide
MPRILKGFLIDADFETVEGRALIRLFLRGEEGSFVVYDDSFSPYFYALPGDEPERVKERILASGAAEAIQKVEIEEKRLFGTPRVALRITVSHPQDVPRIRERIRRVEGVDLILEHDILFVRRYLIDRGIKPLTWLRLEVEERDGRALLRGVEQLEEEPPELRVAAVAIAVYNPKGAPRSSKDEIIMISVATSDGVEKVLTWREVQGLEQVEVLQDEKEMLLRFAELIKEGDYDVIVGYNTDSFDFPYIRDRLKKLGISLPLGRLDAELEVSRRGALPEARIRGRAHVDLYPIVRRHVKLNSYVLESVVEELLGIKKEKLDGERLFTYWDEGGEKRALLARYALEAARVTLALAEKFLPLYCELSTIVGQSLNDVARMTSGQLVEWLLMRYATPRGELIPNHPAGEEYAARARATYAGGYVREPKRGLVEHIAVFDFRSFGPSIIVSHNIDPSTLIVGNCEENRAPELEYCFSLEREGFIPAILKELIRRRAEIKRELKRSEGDRRRTLSFAEKALKILANSFYGYMGYPRARWYRRECAESVAAFARMYIKQVMRIAEEEFKLEVVYGDTDSLFVVIPPEKRELAQKFLQKVNESMPGIIELEFEGFYRRGLFVTKKRYALLSEDGKMVVKGLEFVRRDWAPIARETQKEVLRILLEEADPEKAARLVRDVIERIRQRRVSLEDITIYTQLTKRIKSYKSLEPHVVAAQKLKERGREVAPGMIIGYIITKGTKGISQRATPVEFARLEDYDPEYYIDNQILPAIQRIFEAIGYTRDYLKEGITQTSLSR

SEQ ID NO: 2076 - protein, 792 aa, unidentified
  REGION 1..792: note = Description of Unknown: Synthetic polypeptide
MPRILKGFLIDADFETVEGRALIRLFLRGEEGSFVVYDDSFSPYFYALPGDEPERVKERILASGAAEAIQKVEIEEKRLFGTPRVALRITVSHPQDVPRIRERIRRVEGVDLILEHDILFVRRYLIDRGIKPLTWLRLEVEERDGRALLRGVEQLEEEPPELRVAAVAIAVYNPKGAPRSSKDEIIMISVATSDGVEKVLTWREVQGLEQVEVLQDEKEMLLRFAELIKEGDYDVIVGYNTDSFDFPYIRDRLKKLGISLPLGRLDAELEVSRRGALPEARIRGRAHVDLYPIVRRHVKLNSYDLESVVEELLGIKKEKLDGERLFTYWDEGGEKRALLARYALEDARVTLALAEKFLPLYCELSTIVGQSLNDVARMTSGQLVEWLLMRYATPRGELIPNHPAGEEYAARARATYAGGYVREPKRGLVEHIAVFDFRSFGPSIIVSHNIDPSTLIVGNCEENRAPELEYCFSLEREGFIPAILKELIRRRAEIKRELKRSEGDRRRTLSFAEKALKILANSFYGYDGYPRARWYRRECAESVAAFARMYIKQVMRIAEEEFKLEVVYGDTDSLFVVIPPEKRELAQKFLQKVNESMPGIIELEFEGFYRRGLFVTKKRYALLSEDGKMVVKGLEFVRRDWAPIARETQKEVLRILLEEADPEKAARLVRDVIERIRQRRVSLEDITIYTQLTKRIKSYKSLEPHVVAAQKLKERGREVAPGMIIGYIITKGTKGISQRATPVEFARLEDYDPEYYIDNQILPAIQRIFEAIGYTRDYLKEGITQTSLSRWF

SEQ ID NO: 2077 - protein, 791 aa, unidentified; identical to SEQ ID NO: 1802
  REGION 1..791: note = Description of Unknown: Synthetic polypeptide

SEQ ID NO: 2078 - protein, 792 aa, unidentified
  REGION 1..792: note = Description of Unknown: Synthetic polypeptide
MPRILKGFLIDADFETVEGRALIRLFLRGEEGSFVVYDDSFSPYFYALPGDEPERVKERILASGAAEAIQKVEIEEKRLFGTPRVALRITVSHPQDVPRIRERIRRVEGVDLILEHDILFVRRYLIDRGIKPLTWLRLEVEERDGRALLRGVEQLEEEPPELRVAAVAIAVYNPKGAPRSSKDEIIMISVATSDGVEKVLTWREVQGLEQVEVLQDEKEMLLRFAELIKEGDYDVIVGYNTDSFDFPYIRDRLKKLGISLPLGRLDAELEVSRRGALPEARIRGRAHVDLYPIVRRHVKLNSYDLESVVEELLGIKKEKLDGERLFTYWDEGGEKRALLARYALEDARVTLALAEKFLPLYLELSTIVGQSLNDVARMTSGQLVEWLLMRYATPRGELIPNHPAGEEYAARARATYAGGYVREPKRGLVEHIAVFDFRSFGPSIIVSHNIDPSRLIVGNCEENRAPELEYCFSLEREGFIPAILKELIRRRAEIKRELKRSEGDRRRTLSFAEKALKILANSFYGYMGYPRARWYRRECAESVAAFARMYIKQVMRIAEEEFKLEVVYGDTDSLFVVIPPEKRELAQKFLQKVNESMPGIIELEFEGFYRRGLFVTKKRYALLSEDGKMVVKGLEFVRRDWAPIARETQKEVLRILLEEADPEKAARLVRDVIERIRQRRVSLEDITIYTQLTKRIKSYKSLEPHVVAAQKLKERGREVAPGMIIGYIITKGTKGISQRATPVEFARLRDYDPEYYIDNQILPAIQRIFEAIGYTRDYLKEGITQTSLSRWF

SEQ ID NO: 2079 - protein, 792 aa, unidentified
  REGION 1..792: note = Description of Unknown: Synthetic polypeptide
MPRILKGFLIDADFETVEGRALIRLFLRGEEGSFVVYDDSFSPYFYALPGDEPERVKERILASGAAEAIQKVEIEEKRLFGTPRVALRITVSHPQDVPRIRERIRRVEGVDLILEHDILFVRRYLIDRGIKPLTWLRLEVEERDGRALLRGVEQLEEEPPELRVAAVAIAVYNPKGAPRSSKDEIIMISVATSDGVEKVLTWREVQGLEQVEVLQDEKEMLLRFAELIKEGDYDVIVGYNTDSFDFPYIRDRLKKLGISLPLGRLDAELEVSRRGALPEARIRGRAHVDLYPIVRRHVKLNSYDLESVVEELLGIKKEKLDGERLFTYWDEGGEKRALLARYALEDARVTLALAEKFLPLYCELSTIVGQSLNDVARMTSGQLVEWLLMRYATPRGELIPNHPAGEEYAARARATYAGGYVREPKRGLVEHIAVFDFRSFGPSIIVSHNIDPSTLIVGNCEENRAPELEYCFSLEREGFIPAILKELIRRRAEIKRELKRSEGDRRRTLSFAEKALKILANSFYGYMGYPRARWYRRECAESVAAFARMYIKQVMRIAEEEFKLEVVYGDTDSLFVVIPPEKRELAQKFLQKVNESMPGIIELEFEGFYRRGLFVTKKRYALLSEDGKMVVKGLEFVRRDWAPIARETQKEVLRILLEEADPEKAARLVRDVIERIRQRRVSLEDITIYTQLTKRIKSYKSLEPHVVAAQKLKERGREVAPGMIIGYIITKGTKGISQRATPVEFARLEDYDPEYYINNQILPAIQRIFEAIGYTRDYLKEGITQTSLSRWF

SEQ ID NO: 2080 - protein, 792 aa, unidentified
  REGION 1..792: note = Description of Unknown: Synthetic polypeptide
MPRILKGFLIDADFETVEGRALIRLFLRGEEGSFVVYDDSFSPYFYALPGDEPERVKERILASGAAEAIQKVEIEEKRLFGTPRVALRITVSHPQDVPRIRERIRRVEGVDLILEHDILFVRRYLIDRGIKPLTWLRLEVEERDGRALLRGVEQLEEEPPELRVAAVAIAVYNPKGAPRSSKDEIIMISVATSDGVEKVLTWREVQGLEQVEVLQDEKEMLLRFAELIKEGDYDVIVGYNTDSFDFPYIRDRLKKLGISLPLGRLDAELEVSRRGALPEARIRGRAHVDLYPIVRRHVKLNSYVLESVVEELLGIKKEKLDGERLFTYWDEGGEKRALLARYALEAARVTLALAEKFLPLYLELSTIVGQSLNDVARMTSGQLVEWLLMRYATPRGELIPNHPAGEEYAARARATYAGGYVREPKRGLVEHIAVFDFRSFGPSIIVSHNIDPSTLIVGNCEENRAPELEYCFSLEREGFIPAILKELIRRRAEIKRELKRSEGDRRRTLSFAEKALKILANSFYGYMGYPRARWYRRECAESVAAFARMYIKQVMRIAEEEFKLEVVYGDTDSLFVVIPPEKRELAQKFLQKVNESMPGIIELEFEGFYRRGLFVTKKRYALLSEDGKMVVKGLEFVRRDWAPIARETQKEVLRILLEEADPEKAARLVRDVIERIRQRRVSLEDITIYTQLTKRIKSYKSLEPHVVAAQKLKERGREVAPGMIIGYIITKGTKGISQRATPVEFARLEDYDPEYYIDNQILPAIQRIFEAIGYTRDYLKEGITQTSLSRWF

SEQ ID NO: 2081 - protein, 792 aa, unidentified
  REGION 1..792: note = Description of Unknown: Synthetic polypeptide
MPRILKGFLIDADFETVEGRALIRLFLRGEEGSFVVYDDSFSPYFYALPGDEPERVKERILASGAAEAIQKVEIEEKRLFGTPRVALRITVSHPQDVPRIRERIRRVEGVDLILEHDILFVRRYLIDRGIKPLTWLRLEVEERDGRALLRGVEQLEEEPPELRVAAVAIAVYNPKGAPRSSKDEIIMISVATSDGVEKVLTWREVQGLEQVEVLQDEKEMLLRFAELIKEGDYDVIVGYNTDSFDFPYIRDRLKKLGISLPLGRLDAELEVSRRGALPEARIRGRAHVDLYPIVRRHVKLNSYVLESVVEELLGIKKEKLDGERLFTYWDEGGEKRALLARYALEDARVTLALAEKFLPLYCELSTIVGQSLNDVARMTSGQLVEWLLMRYATPRGELIPNHPAGEEYAARARATYAGGYVREPKRGLVEHIAVFDFRSFGPSIIVSHNIDPSTLIVGNCEENRAPELEYCFSLEREGFIPAILKELIRRRAEIKRELKRSEGDRRRTLSFAEKALKILANSFYGYMGYPRARWYRRECAESVAAFARDYIKQVMRIAEEEFKLEVVYGDTDSLFVVIPPEKRELAQKFLQKVNESMPGIIELEFEGFYRRGLFVTKKRYALLSEDGKMVVKGLEFVRRDWAPIARETQKEVLRILLEEADPEKAARLVRDVIERIRQRRVSLEDITIYTQLTKRIKSYKSLEPHVVAAQKLKERGREVAPGMIIGYIITKGTKGISQRATPVEFARLEDYDPEYYIDNQILPAIQRIFEAIGYTRDYLKEGITQTSLSRWF

SEQ ID NO: 2082 - protein, 792 aa, unidentified
  REGION 1..792: note = Description of Unknown: Synthetic polypeptide
MPRILKGFLIDADFETVEGRALIRLFLRGEEGSFVVYDDSFSPYFYALPGDEPERVKERILASGAAEAIQKVEIEEKRLFGTPRVALRITVSHPQDVPRIRERIRRVEGVDLILEHDILFVRRYLIDRGIKPLTWLRLEVEERDGRALLRGVEQLEEEPPELRVAAVAIAVYNPKGAPRSSKDEIIMISVATSDGVEKVLTWREVQGLEQVEVLQDEKEMLLRFAELIKEGDYDVIVGYNTDSFDFPYIRDRLKKLGISLPLGRLDAELEVSRRGALPEARIRGRAHVDLYPIVRRHVKLNSYDLESVVEELLGIKKEKLDGERLFTYWDEGGEKRALLARYALEDARVTLALAEKFLPLYCELSTIVGQSLNDVARMTSGQLVEWLLMRYATPRGELIPNHPAGEEYAARARATYAGGYVREPKRGLVEHIAVFDFRSFGPSIIVSHNIDPSTLIVGNCEENRAPELEYCFALEREGFIPAILKELIRRRAEIKRELKRSEGDRRRTLSFAEKALKILANSFYGYMGYPRARWYRRECAESVAAFARMYIKQVMRIAEEEFKLEVVYGDTDSLFVVIPPEKRELAQKFLQKVNESMPGIIELEFEGFYRRGLFVTKKRYALLSEDGKMVVKGLEFVRRDWAPIARETQKEVLRILLEEADPEKAARLVRDVIERIRQRRVSLEDITIYTQLTKRIKSYKSLEPHVVAAQKLKERGREVAPGMIIGYIITKGTKGISQRATPVEFARLEDYDPEYYIDNQILPAIQRIFEAIGYTRDYLKEGITQTSLSRWF

SEQ ID NO: 2083 - protein, 792 aa, unidentified
  REGION 1..792: note = Description of Unknown: Synthetic polypeptide
MPRILKGFLIDADFETVEGRALIRLFLRGEEGSFVVYDDSFSPYFYALPGDEPERVKERILASGAAEAIQKVEIEEKRLFGTPRVALRITVSHPQDVPRIRERIRRVEGVDLILEHDILFVRRYLIDRGIKPLTWLRLEVEERDGRALLRGVEQLEEEPPELRVAAVAIAVYNPKGAPRSSKDEIIMISVATSDGVEKVLTWREVQGLEQVEVLQDEKEMLLRFAELIKEGDYDVIVGYNTDSFDFPYIRDRLKKLGISLPLGRLDAELEVSRRGALPEARIRGRAHVDLYPIVRRHVKLNSYVLESVVEELLGIKKEKLDGERLFTYWDEGGEKRALLARYALEDARVTLALAEKFLPLYCELSTIVGQSLNDVARMTSGQLVEWLLMRYATPRGELIPNHPAGEEYAARARATYAGGYVREPKRGLVEHIAVFDFRSFGPSIIVSHNIDPSTLIVGNCEENRAPELEYCFSLEREGFIPAILKELIRRRAEIKRELKRSEGDRRRTLSFAEKALKILANSFYGYVGYPRARWYRRECAESVAAFARMYIKQVMRIAEEEFKLEVVYGDTDSLFVVIPPEKRELAQKFLQKVNESMPGIIELEFEGFYRRGLFVTKKRYALLSEDGKMVVKGLEFVRRDWAPIARETQKEVLRILLEEADPEKAARLVRDVIERIRQRRVSLEDITIYTQLTKRIKSYKSLEPHVVAAQKLKERGREVAPGMIIGYIITKGTKGISQRATPVEFARLEDYDPEYYIDNQILPAIQRIFEAIGYTRDYLKEGITQTSLSRWF

SEQ ID NO: 2084 - protein, 792 aa, unidentified
  REGION 1..792: note = Description of Unknown: Synthetic polypeptide
MPRILKGFLIDADFETVEGRALIRLFLRGEEGSFVVYDDSFSPYFYALPGDEPERVKERILASGAAEAIQKVEIEEKRLFGTPRVALRITVSHPQDVPRIRERIRRVEGVDLILEHDILFVRRYLIDRGIKPLTWLRLEVEERDGRALLRGVEQLEEEPPELRVAAVAIAVYNPKGAPRSSKDEIIMISVATSDGVEKVLTWREVQGLEQVEVLQDEKEMLLRFAELIKEGDYDVIVGYNTDSFDFPYIRDRLKKLGISLPLGRLDAELEVSRRGALPEARIRGRAHVDLYPIVRRHVKLNSYVLESVVEELLGIKKEKLDGERLFTYWDEGGEKRALLARYALEDARVTLALAEKFLPLYCELSTIVGQSLNDVARMTSGQLVEWLLMRYATPRGELIPNHPAGEEYAARARATYAGGYVREPKRGLVEHIAVFDFRSFGPSIIVSHNIDPSTLIVGNCEENRAPELEYCFSLEREGFIPAILKELIRRRAEIKRELKRSEGDRRRTLSFAEKALKILANSFYGYMGYPRARWYRRECAESVAAFARMYIKQVMRIAEEEFKLEVVYGDTDSLFVVIPPEKRELAQKFLQKVNESMPGIIELEFEGFYRRGLFVTKKRYALLSEDGKMVVKGLEFVRRDWAPIARETQKEVLRILLEEADPEKAARLVRDVIERIRQRRVSLEDITIYTQLTKRIKSYKSLEPHVVAAQKLKERGREVAPGMIIGYIITKGTKGISKRATPVEFARLEDYDPEYYIDNQILPAIQRIFEAIGYTRDYLKEGITQTSLSRWF

SEQ ID NO: 2085 - protein, 791 aa, unidentified
  REGION 1..791: note = Description of Unknown: Synthetic polypeptide
MPRILKGFLIDADFETVEGRALIRLFLRGEEGSFVVYDDSFSPYFYALPGDEPERVKERILASGAAEAIQKVEIEEKRLFGTPRVALRITVSHPQDVPRIRERIRRVEGVDLILEHDILFVRRYLIDRGIKPLTWLRLEVEERDGRALLRGVEQLEEEPPELRVAAVAIAVYNPKGAPRSSKDEIIMISVATSDGVEKVLTWREVQGLEQVEVLQDEKEMLLRFAELIKEGDYDVIVGYNTDSFDFPYIRDRLKKLGISLPLGRLDAELEVSRRGALPEARIRGRAHVDLYPIVRRHVKLNSYVLESVVEELLGIKKEKLDGERLFTYWDEGGEKRALLARYALEDARVTLALAEKFLPLYCELSTIVGQSLNDVARMTSGQLVEWLLMRYATPRGELIPNHPAGEEYAARARATYAGGYVREPKRGLVEHIAVFDFRSFGPSIIVSHNIDPSTLIVGNCEENRAPELEYCFSLEREGFIPAILKELIRRRAEIKRELKRSEGDRRRTLSFAEKALKILANSFYGYMGYPRARWYRRECAESVAAFARMYIKQVMRIAEEEFKLEVVYGDTDSLFVVIPPEKRELAQKFLQKVNESMPGIIELEFEGFYRRGLFVTKKRYALLSEDGKMVVKGLEFVRRDWAPIARETQKEVLRILLEEADPEKAARLVRDVIERIRQRRVSLEDITIYTQLTKRIKSYKSLEPHVVAAQKLKERGREVAPGMIIGYIITKGTKGISQRATPVEFARLEDYDPEYYIDNQILPAIQRIFEAIGYTRDYLKEGITQTSLSRW

SEQ ID NO: 2086 - protein, 789 aa, unidentified
  REGION 1..789: note = Description of Unknown: Synthetic polypeptide
MPRILKGFLIDADFETVEGRALIRLFLRGEEGSFVVYDDSFSPYFYALPGDEPERVKERILASGAAEAIQKVEIEEKRLFGTPRVALRITVSHPQDVPRIRERIRRVEGVDLILEHDILFVRRYLIDRGIKPLTWLRLEVEERDGRALLRGVEQLEEEPPELRVAAVAIAVYNPKGAPRSSKDEIIMISVATSDGVEKVLTWREVQGLEQVEVLQDEKEMLLRFAELIKEGDYDVIVGYNTDSFDFPYIRDRLKKLGISLPLGRLDAELEVSRRGALPEARIRGRAHVDLYPIVRRHVKLNSYDLESVVEELLGIKKEKLDGERLFTYWDEGGEKRALLARYALEDARVTLALAEKFLPLYLELSTIVGQSLNDVARMTSGQLVEWLLMRYATPRGELIPNHPAGEEYAARARATYAGGYVREPKRGLVEHIAVFDFRSFGPSIIVSHNIDPSTLIVGNCEENRAPELEYCFSLEDEGFIPAILKELIRRRAEIKRELKRSEGDRRRTLSFAEKALKILANSFYGYMGYPRARWYRRECAESVAAFARMYIKQVMRIAEEEFKLEVVYGDTDSLFVVIPPEKRELAQKFLQKVNESMPGIIELEFEGFYRRGLFVTKKRYALLSEDGKMVVKGLEFVRRDWAPIARETQKEVLRILLEEADPEKAARLVRDVIERIRQRRVSLEDITIYTQLTKRIKSYKSLEPHVVAAQKLKERGREVAPGMIIGYIITKGTKGISQRATPVEFARLEDYDPEYYIDNQILPAIQRIFEAIGYTRDYLKEGITQTSLS

SEQ ID NO: 2087 - protein, 789 aa, unidentified
  REGION 1..789: note = Description of Unknown: Synthetic polypeptide
MPRILKGFLIDADFETVEGRALIRLFLRGEEGSFVVYDDSFSPYFYALPGDEPERVKERILASGAAEAIQKVEIEEKRLFGTPRVALRITVSHPQDVPRIRERIRRVEGVDLILEHDILFVRRYLIDRGIKPLTWLRLEVEERDGRALLRGVEQLEEEPPELRVAAVAIAVYNPKGAPRSSKDEIIMISVATSDGVEKVLTWREVQGLEQVEVLQDEKEMLLRFAELIKEGDYDVIVGYNTDSFDFPYIRDRLKKLGISLPLGRLDAELEVSRRGALPEARIRGRAHVDLYPIVRRHVKLNSYDLESVVEELLGIKKEKLDGERLFTYWDEGGEKRALLARYALEDARVTLALAEKFLPLYCELSTIVGQSLNDVARMTSGQLVEWLLMRYATPRGELIPNHPAGEEYAARARATYAGGYVREPKRGLVEHIAVFDFRSFGPSIIVSHNIDPSTLIVGNCEENRAPELEYCFSLEREGFIPAILKELIRRRAEIKRELKRSEGDRRRTLSFAEKALKILANSFYGYMGYPRARWYRRECAESVAAFARMYIKQVMRIAEEEFKLEVVYGDTDSLFVVIPPEKRELAQKFLQKVNESMPGIIELEFEGFYRRGLFVTKKRYALLSEDGKMVVKGLEFVRRDWAPIARETQKEVLRILLEEADPEKAARLVRDVIERIRQRRVSLEDITIYTQLTKRIKSYKSLEPHVVAAQKLKERGREVAPGMIIGYIITKGTKGISQRATPVEFARLEDYDPEYYIDNQILPAIQRIFEAIGYTRDYLKEGITQTSLS

SEQ ID NO: 2088 - protein, 792 aa, unidentified
  REGION 1..792: note = Description of Unknown: Synthetic polypeptide
MPRILKGFLIDADFETVEGRALIRLFLRGEEGSFVVYDDSFSPYFYALPGDEPERVKERILASGAAEAIQKVEIEEKRLFGTPRVALRITVSHPQDVPRIRERIRRVEGVDLILEHDILFVRRYLIDRGIKPLTWLRLEVEERDGRALLRGVEQLEEEPPELRVAAVAIAVYNPKGAPRSSKDEIIMISVATSDGVEKVLTWREVQGLEQVEVLQDEKEMLLRFAELIKEGDYDVIVGYNTDSFDFPYIRDRLKKLGISLPLGRLDAELEVSRRGALPEARIRGRAHVDLYPIVRRHVKLNSYVLESVVEELLGIKKEKLDGERLFTYWDEGGEKRALLARYALEDARVTLALAEKFLPLYCELSTIVGQSLNDVARMTSGQLVEWLLMRYATPRGELIPNHPAGEEYAARARATYAGGYVREPKRGLVEHIAVFDFRSFGPSIIVSHNIDPSTLIVGNCEENRAPELEYCFSLEREGFIPAILKELIRRRAEIKRELKRSEGDRRRTLSFAEKALKILANSFYGYMGYPRARWYRRECAESVAAFARMYIKQVMRIAEEEFKLEVVYGDTDSLFVVIPPEKRELAQKFLQKVNESMPGIIELEFEGFYRRGLFVTKKRYALLSEDGKMVVKGLEFVRRDWAPIARETQKEVLRILLEEADPEKAARLVRDVIERIRQRRVSLEDITIYTQLTKRIKSYKSLEPHVVAAQKLKERGREVAPGMIIGYIITKGTKGISQRATPVEFARLEDYDPEYYIDNQILPAVQRIFEAIGYTRDYLKEGITQTSLSRWF

SEQ ID NO: 2089 - protein, 792 aa, unidentified
  REGION 1..792: note = Description of Unknown: Synthetic polypeptide
MPRILKGFLIDARFETVEGRALIRLFLRGEEGSFVVYDDSFSPYFYALPGDEPERVKERILASGAAEAIQKVEIEEKRLFGTPRVALRITVSHPQDVPRIRERIRRVEGVDLILEHDILFVRRYLIDRGIKPLTWLRLEVEERDGRALLRGVEQLEEEPPELRVAAVAIAVYNPKGAPRSSKDEIIMISVATSDGVEKVLTWREVQGLEQVEVLQDEKEMLLRFAELIKEGDYDVIVGYNTDSFDFPYIRDRLKKLGISLPLGRLDAELEVSRRGALPEARIRGRAHVDLYPIVRRHVKLNSYVLESVVEELLGIKKEKLDGERLFTYWDEGGEKRALLARYALEDARVTLALAEKFLPLYCELSTIVGQSLNDVARMTSGQLVEWLLMRYATPRGELIPNHPAGEEYAARARATYAGGYVREPKRGLVEHIAVFDFRSFGPSIIVSHNIDPSTLIVGNCEENRAPELEYCFSLEREGFIPAILKELIRRRAEIKRELKRSEGDRRRTLSFAEKALKILANSFYGYMGYPRARWYRRECAESVAAFARMYIKQVMRIAEEEFKLEVVYGDTDSLFVVIPPEKRELAQKFLQKVNESMPGIIELEFEGFYRRGLFVTKKRYALLSEDGKMVVKGLEFVRRDWAPIARETQKEVLRILLEEADPEKAARLVRDVIERIRQRRVSLEDITIYTQLTKRIKSYKSLEPHVVAAQKLKERGREVAPGMIIGYIITKGTKGISQRATPVEFARLEDYDPEYYIDNQILPAIQRIFEAIGYTRDYLKEGITQTSLSRWF

SEQ ID NO: 2090 - protein, 792 aa, unidentified
  REGION 1..792: note = Description of Unknown: Synthetic polypeptide
MPRILKGFLIDADFETVEGRALIRLFLRGEEGSFVVYDDSFSPYFYALPGDEPERVKERILASGAAEAIQKVEIEEKRLFGTPRVALRITVSHPQDVPRIRERIRRVEGVDLILEHDILFVRRYLIDRGIKPLTWLRLEVEERDGRALLRGVEQLEEEPPELRVAAVAIAVYNPKGAPRSSKDEIIMISVATSDGVEKVLTWREVQGLEQVEVLQDEKEMLLRFAELIKEGDYDVIVGYNTDSFDFPYIRDRLKKLGISLPLGRLDAELEVSRRGALPEARIRGRAHVDLYPIVRRHVKLNSYVLESVVEELLGIKKEKLDGERLFTYWDEGGEKRALLARYALEDARVTLALAEKFLPLYCELSTIVGQSLNDVARMTSGQLVEWLLARYATPRGELIPNHPAGEEYAARARATYAGGYVREPKRGLVEHIAVFDFRSFGPSIIVSHNIDPSTLIVGNCEENRAPELEYCFSLEREGFIPAILKELIRRRAEIKRELKRSEGDRRRTLSFAEKALKILANSFYGYMGYPRARWYRRECAESVAAFARMYIKQVMRIAEEEFKLEVVYGDTDSLFVVIPPEKRELAQKFLQKVNESMPGIIELEFEGFYRRGLFVTKKRYALLSEDGKMVVKGLEFVRRDWAPIARETQKEVLRILLEEADPEKAARLVRDVIERIRQRRVSLEDITIYTQLTKRIKSYKSLEPHVVAAQKLKERGREVAPGMIIGYIITKGTKGISQRATPVEFARLEDYDPEYYIDNQILPAIQRIFEAIGYTRDYLKEGITQTSLSRWF

SEQ ID NO: 2091 - protein, 792 aa, unidentified
  REGION 1..792: note = Description of Unknown: Synthetic polypeptide
MPRILKGFLIDADFETVEGRALIRLFLRGEEGSFVVYDDSFSPYFYALPGDEPERVKERILASGAAEAIQKVEIEEKRLFGTPRVALRITVSHPQDVPRIRERIRRVEGVDLILEHDILFVRRYLIDRGIKPLTWLRLEVEERDGRALLRGVEQLEEEPPELRVAAVAIAVYNPKGAPRSSKDEIIMISVATSDGVEKVLTWREVQGLEQVEVLQDEKEMLLRFAELIKEGDYDVIVGYNTDSFDFPYIRDRLKKLGISLPLGRLDAELEVSRRGALPEARIRGRAHVDLYPIVRRHVKLNSYVLESVVEELLGIKKEKLDGERLFTYWDEGGEKRALLARYALEDARVTLALAEKFLPLYCELSTIVGQSLNDVARMTSGQLVEWLLMRYATPRGELIPNHPAGEEYAARARATYAGGYVREPKRGLVEHIAVFDFRSFGPSIIVSHNIDPSTLIVGNCEENRAPELEYCFSLEREGFIPAILKELIRRRAEIKRELKRSEGDRRRTLSFAEKALKILANSFYGYMGYPRARWYRRECAESVAAFARMYIKQVMRIAEEEFKLEVVYGDTDSLFVVIPPEKRELAQKFLQKVNESMPGIIELEFEGFYRRGLFVTKKRYALLSEDGKMVVKGLEFVRRDWAPIARETQKEVLRILLEEADPEKAARLVRDVIERIRARRVSLEDITIYTQLTKRIKSYKSLEPHVVAAQKLKERGREVAPGMIIGYIITKGTKGISQRATPVEFARLEDYDPEYYIDNQILPAIQRIFEAIGYTRDYLKEGITQTSLSRWF

SEQ ID NO: 2092 - protein, 792 aa, unidentified
  REGION 1..792: note = Description of Unknown: Synthetic polypeptide
MPRILKGFLIDADFETVEGRALIRLFLRGEEGSFVVYDDSFSPYFYALPGDEPERVKERILASGAAEAIQKVEIEEKRLFGTPRVALRITVSHPQDVPRIRERIRRVEGVDLILEHDILFVRRYLIDRGIKPLTWLRLEVEERDGRALLRGVEQLEEEPPELRVAAVAIAVYNPKGAPRSSKDEIIMISVATSDGVEKVLTWREVQGLEQVEVLQDEKEMLLRFAELIKEGDYDVIVGYNTDSFDFPYIRDRLKKLGISLPLGRLDAELEVSRRGALPEARIRGRAHVDLYPIVRRHVKLNSYDLESVVEELLGIKKEKLDGERLFTYWDEGGEKRALLARYALEDARVTLALAEKFLPLYCDLSTIVGQSLNDVARMTSGQLVEWLLMRYATPRGELIPNHPAGEEYAARARATYAGGYVREPKRGLVEHIAVFDFRSFGPSIIVSHNIDPSTLIVGNCEENRAPELEYCFSLEREGFIPAILKELIRRRAEIKRELKRSEGDRRRTLSFAEKALKILANSFYGYMGYPRARWYRRECAESVAAFARMYIKQVMRIAEEEFKLEVVYGDTDSLFVVIPPEKRELAQKFLQKVNESMPGIIELEFEGFYRRGLFVTKKRYALLSEDGKMVVKGLEFVRRDWAPIARETQKEVLRILLEEADPEKAARLVRDVIERIRQRRVSLEDITIYTQLTKRIKSYKSLEPHVVAAQKLKERGREVAPGMIIGYIITKGTKGISQRATPVEFARLEDYDPEYYIDNQILPAIQRIFEAIGYTRDYLKEGITQTSLSRWF

SEQ ID NO: 2093 - protein, 792 aa, unidentified
  REGION 1..792: note = Description of Unknown: Synthetic polypeptide
MPRILKGFLIDADFETVEGRALIRLFLRGEEGSFVVYDDSFSPYFYALPGDEPERVKERILASGAAEAIQKVEIEEKRLFGTPRVALRITVSHPQDVPRIRERIRRVEGVDLILEHDILFVRRYLIDRGIKPLTWLRLEVEERDGRALLRGVEQLEEEPPELRVAAVAIAVYNPKGAPRSSKDEIRMISVATSDGVEKVLTWREVQGLEQVEVLQDEKEMLLRFAELIKEGDYDVIVGYNTDSFDFPYIRDRLKKLGISLPLGRLDAELEVSRRGALPEARIRGRAHVDLYPIVRRHVKLNSYVLESVVEELLGIKKEKLDGERRFTYWDEGGEKRALLARYALEDARVTLALAEKFLPLYCELSTIVGQSLNDVARMTSGQLVEWLLMRYATPRGELIPNHPAGEEYAARARATYAGGYVREPKRGLVEHIAVFDFRSFGPSIIVSHNIDPSTLIVGNCEENRAPELEYCFSLEREGFIPAILKELIRRRAEIKRELKRSEGDRRRTLSFAEKALKILANSFYGYMGYPRARWYRRECAESVAAFARMYIKQVMRIAEEEFKLEVVYGDTDSLFVVIPPEKRELAQKFLQKVNESMPGIIELEFEGFYRRGLFVTKKRYALLSEDGKMVVKGLEFVRRDWAPIARETQKEVLRILLEEADPEKAARLVRDVIERIRQRRVSLEDITIYTQLTKRIKSYKSLEPHVVAAQKLKERGREVAPGMIIGYIITKGTKGISQRATPVEFARLEDYDPEYYIDNQILPAIQRIFEAIGYTRDYLKEGITQTSLSRWF

SEQ ID NO: 2094 - protein, 792 aa, unidentified
  REGION 1..792: note = Description of Unknown: Synthetic polypeptide
MPRILKGFLIDADFETVEGRALIRLFLRGEEGSFVVYDDSFSPYFYALPGDEPERVKERILASGAAEAIQKVEIEEKRLFGTPRVALRITVSHPQDVPRIRERIRRVEGVDLILEHDILFVRRYLIDRGIKPLTWLRLEVEERDGRALLRGVEQLEEEPPELRVAAVAIAVYNPKGAPRSSKDEIIMISVATSDGVEKVLTWREVQGLEQVEVLQDEKEMLLRFAELIKEGDYDVIVGYNTDSFDFPYIRDRLKKLGISLPLGRLDAELEVSRRGALPEARIRGRAHVDLYPIVRRHVKLNSYVLESVVEELLGIKKEKLDGERLFTYWDEGGEKRALLARYALEDARVTLALAEKFLPLYCELSTIVGQSLNDVARMTSGQLVEWLLMRYATPRGELIPNHPAGEEYAARARATYAGGYVREPKRGLVEHIAVFDFRSFGPSIIVSHNIDPSRLIVGNCEENRAPELEYCFSLEREGFIPAILKELIRRRAEIKRELKRSEGDRRRTLSFAEKALKILANSFYGYMGYPRARWYRRECAESVAAFARMYIKQVMRIAEEEFKLEVVYGDTDSLFVVIPPEKRELAQKFLQKVNESMPGIIELEFEGFYRRGLFVTKKRYALLSEDGKMVVKGLEFVRRDWAPIARETQKEVLRILLEEADPEKAARLVRDVIERIRQRRVSLEDITIYTQLTKRIKSYKSLEPHVVAAQKLKERGREVAPGMIIGYIITKGTKGISQRATPVEFARLEDYDPEYYIDNQILPAIQRIFEAIGYTRDYLKEGITQTSLSRWF

SEQ ID NO: 2095 - protein, 792 aa, unidentified
  REGION 1..792: note = Description of Unknown: Synthetic polypeptide
MPRILKGFLIDADFETVEGRALIRLFLRGEEGSFVVYDDSFSPYFYALPGDEPERVKERILASGAAEAIQKVEIEEKRLFGTPRVALRITVSHPQDVPRIRERIRRVEGVDLILEHDILFVRRYLIDRGIKPLTWLRLEVEERDGRALLRGVEQLEEEPPELRVAAVAIAVYNPKGAPRSSKDEIIMISVATSDGVEKVLTWREVQGLEQVEVLQDEKEMLLRFAELIKEGDYDVIVGYNTDSFDFPYIRDRLKKLGISLPLGRLDAELEVSRRGALPEARIRGRAHVDLYPIVRRHVKLNSYVLESVVEELLGIKKEKLDGERLFTYWDEGGEKRALLARYALEDARVTLALAEKFLPLYCELSTIVGQSLNDVARMTSGQLVEWLLMRYATPRGELIPNHPAGEEYAARARATYAGGYVREPKRGLVEHIAVFDFRSFGPSIIVSHNIDPSTLIVGNCEENRAPELEYCFSLEREGFIPAILKELIRRRAEIKRELKRSEGDRRRTLSFAEKALKILANSFYGYMGYPRARWYRRECAESVAAFARMYIKQVMRIAEEEFKLEVVYGDTDSLFVVIPPEKRELAQKFLQKVNESMPGIIELEFEGFYRRGLFVTKKRYALLSEDGKMVVKGLEFVRRDWAPIARETQTEVLRILLEEADPEKAARLVRDVIERIRQRRVSLEDITIYTQLTKRIKSYKSLEPHVVAAQKLKERGREVAPGMIIGYIITKGTKGISQRATPVEFARLEDYDPEYYIDNQILPAIQRIFEAIGYTRDYLKEGITQTSLSRWF

SEQ ID NO: 2096 - protein, 792 aa, unidentified
  REGION 1..792: note = Description of Unknown: Synthetic polypeptide
MPRILKGFLIDADFETVEGRALIRLFLRGEEGSFVVYDDSFSPYFYALPGDEPERVKERILASGAAEAIQKVEIEEKRLFGTPRVALRITVSHPQDVPRIRERIRRVEGVDLILEHDILFVRRYLIDRGIKPLTWLRLEVEERDGRALLRGVEQLEEEPPELRVAAVAIAVYNPKGAPRSSKDEIIMISVATSDGVEKVLTWREVQGLEQVEVLQDEKEMLLRFAELIKEGDYDVIVGYNTDSFDFPYIRDRLKKLGISLPLGRLDAELEVSRRGALPEARIRGRAHVDLYPIVRRHVKLNSYVLESVVEELLGIKKEKLDGERLFTYWDEGGEKRALLARYALEDARVTLALAEKFLPLYCELSTIVGQSLNDVARMTSGQLVEWLLMRYATPRGELIPNHPAGEEYAARARATYAGGYVREPKRGLVEHIAVFDFRSFGPSIIVSHNIDPSTLIVGNCEENRAPELEYCFKLEREGFIPAILKELIRRRAEIKRELKRSEGDRRRTLSFAEKALKILANSFYGYMGYPRARWYRRECAESVAAFARMYIKQVMRIAEEEFKLEVVYGDTDSLFVVIPPEKRELAQKFLQKVNESMPGIIELEFEGFYRRGLFVTKKRYALLSEDGKMVVKGLEFVRRDWAPIARETQKEVLRILLEEADPEKAARLVRDVIERIRQRRVSLEDITIYTQLTKRIKSYKSLEPHVVAAQKLKERGREVAPGMIIGYIITKGTKGISQRATPVEFARLEDYDPEYYIDNQILPAIQRIFEAIGYTRDYLKEGITQTSLSRWF

SEQ ID NO: 2097 - protein, 792 aa, unidentified
  REGION 1..792: note = Description of Unknown: Synthetic polypeptide
MPRILKGFLIDADFETVEGRALIRLFLRGEEGSFVVYDDSFSPYFYALPGDEPERVKERILASGAAEAIQKVEIEEKRLFGTPRVALRITVSHPQDVPRIRERIRRVEGVDLILEHDILFVRRYLIDRGIKPLTWLRLEVEERDGRALLRGVEQLEEEPPELRVAAVAIAVYNPKGAPRSSKDEIIMISVATSDGVEKVLTWREVQGLEQVEVLQDEKEMLLRFAELIKEGDYDVIVGYNTDSFDFPYIRDRLKKLGISLPLGRLDAELEVSRRGALPEARIRGRAHVDLYPIVRRHVKLNSYVLESVVEELLGIKKEKLDGERLFTYWDEGGEKRALLARYALEDARVTLALAEKFLPLYCELSTIVGQSLNDVARMTSGQLVEWLLMRYATPRGELIPNHPAGEEYAARARATYAGGYVREPKRGLVEHIAVFDFRSFGPSIIVSHNIDPSTLIVGNCEENRAPELEYCFSLEREGFIPAILKELIRRRAEIKRELKRSEGDRRRTLSFAEKALKILANSFYGYMGYPRARWYRRECAESVAAFARMYIKQVMRIAEEEFKLEVVYGDTDSLFVVIPPEKRELAQKFLQKVNESMPGIIELEFEGFYRRGLFVTKKRYALLSEDGKMVVKGLEFVRRDWAPIARETQKEVLRILLEEADPEKAARLVRDVIERIRQRRVSLEDITIYTQLTKRIKSYKSLEPHVVAAQKLKERGREVAPGMIIGYIITRGTKGISQRATPVEFARLEDYDPEYYIDNQILPAIQRIFEAFGYTRDYLKEDITQTSLSRWF

SEQ ID NO: 2098 - protein, 792 aa, unidentified
  REGION 1..792: note = Description of Unknown: Synthetic polypeptide
MPRILKGFLIDADFETVEGRALIRLFLRGEEGSFVVYDDSFSPYFYALPGDEPERVKERILASGAAEAIQKVEIEEKRLFGTPRVALRITVSHPQDVPRIRERIRRVEGVDLILEHDILFVRRYLIDRGIKPLTWLRLEVEERDGRALLRGVEQLEEEPPELRVAAVAIAVYNPKGAPRSSKDEIIMISVATSDGVEKVLTWREVQGLEQVEVLQDEKEMLLRFAELIKEGDYDVIVGYTTDSFDFPYIRDRLKKLGISLPLGRLDAELEVSRRGALPEARIRGRAHVDLYPIVRRHVKLNSYVLESVVEELLGIKKEKLDGERLFTYWDEGGEKRALLARYALEDARVTLALAEKFLPLYCELSTIVGQSLNDVARMTSGQLVEWLLMRYATPRGELIPNHPAGEEYAARARATYAGGYVREPKRGLVEHIAVFDFRSFGPSIIVSHNIDPSTLIVGNCEENRAPELEYCFSLEREGFIPAILKELIRRRAEIKRELKRSEGDRRRTLSFAEKALKILANSFYGYMGYPRARWYRRECAESVAAFARMYIKQVMRIAEEEFKLEVVYGDTDSLFVVIPPEKRELAQKFLQKVNESMPGIIELEFEGFYRRGLFVTKKRYALLSEDGKMVVKGLEFVRRDWAPIARETQKEVLRILLEEADPEKAARLVRDVIERIRQRRVSLEDITIYTQLTKRIKSYKSLEPHVVAAQKLKERGREVAPGMIIGYIITKGTKGISQRATPVEFARLEDYDPEYYIDNQILPAIQRIFEAIGYTRDYLKEGITQTSLSRWF

SEQ ID NO: 2099 - protein, 792 aa, unidentified
  REGION 1..792: note = Description of Unknown: Synthetic polypeptide
MPRILKGFLIDADFETVEGRALIRLFLRGEEGSFVVYDDSFSPYFYALPGDEPERVKERILASGAAEAIQKVEIEEKRLFGTPRVALRITVSHPQDVPRIRERIRRVEGVDLILEHDILFVRRYLIDRGIKPLTWLRLEVEERDGRALLRGVEQLEEEPPELRVAAVAIAVYNPKGAPRSSKDEIIMISVATSDGVEKVLTWREVQGLEQVEVLQDEKEMLLRFAELIKEGDYDVIVGYNTDSFDFPYIRDRLKKLGISLPLGRLDAELEVSRRGALPEARIRGRAHVDLYPIVRRHVKLNSYDLESVVEELLGIKKEKLDGERLFTYWDEGGEKRALLARYALEDARVTLALAEKFLPLYCELSTIVGQSLNDVARMTSGQLVEWLLMRYATPRGELIPNHPAGEEYAARARATYAGGYVREPKRGLVEHIAVFDFRSFGPSIIVSHNIDPSTLIVGNCEENRAPELEYCFSLEREGFIPAILKELIRRRAEIKRELKRSEGDRRRTLSFAEKALKILANSFYGYMGYPRARWYRRECAESVAAFARTYIKQVMRIAEEEFKLEVVYGDTDSLFVVIPPEKRELAQKFLQKVNESMPGIIELEFEGFYRRGLFVTKKRYALLSEDGKMVVKGLEFVRRDWAPIARETQKEVLRILLEEADPEKAARLVRDVIERIRQRRVSLEDITIYTQLTKRIKSYKSLEPHVVAAQKLKERGREVAPGMIIGYIITKGTKGISQRATPVEFARLEDYDPEYYIDNQILPAIQRIFEAIGYTRDYLKEGITQTSLSRWF

SEQ ID NO: 2100 - protein, 789 aa, unidentified; identical to SEQ ID NO: 2016
  REGION 1..789: note = Description of Unknown: Synthetic polypeptide

SEQ ID NO: 2101 - protein, 792 aa, unidentified
  REGION 1..792: note = Description of Unknown: Synthetic polypeptide
MPRILKGFLIDADFETVEGRALIRLFLRGEEGSFVVYDDSFSPYFYALPGDEPERVKERILASGAAEAIQKVEIEEKRLFGTPRVALRITVSHPQDVPRIRERIRRVEGVDLILEHDILFVRRYLIDRGIKPLTWLRLEVEERDGRALLRGVEQLEEEPPELRVAAVAIAVYNPKGAPRSSKDEIIMISVATSDGVEKVLTWREVQGLEQVEVLQDEKEMLLRFAELIKEGDYDVIVGYNTDSFDFPYIRDRLKKLGISLPLGRLDAELEVSRRGALPEARIRGRAHVDLYPIVRRHVKLNSYVLESVVEELLGIKKEKLDGERLFTYWDEGGEKRALLARYALEDARVTLALAEKFLPLYCELSTIVGQSLNDVARMTSGQLVEWLLMRYATPRGELIPNHPAGEEYAARARATYAGGYVREPKRGLVEHIAVFDFRSFGPSIIVSHNIDPSTLIVGNCEENRAPELEYCFSLEREGFIPAILKELIRRRAEIKRELKRSEGDRRRTLSFAEKALKILANSFYGYMGYPRARWYRRECAESVAAFARMYIKQVGRIAEEEFKLEVVYGDTDSLFVVIPPEKRELAQKFLQKVNESMPGIIELEFEGFYRRGLFVTKKRYALLSEDGKMVVKGLEFVRRDWAPIARETQKEVLRILLEEADPEKAARLVRDVIERIRQRRVSLEDITIYTQLTKRIKSYKSLEPHVVAAQKLKERGREVAPGMIIGYIITKGTKGISQRATPVEFARLEDYDPEYYIDNQILPAIQRIFEAIGYTRDYLKEGITQTSLSRWF

SEQ ID NO: 2102 - protein, 789 aa, unidentified
  REGION 1..789: note = Description of Unknown: Synthetic polypeptide
MPRILKGFLIDADFETVEGRALIRLFLRGEEGSFVVYDDSFSPYFYALPGDEPERVKERILASGAAEAIQKVEIEEKRLFGTPRVALRITVSHPQDVPRIRERIRRVEGVDLILEHDILFVRRYLIDRGIKPLTWLRLEVEERDGRALLRGVEQLEEEPPELRVAAVAIAVYNPKGAPRSSKDEIIMISVATSDGVEKVLTWREVQGLEQVEVLQDEKEMLLRFAELIKEGDYDVIVGYNTDSFDFPYIRDRLKKLGISLPLGRLDAELEVSRRGALPEARIRGRAHVDLYPIVRRHVKLNSYVLESVVEELLGIKKEKLDGERLFTYWDEGGEKRALLARYALEDARVTLALAEKFLPLYLELSTIVGQSLNDVARMTSGQLVEWLLMRYATPRGELIPNHPAGEEYAARARATYAGGYVREPKRGLVEHIAVFDFRSFGPSIIVSHNIDPSTLIVGNCEENRAPELEYCFSLEREGFIPAILKELIRRRAEIKRELKRSEGDRRRTLSFAEKALKILANSFYGYMGYPRARWYRRECAESVAAFARMYIKQVMRIAEEEFKLEVVYGDTDSLFVVIPPEKRELAQKFLQKVNESMPGIIELEFEGFYRRGLFVTKKRYALLSEDGKMVVKGLEFVRRDWAPIARETQKEVLRILLEEADPEKAARLVRDVIERIRQRRVSLEDITIYTQLTKRIKSYKSLEPHVVAAQKLKERGREVAPGMIIGYIITKGTKGISQRATPVEFARLEDYDPEYYIDNQILPAVQRIFEAIGYTRDYLKEGITQTSLS

SEQ ID NO: 2103 - protein, 792 aa, unidentified
  REGION 1..792: note = Description of Unknown: Synthetic polypeptide
MPRILKGFLIDADFETVEGRALIRLFLRGEEGSFVVYDDSFSPYFYALPGDEPERVKERILASGAAEAIQKVEIEEKRLFGTPRVALRITVSHPQDVPRIRERIRRVEGVDLILEHDILFVRRYLIDRGIKPLTWLRLEVEERDGRALLRGVEQLEEEPPELRVAAVAIAVYNPKGAPRSSKDEIIMISVATSDGVEKVLTWREVQGLEQVEVLQDEKEMLLRFAELIKEGDYDVIVGYNTDSFDFPYIRDRLKKLGISLPLGRLDAELEVSRRGALPEARIRGRAHVDLYPIVRRHVKLNSYVLESVVEELLGIKKEKLDGERLFTYWDEGGEKRALLARYALEDARVTLALAEKFLPLYCELSTIVGQSLNDVARMTSGQLVEWLLMRYATPRGELIPNHPAGEEYAARARATYAGGYVREPKRGLVEHIAVFDFRSFGPSIIVSHNIDPSTLIVGNCEENRAPELEYCFTLEREGFIPAILKELIRRRAEIKRELKRSEGDRRRTLSFAEKALKILANSFYGYMGYPRARWYRRECAESVAAFARMYIKQVMRIAEEEFKLEVVYGDTDSLFVVIPPEKRELAQKFLQKVNESMPGIIELEFEGFYRRGLFVTKKRYALLSEDGKMVVKGLEFVRRDWAPIARETQKEVLRILLEEADPEKAARLVRDVIERIRQRRVSLEDITIYTQLTKRIKSYKSLEPHVVAAQKLKERGREVAPGMIIGYIITKGTKGISQRATPVEFARLEDYDPEYYIDNQILPAIQRIFEAIGYTRDYLKEGITQTSLSRWF

SEQ ID NO: 2104 - protein, 792 aa, unidentified
  REGION 1..792: note = Description of Unknown: Synthetic polypeptide
MPRILKGFLIDADFETVEGRALIRLFLRGEEGSFVVYDDSFSPYFYALPGDEPERVKERILASGAAEAIQKVEIEEKRLFGTPRVALRITVSHPQDVPRIRERIRRVEGVDLILEHDILFVRRYLIDRGIKPLTWLRLEVEERDGRALLRGVEQLEEEPPELRVAAVAIAVYNPKGAPRSSKDEIIMISVATSDGVEKVLTWREVQGLEQVEVLQDEKEMLLRFAELIKEGDYDVIVGYNTDSFDFPYIRDRLKKLGISLPLGRLDAELEVSRRGALPEARIRGRAHVDLYPIVRRHVKLNSYDLESVVEELLGIKKEKLDGERLFTYWDEGGEKRALLARYALEDARVTLALAEKFLPLYLELSTIVGQSLNDVARMTSGQLVEWLLMRYATPRGELIPNHPAGEEYAARARATYAGGYVREPKRGLVEHIAVFDFRSFGPSIIVSHNIDPSTLIVGNCEENRAPELEYCFSLEREGFIPAILKELIRRRAEIKRELKRSEGDRRRTLSFAEKALKILANSFYGYMGYPRARWYRRECAESVAAFARMYIKQVMRIAEEEFKLEVVYGDTDSLFVVIPPEKRELAQKFLQKVNESMPGIIELEFEGFYRRGLFVTKKRYALLSEDGKMVVKGLEFVRRDWAPIARETQKEVLRILLEEADPEKAARLVRDVIERIRQRRVSLEDITIYTQLTKRIKSYKSLEPHVVAAQKLKERGREVAPGMIIGYIITKGTKGISQRATPVEFARLEDYDPEYYIDNQILPAIQRIFEAIGYTRDYLKEGITQTSLSRDF

SEQ ID NO: 2105 - protein, 792 aa, unidentified
  REGION 1..792: note = Description of Unknown: Synthetic polypeptide
MPRILKGFLIDADFETVEGRALIRLFLRGEEGSFVVYDDSFSPYFYALPGDEPERVKERILASGAAEAIQKVEIEEKRLFGTPRVALRITVSHPQDVPRIRERIRRVEGVDLILEHDILFVRRYLIDRGIKPLTWLRLEVEERDGRALLRGVEQLEEEPPELRVAAVAIAVYNPKGAPRSSKDEIIMISVATSDGVEKVLTWREVQGLEQVEVLQDEKEMLLRFAELIKEGDYDVIVGYNTDSFDFPYIRDRLKKLGISLPLGRLDAELEVSRRGALPEARIRGRAHVDLYPIVRRHVKLNSYVLESVVEELLGIKKEKLDGERLFTYWDEGGEKRALLARYALEDARVTLALAEKFLPLYCELSTIVGQSLNDVARMTSGQLVEWLLMRYATPRGELIPNHPAGEEYAARARATYAGGYVREPKRGLVEHIAVFDFRSFGPSIIVSHNIDPSTLIVGNCEENRAPELEYCFSLEREGFIPAILKELIRRRAEIKRELKRSEGDRRRTLSFAEKALKILANSFYGYMGYPRARWYRRECAESVAAFARMYIKQVMRIAEEEFKLEVVYGDTDSLFVVIPPEKRELAQKFLQKVNESMPGIIELEFEGFYRRGLFVTKKRYALLSEDGKMVVKGLEFVRRDWAPIARETQKEVLRILLEEADPEKAARLVRDVIERIRQRRVSLEDITIYTQLTKRIKSYKSLEPHVVAAQKLKERGREVAPGMIIGYIITKGTKGISQRATPVEFARLEDYDPEYYIDNQILPAIQRIFEAIGYTRDYLKEGITQTSLSRWS

SEQ ID NO: 2106 - protein, 792 aa, unidentified
  REGION 1..792: note = Description of Unknown: Synthetic polypeptide
MPRILKGFLIDADFETVEGRALIRLFLRGEEGSFVVYDDSFSPYFYALPGDEPERVKERILASGAAEAIQKVEIEEKRLFGTPRVALRITVSHPQDVPRIRERIRRVEGVDLILEHDILFVRRYLIDRGIKPLTWLRLEVEERDGRALLRGVEQLEEEPPELRVAAVAIAVYNPKGAPRSSKDEIIMISVATSDGVEKVLTWREVQGLEQVEVLQDEKEMLLRFAELIKEGDYDVIVGYNTDSFDFPYIRDRLKKLGISLPLGRLDAELEVSRRGALPEARIRGRAHVDLYPIVRRHVKLNSAVLESVVEELLGIKKEKLDGERLFTYWDEGGEKRALLARYALEDARVTLALAEKFLPLYCELSTIVGQSLNDVARMTSGQLVEWLLMRYATPRGELIPNHPAGEEYAARARATYAGGYVREPKRGLVEHIAVFDFRSFGPSIIVSHNIDPSTLIVGNCEENRAPELEYCFSLEREGFIPAILKELIRRRAEIKRELKRSEGDRRRTLSFAEKALKILANSFYGYMGYPRARWYRRECAESVAAFARMYIKQVMRIAEEEFKLEVVYGDTDSLFVVIPPEKRELAQKFLQKVNESMPGIIELEFEGFYRRGLFVTKKRYALLSEDGKMVVKGLEFVRRDWAPIARETQKEVLRILLEEADPEKAARLVRDVIERIRQRRVSLEDITIYTQLTKRIKSYKSLEPHVVAAQKLKERGREVAPGMIIGYIITKGTKGISQRATPVEFARLEDYDPEYYIDNQILPAIQRIFEAIGYTRDYLKEGITQTSLSRWF

SEQ ID NO: 2107 - protein, 789 aa, unidentified
  REGION 1..789: note = Description of Unknown: Synthetic polypeptide
MPRILKGFLIDADFETVEGRALIRLFLRGEEGSFVVYDDSFSPYFYALPGDEPERVKERILASGAAEAIQKVEIEEKRLFGTPRVALRITVSHPQDVPRIRERIRRVEGVDLILEHDILFVRRYLIDRGIKPLTWLRLEVEERDGRALLRGVEQLEEEPPELRVAAVAIAVYNPKGAPRSSKDEIRMISVATSDGVEKVLTWREVQGLEQVEVLQDEKEMLLRFAELIKEGDYDVIVGYNTDSFDFPYIRDRLKKLGISLPLGRLDAELEVSRRGALPEARIRGRAHVDLYPIVRRHVKLNSYDLESVVEELLGIKKEKLDGERLFTYWDEGGEKRALLARYALEDARVTLALAEKFLPLYLELSTIVGQSLNDVARMTSGQLVEWLLMRYATPRGELIPNHPAGEEYAARARATYAGGYVREPKRGLVEHIAVFDFRSFGPSIIVSHNIDPSTLIVGNCEENRAPELEYCFSLEREGFIPAILKELIRRRAEIKRELKRSEGDRRRTLSFAEKALKILANSFYGYMGYPRARWYRRECAESVAAFARMYIKQVMRIAEEEFKLEVVYGDTDSLFVVIPPEKRELAQKFLQKVNESMPGIIELEFEGFYRRGLFVTKKRYALLSEDGKMVVKGLEFVRRDWAPIARETQKEVLRILLEEADPEKAARLVRDVIERIRQRRVSLEDITIYTQLTKRIKSYKSLEPHVVAAQKLKERGREVAPGMIIGYIITKGTKGISQRATPVEFARLEDYDPEYYIDNQILPAIQRIFEAIGYTRDYLKEGITQTSLS

SEQ ID NO: 2108 - protein, 792 aa, unidentified
  REGION 1..792: note = Description of Unknown: Synthetic polypeptide
MPRILKGFLIDADFETVEGRALIRLFLRGEEGSFVVYDDSFSPYFYALPGDEPERVKERILASGAAEAIQKVEIEEKRLFGTPRVALRITVSHPQDVPRIRERIRRVEGVDLILEHDILFVRRYLIDRGIKPLTWLRLEVEERDGRALLRGVEQLEEEPPELRVAAVAIAVYNPKGAPRSSKDEIIMISVATSDGVEKVLTWREVQGLEQVEVLQDEKEMLLRFAELIKEGDYDVIVGYNTDSFDFPYIRDRLKKLGISLPLGRLDAELEVSRRGALPEARIRGRAHVDLYPIVRRHVKLNSYVLESVVEELLGIKKEKLDGERLFTYWDEGGEKRALLARYALEDARVTLALAEKFLPLYCELSTIVGQSLNDVARMTSGQLVEWLLMRYATPRGELIPNHPAGEEYAARARATYAGGYVREPKRGLVEHIAVFDFRSFGPSIIVSHNIDPSTLIVGNCEENRAPELEYCFSLEREGFIPAILKELIRRRAEIKRELKRSEGDRRRTLSFAEKALKILANSFYGYMGYPRARWYRRECAESVAAFARMYIKQVKRIAEEEFKLEVVYGDTDSLFVVIPPEKRELAQKFLQKVNESMPGIIELEFEGFYRRGLFVTKKRYALLSEDGKMVVKGLEFVRRDWAPIARETQKEVLRILLEEADPEKAARLVRDVIERIRQRRVSLEDITIYTQLTKRIKSYKSLEPHVVAAQKLKERGREVAPGMIIGYIITKGTKGISQRATPVEFARLEDYDPEYYIDNQILPAIQRIFEAIGYTRDYLKEGITQTSLSRWF

SEQ ID NO: 2109 - protein, 792 aa, unidentified
  REGION 1..792: note = Description of Unknown: Synthetic polypeptide
MPRILKGFLIDADFETVEGRALIRLFLRGEEGSFVVYDDSFSPYFYALPGDEPERVKERILASGAAEAIQKVEIEEKRLFGTPRVALRITVSHPQDVPRIRERIRRVEGVDLILEHDILFVRRYLIDRGIKPLTWLRLEVEERDGRALLRGVEQLEEEPPELRVAAVAIAVYNPKGAPRSSKDEIIMISVATSDGVEKVLTWREVQGLEQVEVLQDEKEMLLRFAELIKEGDYDVIVGYNTDSFDFPYIRDRLKKLGISLPLGRLDAELEVSRRGALPEARIRGRAHVDLYPIVRRHVKLNSYVLESVVEELLGIKKEKLDGERLFTYWDEGSEKRALLARYALEDARVTLALAEKFLPLYCELSTIVGQSLNDVARMTSGQLVEWLLMRYATPRGELIPNHPAGEEYAARARATYAGGYVREPKRGLVEHIAVFDFRSFGPSIIVSHNIDPSTLIVGNCEENRAPELEYCFSLEREGFIPAILKELIRRRAEIKRELKRSEGDRRRTLSFAEKALKILANSFYGYMGYPRARWYRRECAESVAAFARMYIKQVMRIAEEEFKLEVVYGDTDSLFVVIPPEKRELAQKFLQKVNESMPGIIELEFEGFYRRGLFVTKKRYALLSEDGKMVVKGLEFVRRDWAPIARETQKEVLRILLEEADPEKAARLVRDVIERIRQRRVSLEDITIYTQLTKRIKSYKSLEPHVVAAQKLKERGREVAPGMIIGYIITKGTKGISQRATPVEFARLEDYDPEYYIDNQILPAIQRIFEAIGYTRDYLKEGITQTSLSRWF

SEQ ID NO: 2110 - protein, 789 aa, unidentified
  REGION 1..789: note = Description of Unknown: Synthetic polypeptide
MPRILKGFLIDADFETVEGRALIRLFLRGEEGSFVVYDDSFSPYFYALPGDEPERVKERILASGAAEAIQKVEIEEKRLFGTPRVALRITVSHPQDVPRIRERIRRVEGVDLILEHDILFVRRYLIDRGIKPLTWLRLEVEERDGRALLRGVEQLEEEPPELRVAAVAIAVYNPKGAPRSSKDEIIMISVATSDGVEKVLTWREVQGLEQVEVLQDEKEMLLRFAELIKEGDYDVIVGYNTDSFDFPYIRDRLKKLGISLPLGRLDAELEVSRRGALPEARIRGRAHVDLYPIVRRHVKLNSYDLESVVEELLDIKKEKLDGERLFTYWDEGGEKRALLARYALEDARVTLALAEKFLPLYLELSTIVGQSLNDVARMTSGQLVEWLLMRYATPRGELIPNHPAGEEYAARARATYAGGYVREPKRGLVEHIAVFDFRSFGPSIIVSHNIDPSTLIVGNCEENRAPELEYCFSLEREGFIPAILKELIRRRAEIKRELKRSEGDRRRTLSFAEKALKILANSFYGYMGYPRARWYRRECAESVAAFARMYIKQVMRIAEEEFKLEVVYGDTDSLFVVIPPEKRELAQKFLQKVNESMPGIIELEFEGFYRRGLFVTKKRYALLSEDGKMVVKGLEFVRRDWAPIARETQKEVLRILLEEADPEKAARLVRDVIERIRQRRVSLEDITIYTQLTKRIKSYKSLEPHVVAAQKLKERGREVAPGMIIGYIITKGTKGISQRATPVEFARLEDYDPEYYIDNQILPAIQRIFEAIGYTRDYLKEGITQTSLS

SEQ ID NO: 2111 - protein, 792 aa, unidentified
  REGION 1..792: note = Description of Unknown: Synthetic polypeptide
MPRILKGFLIDADFETVEGRALIRLFLRGEEGSFVVYDDSFSPYFYALPGDEPERVKERILASGAAEAIQKVEIEEKRLFGTPRVALRITVSHPQDVPRIRERIRRVEGVDLILEHDILFVRRYLIDRGIKPLTWLRLEVEERDGRALLRGVEQLEEEPPELRVAAVAIAVYNPKGAPRSSKDEIIMISVATSDGVEKVLTWREVQGLEQVEVLQDEKEMLLRFAELIKEGDYDVIVGYNTDSFDFPYIRDRLKKLGISLPLGRLDAELEVSRRGALPEARIRGRAHVDLYPIVRRHVKLNSYDLESVVEELLGIKKEKLDGERLFTYWDEGGEKRALLARYALEDARVTLALAEKFLPLYCELSTIVGQSLNDVARMTSGQLVEWLLMRYATPRGELIPNHPAGEEYAARARATYAGGYVREPKRGLVEHIAVFDFRSFGPSIIVSHNIDPSTLIVGNCEENRAPELEYCFSLEREGFIPAILKELIRRRAEIKRELKRSEGDRRRTLSFAEKALKILANSFYGYMGYPRARWYRRECAESVAAFARMYIKQVMRIAEEEFKLEVVYGDTDSLFVVIPPEKRELAQKFLQKVNESMPGIIELEFEGFYRRGLFVTKKRYALLSEDGKMVVKGLEFVRRDWAPIARETQKEVLRILLEEADPEKAARLVRDVIERIRQRRVSLEDATIYTQLTKRIKSYKSLEPHVVAAQKLKERGREVAPGMIIGYIITKGTKGISQRATPVEFARLEDYDPEYYIDNQILPAIQRIFEAIGYTRDYLKEGITQTSLSRWF

SEQ ID NO: 2112 - protein, 792 aa, unidentified
  REGION 1..792: note = Description of Unknown: Synthetic polypeptide
MPRILKGFLIDADFETVEGRALIRLFLRGEEGSFVVYDDSFSPYFYALPGDEPERVKERILASGAAEAIQKVEIEEKRLFGTPRVALRITVSHPQDVPRIRERIRRVEGVDLILEHDILFVRRYLIDRGIKPLTWLRLEVEERDGRALLRGVEQLEEEPPELRVAAVAIAVYNPKGAPRSSKDEIIMISVATSDGVEKVLTWREVQGLEQVEVLQDEKEMLLRFAELIKEGDYDVIVGYNTDSFDFPYIRDRLKKLGISLPLGRLDAELEVSRRGALPEARIRGRAHVDLYPIVRRHVKLNSYVLESVVEELLGIKKEKLDGERLFTYWDEGGEKRALLARYALEDARVTLALAEKFLPLYCELSTIVGQSLNDVARMTSGQLVEWLLMRYATPRGELIPNHPAGEEYAARARATYAGGYVREPKRGLVEHIAVFDFRSFGPSIIVSHNIDPSTLIVGNCEENRAPELEYCFSLEREGFIPAILKELIRRRAEIKRELKRSEGDRRRTLSFAEKALKILANSFYGYMGYPRARWYRRECAESVAAFARMYIKQVMRIAEEEFKLEVVYGDTDSLFVVIPPEKRELAQKFLQTVNESMPGIIELEFEGFYRRGLFVTKKRYALLSEDGKMVVKGLEFVRRDWAPIARETQKEVLRILLEEADPEKAARLVRDVIERIRQRRVSLEDITIYTQLTKRIKSYKSLEPHVVAAQKLKERGREVAPGMIIGYIITKGTKGISQRATPVEFARLEDYDPEYYIDNQILPAIQRIFEAIGYTRDYLKEGITQTSLSRWF

SEQ ID NO: 2113 - protein, 792 aa, unidentified
  REGION 1..792: note = Description of Unknown: Synthetic polypeptide
MPRILKGFLIDADFETVEGRALIRLFLRGEEGSFVVYDDSFSPYFYALPGDEPERVKERILASGAAEAIQKVEIEEKRLFGTPRVALRITVSHPQDVPRIRERIRRVEGVDLILEHDILFVRRYLIDRGIKPLTWLRLEVEERDGRALLRGVEQLEEEPPELRVAAVAIAVYNPKGAPRSSKDEIIMISVATSDGVEKVLTWREVQGLEQVEVLQDEKEMLLRFAELIKEGDYDVIVGYNTDSFDFPYIRDRLKKLGISLPLGRLDAELEVSRRGALPEARIRGRAHVDLYPIVRRHVKLNSYVLESVVEELLGIKKEKLDGERLFTYWDEGGEKRALLARYALEDARVTLALAEKFLPLYCELSTIVGQSLNDVARMTSGQLVEWLLMRYATPRGELIPNLPAGGEYVARARATYAGGYVREPKRGLVEHIAVFDFRSFGPSIIVSHNIDPSTLIVGNCEENRAPELEYCFSLEREGFIPAILKELIRRRAEIKRELKRSEGDRRRTLSFAEKALKILANSFYGYMGYPRARWYRRECAESVAAFARMYIKQVMRIAEEEFKLEVVYGDTDSLFVVIPPEKRELAQKFLQKVNESMPGIIELEFEGFYRRGLFVTKKRYALLSEDGKMVVKGLEFVRRDWAPIARETQKEVLRILLEEADPEKAARLVRDVIERIRQRRVSLEDITIYTQLTKRIKSYKSLEPHVVAAQKLKERGREVAPGMIIGYIITKGTKGISQRATPVEFARLEDYDPEYYIDNQILPAIQRIFEAIGYTRDYLKEGITQTSLSRWF

SEQ ID NO: 2114 - protein, 792 aa, unidentified
  REGION 1..792: note = Description of Unknown: Synthetic polypeptide
MPRILKGFLIDADFETVEGRALIRLFLRGEEGSFVVYDDSFSPYFYALPGDEPERVKERILASGAAEAIQKVEIEEKRLFGTPRVALRITVSHPQDVPRIRERIRRVEGVDLILEHDILFVRRYLIDRGIKPLTWLRLEVEERDGRALLRGVEQLEEEPPELRVAAVAIAVYNPKGAPRSSKDEIIMISVATSDGVEKVLTWREVQGLEQVEVLQDEKEMLLRFAELIKEGDYDVIVGYNTDSFDFPDIRDRLKKLGISLPLGRLDAELEVSRRGALPEARIRGRAHVDLYPIVRRHVKLNSYVLESVVEELLGIKKEKLDGERLFTYWDEGGEKRALLARYALEDARVTLALAEKFLPLYCELSTIVGQSLNDVARMTSGQLVEWLLMRYATPRGELIPNHPAGEEYAARARATYAGGYVREPKRGLVEHIAVFDFRSFGPSIIVSHNIDPSTLIVGNCEENRAPELEYCFSLEREGFIPAILKELIRRRAEIKRELKRSEGDRRRTLSFAEKALKILANSFYGYMGYPRARWYRRECAESVAAFARMYIKQVMRIAEEEFKLEVVYGDTDSLFVVIPPEKRELAQKFLQKVNESMPGIIELEFEGFYRRGLFVTKKRYALLSEDGKMVVKGLEFVRRDWAPIARETQKEVLRILLEEADPEKAARLVRDVIERIRQRRVSLEDITIYTQLTKRIKSYKSLEPHVVAAQKLKERGREVAPGMIIGYIITKGTKGISQRATPVEFARLEDYDPEYYIDNQILPAIQRIFEAIGYTRDYLKEGITQTSLSRWF

SEQ ID NO: 2115 - protein, 792 aa, unidentified
  REGION 1..792: note = Description of Unknown: Synthetic polypeptide
MPRILKGFLIDADFETVEGRALIRLFLRGEEGSFVVYDDSFSPYFYALPGDEPERVKERILACGAAEAIQKVEIEEKRLFGTPRVALRITVSHPQDVPRIRERIRRVEGVDLILEHDILFVRRYLIDRGIKPLTWLRLEVEERDSRALLRGVEQLEEEPPELRVAAVAIAVYNPKGAPRSSKDEIIMISVATSDGVEKVLTWREVQGLEQVEVLQDEKEMLLRFAELIKEGDYDVIVGYNTDSFDFPYIRDRLKKLGISLPLGRLDAELEVSRRGALPEARIRGRAHVDLYPIVRRHVKLNSYVLESVVEELLGIKKEKLDGERLFTYWDEGGEKRALLARYALEDARVTLALAEKFLPLYCELSTIVGQSLNDVARMTSGQLVEWLLMRYATPRGELIPNHPAGEEYAARARATYAGGYVREPKRGLVEHIAVFDFRSFGPSIIVSHNIDPSTLIVGNCEENRAPELEYCFSLEREGFIPAILKELIRRRAEIKRELKRSEGDRRRTLSFAEKALKILANSFYGYMGYPRARWYRRECAESVAAFARMYIKQVMRIAEEEFKLEVVYGDTDSLFVVIPPEKRELAQKFLQKVNESMPGIIELEFEGFYRRGLFVTKKRYALLSEDGKMVVKGLEFVRRDWAPIARETQKEVLRILLEEADPEKAARLVRDVIERIRQRRVSLEDITIYTQLTKRIKSYKSLEPHVVAAQKLKERGREVAPGMIIGYIITKGTKGISQRATPVEFARLEDYDPEYYIDNQILPAIQRIFEAIGYTRDYLKEGITQTSLSRWF

SEQ ID NO: 2116 - protein, 792 aa, unidentified
  REGION 1..792: note = Description of Unknown: Synthetic polypeptide
MPRILKGFLIDADFETVEGRALIRLFLRGEEGSFVVYDDSFSPYFYALPGDEPERVKERILASGAAEAIQKVEIEEKRLFGTPRVALRITVSHPQDVPRIRERIRRVEGVDLILEHDILFVRRYLIDRGIKPLTWLRLEVEERDGRALLRGVEQLEEEPPELRVAAVAIAVYNPKGAPRSSKDEIIMISVATSDGVEKVLTWREVQGLEQVEVLQDEKEMLLRFAELIKEGDYDVIVGYNTDSFDFPYIRDRLKKLGISLPLGRLDAELEVSRRGALPEARIRGRAHVDLYPIVRRHVKLNSYVLESVVEELLGIKKEKLDGERLFTYWDEGGEKRALLARYALEDARVTLALAEKFLPLYIELSTIVGQSLNDVARMTSGQLVEWLLMRYATPRGELIPNHPAGEEYAARARATYAGGYVREPKRGLVEHIAVFDFRSFGPSIIVSHNIDPSTLIVGNCEENRAPELEYCFSLEREGFIPAILKELIRRRAEIKRELKRSEGDRRRTLSFAEKALKILANSFYGYMGYPRARWYRRESAESVAAFARMYIKQVMRIAEEEFKLEVVYGDTDSLFVVIPPEKRELAQKFLQKVNESMPGIIELEFEGFYRRGLFVTKKRYALLSEDGKMVVKGLEFVRRDWAPIARETQKEVLRILLEEADPEKAARLVRDVIERIRQRRVSLEDITIYTQLTKRIKSYKSLEPHVVAAQKLKERGREVAPGMIIGYIITKGTKGISQRATPVEFARLEDYDPEYYIDNQILPAIQRIFEAIGYTRDYLKEGITQTSLSRWF

SEQ ID NO: 2117 - protein, 792 aa, unidentified
  REGION 1..792: note = Description of Unknown: Synthetic polypeptide
MPRILKGFLIDADFETVEGRALIRLFLRGEEGSFVVYDDSFSPYFYALPGDEPERVKERILASGAAEAIQKVEIEEKRLFGTPRVALRITVSHPQDVPRIRERIRRVEGVDLILEHDILFVRRYLIDRGIKPLTWLRLEVEERDGRALLRGVEQLEEEPPELRVAAVAIAVYNPKGAPRSSKDEIIMISVATSDGVEKVLTWREVQGLEQVEVLQDEKEMLLRFAELIKEGDYDVIVGYNTDSFDFPYIRDRLKKLGISLPLGRLDAELEVSRRGALPEARIRGRAHVDLYPIVRRHVKLNSYVLESVVEELLGIKKEKLDGERLFTYWDEGGERRALLARYALEDARVTLALAEKFLPLYCELSTIVGQSLNDVARMTSGQLVEWLLMRYATPRGELIPNHPAGEEYAARARATYAGGYVREPKRGLVEHIAVFDFRSFGPSIIVSHNIDPSTLIVGNCEENRAPELEYCFSLEREGFIPAILKELIRRRAEIKRELKRSEGDRRRTLSFAEKALKILANSFYGYMGYPRARWYRRECAESVAAFARMYIKQVMRIAEEEFKLEVVYGDTDSLFVVIPPEKRELAQKFLQKVNESMPGIIELEFEGFYRRGLFVTKKRYALLSEDGKMVVKGLEFVRRDWAPIARETQKEVLRILLEEADPEKAARLVRDVIERIRQRRVSLEDITIYTQLTKRIKSYKSLEPHVVAAQKLKERGREVAPGMIIGYIITKGTKGISQRATPVEFARLEDYDPEYYIDNQILPAIQRIFEAIGYTRDYLKEGITQTSLSRWF

SEQ ID NO: 2118 - protein, 792 aa, unidentified
  REGION 1..792: note = Description of Unknown: Synthetic polypeptide
MPRILKGFLIDADFETVEGRALIRLFLRGEEGSFVVYDDSFSPYFYALPGDEPERVKERILASGAAEAIQKVEIEEKRLFGTPRVALRITVSHPQDVPRIRERIRRVEGVDLILEHDILFVRRYLIDRGIKPLTWLRLEVEERDGRALLRGVEQLEEEPPELRVAAVAIAVYNPKGAPRSSKDEIIMISVATSDGVEKVLTWREVQGLEQVEVLQDEKEMLLRFAELIKEGDYDVIVGYNTDSFDFPYIRDRLKKLGISLPLGRLDAELEVSRRGALPEARIRGRAHVDLYPIVRRHVKLNSYVLESVVEELLGIKKEKLDGERLFTYWDEGGELRALLARYALEDARVTLALAEKFLPLYCELSTIVGQSLNDVARMTSGQLVEWLLMRYATPRGELIPNHPAGEEYAARARATYAGGYVREPKRGLVEHIAVFDFRSFGPSIIVSHNIDPSTLIVGNCEENRAPELEYCFSLEREGFIPAILKELIRRRAEIKRELKRSEGDRRRTLSFAEKALKILANSFYGYMGYPRARWYRRECAESVAAFARMYIKQVMRIAEEEFKLEVVYGDTDSLFVVIPPEKRELAQKFLQKVNESMPGIIELEFEGFYRRGLFVTKKRYALLSEDGKMVVKGLEFVRRDWAPIARETQKEVLRILLEEADPEKAARLVRDVIERIRQRRVSLEDITIYTQLTKRIKSYKSLEPHVVAAQKLKERGREVAPGMIIGYIITKGTKGISQRATPVEFARLEDYDPEYYIDNQILPAIQRIFEAIGYTRDYLKEGITQTSLSRWF

SEQ ID NO: 2119 - protein, 792 aa, unidentified
  REGION 1..792: note = Description of Unknown: Synthetic polypeptide
MPRILKGFLIDADFETVEGRALIRLFLRGEEGSFVVYDDSFSPYFYALPGDEPERVKERILASGAAEAIQKVEIEEKRLFGTPRVALRITVSHPQDVPRIRERIRRVEGVDLILEHDILFVRRYLIDRGIKPLTWLRLEVEERDGRALLRGVEQLEEEPPELRVAAVAIAVYNPKGAPRSSKDEIIMISVATSDGVEKVLTWREVQGLEQVEVLQDEKEMLLRFAELIKEGDYDVIVGYNTDSFDFPYIRDRLKKLGISLPLGRLDAELEVSRRGALPEARIRGRAHVDLYPIVRRHVKLNSYDLESVVEELLGIKKEKLDGERLFTYWDEGGEKRALLARYALEDARVTLALAEKFLPLYCELSTIVGQSLNDVARMTSGQLVEWLLMRYATPRGELIPNHPAGEEYAARARATYAGGYVREPKRGLVEHIAVFDFRSFGPSIIVSHNIDPSTLIVGNCEENRAPELEYCFSLEREGFIPAILKELIRRRAEIKRELKRSEGDRRRTLSFAEKALKILANSFYGYMGYPRARWYRRECAESVAAFARMYIKQVMRIAEEEFKLEVVYGDTDSLFVVIPPEKRELAQKFLQKVNESMPGIIELEFEGFYRRGLFVTKKRYALLSEDGKMVVKGLEFVRRDWAPIARETQKEVLRILLEEADPEKAARLVRDVIERIRQKRVSLEDITIYTQLTKRIKSYKSLEPHVVAAQKLKERGREVAPGMIIGYIITKGTKGISQRATPVEFARLEDYDPEYYIDNQILPAIQRIFEAIGYTRDYLKEGITQTSLSRWF

SEQ ID NO: 2120 - protein, 792 aa, unidentified
  REGION 1..792: note = Description of Unknown: Synthetic polypeptide
MPRILKGFLIDADFETVEGRALIRLFLRGEEGSFVVYDDSFSPYFYALPGDEPERVKERILASGAAEAIQKVEIEEKRLFGTPRVALRITVSHPQDVPRIRERIRRVEGVDLILEHDILFVRRYLIDRGIKPLTWLRLEVEERDGRALLRGVEQLEEEPPELRVAAVAIAVYNPKGAPRSSKDEIIMISVATSDGVEKVLTWREVQGLEQVEVLQDEKEMLLRFAELIKEGDYDVIVGYNTDSFDFPYIRDRLKKLGISLPLGRLDAELEVSRRGALPEARIRGRAHVDLYPIVRRHVKLNSYVLESVVEELLGIKKEKLDGERLFTYWDEGGEKRALLARYALEDARVTLALAEKFLPLYCELSTIVGQSLNDVARMTSGQLVEWLLMRYATPRGELIPNHPAGEEYAARARATYAGGYVREPKRGLVEHIAVFDFRSFGPSIIVSHNIDPSTLIVGNCEENRAPELEYCFSLEREGFIPAILKELIRRRAEIKRELKRSEGDRRRTLSFAEKALKILANSFYGYMGYPRARWYRRECAESVAAFARMYIKQVMRIAEEEFKLEVVYGDTDSLFVVIPPEKRELAQKFLQKVNESMPGIIELEFEGFYRRGLFVTKKRYALLSEDGKMVVKGLEFVRRDWAPIARETQKEVLRILLEEADPEKAARLVRDVIERIRQRRVSLEDITIYTQLTKRIKSYKSLEPHVVAAQKLKERGREVAPGMIIGYIITKGTKGISQRATPVEFARLEDYDPEYYINNQILPAVQRIFEAIGYTRDYLKEGITQTSLSRWF

SEQ ID NO: 2121 - protein, 792 aa, unidentified
  REGION 1..792: note = Description of Unknown: Synthetic polypeptide
MPRILKGFLIDADFETVEGRALIRLFLRGEEGSFVVYDDSFSPYFYALPGDEPERVKERILASGAAEAIQKVEIEEKRLFGTPRVALRITVSHPQDVPRIRERIRRVEGVDLILEHDILFVRRYLIDRGIKPLTWLRLEVEERDGRALLRGVEQLEEEPPELRVAAVAIAVRNPKGAPRSSKDEIIMISVATSDGVEKVLTWREVQGLEQVEVLQDEKEMLLRFAELIKEGDYDVIVGYNTDSFDFPYIRDRLKKLGISLPLGRLDAELEVSRRGALPEARIRGRAHVDLYPIVRRHVKLNNYVLESVVEELLGIKKEKLDGERLFTYWDEGGEKRALLARYALEDARVTLALAEKFLPLYCELSTIVGQSLNDVARMTSGQLVEWLLMRYATPRGELIPNHPAGEEYAARARATYAGGYVREPKRGLVEHIAVFDFRSFGPSIIVSHNIDPSTLIVGNCEENRAPELEYCFSLEREGFIPAILKELIRRRAEIKRELKRSEGDRRRTLSFAEKALKILANSFYGYMGYPRARWYRRECAESVAAFARMYIKQVMRIAEEEFKLEVVYGDTDSLFVVIPPEKRELAQKFLQKVNESMPGIIELEFEGFYRRGLFVTKKRYALLSEDGKMVVKGLEFVRRDWAPIARETQKEVLRILLEEADPEKAARLVRDVIERIRQRRVSLEDITIYTQLTKRIKSYKSLEPHVVAAQKLKERGREVAPGMIIGYIITKGTKGISQRATPVEFARLEDYDPEYYIDNQILPAIQRIFEAIGYTRDYLKEGITQTSLSRWF

SEQ ID NO: 2122 - protein, 792 aa, unidentified
  REGION 1..792: note = Description of Unknown: Synthetic polypeptide
MPRILKGFLIDADFETVEGRALIRLFLRGEEGSFVVYDDSFSPYFYALPGDEPERVKERILASGAAEAIQKVEIEEKRLFGTPRVALRITVSHPQDVPRIRERIRRVEGVDLILEHDILFVRRYLIDRGIKPLTWLRLEVEERDGRALLRGVEQLEEEPPELRVAAVAIAVYNPKGAPRSSKDEIIMISVATSDGVEKVLTWREVQGLEQVEVLQDEKEMLLRFAELIKEGDYDVIVGYNTDSFDFPYIRDRLKKLGISLPLGRLDAELEVSRRGALPEARIRGRAHVDLYPIVRRHVKLNSYVLESVVEELLGIKKEKLDGERLFTYWDEGGEKRALLARYALEDARVTLALAEKFLPLYCELSTIVGQSLNDVARMTSGQLVEWLLMRYATPRGELIPNHPAGEEYAARARATYAGGYVREPKRGLVEHIAVFDFRSFGPSIIVSHNIDPSTLIVGNCEENRAPELEYCFSLEREGFIPAILKELIRRRAEIKRELKRSEGDRRRTLSFAEKALKILANSFYGYMGYPRARWYRRECAESVAAFARMYIKQVMRIAEEEEKLEVVYGDTDSLFVVIPPEKRELAQKFLQKVNESMPGIIELEFEGFYRRGLFVTKKRYALLSEDGKMVVKGLEFVRRDWAPIARETQKEVLRILLEEADPEKAARLVRDVIERIRQRRVSLEDITIYTQLTKRIKSYKSLEPHVVAAQKLKERGREVAPGMIIGYIITKGTKGISQRATPVEFARLEDYDPEYYIDNQILPAIQRIFEAIGYTRDYLKEGITQTSLSRWF

SEQ ID NO: 2123 - protein, 792 aa, unidentified
  REGION 1..792: note = Description of Unknown: Synthetic polypeptide
MPRILKGFLIDADFETVEGRALIRLFLRGEEGSFVVYDDSFSPYFYALPGDEPERVKERILASGAAEAIQKVEIEEKRLFGTPRVALRITVSHPQDVPRIRERIRRVEGVDLILEHDILFVRRYLIDRGIKPLTWLRLEVEERDGRALLRGVEQLEEEPPELRVAAVAIAVYNPKGAPRSSKDEIIMISVATSDGVEKVLTWREVQGLEQVEVLQDEKEMLLRFAELIKEGDYDVIVGYNTDSFDFPYIRDRLKKLGISLPLGRLDAELEVSRRGALPEARIRGRAHVDLYPIVRRHVKLNSYVLESVVEELLGIKKEKLDGERLFTYWDEGGEKRALLARYALEDARVTLALAEKFLPLYCELSTIVGQSLNDVARMTSGQLVEWLLMRYATPRGELNPNHPAGEEYAARARATYAGGYVREPKRGLVEHIAVFDFRSFGPSIIVSHNIDPSTLIVGNCEENRAPELEYCFSLEREGFIPAILKELIRRRAEIKRELKRSEGDRRRTLSFAEKALKILANSFYGYMGYPRARWYRRECAESVAAFARMYIKQVMRIAEEEFKLEVVYGDTDSLFVVIPPEKRELAQKFLQKVNESMPGIIELEFEGFYRRGLFVTKKRYALLSEDGKMVVKGLEFVRRDWAPIARETQKEVLRILLEEADPEKAARLVRDVIERIRQRRVSLEDITIYTQLTKRIKSYKSLEPHVVAAQKLKERGREVAPGMIIGYIITKGTKGISQRATPVEFARLEDYDPEYYIDNQILPAIQRIFEAIGYTRDYLKEGITQTSLSRWF

SEQ ID NO: 2124 - protein, 792 aa, unidentified
  REGION 1..792: note = Description of Unknown: Synthetic polypeptide
MPRILKGFLIDADFETVEGRALIRLFLRGEEGSFVVYDDSFSPYFYALPGDEPERVKERILASGAAEAIQKVEIEEKRLFGTPRVALRITVSHPQDVPRIHERIRRVEGVDLILEHDILFVRRYLIDRGIKPLTWLRLEVEERDGRALLRGVEQLEEEPPELRVAAVAIAVYNPKGAPRSSKDEIIMISVATSDGVEKVLTWREVQGLEQVEVLQDEKEMLLRFAELIKEGDYDVIVGYNTDSFDFPYIRDRLKKLGISLPLGRLDAELEVSRRGALPEARIRGRAHVDLYPIVRRHVKLNSYVLESVVEELLGIKKEKLDGERLFTYWDEGGEKRALLARYALEDARVTLALAEKFLPLYCELSTIVGQSLNDVARMTSGQLVEWLLMRYATPRGELIPNHPAGEEYAARARATYAGGYVREPKRGLVEHIAVFDFRSFGPSIIVSHNIDPSTLIVGNCEENRAPELEYCFSLEREGFIPAILKELIRRRAEIKRELKRSEGDRRRTLSFAEKALKILANSFYGYMGYPRARWYRRECAESVAAFARMYIKQVMRIAEEEFKLEVVYGDTDSLFVVIPPEKRELAQKFLQKVNESMPGIIELEFEGFYRRGLFVTKKRYALLSEDGKMVVKGLEFVRRDWAPIARETQKEVLRILLEEADPEKAARLVRDVIERIRQRRVSLEDITIYTQLTKRIKSYKSLEPHVVAAQKLKERGREVAPGMIIGYIITKGTKGISQRATPVEFARLEDYDPEYYIDNQILPAIQRIFEAIGYTRDYLKEGITQTSLSRWF

SEQ ID NO: 2125 - protein, 792 aa, unidentified; identical to SEQ ID NO: 1896
  REGION 1..792: note = Description of Unknown: Synthetic polypeptide

SEQ ID NO: 2126 - protein, 789 aa, unidentified; identical to SEQ ID NO: 1719
  REGION 1..789: note = Description of Unknown: Synthetic polypeptide

SEQ ID NO: 2127 - protein, 792 aa, unidentified
  REGION 1..792: note = Description of Unknown: Synthetic polypeptide
MPRILKGFLIDADFETVEGRALIRLFLRGEEGSFVVYDDSFSPYFYALPGDEPERVKERILASGAAEAIQKVEIEEKRLFGTPRVALRITVSHPQDVPRIRERIRRVEGVDLILEHDILFVRRYLIDRGIKPLTWLRLEVEERDGRALLRGVEQLEEEPPELRVAAVAIAVYNPKGAPRSSKDEIIMISVATSDGVEKVLTWREVQGLEQVEVLQDEKEMLLRFAELIKEGDYDVIVGYNTDSFDFPYIRDRLKKLGISLPLGRLDAELEVSRRGALPEARIRGRAHVDLYPIVRRHVKLNSYDLESVVEELLGIKKEKLDGERLFTYWDEGGEKRALLARYALEDARVTLALAEKFLPLYCELSTIVGQSLNDVARMTSGQLVEWLLMRYATPRGELIPNHPAGEEYAARARATYAGGYVREPKRGLVEHIAVFDFRSFGPSIIVSHNIDPSTLIVGNCEENRAPELEYCFSLEREGFIPAILKELIRRRAEIKRELKRSEGDRRRTLSFAEKALKILANSFYGYMGYPRARWYRRECAESVAAFARMYIKQVMRIAEEEFKLEVVYGDTDSLFVVIPPEKRELAQKFLQKVNESMPGIIELEFEGFYRRGLFVTKKRYALLSEDGKMVVKGLEFVRRDWAPIAHETQKEVLRILLEEADPEKAARLVRDVIERIRQRRVSLEDITIYTQLTKRIKSYKSLEPHVVAAQKLKERGREVAPGMIIGYIITKGTKGISQRATPVEFARLEDYDPEYYIDNQILPAIQRIFEAIGYTRDYLKEGITQTSLSRWF

SEQ ID NO: 2128 - protein, 792 aa, unidentified
  REGION 1..792: note = Description of Unknown: Synthetic polypeptide
MPRILKGFLIDADFETVEGRALIRLFLRGEEGSFVVYDDSFSPYFYALPGDEPERVKERILASGAAEAIQKVEIEEKRLFGTPRVALRITVSHPQDVPRIRERIRRVEGVDLILEHDILFVRRYLIDRGIKPLTWLRLEVEERDGRALLRGVEQLEEEPPELRVAAVAIAVYNPKGAPRSSKDEIIMISVATSDGVEKVLTWREVQGLEQVEVLQDEKEMLLRFAELIKEGDYDVIVGYNTDSFDFPYIRDRLKKLGISLPLGRLDAELEVSRRGALPEARIRGRAHVDLYPIVRRHVKLNSYDLESVVEELLGIKKEKLDGERLFTYWDEGGEKRALLARYALEDARVTLALAEKFLPLYCELSTIVGQSLNDVARMTSGQLVEWLLMRYATPRGELIPNHPAGEEYAARARATYAGGYVREPKRGLVEHIAVFDFRSFGPSIIVSHNIDPSTLIVGNCEENRAPELEYCFSLEREGFIPAILKELIRRRAEIKRELKRSEGDRRRTLSFAEKALKILANSFYGYMGYPRARWYRRECAESVAAFARMYIKQVMRIAEEEFKLEVVYGDTDSLFVVIPPEKRELAQKFLQKVNESMPGIIELEFEGFYRRGLFVTKKRYALLSEDGKMVVKGLEFVRRDWAPIARETQKEVLRILLEEADPEKAARLVRDVIERIRQRRVSLEDITIYTQLTKRIKSYKSLEPHVVAAQKLKERGREVAPGLIIGYIITKGTKGISQRATPVEFARLEDYDPEYYIDNQILPAIQRIFEAIGYTRDYLKEGITQTSLSRWF

SEQ ID NO: 2129 - protein, 789 aa, unidentified
  REGION 1..789: note = Description of Unknown: Synthetic polypeptide
MPRILKGFLIDADNETVEGRALIRLFLRGEEGSFVVYDDSFSPYFYALPGDEPERVKERILASGAAEAIQKVEIEEKRLFGTPRVALRITVSHPQDVPRIRERIRRVEGVDLILEHDILFVRRYLIDRGIKPLTWLRLEVEERDGRALLRGVEQLEEEPPELRVAAVAIAVYNPKGAPRSSKDEIIMISVATSDGVEKVLTWREVQGLEQVEVLQDEKEMLLRFAELIKEGDYDVIVGYNTDSFDFPYIRDRLKKLGISLPLGRLDAELEVSRRGALPEARIRGRAHVDLYPIVRRHVKLNSYDLESVVEELLGIKKEKLDGERLFTYWDEGGEKRALLARYALEDARVTLALAEKFLPLYLELSTIVGQSLNDVARMTSGQLVEWLLMRYATPRGELIPNHPAGEEYAARARATYAGGYVREPKRGLVEHIAVFDFRSFGPSIIVSHNIDPSTLIVGNCEENRAPELEYCFSLEREGFIPAILKELIRRRAEIKRELKRSEGDRRRTLSFAEKALKILANSFYGYMGYPRARWYRRECAESVAAFARMYIKQVMRIAEEEFKLEVVYGDTDSLFVVIPPEKRELAQKFLQKVNESMPGIIELEFEGFYRRGLFVTKKRYALLSEDGKMVVKGLEFVRRDWAPIARETQKEVLRILLEEADPEKAARLVRDVIERIRQRRVSLEDITIYTQLTKRIKSYKSLEPHVVAAQKLKERGREVAPGMIIGYIITKGTKGISQRATPVEFARLEDYDPEYYIDNQILPAIQRIFEAIGYTRDYLKEGITQTSLS

SEQ ID NO: 2130 - protein, 792 aa, unidentified
  REGION 1..792: note = Description of Unknown: Synthetic polypeptide
MPRILKGFLIDADFETVEGRALIRLFLRGEEGSFVVYDDSFSPYFYALPGDEPERVKERILASGAAEAIQKVEIEEKRLFGTPRVALRITVSHPQDVPRIRERIRRVEGVDLILEHDILFVRRYLIDRGIKPLTWLRLEVEERDGRALLRGVEQLEEEPPELRVAAVAIAVYNPKGAPRSSKDEIIMISVATSDGVEKVLTWREVQGLEQVEVLQDEKEMLLRFAELIKEGDYDVIVGYNTDSFDFPYIRDRLKKLGISLPLGRLDAELEVSRRGALPEARIRGRAHVDLYPIVRRHVKLNSYDLESVVEELLGIKKEKLDGERLFTYWDEGGEKRALLARYALEDARVTLALAEKFLPLYCELSTIVGQSLNDVARMTSGQLVEWLLMRYATPRGELIPNHPAGEEYAARARATYAGGYVREPKRGLVEHIAVFDFRSFGPSIIVSHNIDPSTLIVGNCEENRAPELEYCFSLEREGFIPAILKELIRRRAEIKRELKRSEGDRRRTLSFAEKALKILANSFYGYMGYPRARWYRRECAESVAAFARMYIKQVMRIAEEEFKLEVVYGDTDSLFVVIPPEKRELAQKFLQKVNESMPGIIELEFEGFYRRGLFVTKKRYALLSEDGKMVVKGLEFVRRDWAPIARETQKEVLRILLEEADPEKAARLVRDVIERIRQRRVSLEDITIYTQLTKRIKSYKSLEPHVVAAQKLKERGREVAPGMIIGYIITKGTKGISQRATPVEFARLEDYDPEYYIDPQILPAIQRIFEAIGYTRDYLKEGITQTSLSRWF

SEQ ID NO: 2131 - protein, 792 aa, unidentified
  REGION 1..792: note = Description of Unknown: Synthetic polypeptide
MPRILKGFLIDADFETVEGRALIRLFLRGEEGSFVVYDDSFSPYFYALPGDEPERVKERILASGAAEAIQKVEIEEKRLFGTPRVALRITVSHPQDVPRIRERIRRVEGVDLILEHDILFVRRYLIDRGIKPLTWLRLEVEERDGRALLRGVEQLEEEPPELRVAAVAIAVYNPKGAPRSSKDEIIMISVATSDGVEKVLTWREVQGLEQVEVLQDEKEMLLRFAELIKEGDYDVIVGYNTDSFDFPYIRDRLKKLGISLPLGRLDAELEVSRRGALPEARIRGRAHVDLYPIVRRHVKLNSYVLESVVEELLGIKKEKLDGERLFTYWDEGGEKRALLARYALEDARVTLALAEKFLPLYCELSTIVGQSLNDVARMTSGQLVEWLLMRYATPRGELIPNHPAGEEYAARARATYAGGYVREPKRGLVEHIAVFDFRSFGPSIIVSHNIDPSTLIVGNCEENRAPELEYCFSLEREGFIPAILKELIRRRAEIKRELKRSEGDRRRTLSFAEKALKILANSFYGYMGYPRARWYRRECAESVAAFARMYIKQVMRIAEEEFKLEVVYGDTDSLFVVIPPEKRELAQKFLQKVNESMPGIIELEFEGFYRRGLFVTKKRYALLSEDGKMVVKGLEFVRRDWAPIARETQKEVLRILLEEADPEKAARLVRDVIERIRQRRVSLEDITIYTQLTKRIKSYKSLEPHVVAAQKLKERGREVAPGMIIGYIITKGTKRISQRATPVEFARLEDYDPEYYIDNQILPAIQRIFEAIGYTRDYLKEGITQTSLSRWF

SEQ ID NO: 2132 - protein, 792 aa, unidentified
  REGION 1..792: note = Description of Unknown: Synthetic polypeptide
MPRILKGFLIDADFETVEGRALIRLFLRGEEGSFVVYDDSFSPYFYALPGDEPERVKERILASGAAEAIQKVEIEEKRLFGTPRVALRITVSHPQDVPRIRERIRRVEGVDLILELDILFVRRYLIDRGIKPLTWLRLEVEERDGRALLRGVEQLEEEPPELRVAAVAIAVYNPKGAPRSSKDEIIMISVATSDGVEKVLTWREVQGLEQVEVLQDEKEMLLRFAELIKEGDYDVIVGYNTDSFDFPYIRDRLKKLGISLPLGRLDAELEVSRRGALPEARIRGRAHVDLYPIVRRHVKLNSYVLESVVEELLGIKKEKLDGERLFTYWDEGGEKRALLARYALEAARVTLALAEKFLPLYLELSTIVGQSLNDVARMTSGQLVEWLLMRYATPRGELIPNHPAGEEYAARARATYAGGYVREPKRGLVEHIAVFDFRSFGPSIIVSHNIDPSTLIVGNCEENRAPELEYCFSLEREGFIPAILKELIRRRAEIKRELKRSEGDRRRTLSFAEKALKILANSFYGYMGYPRARWYRRECAESVAAFARMYIKQVMRIAEEEFKLEVVYGDTDSLFVVIPPEKRELAQKFLQKVNESMPGIIELEFEGFYRRGLFVTKKRYALLSEDGKMVVKGLEFVRRDWAPIARETQKEVLRILLEEADPEKAARLVRDVIERIRQRRVSLEDITIYTQLTKRIKSYKSLEPHVVAAQKLKERGREVAPGMIIGYIITKGTKGISQRATPVEFARLEDYDPEYYIDNQILPAIQRIFEAIGYTRDYLKEGITQTSLSRWF

SEQ ID NO: 2133 - protein, 792 aa, unidentified
  REGION 1..792: note = Description of Unknown: Synthetic polypeptide
MPRILKGFLIDADFETVEGRALIRLFLRGEEGSFVVYDDSFSPYFYALPGDEPERVKERILASGAAEAIQKVEIEEKRLFGTPRVALRITVSHPQDVPRIRERIRRVEGVDLILEHDILFVRRYLIDRGIKPLTWLRLEVEERDGRALLRGVEQLEEEPPELRVAAVAIAVYNPKGAPRSSKDEIIMISVATSDGVEKVLTWREVQGLEQVEVLQDEKEMLLRFAELIKEGDYDVIVGYNTDSFDFPYIRDRLKKLGISLPLGRLDAELEVSRRGALPEARIRGRAHVDLYPIVRRHVKLNSYDLESVVEELLGIKKEKLDGERLFTYWDEGGEKRALLARYALEDARVTLALAEKFLPLYCELSTIVGQSLNDVARMTSGQLVEWLLMRYATPRGELIPNHPAGEEYAARARATYAGGYVREPKRGLVEHIAVFDFRSFGPSIIVSHNIDPSTLIVGNCEENRAPELEYCFSLEREGFIPAILKELIRRRAEIKRELKRSEGDRRRTLSFAEKALKILANSFYGYMGYPRARWYRRECAESVAAFARMYIKQVMRIAEEEFKLEVVYGDTDSLFVVIPPEKRELAQKFLQKVNESMPGIIELEFEGFYRRGLFVTKKRYALLSEDGKMVVKGLEFVRRDYAPIARETQKEVLRILLEEADPEKAARLVRDVIERIRQRRVSLEDITIYTQLTKRIKSYKSLEPHVVAAQKLKERGREVAPGMIIGYIITKGTKGISQRATPVEFARLEDYDPEYYIDNQILPAIQRIFEAIGYTRDYLKEGITQTSLSRWF

SEQ ID NO: 2134 - protein, 792 aa, unidentified
  REGION 1..792: note = Description of Unknown: Synthetic polypeptide
MPRILKGFLIDADFETVEGRALIRLFLRGEEGSFVVYDDSFSPYFYALPGDEPERVKERILASGAAEAIQKVEIEEKRLFGTPRVALRITVSHPQDVPRIRERIRRVEGVDLILEHDILFVRRYLIDRGIKPLTWLRLEVEERDGRALLRGVEQLEEEPPELRVAAVAILVYNPKGAPRSSKDEIIMISVATSDGVEKVLTWREVQGLEQVEVLQDEKEMLLRFAELIKEGDYDVIVGYNTDSFDFPYIRDRLKKLGISLPLGRLDAELEVSRRGALPEARIRGRAHVDLYPIVRRHVKLNSYVLESVVEELLGIKKEKLDGERLFTYWDEGGEKRALLARYALEDARVTLALAEKFLPLYCELSTIVGQSLNDVARMTSGQLVEWLLMRYATPRGELIPNHPAGEEYAARARATYAGGYVREPKRGLVEHIAVFDFRSFGPSIIVSHNIDPSTLIVGNCEENRAPELEYCFSLEREGFIPAILKELIRRRAEIKRELKRSEGDRRRTLSFAEKALKILANSFYGYMGYPRARWYRRESAESVAAFARMYIKQVMRIAEEEFKLEVVYGDTDSLFVVIPPEKRELAQKFLQKVNESMPGIIELEFEGFYRRGLFVTKKRYALLSEDGKMVVKGLEFVRRDWAPIARETQKEVLRILLEEADPEKAARLVRDVIERIRQRRVSLEDITIYTQLTKRIKSYKSLEPHVVAAQKLKERGREVAPGMIIGYIITKGTKGISQRATPVEFARLEDYDPEYYIDNQILPAIQRIFEAIGYTRDYLKEGITQTSLSRWF

SEQ ID NO: 2135 - protein, 792 aa, unidentified; identical to SEQ ID NO: 1805
  REGION 1..792: note = Description of Unknown: Synthetic polypeptide

SEQ ID NO: 2136 - protein, 792 aa, unidentified
  REGION 1..792: note = Description of Unknown: Synthetic polypeptide
MPRILKGFLIDADFETVEGRALIRLFLRGEEGSFVVYDDSFSPYFYALPGDEPERVKERILASGAAEAIQKVEIEEKRLFGTPRVALRITVSHPQDVPRIRERIRRVEGVDLILEHDILFVRRYLIDRGIKPLTWLRLEVEERDGRALLRGVEQLEEEPPELRVAAVAIAVYNPKGAPRSSKDEIIMISVATSDGVEKVLTWREVQGLEQVEVLQDEKEMLLRFAELIKEGDYDVIVGYNTDSFDFPYIRDRLKKLGISLPLGRLDAELEVSRRGALPEARIRGRAHVDLYPIVRRHVKLNSYVLESVVEELLGIKKEKLDGERLFTYWDEGGEKRALLARYALEDARVTLALAEKFLPLYCELSTIVGQSLNDVARMTSGQLVEWLLMRYATPRGELIPNHPAGEEYAARARATYAGGYVREPKRGLVEHIAVFDFRSFGPSIIVSHNIDPSTLIVGNCEENRAPELEYCFSLEREGFIPAILKELIRRRAEIKRELKRSEGDRRRTLSFAEKALKILANSFYGYMGYPRARWYRRECAESVAAFARMYIKQVMRIAEEEFKLEVVYGDTDSLFVVIPPEKRELAQKFLQKVNESMPGIIELEFEGFYRRGLFVTKKRYALLSEDGKLVVKGLEFVRRDWAPIARETQKEVLRILLEEADPEKAARLVRDVIERIRQRRVSLEDITIYTQLTKRIKSYKSLEPHVVAAQKLKERGREVAPGMIIGYIITKGTKGISQRATPVEFARLEDYDPEYYIDNQILPAIQRIFEAIGYTRDYLKEGITQTSLSRWF

SEQ ID NO: 2137 - protein, 792 aa, unidentified
  REGION 1..792: note = Description of Unknown: Synthetic polypeptide
MPRILKGFLIDADFETVEGRALIRLFLRGEEGSFVVYDDSFSPYFYALPGDEPERVKERILASGAAEAIQKVEIEEKRLFGTPRVALRITVSHPQDVPRIRERIRRVEGVDLILEHDILFVRRYLIDRGIKPLTWLRLEVEERDGRALLRGVEQLEEEPPELRVAAVAIAVYNPKGAPRSSKDEIIMISVATSDGVEKVLTWREVQGLEQVEVLQDEKEMLLRFAELIKEGDYDVIVGYNTDSFDFPYIRDRLKKLGISLPLGRLDAELEVSRRGALPEARIRGRAHVDLYPIVRRHVKLNSYDLESVVEELLGIKKEKLDGERLFTYWDEGGEKRALLARYALEDARVTLALAEKFLPLYCELSTIVGQSLNDVARMTSGQLVEWLLMRYATPRGELIPNHPAGEEYAARARATYAGGYVREPKRGLVEHIAVFDFRSFGPSIIVSHNIDPSTLIVGNCEENRAPELEYCFSLEREGFIPAILKELIRRRAEIKRELKRSEGDRRRTLSFAEKALKILANSFYGYMGYPRARWYRRECAESVAAFKRMYIKQVMRIAEEEFKLEVVYGDTDSLFVVIPPEKRELAQKFLQKVNESMPGIIELEFEGFYRRGLFVTKKRYALLSEDGKMVVKGLEFVRRDWAPIARETQKEVLRILLEEADPEKAARLVRDVIERIRQRRVSLEDITIYTQLTKRIKSYKSLEPHVVAAQKLKERGREVAPGMIIGYIITKGTKGISQRATPVEFARLEDYDPEYYIDNQILPAIQRIFEAIGYTRDYLKEGITQTSLSRWF

SEQ ID NO: 2138 - protein, 792 aa, unidentified
  REGION 1..792: note = Description of Unknown: Synthetic polypeptide
MPRILKGFLIDADFETVEGRALIRLFLRGEEGSFVVYDDSFSPYFYALPGDEPERVKERILASGAAEAIQKVEIEEKRLFGTPRVALRITVSHPQDVPRIRERIRRVEGVDLILEHDILFVRRYLIDRGIKPLTWLRLEVEERDGRALLRGVEQLEEEPPELRVAAVAIAVYNPKGAPRSSKDEIIMISVATSDGVEKVLTWREVQGLEQVEVLQDEKEMLLRFAELIKEGDYDVIVGYNTDSFDFPYIRDRLKKLGISLPLGRLDAELEVSRRGALPEARIRGRAHVDLYPIVRRHVKLNSYDLESVVEELLGIKKEKLDGERLFTYWDEGGEKRALLARYALEDARVTLALAEKFLPLYCELSTIVGQSLNDVARMTSGQLVEWLLMRYATPRGELIPNHPAGEEYAARARATYAGGYVREPKRGLVEHIAVFDFRSFGPSIIVSHNIDPSTLIVGNCEENRAPELEYCFQLEREGFIPAILKELIRRRAEIKRELKRSEGDRRRTLSFAEKALKILANSFYGYMGYPRARWYRRECAESVAAFARMYIKQVMRIAEEEFKLEVVYGDTDSLFVVIPPEKRELAQKFLQKVNESMPGIIELEFEGFYRRGLFVTKKRYALLSEDGKMVVKGLEFVRRDWAPIARETQKEVLRILLEEADPEKAARLVRDVIERIRQRRVSLEDITIYTQLTKRIKSYKSLEPHVVAAQKLKERGREVAPGMIIGYIITKGTKGISQRATPVEFARLEDYDPEYYIDNQILPAIQRIFEAIGYTRDYLKEGITQTSLSRWF

SEQ ID NO: 2139 - protein, 792 aa, unidentified
  REGION 1..792: note = Description of Unknown: Synthetic polypeptide
MPRILKGFLIDADFETVEGRALIRLFLRGEEGSFVVYDDSFSPYFYALPGDEPERVKERILASGAAEAIQKVEIEEKRLFGTPRVALRITVSHPQDVPRIRERIRRVEGVDLILEHDILFVRRYLIDRGIKPLTWLRLEVEERDGRALLRGVEQLEEEPPELRVAAVAIAVYNPKGAPRSSKDEIIMISVATSDGVEKVLTWREVQGLEQVEVLQDEKEMLLRFAELIKEGDYDVIVGYNTDSFDFPYIRDRLKKLGISLPLGRLDAELEVSRRGALPEARIRGRAHVDLYPIVRRHVKLNSYDLESVVEELLGIKKEKLDGERLFTYWDEGGEKRALLARYALEDARVTLALAEKFLPLYCELSTIVGQSLNDVARMTSGQLVEWLLMRYATPRGELIPNHPAGEEYAARARAEYAGGYVREPKRGLVEHIAVFDFRSFGPSIIVSHNIDPSTLIVGNCEENRAPELEYCFSLEREGFIPAILKELIRRRAEIKRELKRSEGDRRRTLSFAEKALKILANSFYGYMGYPRARWYRRECAESVAAFARMYIKQVMRIAEEEFKLEVVYGDTDSLFVVIPPEKRELAQKFLQKVNESMPGIIELEFEGFYRRGLFVTKKRYALLSEDGKMVVKGLEFVRRDWAPIARETQKEVLRILLEEADPEKAARLVRDVIERIRQRRVSLEDITIYTQLTKRIKSYKSLEPHVVAAQKLKERGREVAPGMIIGYIITKGTKGISQRATPVEFARLEDYDPEYYIDNQILPAIQRIFEAIGYTRDYLKEGITQTSLSRWF

SEQ ID NO: 2140 - protein, 789 aa, unidentified; identical to SEQ ID NO: 2016
  REGION 1..789: note = Description of Unknown: Synthetic polypeptide

SEQ ID NO: 2141 - protein, 791 aa, unidentified; identical to SEQ ID NO: 1802
  REGION 1..791: note = Description of Unknown: Synthetic polypeptide

SEQ ID NO: 2142 - protein, 792 aa, unidentified
  REGION 1..792: note = Description of Unknown: Synthetic polypeptide
MPRILKGFLIDADFETVEGRALIRLFLRGEEGSFVVYDDSFSPYFYALPGDEPERVKERILASGAAEAIQKVEIEEKRLFGTPRVALRITVSHPQDVPRIRERIRRVEGVDLILEHDILFVRRYLIDRGIKPLTWLRLEVEERDGRALLRGVEQLEEEPPELRVAAVAIAVYNPKGAPRSSKDEIIMISVATSDGVEKVLTWREVQGLEQVEVLQDEKEMLLRFAELIKEGDYDVIVGYNTDSFDFPYIRDRLKKLGISLPLGRLDAELEVSRRGALPEARIRGRAHVDLYPIVRRHVKLNSYDLESVVEELLGIKKEKLDGERLFTYWDEGGEKRALLARYALEDARVTLALAEKFLPLYCELSTIVGQSLNDVARMTSGQLVEWLLMRYATPRGELIPNHPAGEEYAARARATYAGGYVREPKRGLVEHIAVFDFRSFGPSIIVSHNIDPSTLIVGNCEENRAPELEYCFSLEREGFIPAILKELIRRRAEIKRELKRSEGDRRRTLSFAEKALKILANSFYGYVGYPRARWYRRECAESVAAFARMYIKQVMRIAEEEFKLEVVYGDTDSLFVVIPPEKRELAQKFLQKVNESMPGIIELEFEGFYRRGLFVTKKRYALLSEDGKMVVKGLEFVRRDWAPIARETQKEVLRILLEEADPEKAARLVRDVIERIRQRRVSLEDITIYTQLTKRIKSYKSLEPHVVAAQKLKERGREVAPGMIIGYIITKGTKGISQRATPVEFARLEDYDPEYYIDNQILPAIQRIFEAIGYTRDYLKEGITQTSLSRWF

SEQ ID NO: 2143 - protein, 789 aa, unidentified
  REGION 1..789: note = Description of Unknown: Synthetic polypeptide
MPRILKGFLIDADFETVEGRALIRLFLRGEEGSFVVYDDSFSPYFYALPGDEPERVKERILASGAAEAIQKVEIEEKRLFGTPRVALRITVSHPQDVPRIRERIRRVEGVDLILEHDILFVRRYLIDRGIKPLTWLRLEVEERDGRALLRGVEQLEEEPPELRVAAVAIAVYNPKGAPRSSKDEIIMISVATSDGVEKVLTWREVQGLEQVEVLQDEKEMLLRFAELIKEGDYDVIVGYNTDSFDFPYIRDRLKKLGISLPLGRLDAELEVSRRGALPEARIRGRAHVDLYPIVRRHVKLNSYDLESVVEELLGIKKEKLDGERLFTYWDEGGEKRALLARYALEDARVTLALAEKFLPLYCELSTIVGQSLNDVARMTSGQLVEWLLMRYATPRGELIPNHPAGEEYAARARATYAGGYVREPKRGLVEHIAVFDFRSFGPSIIVSHNIDPSTLIVGNCEENRAPELEYCFSLEDEGFIPAILKELIRRRAEIKRELKRSEGDRRRTLSFAEKALKILANSFYGYMGYPRARWYRRECAESVAAFARMYIKQVMRIAEEEFKLEVVYGDTDSLFVVIPPEKRELAQKFLQKVNESMPGIIELEFEGFYRRGLFVTKKRYALLSEDGKMVVKGLEFVRRDWAPIARETQKEVLRILLEEADPEKAARLVRDVIERIRQRRVSLEDITIYTQLTKRIKSYKSLEPHVVAAQKLKERGREVAPGMIIGYIITKGTKGISQRATPVEFARLEDYDPEYYIDNQILPAIQRIFEAIGYTRDYLKEGITQTSLS

SEQ ID NO: 2144 - protein, 792 aa, unidentified
  REGION 1..792: note = Description of Unknown: Synthetic polypeptide
MPRILKGFLIDADFETVEGRALIRLFLRGEEGSFVVYDDSFSPYFYALPGDEPERVKERILASGAAEAIQKVEIEEKRLFGTPRVALRITVSHPQDVPRIRERIRRVEGVDLILEHDILFVRRYLIDRGIKPLTWLRLEVEERDGRALLRGVEQLEEEPPELRVAAVAIAVYNPKGAPRSSKDEIIMISVATSDGVEKVLTWREVQGLEQVEVLQDEKEMLLRFAELIKEGDYDVIVGYNTDSFDFPYIRDRLKKLGISLPLGRLDAELEVSRRGALPEARIRGRAHVDLYPIVRRHVKLNSYDLESVVEELLGIKKEKLDGERLFTYWDEGGEKRALLARYALEDARVTLALAEKFLPLYCELSTIVGQSLNDVARMTSGQLVEWLLMRYATPRGELIPNHPAGEEYAARARATYAGGYVREPKRGLVEHIAVFDFRSFGPSIIVSHNIDPSTLIVGNCEENRAPELEYCFSLEREGFIPAILKELIRRRAEIKRELKRSEGDRRRTLSFAEKALKILANSFYGYMGYPRARWYRRECAESVAAFARMYIQQVMRIAEEEFKLEVVYGDTDSLFVVIPPEKRELAQKFLQKVNESMPGIIELEFEGFYRRGLFVTKKRYALLSEDGKMVVKGLEFVRRDWAPIARETQKEVLRILLEEADPEKAARLVRDVIERIRQRRVSLEDITIYTQLTKRIKSYKSLEPHVVAAQKLKERGREVAPGMIIGYIITKGTKGISQRATPVEFARLEDYDPEYYIDNQILPAIQRIFEAIGYTRDYLKEGITQTSLSRWF

SEQ ID NO: 2145 - protein, 792 aa, unidentified
  REGION 1..792: note = Description of Unknown: Synthetic polypeptide
MPRILKGFLIDADFETVEGRALIRLFLRGEEGSFVVYDDSFSPYFYALPGDEPERVKERILASGAAEAIQKVEIEEKRLFGTPRVALRITVSHPQDVPRIRERIRRVEGVDLILEHDILFVRRYLIDRGIKPLTWLRLEVEERDGRALLRGVEQLEEEPPELRVAAVAIAVYNPKGAPRSSKDEIIMISVATSDGVEKVLTWREVQGLEQVEVLQDEKEMLLRFAELIKEGDYDVIVGYNTDSFDFPYIRDRLKKLGISLPLGRLDAELEVSRRGALPEARIRGRAHVDLYPIVRRHVKLNSYDLESVVEELLGIKKEKLDGERLFTYWDEGGEKRALLARYALEDARVTLALAEKFLPLYCELSTIVGQSLNDVARMTSGQLVEWLLMRYATPRGELIPNHPAGEEYAARARATYAGGYVREPKRGLVEHIAVFDFRSFGPSIIVSHNIDPSTLIVGNCEENRAPELEYCFSLEREGFIPAILKELIRRRAEIKRELKRSEGDRRRTLSFAEKALKILANSFYGYMGYPRARWYRRECAESVAAFARMYIKQVMRIAEEEFKLEVVYGDTDSLFVVIPPEKRELAQKFLQKVNESMPGIIELEFEGFYRRGLFVTKKRYALLSEDGKMVVKGLEFVRRDWAPIARETQKEVLRILLEEADPEKAARLVRDVIERIRQMRVSLEDITIYTQLTKRIKSYKSLEPHVVAAQKLKERGREVAPGMIIGYIITKGTKGISQRATPVEFARLEDYDPEYYIDNQILPAIQRIFEAIGYTRDYLKEGITQTSLSRWF

SEQ ID NO: 2146 - protein, 792 aa, unidentified
  REGION 1..792: note = Description of Unknown: Synthetic polypeptide
MPRILKGFLIDADFETVEGRALIRLFLRGEEGSFVVYDDSFSPYFYALPGDEPERVKERILASGAAEAIQKVEIEEKRLFGTPRVALRITVSHPQDVPRIRERIRRVEGVDLILEHDILFVRRYLIDRGIKPLTWLRLEVEERDGRALLRGVEQLEEEPPELRVAAVAIAVYNPKGAPRSSKDEIIMISVATSDGVEKVLTWREVQGLEQVEVLQDEKEMLLRFAELIKEGDYDVIVGYNTDSFDFPYIRDRLKKLGISLPLGRLDAELEVSRRGALPEARIRGRAHVDLYPIVRRHVKLNSYVLESVVEELLGIKKEKLDGERLFTYWDEGGEKRALLARYALEDARVTLALAEKFLPLYCELSTIVGQSLNDVARMTSGQLVEWLLMRYATPRGELIPNHPAGEEYAARARATYAGGYVREPKRGLVEHIAVFDFRSFGPSIIVSHNIDPSTLIVGNCEENRAPELEYCFSLEREGFIPAILKELIRRRAEIKRELKRSEGDRRRTLSFAEKALKILANSFYGYMGYPRARWYRRECAESVAAFARMYITQVMRIAEEEFKLEVVYGDTDSLFVVIPPEKRELAQKFLQKVNESMPGIIELEFEGFYRRGLFVTKKRYALLSEDGKMVVKGLEFVRRDWAPIARETQKEVLRILLEEADPEKAARLVRDVIERIRQRRVSLEDITIYTQLTKRIKSYKSLEPHVVAAQKLKERGREVAPGMIIGYIITKGTKGISQRATPVEFARLEDYDPEYYIDNQILPAIQRIFEAIGYTRDYLKEGITQTSLSRWF

SEQ ID NO: 2147 - protein, 792 aa, unidentified
  REGION 1..792: note = Description of Unknown: Synthetic polypeptide
MPRILKGFLIDADFETVEGRALIRLFLRGEEGSFVVYDDSFSPYFYALPGDEPERVKERILASGAAEAIQKVEIEEKRLFGTPRVALRITVSHPQDVPRIRERIRRVEGVDLILEHDILFVRRYLIDRGIKPLTWLRLEVEERDGRALLRGVEQLEEEPPELRVAAVAIAVYNPKGAPRSSKDEIIMISVATSDGVEKVLTWREVQRLEQVEVLQDEKEMLLRFAELIKEGDYDVIVGYNTDSFDFPYIRDRLKKLGISLPLGRLDAELEVSRRGALPEARIRGRAHVDLYPIVRRHVKLNSYDLESVVEELLGIKKEKLDGERLFTYWDEGGEKRALLARYALEDARVTLALAEKFLPLYCELSTIVGQSLNDVARMTSGQLVEWLLMRYATPRGELIPNHPAGEEYAARARATYAGGYVREPKRGLVEHIAVFDFRSFGPSIIVSHNIDPSTLIVGNCEENRAPELEYCFSLEREGFIPAILKELIRRRAEIKRELKRSEGDRRRTLSFAEKALKILANSFYGYMGYPRARWYRRECAESVAAFARMYIKQVMRIAEEEFKLEVVYGDTDSLFVVIPPEKRELAQKFLQKVNESMPGIIELEFEGFYRRGLFVTKKRYALLSEDGKMVVKGLEFVRRDWAPIARETQKEVLRILLEEADPEKAARLVRDVIERIRQRRVSLEDITIYTQLTKRIKSYKSLEPHVVAAQKLKERGREVAPGMIIGYIITKGTKGISQRATPVEFARLEDYDPEYYIDNQILPAIQRIFEAIGYTRDYLKEGITQTSLSRWF

SEQ ID NO: 2148 - protein, 792 aa, unidentified
  REGION 1..792: note = Description of Unknown: Synthetic polypeptide
MPRILKGFLIDADFETVEGRALIRLFLRGEEGSFVVYDDSFSPYFYALPGDEPERVKERILASGAAEAIQKVEIEEKRLFGTPRVALRITVSHPQDVPRIRERIRRVEGVDLILEHDILFVRRYLIDRGIKPLTWLRLEVEERDGRALLRGVEQLEEEPPELRVAAVAIAVYNPKGAPRSSKDEIIMISVATSDGVEKVLTWREVQGLEQVEVLQDEKEMLLRFAELIKEGDYDVIVGYNTDSFDFPYIRDRLKKLGISLPLGRLDAELEVSRRGALPEARIRGRAHVDLYPIVRRHVKLNSYVLESVVEELLGIKKEKLDGERLFTYWDEGGEKRALLARYALEDARVTLALAEKFLPLYCELSTIVGQSLNDVARMTSGQLVEWLLMRYATPRGELIPNHPAGEEYAARARATYAGGYVREPKRGLVEHIAVFDFRSFGPSIIVSHNIDPSTLIVGNCEENRAPELEYCFSLEREGFIPAILKELIRRRAEIKRELKRSEGDRRRTLSFAEKALKILANSFYGYMGYPRARWYRRECAESVAAFARMYIKQVMRIAEEEFKLEVVYGDTDSLFVVIPPEKRELAQKFLQKVNESMPGIIELEFEGFYRRGLFVTKKRYALLSEDGKMVVKGLEFVRRDYAPIARETQKEVLRILLEEADPEKAARLVRDVIERIRQRRVSLEDITIYTQLTKRIKSYKSLEPHVVAAQKLKERGREVAPGMIIGYIITKGTKGISQRATPVEFARLEDYDPEYYIDNQILPAIQRIFEAIGYTRDYLKEGITQTSLSRWF

SEQ ID NO: 2149 - protein, 792 aa, unidentified
  REGION 1..792: note = Description of Unknown: Synthetic polypeptide
MPRILKGFLIDADFETVEGRALIRLFLRGEEGSFVVYDDSFSPYFYALPGDEPERVKERILASGAAEAIQKVEIEEKRLFGTPRVALRITVSHPQDVPRIRERIRRVEGVDLILEHDILFVRRYLIDRGIKPLTWLRLEVEERDGRALLRGVEQLEEEPPELRVAAVAIAVYNPKGAPRSSKDEIIMISVATSDGVEKVLTWREVQGLEQVEVLQDEKEMLLRFAELIKEGDYDVIVGYNTDSFDFPYIRDRLKKLGISLPLGRLDAELEVSRRGALPEARIRGRAHVDLYPIVRRHVKLNSYVLESVVEELLGIKKEKLDGERLFTYWDEGGEKRALLARYALEDARVTLALAEKFLPLYCELSTIVGQSLNDVARMTSGQLVEWLLMRYATPRGELIPNHPAGEEYAARARATYAGGYVREPKRGLVEHIAVFDFRSFGPSIIVSHNIDPSTLIVGNCEENRAPELEYCFSLEREGFIPAILKELIRRRAEIKRELKRSEGDRRRTLSFAEKALKILANSFYGYMGYPRARWYRRECAESVAAFARMYIKQVMRIAEEEFKLEVVYGDTDSLFVVIPPEKRELAQKFLQKVNESMPGIIELEFEGFYRRGLFVTKKRYALLSEDGKMVVKGLEFVRRDWAPIARETQKEVLRILLEEADPEKAARLVRDVIERIRQRRVSLEDITIYTQLTKRIKSYKSLEPHVVAAQKLKERGREVAPGMIIGYIITKGTKSISLRATPVEFARLEDYDPEYYIDNQILPAIQRIFEAIGYTRDYLKEGITQTSLSRWF

SEQ ID NO: 2150 - protein, 792 aa, unidentified
  REGION 1..792: note = Description of Unknown: Synthetic polypeptide
MPRILKGFLIDADFETVEGRALIRLFLRGEEGSFVVYDDSFSPYFYALPGDEPERVKERILASGAAEAIQKVEIEEKRLFGTPRVALRITVSHPQDVPRIRERIRRVEGVDLILEHDILFVRRYLIDRGIKPLTWLRLEVEERDGRALLRGVEQLEEEPPELRVAAVAIAVYNPKGAPRSSKDEIIMISVATSDGVEKVLTWREVQGLEQVEVLQDEKEMLLRFAELIKEGDYDVIVGYNTDSFDFPYIRDRLKKLGISLPLGRLDAELEVSRRGALPEARIRGRAHVDLYPIVRRHVKLNSYVLESVVEELLGIKKEKLDGERLFTYWDEGGEKRALLARYALEDARVTLALAEKFLPLYCELSTIVGQSLNDVARMTSGQLVEWLLMRYATPRGELIPNHPAGEEYAARARATYAGGYVREPKRGLVEHIAVFDFRSFGPSIIVSHNIDPSTLIVGNCEENRAPELEYCFSLEREGFIPAILKELIRRRAEIKRELKRSEGDRRRTLSFAEKALKILANSFYGYMGYPRARWYRRECAESVAAFARMYINQVMRIAEEEFKLEVVYGDTDSLFVVIPPEKRELAQKFLQKVNESMPGIIELEFEGFYRRGLFVTKKRYALLSEDGKMVVKGLEFVRRDWAPIARETQKEVLRILLEEADPEKAARLVRDVIERIRQRRVSLEDITIYTQLTKRIKSYKSLEPHVVAAQKLKERGREVAPGMIIGYIITKGTKGISQRATPVEFARLEDYDPEYYIDNQILPAIQRIFEAIGYTRDYLKEGITQTSLSRWF

SEQ ID NO: 2151 - protein, 792 aa, unidentified
  REGION 1..792: note = Description of Unknown: Synthetic polypeptide
MPRILKGFLIDADFETVEGRALIRLFLRGEEGSFVVYDDSFSPYFYALPGDEPERVKERILASGAAEAIQKVEIEEKRLFGTPRVALRITVSHPQDVPRIRERIRRVEGVDLILEHDILFVRRYLIDRGIKPLTWLRLEVEERDGRALLRGVEQLEEEPPELRVAAVAIAVYNPKGAPRSSKDEIIMISVATSDGVEKVLTWREVQGLEQVEVLQDEKEMLLQFAELIKEGDYDVIVGCNTDSFDFPYIRDRLKKLGISLPLGRLDAELEVSRRGALPEARIRGRAHVDLYPIVRRHLKLNSYVLESVVEELLGIKKEKLDGERLFTYWDEGGEKRALLARYALEDARVTLALAEKFLPLYCELSTIVGQSLNDVARMTSGQLVEWLLMRYATPRGELIPNHPAGEEYAARARATYAGGYVREPKRGLVEHIAVFDFRSFGPSIIVSHNIDPSTLIVGNCEENRAPELEYCFSLEREGFIPAILKELIRRRAEIKRELKRSEGDRRRTLSFAEKALKILANSFYGYMGYPRARWYRRECAESVAAFARMYIKQVMRIAEEEFKLEVVYGDTDSLFVVIPPEKRELAQKFLQKVNESMPGIIELEFEGFYRRGLFVTKKRYALLSEDGKMVVKGLEFVRRDWAPIARETQKEVLRILLEEADPEKAARLVRDVIERIRQRRVSLEDITIYTQLTKRIKSYKSLEPHVVAAQKLKERGREVAPGMIIGYIITKGTKGISQRATPVEFARLEDYDPEYYIDNQILPAIQRIFEAIGYTRDYLKEGITQTSLSRWF

SEQ ID NO: 2152 - protein, 789 aa, unidentified
  REGION 1..789: note = Description of Unknown: Synthetic polypeptide
MPRILKGFLIDADFETVEGRALIRLFLRGEEGSFVVYDDSFSPYFYALPGDEPERVKERILASGAAEAIQKVEIEEKRLFGTPRVALRITVSHPQDVPRIRERIRRVEGVDLILEHDILFVRRYLIDRGIKPLTWLRLEVEERDGRALLRGVEQLEEEPPELRVAAVAIAVYNPKGAPRSSKDEIIMISVATSDGVEKVLTWREVQGLEQVEVLQDEKEMLLRFAELIKEGDYDVIVGYNTDSFDFPYIRDRLKKLGISLPLGRLDAELEVSRRGALPEARIRGRAHVDLYPIVRRHVKLNSYDLESVVEELLGIKKEKLDGERLFTYWDEGGEKRALLARYALEDARVTLALAEKFLPLYLELSTIVGQSLNDVARMTSGQLVEWLLMRYATPRGELIPNHPAGEEYAARARATYAGGYVREPKRGLVEHIAVFDFRSFGPSIIVSHNIDPSTLIVGNCEENRAPELEYCFSLEDEGFIPAILKELIRRRAEIKRELKRSEGDRRRTLSFAEKALKILANSFYGYMGYPRARWYRRECAESVAAFARMYIKQVMRIAEEEFKLEVVYGDTDSLFVVIPPEKRELAQKFLQKVNESMPGIIELEFEGFYRRGLFVTKKRYALLSEDGKMVVKGLEFVRRDWAPIARETQKEVLRILLEEADPEKAARLVRDVIERIRQRRVSLEDITIYTQLTKRIKSYKSLEPHVVAAQKLKERGREVAPGMIIGYIITKGTKGISQRATPVEFARLRDYDPEYYIDNQILPAIQRIFEAIGYTRDYLKEGITQTSLS

SEQ ID NO: 2153 - protein, 792 aa, unidentified
  REGION 1..792: note = Description of Unknown: Synthetic polypeptide
MPRILKGFLIDADFETVEGRALIRLFLRGEEGSFVVYDDSFSPYFYALPGDEPERVKERILASGAAEAIQKVEIEEKRLFGTPRVALRITVSHPQDVPRIRERIRRVEGVDLILEHDILFVRRYLIDRGIKPLTWLRLEVEERDGRALLRGVEQLEEEPPELRVAAVAIAVYNPKGAPRSSKDEIIMISVATSDGVEKVLTWREVQGLEQVEVLQDEKEMLLRFAELIKEGDYDVIVGYNTDSFDFPYIRDRLKKLGISLPLGRLDAELEVSRRGALPEARIRGRAHVDLYPIVRRHVKLNSYVLESVVEELLGIKKEKLDGERLFTYWDEGGEKRALLARYALEDARVTLALAEKFLPLYCELSTIVGQSLNDVARMTSGQLVEWLLMRYATPRGELIPNHPAGEEYAARARATYAGGYVREPKRGLVEHIAVFDFRSFGPSIIVSHNIDPSTLIVGNCEENRAPELEYCFSLEREGFIPAILKELIRRRAEIKRELKRSEGDRRRTLSFAEKALKILANSFYGYMGYPRARWYRRECAESVAAFARMYIKQVMRIAEEEFKLEVVYGDTDSLFVVIPPEKRELAQKFLQKVNESMPGIIELEFEGFYRRGLFVTKKRYALLSEDGKMVVKGLEFDRRDWAPIARETQKEVLRILLEEADPEKAARLVRDVIERIRQRRVSLEDITIYTQLTKRIKSYKSLEPHVVAAQKLKERGREVAPGMIIGYIITKGTKGISQRATPVEFARLEDYDPEYYIDNQILPAIQRIFEAIGYTRDYLKEGITQTSLSRWF

SEQ ID NO: 2154 - protein, 792 aa, unidentified
  REGION 1..792: note = Description of Unknown: Synthetic polypeptide
MPRILKGFLIDADFETVEGRALIRLFLRGEEGSFVVYDDSFSPYFYALPGDEPERVKERILASGAAEAIQKVEIEEKRLFGTPRVALRITVSHPQDVPRIRERIRRVEGVDLILEHDILFVRRYLIDRGIKPLTWLRLEVEERDGRALLRGVEQLEEEPPELRVAAVAIAVYNPKGAPRSSKDEIIMISVATSDGVEKVLTWREVQGLEQVEVLQDEKEMLLRFAELIKEGDYDVIVGYNTDSFDFPYIRDRLKKLGISLPLGRLDAELEVSRRGALPEARIRGRAHVDLYPIVRRHVKLNSYVLESVVEELLDIKKEKLDGERLFTYWDEGGEKRALLARYALEDARVTLALAEKFLPLYCELSTIVGQSLNDVARMTSGQLVEWLLMRYATPRGELIPNHPAGEEYAARARATYAGGYVREPKRGLVEHIAVFDFRSFGPSIIVSHNIDPSTLIVGNCEENRAPELEYCFSLEREGFIPAILKELIRRRAEIKRELKRSEGDRRRTLSFAEKALKILANSFYGYMGYPRARWYRRECAESVAAFARMYIKQVMRIAEEEFKLEVVYGDTDSLFVVIPPEKRELAQKFLQKVNESMPGIIELEFEGFYRRGLFVTKKRYALLSEDGKMVVKGLEFVRRDWAPIARETQKEVLRILLEEADPEKAARLVRDVIERIRQRRVSLEDITIYTQLTKRIKSYKSLEPHVVAAQKLKERGREVAPGMIIGYIITKGTKGISQRATPVEFARLEDYDPEYYIDNQILPAIQRIFEAIGYTRDYLKEGITQTSLSRWF

SEQ ID NO: 2155 - protein, 792 aa, unidentified
  REGION 1..792: note = Description of Unknown: Synthetic polypeptide
MPRILKGFLIDADFETVEGRALIRLFLRGEEGSFVVYDDSFSPYFYALPGDEPERVKERILASGAAEAIQKVEIEEKRLFGTPRVALRITVSHPQDVPRIRERIRRVEGVDLILEHDILFVRRYLIDRGIKPLTWLRLEVEERDGRALLRGVEQLEEEPPELRVAAVAIAVYNPKGAPRSSKDEIIMISVATSDGVEKVLTWREVQGLEQVEVLQDEKEMLLRFAELIKEGDYDVIVGYNTDSFDFPYIRDRLKKLGISLPLGRLDAELEVSRRGALPEARIRGRAHVDLYPIVRRHVKLNSYDLESVVEELLGIKKEKLDGERLFTYWDEGGEKRALLARYALEDARVTLALAEKFLPLYLDLSTIVGQSLNDVARMTSGQLVEWLLMRYATPRGELIPNHPAGEEYAARARATYAGGYVREPKRGLVEHIAVFDFRSFGPSIIVSHNIDPSTLIVGNCEENRAPELEYCFSLEREGFIPAILKELIRRRAEIKRELKRSEGDRRRTLSFAEKALKILANSFYGYMGYPRARWYRRECAESVAAFARMYIKQVMRIAEEEFKLEVVYGDTDSLFVVIPPEKRELAQKFLQKVNESMPGIIELEFEGFYRRGLFVTKKRYALLSEDGKMVVKGLEFVRRDWAPIARETQKEVLRILLEEADPEKAARLVRDVIERIRQRRVSLEDITIYTQLTKRIKSYKSLEPHVVAAQKLKERGREVAPGMIIGYIITKGTKGISQRATPVEFARLEDYDPEYYIDNQILPAIQRIFEAIGYTRDYLKEGITQTSLSRWF

SEQ ID NO: 2156 - protein, 792 aa, unidentified
  REGION 1..792: note = Description of Unknown: Synthetic polypeptide
MPRILKGFLIDADFETVEGRALIRLFLRGEEGSFVVYDDSFSPYFYALPGDEPERVKERILASGAAEAIQKVEIEEKRLFGTPRVALRITVSHPQDVPRIRERIRRVEGVDLILEHDILFVRRYLIDRGIKPLTWLRLEVEERDGRALLRGVEQLEEEPPELRVAAVAIAVYNPKGAPRSSKDEIIMISVATSDGVEKVLTWREVQGLEQVEVLQDEKEMLLRFAELIKEGDYDVIVGYNTDSFDFPYIRDRLKKLGISLPLGRLDAELEVSRRGALPEARIRGRAHVDLYPIVRRHVKLNSYDLESVVEELLGIKKEKLDGERLFTYWDEGGEKRALLARYALEDARVTLALAEKFLPLYCELSTIVGQSLNDVARMTSGQLVEWLLMRYATPRGELIPNHPAGEEYAARARATYAGGYVREPKRGLVEHIAVFDFRSFGPSIIVSHNIDPSTLIVGNCEENRAPELEYCFSLEREGFIPAILKELIRRRAEIKRELKRSEGDRRRTLSFAEKALKILAHSFYGYMGYPRARWYRRECAESVAAFARMYIKQVMRIAEEEFKLEVVYGDTDSLFVVIPPEKRELAQKFLQKVNESMPGIIELEFEGFYRRGLFVTKKRYALLSEDGKMVVKGLEFVRRDWAPIARETQKEVLRILLEEADPEKAARLVRDVIERIRQRRVSLEDITIYTQLTKRIKSYKSLEPHVVAAQKLKERGREVAPGMIIGYIITKGTKGISQRATPVEFARLEDYDPEYYIDNQILPAIQRIFEAIGYTRDYLKEGITQTSLSRWF

SEQ ID NO: 2157 - protein, 792 aa, unidentified
  REGION 1..792: note = Description of Unknown: Synthetic polypeptide
MPRILKGFLIDADFETVEGRALIRLFLRGEEGSFVVYDDSFSPYFYALPGDEPERVKERILASGAAEAIQKVEIEEKRLFGTPRVALRITVSHPQDVPRIRERIRRVEGVDLILEHDILFVRRYLIDRGIKPLTWLRLEVEERDGRALLRGVEQLEEEPPELRVAAVAIAVYNPKGAPRSSKDEIIMISVATSDGVEKVLTWREVQGLEQVEVLQDEKEMLLRFAELIKEGDYDVIVGYNTDSFDFPYIRDRLKKLGISLPLGRLDAELEVSRRGALPEARIRGRAHVDLYPIVRRHVKLNSYVLESVVEELLGIKKEKLDGERLFTYWDEGGEKRALLARYALEDARVTLALAEKFLPLYCELSTIVGQSLNDVARMTSGQLVEWLLMRYATPRGELIPNHPAGEEYAARARATYAGGYVREPKRGLVEHIAVFDFRSFGPSIIVSHNIDPSTLIVGNCEENRAPELEYCFSLEREGFIPAILKELIRRRAEIKRELKRSEGDRRRTLSFAEKALKILANSFYGYMGYPRARWYRRECAESVAAFARMYIKQVMRIAEEEFKLEVVYGDTDSLFVVIPPEKRELAQKFLQKVNESMPGIIELEFRGFYRRGLFVTKKRYALLSEDGKMVVKGLEFVRRDWAPIARETQKEVLRILLEEADPEKAARLVRDVIERIRQRRVSLEDITIYTQLTKRIKSYKSLEPHVVAAQKLKERGREVAPGMIIGYIITKGTKGISQRATPVEFARLEDYDPEYYIDNQILPAIQRIFEAIGYTRDYLKEGITQTSLSRWF

SEQ ID NO: 2158 - protein, 792 aa, unidentified
  REGION 1..792: note = Description of Unknown: Synthetic polypeptide
MPRILKGFLIDADFETVEGRALIRLFLRGEEGSFVVYDDSFSPYFYALPGDEPERVKERILASGAAEAIQKVEIEEKRLFGTPRVALRITVSHPQDVPRIRERIRRVEGVDLILEHDILFVRRYLIDRGIKPLTWLRLEVEERDGRALLRGVEQLEEEPPELRVAAVAIAVYNPKGAPRSSKDEIIMISVATSDGVEKVLTWREVQGLEQVEVLQDEKEMLLRFAELIKEGDYDVIVGYNTDSFDFPYIRDRLKKLGISLPLGRLDAELEVSRRGALPEARIRGRAHVDLYPIVRRHVKLNSYVLESVVEELLGIKKEKLDGERLFTYWDEGGEKRALLARYALEDARVTLALAEKFLPLYCELSTIVGQSLNDVARMTSGQLVEWLLMRYATPRGELIPNHPAGEEYAARARATYAGGYVREPKRGLVEHIAVFDFRSFGPSIIVSHNIDPSTLIVGNCEENRAPELEYCFSLEREGFIPAILKELIRRRAEIKRELKRSEGDRRRTLSFAEKALKILYNSFYGYMGYPRARWYRRECAESVAAFARMYIKQVMRIAEEEFKLEVVYGDTDSLFVVIPPEKRELAQKFLQKVNESMPGIIELEFEGFYRRGLFVTKKRYALLSEDGKMVVKGLEFVRRDWAPIARETQKEVLRILLEEADPEKAARLVRDVIERIRQRRVSLEDITIYTQLTKRIKSYKSLEPHVVAAQKLKERGREVAPGMIIGYIITKGTKGISQRATPVEFARLEDYDPEYYIDNQILPAIQRIFEAIGYTRDYLKEGITQTSLSRWF

SEQ ID NO: 2159 - protein, 792 aa, unidentified
  REGION 1..792: note = Description of Unknown: Synthetic polypeptide
MPRILKGFLIDADFETVEGRALIRLFLRGEEGSFVVYDDSFSPYFYALPGDEPERVKERILASGAAEAIQKVEIEEKRLFGTPRVALRITVSHPQDVPRIRERIRRVEGVDLILEHDILFVRRYLIDRGIKPLTWLRLEVEERDGRALLRGVEQLEEEPPELRVAAVAIAVYNPKGAPRSSKDEIIMISVATSDGVEKVLTWREVQGLEQVEVLQDEKEMLLRFAELIKEGDYDVIVGYNTDSFDFPYIRDRLKKLGISLPLGRLDAELEVSRRGALPEARIRGRAHVDLYPIVRRHVKLNSYDLESVVEELLGIKKEKLDGERLFTYWDEGGEKRALLARYALEDARVTLALAEKFLPLYCELSTIVGQSLNDVARMTSGQLVEWLLMRYATPRGELIPNHPAGEEYAARARATYAGGYVREPKRGLVEHIAVFDFRSFGPSIIVSHNIDPSTLIVGNCEENRAPELEYCFSLEREGFIPAILKELIRRRAEIKRELKRSEGDRRRTLSFAEKALKILANSFYGYMGYPRARWYRRECAESVAAFARMYIKQVMRIAEEEFKLEVVYGDTDSLFVVIPPEKRELAQKFLQKVNESMPGIIELEFEGFYRRGLFVTKKRYALLSEDGKMVVKGLEFVRRDLAPIARETQKEVLRILLEEADPEKAARLVRDVIERIRQRRVSLEDITIYTQLTKRIKSYKSLEPHVVAAQKLKERGREVAPGMIIGYIITKGTKGISQRATPVEFARLEDYDPEYYIDNQILPAIQRIFEAIGYTRDYLKEGITQTSLSRWF

SEQ ID NO: 2160 - protein, 792 aa, unidentified; identical to SEQ ID NO: 1753
  REGION 1..792: note = Description of Unknown: Synthetic polypeptide

SEQ ID NO: 2161 - protein, 792 aa, unidentified
  REGION 1..792: note = Description of Unknown: Synthetic polypeptide
MPRILKGFLIDADFETVEGRALIRLFLRGEEGSFVVYDDSFSPYFYALPGDEPERVKERILASGAAEAIQKVEIEEKRLFGTPRVALRITVSHPQDVPRIRERIRRVEGVDLILEHDILFVRRYLIDRGIKPLTWLRLEVDERDGRALLRGVEQLEEEPPELRVAAVAIAVYNPKGAPRSSKDEIIMISVATSDGVEKVLTWREVQGLEQVEVLQDEKEMLLRFAELIKEGDYDVIVGYNTDSFDFPYIRDRLKKLGISLPLGRLDAELEVSRRGALPEARIRGRAHVDLYPIVRRHVKLNSYVLESVVEELLGIKKEKLDGERLFTYWDEGGEKRALLARYALEDARVTLALAEKFLPLYCELSTIVGQSLNDVARMTSGQLVEWLLMRYATPRGELIPNHPAGEEYAARARATYAGGYVREPKRGLVEHIAVFDFRSFGPSIIVSHNIDPSTLIVGNCEENRAPELEYCFSLEREGFIPAILKELIRRRAEIKRELKRSEGDRRRTLSFAEKALKILANSFYGYMGYPRARWYRRECAESVAAFARMYIKQVMRIAEEEFKLEVVYGDTDSLFVVIPPEKRELAQKFLQKVNESMPGIIELEFEGFYRRGLFVTKKRYALLSEDGKMVVKGLEFVRRDWAPIARETQKEVLRILLEEADPEKAARLVRDVIERIRQRRVSLEDITIYTQLTKRIKSYKSLEPHVVAAQKLKERGREVAPGMIIGYIITKGTKGISQRATPVEFARLEDYDPEYYIDNQILPAIQRIFEAIGYTRDYLKEGITQTSLSRWF

SEQ ID NO: 2162 - protein, 789 aa, unidentified
  REGION 1..789: note = Description of Unknown: Synthetic polypeptide
MPRILKGFLIDADFETVEGRALIRLFLRGEEGSFVVYDDSFSPYFYALPGDEPERVKERILASGAAEAIQKVEIEEKRLFGTPRVALRITVSHPQDVPRIRERIRRVEGVDLILEHDILFVRRYLIDRGIKPLTWLRLEVEERDGRALLRGVEQLEEEPPELRVAAVAIAVYNPKGAPRSSKDEIIMISVATSDGVEKVLTWREVQGLEQVEVLQDEKEMLLRFAELIKEGDYDVIVGYNTDSFDFPYIRDRLKKLGISLPLGRLDAELEVSRRGALPEARIRGRAHVDLYPIVRRHVKLNNYVLESVVEELLGIKKEKLDGERLFTYWDEGGEKRALLARYALEDARVTLALAEKFLPLYLELSTIVGQSLNDVARMTSGQLVEWLLMRYATPRGELIPNHPAGEEYAARARATYAGGYVREPKRGLVEHIAVFDFRSFGPSIIVSHNIDPSTLIVGNCEENRAPELEYCFSLEREGFIPAILKELIRRRAEIKRELKRSEGDRRRTLSFAEKALKILANSFYGYMGYPRARWYRRECAESVAAFARMYIKQVMRIAEEEFKLEVVYGDTDSLFVVIPPEKRELAQKFLQKVNESMPGIIELEFEGFYRRGLFVTKKRYALLSEDGKMVVKGLEFVRRDWAPIARETQKEVLRILLEEADPEKAARLVRDVIERIRQRRVSLEDITIYTQLTKRIKSYKSLEPHVVAAQKLKERGREVAPGMIIGYIITKGTKGISQRATPVEFARLEDYDPEYYIDNQILPAIQRIFEAIGYTRDYLKEGITQTSLS

SEQ ID NO: 2163 - protein, 792 aa, unidentified
  REGION 1..792: note = Description of Unknown: Synthetic polypeptide
MPRILKGFLIDADFETVEGRALIRLFLRGEEGSFVVYDDSFSPYFYALPGDEPERVKERILASGAAEAIQKVEIEEKRLFGTPRVALRITVSHPQDVPRIRERIRRVEGVDLILEHDILFVRRYLIDRAFKPLTWLRLEVEERDGRALLRGVEQLEEEPPELRVAAVAIAVYNPKGAPRSSKDEIIMISVATSDGVEKVLTWREVQGLEQVEVLQDEKEMLLRFAELIKEGDYDVIVGYNTDSFDFPYIRDRLKKLGISLPLGRLDAELEVSRRGALPEARIRGRAHVDLYPIVRRHVKLNSYVLESVVEELLGIKKEKLDGERLFTYWDEGGEKRALLARYALEDARVTLALAEKFLPLYCELSTIVGQSLNDVARMTSGQLVEWLLMRYATPRGELIPNHPAGEEYAARARATYAGGYVREPKRGLVEHIAVFDFRSFGPSIIVSHNIDPSTLIVGNCEENRAPELEYCFSLEREGFIPAILKELIRRRAEIKRELKRSEGDRRRTLSFAEKALKILANSFYGYMGYPRARWYRRECAESVAAFARMYIKQVMRIAEEEFKLEVVYGDTDSLFVVIPPEKRELAQKFLQKVNESMPGIIELEFEGFYRRGLFVTKKRYALLSEDGKMVVKGLEFVRRDWAPIARETQKEVLRILLEEADPEKAARLVRDVIERIRQRRVSLEDITIYTQLTKRIKSYKSLEPHVVAAQKLKERGREVAPGMIIGYIITKGTKGISQRATPVEFARLEDYDPEYYIDNQILPAIQRIFEAIGYTRDYLKEGITQTSLSRWF

SEQ ID NO: 2164 - protein, 792 aa, unidentified
  REGION 1..792: note = Description of Unknown: Synthetic polypeptide
MPRILKGFLIDADFETVEGRALIRLFLRGEEGSFVVYDDSFSPYFYALPGDEPERVKERILASGAAEAIQKVEIEEKRLFGTPRVALRITVSHPQDVPRIRERIRRVEGVDLILEHDILFVRRYLIDRGIKPLTWLRLEVEERDGRALLRGVEQLEEEPPELRVAAVAIAVYNPKGAPRSSKDEIIMISVATSDGVEKVLTWREVQGLEQVEVLQDEKEMLLRFAELIKEGDYDVIVGYNTDSFDFPYIRDRLKKLGISLPLGRLDAELEVSRRGALPEARIRGRAHVDLYPIVRRHVKLNSYVLESVVEELLGIKKEKLDGERLFTYWDEGGEKRALLARYALEDARVTLALAEKFLPLYCELSTIVGQSLNDVARMTSGQLVEWLLMRYATPRGELIPNHPAGEEYAARARATYAGGYVREPKRGLVEHIAVFDFRSFGPSIIVSHNIDPSTLIVGNCEENRAPELEYCFSLEREGFIPAILKELIRRRAEIKRELKRSEGDRRRTLSFAEKALKILAQSFYGYMGYPRARWYRRECAESVAAFARMYIKQVMRIAEEEFKLEVVYGDTDSLFVVIPPEKRELAQKFLQKVNESMPGIIELEFEGFYRRGLFVTKKRYALLSEDGKMVVKGLEFVRRDWAPIARETQKEVLRILLEEADPEKAARLVRDVIERIRQRRVSLEDITIYTQLTKRIKSYKSLEPHVVAAQKLKERGREVAPGMIIGYIITKGTKGISQRATPVEFARLEDYDPEYYIDNQILPAIQRIFEAIGYTRDYLKEGITQTSLSRWF

SEQ ID NO: 2165 - protein, 792 aa, unidentified
  REGION 1..792: note = Description of Unknown: Synthetic polypeptide
MPRILKGFLIDADFETVEGRALIRLFLRGEEGSFVVYDDSFSPYFYALPGDEPERVKERILASGAAEAIQKVEIEEKRLFGTPRVALRITVSHPQDVPRIRERIRRVEGVDLILEHDILFVRRYLIDRGIKPLTWLRLEVEERDGRALLRGVEQLEEEPPELRVAAVAIAVYNPKGAPRSSKDEIIMISVATSDGVEKVLTWREVQGLEQVEVLQDEKEMLLRFAELIKEGDYDVIVGYNTDSFDFPYIRDRLKKLGISLPLGRLDAELEVSRRGALPEARIRGRAHVDLYPIVRRHVKLNSYDLESVVEELLGIKKEKLDGERLFTYADEGGEKRALLARYALEDARVTLALAEKFLPLYCELSTIVGQSLNDVARMTSGQLVEWLLMRYATPRGELIPNHPAGEEYAARARATYAGGYVREPKRGLVEHIAVFDFRSFGPSIIVSHNIDPSTLIVGNCEENRAPELEYCFSLEREGFIPAILKELIRRRAEIKRELKRSEGDRRRTLSFAEKALKILANSFYGYMGYPRARWYRRECAESVAAFARMYIKQVMRIAEEEFKLEVVYGDTDSLFVVIPPEKRELAQKFLQKVNESMPGIIELEFEGFYRRGLFVTKKRYALLSEDGKMVVKGLEFVRRDWAPIARETQKEVLRILLEEADPEKAARLVRDVIERIRQRRVSLEDITIYTQLTKRIKSYKSLEPHVVAAQKLKERGREVAPGMIIGYIITKGTKGISQRATPVEFARLEDYDPEYYIDNQILPAIQRIFEAIGYTRDYLKEGITQTSLSRWF

SEQ ID NO: 2166 - protein, 792 aa, unidentified
  REGION 1..792: note = Description of Unknown: Synthetic polypeptide
MPRILKGFLIDADFETVEGRALIRLFLRGEEGSFVVYDDSFSPYFYALPGDEPERVKERILASGAAEAIQKVEIEEKRLFGTPRVALRITVSHPQDVPRIRERIRRVEGVDLILEHDILFVRRYLIDRGIKPLTWLRLEVEERDGRALLRGVEQLEEEPPELRVAAVAILVYNPKGAPRSSKDEIIMISVATSDGVEKVLTWREVQGLEQVEVLQDEKEMLLRFAELIKEGDYDVIVGYNTDSFDFPYIRDRLKKLGISLPLGRLDAELEVSRRGALPEARIRGRAHVDLYPIVRRHVKLNSYVLESVVEELLGIKKEKLDGERLFTYWDEGGEKRALLARYALEDARVTLALAEKFLPLYVELSTIVGQSLNDVARMTSGQLVEWLLMRYATPRGELIPNHPAGEEYAARARATYAGGYVREPKRGLVEHIAVFDFRSFGPSIIVSHNIDPSTLIVGNCEENRAPELEYCFSLEREGFIPAILKELIRRRAEIKRELKRSEGDRRRTLSFAEKALKILANSFYGYMGYPRARWYRREVAESVAAFARMYIKQVMRIAEEEFKLEVVYGDTDSLFVVIPPEKRELAQKFLQKVNESMPGIIELEFEGFYRRGLFVTKKRYALLSEDGKMVVKGLEFVRRDWAPIARETQKEVLRILLEEADPEKAARLVRDVIERIRQRRVSLEDITIYTQLTKRIKSYKSLEPHVVAAQKLKERGREVAPGMIIGYIITKGTKGISQRATPVEFARLEDYDPEYYIDNQILPAIQRIFEAIGYTRDYLKEGITQTSLSRWF

SEQ ID NO: 2167 - protein, 792 aa, unidentified
  REGION 1..792: note = Description of Unknown: Synthetic polypeptide
MPRILKGFLIDADFETVEGRALIRLFLRGEEGSFVVYDDSFSPYFYALPGDEPERVKERILASGAAEAIQKVEIEEKRLFGTPRVALRITVSHPQDVPRIRERIRRVEGVDLILEHDILFVRRYLIDRGIKPLTWLRLEVEERDGRALLRGVEQLEEEPPELRVAAVAIAVYNPKGAPRSSKDEIIMISVATSDGVEKVLTWREVQGLEQVEVLQDEKEMLLRFAELIKEGDYDVIVGYNTDSFDFPYIRDRLKKLGISLPLGRLDAELEVSRRGALPEARIRGRAHVDLYPIVRRHVKLNSYDLESVVEELLGIKKEKLDGERLFTYWDEGGEKRALLARYALEDARVTLALAEKFLPLYCELSTIVGQSLNDVARMTSGQLVEWLLMRYATPRGELIPNHPAGEEYAARARATQAGGYVREPKRGLVEHIAVFDFRSFGPSIIVSHNIDPSTLIVGNCEENRAPELEYCFSLEREGFIPAILKELIRRRAEIKRELKRSEGDRRRTLSFAEKALKILANSFYGYMGYPRARWYRRECAESVAAFARMYIKQVMRIAEEEFKLEVVYGDTDSLFVVIPPEKRELAQKFLQKVNESMPGIIELEFEGFYRRGLFVTKKRYALLSEDGKMVVKGLEFVRRDWAPIARETQKEVLRILLEEADPEKAARLVRDVIERIRQRRVSLEDITIYTQLTKRIKSYKSLEPHVVAAQKLKERGREVAPGMIIGYIITKGTKGISQRATPVEFARLEDYDPEYYIDNQILPAIQRIFEAIGYTRDYLKEGITQTSLSRWF

SEQ ID NO: 2168 - protein, 792 aa, unidentified
  REGION 1..792: note = Description of Unknown: Synthetic polypeptide
MPRILKGFLIDADFETVEGRALIRLFLRGEEGSFVVYDDSFSPYFYALPGDEPERVKERILASGAAEAIQKVEIEEKRLFGTPRVALRITVSHPQDVPRIRERIRRVEGVDLILEHDILFVRRYLIDRGIKPLTWLRLEVEERDGRALLRGVEQLEEEPPELRVAAVAIAVYNPKGAPRSSKDEIIMISVATSDGVEKVLTWREVQGLEQVEVLQDEKEMLLRFAELIKEGDYDVIVGYNTDSFDFPYIRDRLKKLGISLPLGRLDAELEVSRRGALPEARIRGRAHVDLYPIVRRHVKLNSYDLESVVEELLGIKKEKLDGERLFTYWDEGGEKRALLARYALEDARVTLALAEKFLPLYCELSTIVGQSLNDVARMTSGQLVEWLLMRYATPRGELIPNHPAGEEYAARARATYAGGYVREPKRGLVEHIAVFDFRSFGPSIIVSHNIDPSTLIVGNCEENRAPELEYCFSLEDEGFIPAILKELIRRRAEIKRELKRSEGDRRRTLSFAEKALKILANSFYGYMGYPRARWYRRECAESVAAFARMYIKQVMRIAEEEFKLEVVYGDTDSLFVVIPPEKRELAQKFLQKVNESMPGIIELEFEGFYRRGLFVTKKRYALLSEDGKMVVKGLEFVRRDWAPIARETQKEVLRILLEEADPEKAARLVRDVIERIRQRRVSLEDITIYTQLTKRIKSYKSLEPHVVAAQKLKERGREVAPGMIIGYIITKGTKGISQRATPVEFARLEDYDPEYYIDNQILPAIQRIFEAIGYTRDYLKEGITQTSLSRDF

SEQ ID NO: 2169 - protein, 792 aa, unidentified
  REGION 1..792: note = Description of Unknown: Synthetic polypeptide
MPRILKGFLIDADFETVEGRALIRLFLRGEEGSFVVYDDSFSPYFYALPGDEPERVKERILASGAAEAIQKVEIEEKRLFGTPRVALRITVSHPQDVPRIRERIRRVEGVDLILEHDILFVRRYLIDRGIKPLTWLRLEVEERDGRALLRGVEQLEEEPPELRVAAVAIAVYNPKGAPRSSKDEIIMISVATSDGVEKVLTWREVQGLEQVEVLQDEKEMLLRFAELIKEGDYDVIVGYSTDSFDFPYIRDRLKKLGISLPLGRLDAELEVSRRGALPEARIRGRAHVDLYPIVRRHVKLNSYVLESVVEELLGIKKEKLDGERLFTYWDEGGEKRALLARYALEDARVTLALAEKFLPLYCELSTIVGQSLNDVARMTSGQLVEWLLMRYATPRGELIPNHPAGEEYAARARATYAGGYVREPKRGLVEHIAVFDFRSFGPSIIVSHNIDPSTLIVGNCEENRAPELEYCFSLEREGFIPAILKELIRRRAEIKRELKRSEGDRRRTLSFAEKALKILANSFYGYMGYPRARWYRRECAESVAAFARMYIKQVMRIAEEEFKLEVVYGDTDSLFVVIPPEKRELAQKFLQKVNESMPGIIELEFEGFYRRGLFVTKKRYALLSEDGKMVVKGLEFVRRDWAPIARETQKEVLRILLEEADPEKAARLVRDVIERIRQRRVSLEDITIYTQLTKRIKSYKSLEPHVVAAQKLKERGREVAPGMIIGYIITKGTKGISQRATPVEFARLEDYDPEYYIDNQILPAIQRIFEAIGYTRDYLKEGITQTSLSRWF

SEQ ID NO: 2170 - protein, 789 aa, unidentified; identical to SEQ ID NO: 1971
  REGION 1..789: note = Description of Unknown: Synthetic polypeptide

SEQ ID NO: 2171 - protein, 792 aa, unidentified; identical to SEQ ID NO: 1883
  REGION 1..792: note = Description of Unknown: Synthetic polypeptide

SEQ ID NO: 2172 - protein, 792 aa, unidentified
  REGION 1..792: note = Description of Unknown: Synthetic polypeptide
MPRILKGFLIDADFETVEGRALIRLFLRGEEGSFVVYDDSFSPYFYALPGDEPERVKERILASGAAEAIQKVEIEEKRLFGTPRVALRITVSHPQDVPRIRERIRRVEGVDLILEHDILFVRRYLIDRGIKPLTWLRLEVEERDGRALLRGVEQLEEEPPELRVAAVAIAVYNPKGAPRSSKDEIIMISVATSDGVEKVLTWREVQGLEQVEVLQDEKEMLLRFAELIKEGDYDVIVGYNTDSFDFPYIRDRLKKLGISLPLGRLDAELEVSRRGALPEARIRGRAHVDLGPIVRRHVKLNSYVLESVVEELLGIKKEKLDGERLFTYWDEGGEKRALLARYALEDARVTLALAEKFLPLYCELSTIVGQSLNDVARMTSGQLVEWLLMRYATPRGELIPNHPAGEEYAARARATYAGGYVREPKRGLVEHIAVFDFRSFGPSIIVSHNIDPSTLIVGNCEENRAPELEYCFSLEREGFIPAILKELIRRRAEIKRELKRSEGDRRRTLSFAEKALKILANSFYGYMGYPRARWYRRECAESVAAFARMYIKQVMRIAEEEFKLEVVYGDTDSLFVVIPPEKRELAQKFLQKVNESMPGIIELEFEGFYRRGLFVTKKRYALLSEDGKMVVKGLEFVRRDWAPIARETQKEVLRILLEEADPEKAARLVRDVIERIRQRRVSLEDITIYTQLTKRIKSYKSLEPHVVAAQKLKERGREVAPGMIIGYIITKGTKGISQRATPVEFARLEDYDPEYYIDNQILPAIQRIFEAIGYTRDYLKEGITQTSLSRWF

SEQ ID NO: 2173 - protein, 792 aa, unidentified
  REGION 1..792: note = Description of Unknown: Synthetic polypeptide
MPRILKGFLIDADFETVEGRALIRLFLRGEEGSFVVYDDSFSPYFYALPGDEPERVKERILASGAAEAIQKVEIEEKRLFGTPRVALRITVSHPQDVPRIRERIRRVEGVDLILEHDILFVRRYLIDRGIKPLTWLRLEVEERDGRALLRGVEQLEEEPPELRVAAVAIAVYNPKGAPRSSKDEIIMISVATSDGVEKVLTWREVQGLEQVEVLQDEKEMLLRFAELIKEGDYDVIVGYNTDSFDFPYIRDRLKKLGISLPLGRLDAELEVSRRGALPEARIRGRAHVDLYPIVRRHVKLNSYDLESVVEELLGIKKEKLDGERLFTYWDEGGEKRALLARYALEDARVTLALAEKFLPLYCELSTIVGQSLNDVARMTSGQLVEWLLMRYATPRGELIPNHPAGEEYAARARATYAGGYVREPKRGLVEHIAVFDFRSFGPSIIVSHNIDPSTLIVGNCEENRAPELEYCFSLEREGFIPAILKELIRRRAEIKRELKRSEGDRRRTLSFAEKALKILAQSFYGYMGYPRARWYRRECAESVAAFARMYIKQVMRIAEEEFKLEVVYGDTDSLFVVIPPEKRELAQKFLQKVNESMPGIIELEFEGFYRRGLFVTKKRYALLSEDGKMVVKGLEFVRRDWAPIARETQKEVLRILLEEADPEKAARLVRDVIERIRQRRVSLEDITIYTQLTKRIKSYKSLEPHVVAAQKLKERGREVAPGMIIGYIITKGTKGISQRATPVEFARLEDYDPEYYIDNQILPAIQRIFEAIGYTRDYLKEGITQTSLSRWF

SEQ ID NO: 2174 - protein, 792 aa, unidentified
  REGION 1..792: note = Description of Unknown: Synthetic polypeptide
MPRILKGFLIDADFETVEGRALIRLFLRGEEGSFVVYDDSFSPYFYALPGDEPERVKERILASGAAEAIQKVEIEEKRLFGTPRVALRITVSHPQDVPRIRERIRRVEGVDLILEHDILFVRRYLIDRGIKPLTWLRLEVEERDGRALLRGVEQLEEEPPELRVAAVAIAVYNPKGAPRSSKDEIIMISVATSDGVEKVLTWREVQGLEQVEVLQDEKEMLLRFAELIKEGDYDVIVGYNTDSFDFPYIRDRLKKLGISLPLGRLDAELEVSRRGALPEARIRGRAHVDLYPIVRRHVKLNSYVLESVVEELLGIKKEKLDGERLFTYWDEGGEKRALLARYALEDARVTLALAEKFLPLYCELSTIVGQSLNDVARMTSGQLVEWLLMRYATPRGELIPNHPAGEEYAARARATYAGGYVREPKRGLVEHIAVFDFRSFGPSIIVSHNIDPSTLIVGNCEENRAPELEYCFSLEREGFIPAILKELIRRRAEIKRELKRSEGDRRRTLSFAEKALKILANSFYGYMGYPRARWYRRECAESVAAFARAYIKQVMRIAEEEFKLEVVYGDTDSLFVVIPPEKRELAQKFLQKVNESMPGIIELEFEGFYRRGLFVTKKRYALLSEDGKMVVKGLEFVRRDWAPIARETQKEVLRILLEEADPEKAARLVRDVIERIRQRRVSLEDITIYTQLTKRIKSYKSLEPHVVAAQKLKERGREVAPGMIIGYIITKGTKGISQRATPVEFARLEDYDPEYYIDNQILPAIQRIFEAIGYTRDYLKEGITQTSLSRWF

SEQ ID NO: 2175 - protein, 792 aa, unidentified
  REGION 1..792: note = Description of Unknown: Synthetic polypeptide
MPRILKGFLIDADFETVEGRALIRLFLRGEEGSFVVYDDSFSPYFYALPGDEPERVKERILASGAAEAIQKVEIEEKRLFGTPRVALRITVSHPQDVPRIRERIRRVEGVDLILEHDILFVRRYLIDRGIKPLTWLRLEVEERDGRALLRGVEQLEEEPPELRVAAVAIAVYNPKGAPRSSKDEIIMISVATSDGVEKVLTWREVQGLEQVEVLQDEKEMLLRFAELIKEGDYDVIVGYNTDSFDFPYIRDRLKKLGISLPLGRLDAELEVSRRGALPEARIRGRAHVDLYPIVRRHVKLNSYDLESVVEELLGIKKEKLDGERLFTYWDEGGEARALLARYALEDARVTLALAEKFLPLYCELSTIVGQSLNDVARMTSGQLVEWLLMRYATPRGELIPNHPAGEEYAARARATYAGGYVREPKRGLVEHIAVFDFRSFGPSIIVSHNIDPSTLIVGNCEENRAPELEYCFSLEREGFIPAILKELIRRRAEIKRELKRSEGDRRRTLSFAEKALKILANSFYGYMGYPRARWYRRECAESVAAFARMYIKQVMRIAEEEFKLEVVYGDTDSLFVVIPPEKRELAQKFLQKVNESMPGIIELEFEGFYRRGLFVTKKRYALLSEDGKMVVKGLEFVRRDWAPIARETQKEVLRILLEEADPEKAARLVRDVIERIRQRRVSLEDITIYTQLTKRIKSYKSLEPHVVAAQKLKERGREVAPGMIIGYIITKGTKGISQRATPVEFARLEDYDPEYYIDNQILPAIQRIFEAIGYTRDYLKEGITQTSLSRWF

SEQ ID NO: 2176 - protein, 789 aa, unidentified; identical to SEQ ID NO: 1988
  REGION 1..789: note = Description of Unknown: Synthetic polypeptide

SEQ ID NO: 2177 - protein, 792 aa, unidentified
  REGION 1..792: note = Description of Unknown: Synthetic polypeptide
MPRILKGFLIDADFETVEGRALIRLFLRGEEGSFVVYDDSFSPYFYALPGDEPERVKERILASGAAEAIQKVEIEEKRLFGTPRVALRITVSHPQDVPRIRERIRRVEGVDLILEHDILFVRRYLIDRGIKPLTWLRLEVEERDGRALLRGVEQLEEEPPELRVAAVAIAVYNPKGAPRSSKDEIIMISVATSDGVEKVLTWREVQGLEQVEVLQDEKEMLLRFAELIKEGDYDVIVGYNTDSFDFPYIRDRLKKLGISLPLGRLDAELEVSRRGALPEARIRGRAHVDLYPIVRRHVKLNSYDLESVVEELLGIKKEKLDGERLFTYWDEGGEKRALLARYALEDARVTLALAEKFLPLYCELSTIVGQSLNDVARMTSGQLVEWLLMRYATPRGELIPNHPAGEEYAARARATYAGGYVREPKRGLVEHIAVFDFRSFGPSIIVSHNIDPSTLIVGNCEENRAPELEYCFSLEREGFIPAILKELIRRRAEIKRELKRSEGDRRRTLSFAEKALKILANSFYGYMGYPRARWYRRECAESVAAFARMYIKQVMRIAEEEFKLEVVYGDTDSLFVVIPPEKRELAQKFLQKVNESMPGIIELEFEGFYRRGLFVTKKRYALLSEDGKMVVKGLEFVRRDWAPIARETQKEVLRILLEEADPEKAARLVRDVIERIRQRRVSLEDITIYTQLTKRIKSYKSLEPHVVAAQKLKERGREVAPGAIIGYIITKGTKGISQRATPVEFARLEDYDPEYYIDNQILPAIQRIFEAIGYTRDYLKEGITQTSLSRWF

SEQ ID NO: 2178 - protein, 792 aa, unidentified
  REGION 1..792: note = Description of Unknown: Synthetic polypeptide
MPRILKGFLIDADFETVEGRALIRLFLRGEEGSFVVYDDSFSPYFYALPGDEPERVKERILASGAAEAIQKVEIEEKRLFGTPRVALRITVSHPQDVPRIRERIRRVEGVDLILEHDILFVRRYLIDRGIKPLTWLRLEVEERDGRALMRGVEQLEEEPPELRVAAVAIAVYNPKGAPRSSKDEIIMISVATSDGVEKVLTWREVQGLEQVEVLQDEKEMLLRFAELIKEGDYDVIVGYNTDSFDFPYIRDRLKKLGISLPLGRLDAELEVSRRGALPEARIRGRAHVDLYPIVRRHVKLNSYVLESVVEELLGIKKEKLDGERLFTYWDEGGEKRALLARYALEDARVTLALAEKFLPLYCELSTIVGQSLNDVARMTSGQLVEWLLMRYATPRGELIPNHPAGEEYAARARATYAGGYVREPKRGLVEHIAVFDFRSFGPSIIVSHNIDPSTLIVGNCEENRAPELEYCFSLEREGFIPAILKELIRRRAEIKRELKRSEGDRRRTLSFAEKALKILANSFYGYMGYPRARWYRRECAESVAAFARMYIKQVMRIAEEEFKLEVVYGDTDSLFVVIPPEKRELAQKFLQKVNESMPGIIELEFEGFYRRGLFVTKKRYALLSEDGKMVVKGLEFVRRDWAPIARETQKEVLRILLEEADPEKAARLVRDVIERIRQRRVSLEDITIYTQLTKRIKSYKSLEPHVVAAQKLKERGREVAPGMIIGYIITKGTKGISQRATPVEFARLEDYDPEYYIDNQILPAIQRIFEAIGYTRDYLKEGITQTSLSRWF

SEQ ID NO: 2179 - protein, 789 aa, unidentified; identical to SEQ ID NO: 2087
  REGION 1..789: note = Description of Unknown: Synthetic polypeptide

SEQ ID NO: 2180 - protein, 792 aa, unidentified
  REGION 1..792: note = Description of Unknown: Synthetic polypeptide
MPRILKGFLIDADFETVEGRALIRLFLRGEEGSFVVYDDSFSPYFYALPGDEPERVKERILASGAAEAIQKVEIEEKRLFGTPRVALRITVSHPQDVPRIRERIRRVEGVDLILEHDILFVRRYLIDRGIKPLTWLRLEVEERDGRALLRGVEQLEEEPPELRVAAVAIAVYNPKGAPRSSKDEIIMISVATSDGVEKVLTWREVQGLEQVEVLQDEKEMLLRFAELIKEGDYDVIVGYNTDSFDFPYIRDRLKKLGISLPLGRLDAELEVSRRGALPEARIRGRAHVDLYPIVRRHVKLNSYDLESVVEELLGIKKEKLDGERLFTYWDEGGEKRALLARYALEDARVTLALAEKFLPLYLELSTIVGQSLNDVARMTSGQLVEWLLMRYATPRGELAPNHPAGEEYAARARATYAGGYVREPKRGLVEHIAVFDFRSFGPSIIVSHNIDPSTLIVGNCEENRAPELEYCFSLEREGFIPAILKELIRRRAEIKRELKRSEGDRRRTLSFAEKALKILANSFYGYMGYPRARWYRRECAESVAAFARMYIKQVMRIAEEEFKLEVVYGDTDSLFVVIPPEKRELAQKFLQKVNESMPGIIELEFEGFYRRGLFVTKKRYALLSEDGKMVVKGLEFVRRDWAPIARETQKEVLRILLEEADPEKAARLVRDVIERIRQRRVSLEDITIYTQLTKRIKSYKSLEPHVVAAQKLKERGREVAPGMIIGYIITKGTKGISQRATPVEFARLEDYDPEYYIDNQILPAIQRIFEAIGYTRDYLKEGITQTSLSRWF

SEQ ID NO: 2181 - protein, 792 aa, unidentified
  REGION 1..792: note = Description of Unknown: Synthetic polypeptide
MPRILKGFLIDADFETVEGRALIRLFLRGEEGSFVVYDDSFSPYFYALPGDEPERVKERILASGAAEAIQKVEIEEKRLFGTPRVALRITVSHPQDVPRIRERIRRVEGVDLILEHDILFVRRYLIDRGIKPLTWLRLEVEERDGRALLRGVEQLEEEPPELRVAAVAIAVYNPKGAPRSSKDEIIMISVATSDGVEKVLTWREVQGLEQVEVLQDEKEMLLRFAELIKEGDYDVIVGYNTDSFDFPYIRDRLKKLGISLPLGRLDAELEVSRRGALPEARIRGRAHVDLYPIVRRHVKLNSYVLESVVEELLGIKKEKLDGERLFTYWDEGGEKRALLARYALEDARVTLALAEKFLPLYCELSTIVGQSLNDVARMTSGQLVEWLLMRYATPRGEDIPNHPAGEEYAARARATYAGGYVREPKRGLVEHIAVFDFRSFGPSIIVSHNIDPSTLIVGNCEENRAPELEYCFSLEREGFIPAILKELIRRRAEIKRELKRSEGDRRRTLSFAEKALKILANSFYGYMGYPRARWYRRECAESVAAFARMYIKQVMRIAEEEFKLEVVYGDTDSLFVVIPPEKRELAQKFLQKVNESMPGIIELEFEGFYRRGLFVTKKRYALLSEDGKMVVKGLEFVRRDWAPIARETQKEVLRILLEEADPEKAARLVRDVIERIRQRRVSLEDITIYTQLTKRIKSYKSLEPHVVAAQKLKERGREVAPGMIIGYIITKGTKGISQRATPVEFARLEDYDPEYYIDNQILPAIQRIFEAIGYTRDYLKEGITQTSLSRWF

SEQ ID NO: 2182 - protein, 789 aa, unidentified
  REGION 1..789: note = Description of Unknown: Synthetic polypeptide
MPRILKGFLIDADFETVEGRALIRLFLRGEEGSFVVYDDSFSPYFYALPGDEPERVKERILASGAAEAIQKVEIEEKRLFGTPRVALRITVSHPQDVPRIRERIRRVEGVDLDLEHDILFVRRYLIDRGIKPLTWLRLEVEERDGRALLRGVEQLEEEPPELRVAAVAIAVYNPKGAPRSSKDEIIMISVATSDGVEKVLTWREVQGLEQVEVLQDEKEMLLRFAELIKEGDYDVIVGYNTDSFDFPYIRDRLKKLGISLPLGRLDAELEVSRRGALPEARIRGRAHVDLYPIVRRHVKLNSYVLESVVEELLGIKKEKLDGERLFTYWDEGGEKRALLARYALEDARVTLALAEKFLPLYLELSTIVGQSLNDVARMTSGQLVEWLLMRYATPRGELIPNHPAGEEYAARARATYAGGYVREPKRGLVEHIAVFDFRSFGPSIIVSHNIDPSTLIVGNCEENRAPELEYCFSLEREGFIPAILKELIRRRAEIKRELKRSEGDRRRTLSFAEKALKILANSFYGYMGYPRARWYRRECAESVAAFARMYIKQVMRIAEEEFKLEVVYGDTDSLFVVIPPEKRELAQKFLQKVNESMPGIIELEFEGFYRRGLFVTKKRYALLSEDGKMVVKGLEFVRRDWAPIARETQKEVLRILLEEADPEKAARLVRDVIERIRQRRVSLEDITIYTQLTKRIKSYKSLEPHVVAAQKLKERGREVAPGMIIGYIITKGTKGISQRATPVEFARLEDYDPEYYIDNQILPAIQRIFEAIGYTRDYLKEGITQTSLS

SEQ ID NO: 2183 - protein, 792 aa, unidentified
  REGION 1..792: note = Description of Unknown: Synthetic polypeptide
MPRILKGFLIDADFETVEGRALIRLFLRGEEGSFVVYDDSFSPYFYALPGDEPERVKERILASGAAEAIQKVEIEEKRLFGTPRVALRITVSHPQDVPRIRERIRRVEGVDLILEHDILFVRRYLIDRGIKPLTWLRLEVEERDGRALLRGVEQLEEEPPELRVAAVAIAVYNPKGAPRSSKDEIIMISVATSDGVEKVLTWREVQGLEQVEVLQDEKEMLLRFAELIKEGDYDVIVGYNTDSFDFPYIRDRLKKLGISLPLGRLDAELEVSRRGALPEARIRGRAHVDLYPIVRRHVKLNSYVLESVVEELLGIKKEKLDGERLFTYWDEGGEKRALLARYALEDARVTLALAEKFLPLYAELSTIVGQSLNDVARMTSGQLVEWLLMRYATPRGELIPNHPAGEEYAARARATYAGGYVREPKRGLVEHIAVFDFRSFGPSIIVSHNIDPSTLIVGNCEENRAPELEYCFSLEREGFIPAILKELIRRRAEIKRELKRSEGDRRRTLSFAEKALKILANSFYGYMGYPRARWYRRESAESVAAFARMYIKQVMRIAEEEFKLEVVYGDTDSLFVVIPPEKRELAQKFLQKVNESMPGIIELEFEGFYRRGLFVTKKRYALLSEDGKMVVKGLEFVRRDWAPIARETQKEVLRILLEEADPEKAARLVRDVIERIRQRRVSLEDITIYTQLTKRIKSYKSLEPHVVAAQKLKERGREVAPGMIIGYIITKGTKGISQRATPVEFARLEDYDPEYYIDNQILPAIQRIFEAIGYTRDYLKEGITQTSLSRWF

SEQ ID NO: 2184 - protein, 792 aa, unidentified
  REGION 1..792: note = Description of Unknown: Synthetic polypeptide
MPRILKGFLIDADFETVEGRALIRLFLRGEEGSFVVYDDSFSPYFYALPGDEPERVKERILASGAAEAIQKVEIEEKRLFGTPRVALRITVSHPQDVPRIRERIRRVEGVDLILEHDILFVRRYLIDRGIKPLTWLRLEVEERDGRALLRGVEQLEEEPPELRVAAVAIAVYNPKGAPRSSKGEIIMISVATSDGVEKVLTWREVQGLEQVEVLQDEKEMLLRFAELIKEGDYDVIVGYNTDSFDFPYIRDHLKKLGISLSLGRLDAELEVSRRGALPEVRIRGRAHVDLYPIVRRHVKLNSYVLESVVEELLGIKKEKLDGERLFTYWDEGGEKRALLARYALEDARVTLALAEKFMPLYCELSTIVGQSLNDVARMTSGQLVEWLLMRYATPRGELIPNHPAGEEYAARARATYAGGYVREPKRGLVEHIAVFDFRSFGPSIIVSHNIDPSTLIVGNCEENRAPELEYCFSLEREGFIPAILKELIRRRAEIKRELKRSEGDRRRTLSFAEKALKILANSFYGYMGYPRARWYRRECAESVAAFARMYIKQVMRIAEEEFKLEVVYGDTDSLFVVIPPEKRELAQKFLQKVNESMPGIIELEFEGFYRRGLFVTKKRYALLSEDGKMVVKGLEFVRRDWAPIARETQKEVLRILLEEADPEKAARLVRDVIERIRQRRVSLEDITIYTQLTKRIKSYKSLEPHVVAAQKLKERGREVAPGMIIGYIITKGTKGISQRATPVEFARLEDYDPEYYIDNQILPAIQRIFEAIGYTRDYLKEGITQTSLSRWF

SEQ ID NO: 2185 - protein, 789 aa, unidentified
  REGION 1..789: note = Description of Unknown: Synthetic polypeptide
MPRILKGFLIDADFETVEGRALIRLFLRGEEGSFVVYDDSFSPYFYALPGDEPERVKERILASGAAEAIQKVEIEEKRLFGTPRVALRITVSHPQDVPRIRERIRRVEGVDLILEHDILFVRRYLIDRGIKPLTWLRLEVEERDGRALLRGVEQLEEEPPELRVAAVAIAVYNPKGAPRSSKDEIIMISVATSDGVEKVLTWREVQGLEQVEVLQDEKEMLLRFAELIKEGDYDVIVGYNTDSFDFPYIRDRLKKLGISLPLGRLDAELEVSRRGALPEARIRGRAHVDLYPIVRRHVKLNSYVLESVVEELLGIKKEKLDGERLFTYWDEGGEKRALLARYALEAARVTLALAEKFLPLYLELSTIVGQSLNDVARMTSGQLVEWLLMRYATPRGELIPNHPAGEEYAARARATYAGGYVREPKRGLVEHIAVFDFRSFGPSIIVSHNIDPSTLIVGNCEENRAPELEYCFSLEREGFIPAILKELIRRRAEIKRELKRSEGDRRRTLSFAEKALKILANSFYGYMGYPRARWYRRECAESVAAFARMYIKQVMRIAEEEFKLEVVYGDTDSLFVVIPPEKRELAQKFLQKVNESMPGIIELEFEGFYRRGLFVTKKRYALLSEDGKMVVKGLEFVRRDWAPIARETQKEVLRILLEEADPEKAARLVRDVIERIRQRRVSLEDITIYTQLTKRIKSYKSLEPHVVAAQKLKERGREVAPGMIIGYIITKGTKGISQRATPVEFARLEDYDPEYYIDNQILPAIQRIFEAIGYTRDYLKEGITQTSLS

SEQ ID NO: 2186 - protein, 792 aa, unidentified
  REGION 1..792: note = Description of Unknown: Synthetic polypeptide
MPRILKGFLIDADFETVEGRALIRLFLRGEEGSFVVYDDSFSPYFYALPGDEPERVKERILASGAAEAIQKVEIEEKRLFGTPRVALRITVSHPQDVPRIRERIRRVEGVDLILEHDILFVRRYLIDRGIKPLTWLRLEVEERDGRALLRGVEQLEEEPPELRVAAVAIAVRNPKGAPRSSKDEIIMISVATSDGVEKVLTWREVQGLEQVEVLQDEKEMLLRFAELIKEGDYDVIVGYNTDSFDFPYIRDRLKKLGISLPLGRLDAELEVSRRGALPEARIRGRAHVDLYPIVRRHVKLNSYVLESVVEELLGIKKEKLDGERLFTYWDEGGEKRALLARYALEDARVTLALAEKFLPLYCELSTIVGQSLNDVARMTSGQLVEWLLMRYATPRGELIPNHPAGEEYAARARATYAGGYVREPKRGLVEHIAVFDFRSFGPSIIVSHNIDPSTLIVGNCEENRAPELEYCFSLEREGFIPAILKELIRRRAEIKRELKRSEGDRRRTLSFAEKALKILANSFYGYMGYPRARWYRRECAESVAAFARMYIKQVMRIAEEEFKLEVVYGDTDSLFVVIPPEKRELAQKFLQKVNESMPGIIELEFEGFYRRGLFVTKKRYALLSEDGKMVVKGLEFVRRDWAPIARETQKEVLRILLEEADPEKAARLVRDVIERIRQRRVSLEDITIYTQLTKRIKSYKSLEPHVVAAQKLKERGREVAPGMIIGYIITKGTKGISQRATPVEFARLEDYDPEYYIDNQILPAIQRIFEAIGYTRDYLKEGITQTSLSRWF

SEQ ID NO: 2187 - protein, 789 aa, unidentified
  REGION 1..789: note = Description of Unknown: Synthetic polypeptide
MPRILKGFLIDADFETVEGRALIRLFLRGEEGSFVVYDDSFSPYFYALPGDEPERVKERILASGAAEAIQKVEIEEKRLFGTPRVALRITVSHPQDVPRIRERIRRVEGVDLILEHDILFVRRYLIDRGIKPLTWLRLEVEERDGRALLRGVEQLEEEPPELRVAAVAIAVYNPKGAPRSSKDEIIMISVATSDGVEKVLTWREVQGLEQVEVLQDEKEMLLRFAELIKEGDYDVIVGYNTDSFDFPYIRDRLKKLGISLPLGRLDAELEVSRRGALPEARIRGRAHVDLYPIVRRHVKLNSYVLESVVEELLGIKKEKLDGERLFTYWDEGGEKRALLARYALEDARVTLALAEKFLPLYLELSTIVGQSLNDVARMTSGQLVEWLLMRYATPRGELIPNHPAGEEYAARARATYAGGYVREPKRGLVEHIAVFDFRSFGPSIIVSHNIDPSTLIVGNCEENRAPELEYCFSLEDEGFIPAILKELIRRRAEIKRELKRSEGDRRRTLSFAEKALKILANSFYGYMGYPRARWYRRECAESVAAFARMYIKQVMRIAEEEFKLEVVYGDTDSLFVVIPPEKRELAQKFLQKVNESMPGIIELEFEGFYRRGLFVTKKRYALLSEDGKMVVKGLEFVRRDWAPIARETQKEVLRILLEEADPEKAARLVRDVIERIRQRRVSLEDITIYTQLTKRIKSYKSLEPHVVAAQKLKERGREVAPGMIIGYIITKGTKGISQRATPVEFARLEDYDPEYYIDNQILPAIQRIFEAIGYTRDYLKEGITQTSLS

SEQ ID NO: 2188 - protein, 792 aa, unidentified
  REGION 1..792: note = Description of Unknown: Synthetic polypeptide
MPRILKGFLIDADFETVEGRALIRLFLRGEEGSFVVYDDSFSPYFYALPGDEPERVKERILASGAAEAIQKVEIEEKRLFGTPRVALRITVSHPQDVPRIRERIRRVEGVDLILEHDILFVRRYLIDRGIKPLTWLRLEVEERDGRALLRGVEQLEEEPPELRVAAVAIAVYNPKGAPRSSKDEIIMISVATSDGVEKVLTWREVQGLEQVEVLQDEKEMLLRFAELIKEGDYDVIVGYNTDSFDFPYIRDRLKKLGISLPLGRLDAELEVSRRGALPEARIRGRAHVDLYPIVRRHVKLNSYVLESVVEELLGIKKEKLDGERLFTYWDEGGEKRALLARYALEDARVTLALAEKFLPLYCELSTIVGQSLNDVARMTSGQLVEWLLMRYATPRGELIPNHPAGEEYAARARATYAGGYVREPKRGLVEHIAVFDFRSFGPSIIVSHNIDPSTLIVGNCEENRAPELEYCFSLEREGFIPAILKELIRRRAEIKRELKRSEGDRRRTLSFAEKALKILANSFYGYMGYPRARWYRRECAESVAAFARMYIKQVMRIAEEEFKLEVVYGDTDSLFVVIPPEKRELAQKFLQKVNESMPGIIELEFEGFYRRGLFVTKKRYALLSEDGKMVVKGLEFVRRDWAPIARETQKEVLRILLEEADPEKAARLVRDVIERIRQRRVSLEDITIYTQLTKKIKSYKSLEPHVVAAQKLKERGREVAPGMIIGYIITKGTKGISQRATPVEFARLEDYDPEYYIDNQILPAIQRIFEAIGYTRDYLKEGITQTSLSRWF

SEQ ID NO: 2189 - protein, 792 aa, unidentified
  REGION 1..792: note = Description of Unknown: Synthetic polypeptide
MPRILKGFLIDADFETVEGRALIRLFLRGEEGSFVVYDDSFSPYFYALPGDEPERVKERILASGAAEAIQKVEIEEKRLFGTPRVALRITVSHPQDVPRIRERIRRVEGVDLILEHDILFVRRYLIDRGIKPLTWLRLEVEERDGRALLRGVEQLEEEPPELRVAAVAIAVYNPKGAPRSSKDEIIIISVATSDGVEKVLTWREVQGLEQVEVLQDEKEMLLRFAELIKEGDYDVIVGYNTDSFDFPYIRDRLKKLGISLPLGRLDAELEVSRRGALPEARIRGRAHVDLYPIVRRHVKLNSYVLESVVEELLGIKKEKLDGERLFTYWDEGGEKRALLARYALEDARVTLALAEKFLPLYCELSTIVGQSLNDVARMTSGQLVEWLLMRYATPRGELIPNHPAGEEYAARARATYAGGYVREPKRGLVEHIAVFDFRSFGPSIIVSHNIDPSTLIVGNCEENRAPELEYCFSLEREGFIPAILKELIRRRAEIKRELKRSEGDRRRTLSFAEKALKILANSFYGYMGYPRARWYRRECAESVAAFARMYIKQVMRIAEEEFKLEVVYGDTDSLFVVIPPEKRELAQKFLQKVNESMPGIIELEFEGFYRRGLFVTKKRYALLSEDGKMVVKGLEFVRRDWAPIARETQKEVLRILLEEADPEKAARLVRDVIERIRQRRVSLEDITIYTQLTKRIKSYKSLEPHVVAAQKLKERGREVAPGMIIGYIITKGTKGISQRATPVEFARLEDYDPEYYIDNQILPAIQRIFEAIGYTRDYLKEGITQTSLSRWF

SEQ ID NO: 2190 - protein, 792 aa, unidentified
  REGION 1..792: note = Description of Unknown: Synthetic polypeptide
MPRILKGFLIDADFETVEGRALIRLFLRGEEGSFVVYDDSFSPYFYALPGDEPERVKERILASGAAEAIQKVEIEEKRLFGTPRVALRITVSHPQDVPRIRERIRRVEGVDLILEHDILFVRRYLIDRGIKPLTWLRLEVEERDGRALLRGVEQLEEEPPELRVAAVAIAVYNPKGAPRSSKDEIIMISVATSDGVEKVLTWREVQGLEQVEVLQDEKEMLLRFAELIKEGDYDVIVGYNTDSFDFPYIRDRLKKLGISLPLGRLDAELEVSRRGALPEARIRGRAHVDLYPIVRRHVKLNSYVLESVVEELLGIKKEKLDGERLFTYWDEGGEKRALLARYALEDARVTLALAEKFLPLYCELSTIVGQSLNDVARMTSGQLVEWLLMRYATPRGELIPNHPAGEEYAARARATYAGGYVREPKRGLVEHIAVFRFRSFGPSIIVSHNIDPSTLIVGNCEENRAPELEYCFSLEREGFIPAILKELIRRRAEIKRELKRSEGDRRRTLSFAEKALKILANSFYGYMGYPRARWYRRECAESVAAFARMYIKQVMRIAEEEFKLEVVYGDTDSLFVVIPPEKRELAQKFLQKVNESMPGIIELEFEGFYRRGLFVTKKRYALLSEDGKMVVKGLEFVRRDWAPIARETQKEVLRILLEEADPEKAARLVRDVIERIRQRRVSLEDITIYTQLTKRIKSYKSLEPHVVAAQKLKERGREVAPGMIIGYIITKGTKGISQRATPVEFARLEDYDPEYYIDNQILPAIQRIFEAIGYTRDYLKEGITQTSLSRWF

SEQ ID NO: 2191 - protein, 792 aa, unidentified
  REGION 1..792: note = Description of Unknown: Synthetic polypeptide
MPRILKGFLIDADFETVEGRALIRLFLRGEEGSFVVYDDSFSPYFYALPGDEPERVKERILASGAAEAIQKVEIEEKRLFGTPRVALRITVSHPQDVPRIRERIRRVEGVDLILEHDIPFVRRYLIDRGIKPLTWLRLEDEERDGRALLRGVEQLEEEPPELRVAAVAIAVYNPKGAPRSSKDEIIMISVATSDGVEKVLTWREVQGLEQVEVLQDEKEMLLRFAELIKEGDYDVIVGYNTDSFDFPYIRDRLKKLGISLPLGRLDAELEVSRRGALPEARIRGRAHVDLYPIVRRHVKLNSYVLESVVEELLGIKKEKLDGERLFTYWDEGGEKRALLARYALEDARVTLALAEKFLPLYCELSTIVGQSLNDVARMTSGQLVEWLLMRYATPRGELIPNHPAGEEYAARARATYAGGYVREPKRGLVEHIAVFDFRSFGPSIIVSHNIDPSTLIVGNCEENRAPELEYCFSLEREGFIPAILKELIRRRAEIKRELKRSEGDRRRTLSFAEKALKILANSFYGYMGYPRARWYRRECAESVAAFARMYIKQVMRIAEEEFKLEVVYGDTDSLFVVIPPEKRELAQKFLQKVNESMPGIIELEFEGFYRRGLFVTKKRYALLSEDGKMVVKGLEFVRRDWAPIARETQKEVLRILLEEADPEKAARLVRDVIERIRQRRVSLEDITIYTQLTKRIKSYKSLEPHVVAAQKLKERGREVAPGMIIGYIITKGTKGISQRATPVEFARLEDYDPEYYIDNQILPAIQRIFEAIGYTRDYLKEGITQTSLSRWF

SEQ ID NO: 2192 - protein, 789 aa, unidentified
  REGION 1..789: note = Description of Unknown: Synthetic polypeptide
MPRILKGFLIDADFETVEGRALIRLFLRGEEGSFVVYDDSFSPYFYALPGDEPERVKERILASGAAEAIQKVEVEEKRLFGTPRVALRITVSHPQDVPRIRERIRRVEGVDLILEHDILFVRRYLIDRGIKPLTWLRLEVEERDGRALLRGVEQLEEEPPELRVAAVAIAVYNPKGAPRSSKDEIIMISVATSDGVEKVLTWREVQGLEQVEVLQDEKEMLLRFAELIKEGDYDVIVGYNTDSFDFPYIRDRLKKLGISLPLGRLDAELEVSRRGALPEARIRGRAHVDLYPIVRRHVKLNSYDLESVVEELLGIKKEKLDGERLFTYWDEGGEKRALLARYALEDARVTLALAEKFLPLYLELSTIVGQSLNDVARMTSGQLVEWLLMRYATPRGELIPNHPAGEEYAARARATYAGGYVREPKRGLVEHIAVFDFRSFGPSIIVSHNIDPSTLIVGNCEENRAPELEYCFSLEREGFIPAILKELIRRRAEIKRELKRSEGDRRRTLSFAEKALKILANSFYGYMGYPRARWYRRECAESVAAFARMYIKQVMRIAEEEFKLEVVYGDTDSLFVVIPPEKRELAQKFLQKVNESMPGIIELEFEGFYRRGLFVTKKRYALLSEDGKMVVKGLEFVRRDWAPIARETQKEVLRILLEEADPEKAARLVRDVIERIRQRRVSLEDITIYTQLTKRIKSYKSLEPHVVAAQKLKERGREVAPGMIIGYIITKGTKGISQRATPVEFARLEDYDPEYYIDNQILPAIQRIFEAIGYTRDYLKEGITQTSLS

SEQ ID NO: 2193 - protein, 792 aa, unidentified
  REGION 1..792: note = Description of Unknown: Synthetic polypeptide
MPRILKGFLIDADFETVEGRALIRLFLRGEEGSFVVYDDSFSPYFYALPGDEPERVKERILASGAAEAIQKVEIEEKRLFGTPRVALRITVSHPQDVPRIRERIRRVEGVDLILEHDILFVRRYLIDRGIKPLTWLRLEVEERDGRALLRGVEQLEEEPPELRVAAVAIAVYNPKGAPRSSKDEIIMISVATSDGVEKVLTWREVQGLEQVEVLQDEKEMLLRFAELIKEGDYDVIVGYNTDSFDFPYIRDRLKKLGISLPLGRLDAELEVSRRGALPEARIRGRAHVDLYPIVRRHVKLNSYDLESVVEELLGIKKEKLDGERLFTYWDEGGEKRALLARYALEDARVTLALAEKFLPLYCELSTIVGQSLNDVARMTSGQLVEWLLMRYATPRGELIPNHPAGEEYAARARATYAGGYVREPKRGLVEHIAVFDFRSFGPSIIVSHNIDPSTLIVGNCEENRAPELEYCFSLEREGFIPAILKELIRRRAEIKRELKRSEGDRRRTLSFAEKALKILANSFYGYMGYPRARWYRRECAESVAAFARMYIKQVMRIAEEEFKLEVVYNDTDSLFVVIPPEKRELAQKFLQKVNESMPGIIELEFEGFYRRGLFVTKKRYALLSEDGKMVVKGLEFVRRDWAPIARETQKEVLRILLEEADPEKAARLVRDVIERIRQRRVSLEDITIYTQLTKRIKSYKSLEPHVVAAQKLKERGREVAPGMIIGYIITKGTKGISQRATPVEFARLEDYDPEYYIDNQILPAIQRIFEAIGYTRDYLKEGITQTSLSRWF

SEQ ID NO: 2194 - protein, 789 aa, unidentified
  REGION 1..789: note = Description of Unknown: Synthetic polypeptide
MPRILKGFLIDADFETVEGRALIRLFLRGEEGSFVVYDDSFSPYFYALPGDEPERVKERILASGAAEAIQKVEIEEKRLFGTPRVALRITVSHPQDVPRIRERIRRVEGVDLILEHDILFVRRYLIDRGIKPLTWLRLEVEERDGRALLRGVEQLEEEPPELRVAAVAIAVYNPKGAPRSSKDEIIMISVATSDGVEKVLTWREVQGLEQVEVLQDEKEMLLRFAELIKEGDYDVIVGYNTDSFDFPYIRDRLKKLGISLPLGRLDAELEVSRRGALPEARIRGRAHVDLYPIVRRHVKLNNYDLESVVEELLGIKKEKLDGERLFTYWDEGGEKRALLARYALEDARVTLALAEKFLPLYLELSTIVGQSLNDVARMTSGQLVEWLLMRYATPRGELIPNHPAGEEYAARARATYAGGYVREPKRGLVEHIAVFDFRSFGPSIIVSHNIDPSTLIVGNCEENRAPELEYCFSLEREGFIPAILKELIRRRAEIKRELKRSEGDRRRTLSFAEKALKILANSFYGYMGYPRARWYRRECAESVAAFARMYIKQVMRIAEEEFKLEVVYGDTDSLFVVIPPEKRELAQKFLQKVNESMPGIIELEFEGFYRRGLFVTKKRYALLSEDGKMVVKGLEFVRRDWAPIARETQKEVLRILLEEADPEKAARLVRDVIERIRQRRVSLEDITIYTQLTKRIKSYKSLEPHVVAAQKLKERGREVAPGMIIGYIITKGTKGISQRATPVEFARLEDYDPEYYIDNQILPAIQRIFEAIGYTRDYLKEGITQTSLS

SEQ ID NO: 2195 - protein, 789 aa, unidentified
  REGION 1..789: note = Description of Unknown: Synthetic polypeptide
MPRILKGFLIDADFETVEGRALIRLFLRGEEGSFVVYDDSFSPYFYALPGDEPERVKERILASGAAEAIQKVEIEEKRLFGTPRVALRITVSHPQDVPRIRERIRRVEGVDLILEHDILFVRRYLIDRGIKPLTWLRLEVEERDGRALLRGVEQLEEEPPELRVAAVAIAVYNPKGAPRSSKDEIIMISVATSDGVEKVLTWREVQGLEQVEVLQDEKEMLLRFAELIKEGDYDVIVGYNTDSFDFPYIRDRLKKLGISLPLGRLDAELEVSRRGALPEARIRGRAHVDLYPIVRRHVKLNSYVLESVVEELLGIKKEKLDGERLFTYWDEGGEKRALLARYALEDARVTLALAEKFLPLYLELSTIVGQSLNDVARMTSGQLVEWLLMRYATPRGELIPNHPAGEEYAARARATYAGGYVREPKRGLVEHIAVFDFRSFGPSIIVSHNIDPSTLIVGNCEENRAPELEYCFSLEREGFIPAILKELIRRRAEIKRELKRSEGDRRRTLSFAEKALKILANSFYGYMGYPRARWYRRECAESVAAFARMYIKQVMRIAEEEFKLEVVYGDTDSLFVVIPPEKRELAQKFLQKVNESMPGIIELEFEGFYRRGLFVTKKRYALLSEDGKMVVKGLEFVRRDWAPIARETQKEVLRILLEEADPEKAARLVRDVIERIRQRRVSLEDITIYTQLTKRIKSYKSLEPHVVAAQKLKERGREVAPGMIIGYIITKGTKGISQRATPVEFARLEDYDPEYYIDNQILPAIQRIFEAIGYTRDYLKEGITQTSLS

SEQ ID NO: 2196 - protein, 792 aa, unidentified
  REGION 1..792: note = Description of Unknown: Synthetic polypeptide
MPRILKGFLIDADFETVEGRALIRLFLRGEEGSFVVYDDSFSPYFYALPGDEPERVKERILASGAAEAIQKVEIEEKRLFGTPRVALRITVSHPQDVPRIRERIRRVEGVDLILEHDILFVRRYLIDRGIKPLTWLRLEVEERDGRALLRGVEQLEEEPPELRVAAVAIAVYNPKGAPRSSKDEIIMISVATSDGVEKVLTWREVQGLEQVEVLQDEKEMLLRFAELIKEGDYDVIVGYNTDSYDFPYIRDRLKKLGISLPLGRLDAELEVSRRGALPEARIRGRAHVDLYPIVRRHVKLNSYVLESVVEELLGIKKEKLDGERLFTYWDEGGEKRALLARYALEDARVTLALAEKFLPLYCELSTIVGQSLNDVARMTSGQLVEWLLMRYATPRGELIPNHPAGEEYAARARATYAGGYVREPKRGLVEHIAVFDFRSFGPSIIVSHNIDPSTLIVGNCEENRAPELEYCFSLEREGFIPAILKELIRRRAEIKRELKRSEGDRRRTLSFAEKALKILANSFYGYMGYPRARWYRRECAESVAAFARMYIKQVMRIAEEEFKLEVVYGDTDSLFVVIPPEKRELAQKFLQKVNESMPGIIELEFEGFYRRGLFVTKKRYALLSEDGKMVVKGLEFVRRDWAPIARETQKEVLRILLEEADPEKAARLVRDVIERIRQRRVSLEDITIYTQLTKRIKSYKSLEPHVVAAQKLKERGREVAPGMIIGYIITKGTKGISQRATPVEFARLEDYDPEYYIDNQILPAIQRIFEAIGYTRDYLKEGITQTSLSRWF

SEQ ID NO: 2197 - protein, 792 aa, unidentified
  REGION 1..792: note = Description of Unknown: Synthetic polypeptide
MPRILKGFLIDADFETVEGRALIRLFLRGEEGSFVVYDDSFSPYFYALPGDEPERVKERILASGAAEAIQKVEIEEKRLFGTPRVALRITVSHPQDVPRIRERIRRVEGVDLILEHDILFVRRYLIDRGIKPLTWLRLEVEERDGRALLRGVEQLEEEPPELRVAAVAIAVYNPKGAPRSSKDEIIMISVATSDGVEKVLTWREVQGLEQVEVLQDEKEMLLRFAELIKEGDYDVIVGYNTDSFDFPYIRDRLKKLGISLPLGRLDAELEVSRRGALPEARIRGRAHVDLYPIVRRHVKLNSYVLESVVEELLGIKKEKLDGERLFTYWDEGGEKRALLARYALEDARVTLALAEKFLPLYVELSTIVGQSLNDVARMTSGQLVEWLLMRYATPRGELIPNHPAGEEYAARARATYAGGYVREPKRGLVEHIAVFDFRSFGPSIIVSHNIDPSTLIVGNCEENRAPELEYCFSLEREGFIPAILKELIRRRAEIKRELKRSEGDRRRTLSFAEKALKILANSFYGYMGYPRARWYRRESAESVAAFARMYIKQVMRIAEEEFKLEVVYGDTDSLFVVIPPEKRELAQKFLQKVNESMPGIIELEFEGFYRRGLFVTKKRYALLSEDGKMVVKGLEFVRRDWAPIARETQKEVLRILLEEADPEKAARLVRDVIERIRQRRVSLEDITIYTQLTKRIKSYKSLEPHVVAAQKLKERGREVAPGMIIGYIITKGTKGISQRATPVEFARLEDYDPEYYIDNQILPAIQRIFEAIGYTRDYLKEGITQTSLSRWF

SEQ ID NO: 2198 - protein, 792 aa, unidentified
  REGION 1..792: note = Description of Unknown: Synthetic polypeptide
MPRILKGFLIDADFETVEGRALIRLFLRGEEGSFVVYDDSFSPYFYALPGDEPERVKERILASGAAEAIQKVEIEEKRLFGTPRVALRITVSHPQDVPRICERIRRVEGVDLILEHDFLFVRRYLIDRGIKPLTWLRLEVEEREGRALLRGVEQLEEEPPELRVAAVAIAVYNPKGAPRSSKDEIIMISVATSDGVEKVLTWREVQGLEQVEVLQDEKEMLLRFAELIKEGDYDVIVGYNTDSFDFPYIRDRLKKLGISLPLGRLDAELEVSRRGALPEARIRGRAHVDLYPIVRRHVKLNSYVLESVVEELLGIKKEKLDGERLFTYWDEGGEKRALLARYALEDARVTLALAEKFLPLYCELSTIVGQSLNDVARMTSGQLVEWLLMRYATPRGELIPNHPAGEEYAARARATYAGGYVREPKRGLVEHIAVFDFRSFGPSIIVSHNIDPSTLIVGNCEENRAPELEYCFSLEREGFIPAILKELIRRRAEIKRELKRSEGDRRRTLSFAEKALKILANSFYGYMGYPRARWYRRECAESVAAFARMYIKQVMRIAEEEFKLEVVYGDTDSLFVVIPPEKRELAQKFLQKVNESMPGIIELEFEGFYRRGLFVTKKRYALLSEDGKMVVKGLEFVRRDWAPIARETQKEVLRILLEEADPEKAARLVRDVIERIRQRRVSLEDITIYTQLTKRIKSYKSLEPHVVAAQKLKERGREVAPGMIIGYIITKGTKGISQRATPVEFARLEDYDPEYYIDNQILPAIQRIFEAIGYTRDYLKEGITQTSLSRWF

SEQ ID NO: 2199 - protein, 789 aa, unidentified; identical to SEQ ID NO: 2143
  REGION 1..789: note = Description of Unknown: Synthetic polypeptide

SEQ ID NO: 2200 - protein, 789 aa, unidentified
  REGION 1..789: note = Description of Unknown: Synthetic polypeptide
MPRILKGFLIDADFETVEGRALIRLFLRGEEGSFVVYDDSFSPYFYALPGDEPERVKERILASGAAEAIQKVEIEEKRLFGTPRVALRITVSHPQDVPRIRERIRRVEGVDLILEHDILFVRRYLIDRGIKPLTWLRLEVEERDGRALLRGVEQLEEEPPELRVAAVAIAVYNPKGAPRSSKDEIIMISVATSDGVEKVLTWREVQGLEQVEVLQDEKEMLLRFAELIKEGDYDVIVGYNTDSFDFPYIRDRLKKLGISLPLGRLDAELEVSRRGALPEARIRGRAHVDLYPIVRRHVKLNSYDLESVVEELLGIKKVKLDGERLFTYWDEGGEKRALLARYALEDARVTLALAEKFLPLYLELSTIVGQSLNDVARMTSGQLVEWLLMRYATPRGELIPNHPAGEEYAARARATYAGGYVREPKRGLVEHIAVFDFRSFGPSIIVSHNIDPSTLIVGNCEENRAPELEYCFSLEREGFIPAILKELIRRRAEIKRELKRSEGDRRRTLSFAEKALKILANSFYGYMGYPRARWYRRECAESVAAFARMYIKQVMRIAEEEFKLEVVYGDTDSLFVVIPPEKRELAQKFLQKVNESMPGIIELEFEGFYRRGLFVTKKRYALLSEDGKMVVKGLEFVRRDWAPIARETQKEVLRILLEEADPEKAARLVRDVIERIRQRRVSLEDITIYTQLTKRIKSYKSLEPHVVAAQKLKERGREVAPGMIIGYIITKGTKGISQRATPVEFARLEDYDPEYYIDNQILPAIQRIFEAIGYTRDYLKEGITQTSLS

SEQ ID NO: 2201 - protein, 792 aa, unidentified; identical to SEQ ID NO: 1727
  REGION 1..792: note = Description of Unknown: Synthetic polypeptide

SEQ ID NO: 2202 - protein, 792 aa, unidentified
  REGION 1..792: note = Description of Unknown: Synthetic polypeptide
MPRILKGFLIDADFETVEGRALIRLFLRGEEGSFVVYDDSFSPYFYALPGDEPERVKERILASGAAEAIQKVEIEEKRLFGTPRVALRITVSHPQDVPRIRERIRRVEGVDLILEHDILFVRRYLIDRGIKPLTWLRLEVEERDGRALLRGVEQLEEEPPELRVAAVAIAVYNPKGAPRSSKDEIIMISVATSDGVEKVLTWREVQGLEQVEVLQDEKEMLLRFAELIKEGDYDVIVGYNTDSFDFPYIRDRLKKLGISLPLGRLDAELEVSRRGALPEARIRGRAHVDLYPIVRRHVKLNSYVLESVVEELLGIKKEKLDGERLFTYWDEGGEKRALLARYALEDARVTLALAEKFLPLYCELSTIVGQSLNDVARMTSGQLVEWLLMRYATPRGELIPNHPAGEEYAARARATYAGGYVREPKRGLVEHIAVFDFRSFGPSIIVSHNIDPSTLIVGNCEENRAPELEYCFSLEREGFIPAILKELIRRRAEIKRELKRSEGDRRRTLSFAEKALKILANSFYGYMGYPRARWYRRECAESVAAFARMYIKQVMRIAEEEFKLEVVYGDTDSLFVVIPPEKRELAQKFLQKVNESMPGIIELEFEGFYRRGLFVTKKRYALLSEDGKMVVKGLEFVRDDWAPIARETQKEVLRILLEEADPEKAARLVRDVIERIRQRRVSLEDITIYTQLTKRIKSYKSLEPHVVAAQKLKERGREVAPGMIIGYIITKGTKGISQRATPVEFARLEDYDPEYYIDNQILPAIQRIFEAIGYTRDYLKEGITQTSLSRWF

SEQ ID NO: 2203 - protein, 792 aa, unidentified
  REGION 1..792: note = Description of Unknown: Synthetic polypeptide
MPRILKGFLIDADFETVEGRALIRLFLRGEEGSFVVYDDSFSPYFYALPGDEPERVKERILASGAAEAIQKVEIEEKRLFGTPRVALRITVSHPQDVPRIRERIRRVEGVDLILEHDILFVRRYLIDRGIKPLTWLRLEVEERDGRALLRGVEQLEEEPPELRVAAVAIAVYNPKGAPRSSKDEIIMISVATSDGVEKVLTWREVQGLEQVEVLQDEKEMLLRFAELIKEGDYDVIVGYNTDSSDFPYIRDRLKKLGISLPLGRLDAELEVSRRGALPEARIRGRAHVDLYPIVRRHVKLNSYVLESVVEELLGIKKEKLDGERLFTYWDEGGEKRALLARYALEDARVTLALAEKFLPLYCELSTIVGQSLNDVARMTSGQLVEWLLMRYATPRGELIPNHPAGEEYAARARATYAGGYVREPKRGLVEHIAVFDFRSFGPSIIVSHNIDPSTLIVGNCEENRAPELEYCFSLEREGFIPAILKELIRRRAEIKRELKRSEGDRRRTLSFAEKALKILANSFYGYMGYPRARWYRRECAESVAAFARMYIKQVMRIAEEEFKLEVVYGDTDSLFVVIPPEKRELAQKFLQKVNESMPGIIELEFEGFYRRGLFVTKKRYALLSEDGKMVVKGLEFVRRDWAPIARETQKEVLRILLEEADPEKAARLVRDVIERIRQRRVSLEDITIYTQLTKRIKSYKSLEPHVVAAQKLKERGREVAPGMIIGYIITKGTKGISQRATPVEFARLEDYDPEYYIDNQILPAIQRIFEAIGYTRDYLKEGITQTSLSRWF

SEQ ID NO: 2204 - protein, 792 aa, unidentified
  REGION 1..792: note = Description of Unknown: Synthetic polypeptide
MPRILKGFLIDADFETVEGRALIRLFLRGEEGSFVVYDDSFSPYFYALPGDEPERVKERILASGAAEAIQKVEIEEKRLFGTPRVALRITVSHPQDVPRIRERIRRVEGVDLILEHDILFVRRYLIDRGIKPLTWLRLEVEERDGRALLRGVEQLEEEPPELRVAAVAIAVYNPKGAPRSSKDEIIMISVATSDGVEKVLTWREVQGLEQVEVLQDEKEMLLRFAELIKEGDYDVIVGYNTDSFDFPYIRDRLKKPGISLPLGRLDAELEVSRRGALPEARIRGRAHVDLYPIVRRHVKLNSYVLESVVEELLDIKKEKLDGERLFTYWDEGSEKRALLARYALEDARVTLALAEKFLPLYCELSTIVGQSLNDVARMTSGQLVEWLLMRYATPRGELIPNHPAGEEYAARARATYAGGYVREPKRGLVEHIAVFDFRSFGPSIIVSHNIDPSTLIVGNCEENRAPELEYCFSLEREGFIPAILKELIRRRAEIKRELKRSEGDRRRTLSFAEKALKILANSFYGYMGYPRARWYRRECAESVAAFARMYIKQVMRIAEEEFKLEVVYGDTDSLFVVIPPEKRELAQKFLQKVNESMPGIIELEFEGFYRRGLFVTKKRYALLSEDGKMVVKGLEFVRRDWAPIARETQKEVLRILLEEADPEKAARLVRDVIERIRQRRVSLEDITIYTQLTKRIKSYKSLEPHVVAAQKLKERGREVAPGMIIGYIITKGTKGISQRATPVEFARLEDYDPEYYIDNQILPAIQRIFEAIGYTRDYLKEGITQTSLSRWF

SEQ ID NO: 2205 - protein, 792 aa, unidentified
  REGION 1..792: note = Description of Unknown: Synthetic polypeptide
MPRILKGFLIDADFETVEGRALIRLFLRGEEGSFVVYDDSFSPYFYALPGDEPERVKERILASGAAEAIQKVEIEEKRLFGTPRVALRITVSHPQDVPRIRERIRRVEGVDLILEHDILFVRRYLIDRGIKPLTWLRLEVEERDGRALLRGVEQLEEEPPELRVAAVAIAVYNPKGAPRSSKDEIIMISVATSDGVEKVLTWREVQGLEQVEVLQDEKEMLLRFAELIKEGDYDVIVGYNTDSFDFPYIRDRLKKLGISLPLGRLDAELEVSRRGALPEARIRGRAHVDLYPIVRRHVKLNSYVLESVVEELLGIKKEKLDGERLFTYWDEGGEKRALLARYALEDARVTLALAEKFLPLYCELSTIVGQSLNDVARMTSGQLVEWLLMRYATPRGELIPNHPAGEEYAARARATYAGGYVREPKRGLVEHIAVFDFRSFGPSIIVSHNIDPSTLIVGNCEENRAPELEYCFSLEREGFIPAILKELIRRRAEIKRELKRSEGDRRRTLSFAEKALKILADSFYGYMGYPRARWYRRECAESVAAFARMYIKQVMRIAEEEFKLEVVYGDTDSLFVVIPPEKRELAQKFLQKVNESMPGIIELEFEGFYRRGLFVTKKRYALLSEDGKMVVKGLEFVRRDWAPIARETQKEVLRILLEEADPEKAARLVRDVIERIRQRRVSLEDITIYTQLTKRIKSYKSLEPHVVAAQKLKERGREVAPGMIIGYIITKGTKGISQRATPVEFARLEDYDPEYYIDNQILPAIQRIFEAIGYTRDYLKEGITQTSLSRWF

SEQ ID NO: 2206 - protein, 790 aa, unidentified
  REGION 1..790: note = Description of Unknown: Synthetic polypeptide
MPRILKGFLIDADFETVEGRALIRLFLRGEEGSFVVYDDSFSPYFYALPGDEPERVKERILASGAAEAIQKVEIEEKRLFGTPRVALRITVSHPQDVPRIRERIRRVEGVDLILEHDILFVRRYLIDRGIKPLTWLRLEVEERDGRALLRGVEQLEEEPPELRVAAVAIAVYNPKGAPRSSKDEIRMISVATSDGVEKVLTWREVQGLEQVEVLQDEKEMLLRFAELIKEGDYDVIVGYNTDSFDFPYIRDRLKKLGISLPLGRLDAELEVSRRGALPEARIRGRAHVDLYPIVRRHVKLNSYVLESVVEELLGIKKEKLDGERLFTYWDEGGEKRALLARYALEDARVTLALAEKFLPLYCELSTIVGQSLNDVARMTSGQLVEWLLMRYATPRGELIPNHPAGEEYAARARATYAGGYVREPKRGLVEHIAVFDFRSFGPSIIVSHNIDPSTLIVGNCEENRAPELEYCFSLEREGFIPAILKELIRRRAEIKRELKRSEGDRRRTLSFAEKALKILANSFYGYMGYPRARWYRRECAESVAAFARMYIKQVMRIAEEEFKLEVVYGDTDSLFVVIPPEKRELAQKFLQKVNESMPGIIELEFEGFYRRGLFVTKKRYALLSEDGKMVVKGLEFVRRDWAPIARETQKEVLRILLEEADPEKAARLVRDVIERIRQRRVSLEDITIYTQLTKRIKSYKSLEPHVVAAQKLKERGREVAPGMIIGYIITKGTKGISQRATPVEFARLEDYDPEYYIDNQILPAIQRIFEAIGYTRDYLKEGITQTSLSR

SEQ ID NO: 2207 - protein, 792 aa, unidentified
  REGION 1..792: note = Description of Unknown: Synthetic polypeptide
MPRILKGFLIDADFETVEGRALIRLFLRGEEGSFVVYDDSFSPYFYALPGDEPERVKERILASGAAEAIQKVEIEEKRLFGTPRVALRITVSHPQDVPRIRERIRRVEGVDLILEHDILFVRRYLIDRGIKPLTWLRLEVEERDGRALLRGVEQLEEEPPELRVAAVAIAVYNPKGAPRSSKDEIIMISVATSDGVEKVLTWREVQGLEQVEVLQDEKEMLLRFAELIKEGDYDVIVGYNTDSFDFPYIRDRLKKLGISLPLGRLDAELEVSRRGALPEARIRGRAHVDLYPIVRRHVKLNSYVLESVVEELLGIKKEKLDGERLFTYWDEGGEKRALLARYALEDARVTLALAEKFLPLYCELSTIVGQSLNDVARMTSGQLVEWLLMRYATPRGELAPNHPAGEEYAARARATYAGGYVREPKRGLVEHIAVFDFRSFGPSIIVSHNIDPSTLIVGNCEENRAPELEYCFSLEREGFIPAILKELIRRRAEIKRELKRSEGDRRRTLSFAEKALKILANSFYGYMGYPRARWYRRECAESVAAFARMYIKQVMRIAEEEFKLEVVYGDTDSLFVVIPPEKRELAQKFLQKVNESMPGIIELEFEGFYRRGLFVTKKRYALLSEDGKMVVKGLEFVRRDWAPIARETQKEVLRILLEEADPEKAARLVRDVIERIRQRRVSLEDITIYTQLTKRIKSYKSLEPHVVAAQKLKERGREVAPGMIIGYIITKGTKGISQRATPVEFARLEDYDPEYYIDNQILPAVQRIFEAIGYTRDYLKEGITQTSLSRWF

SEQ ID NO: 2208 - protein, 792 aa, unidentified
  REGION 1..792: note = Description of Unknown: Synthetic polypeptide
MPRILKGFLIDADFETVEGRALIRLFLRGEEGSFVVYDDSFSPYFYALPGDEPERVKERILASGAAEAIQKVEIEEKRLFGTPRVALRITVSHPQDVPRIRERIRRVEGVDLILEHDILFVRRYLIDRGIKPLTWLRLEVEERDGRALLRGVEQLEEEPPELRVAAVAIAVYNPKGAPRSSKDEIIMISVATSDGVEKVLTWREVQGLEQVEVLQDEKEMLLRFAELIKEGDYDVIVGYNTDSFDFPYIRDRLKKLGISLPLGRLDAELEVSRRGALPEARIRGRAHVDLYPIVRRHVKLNSYVLESVVEELLGIKKEKLDGERLFTYWDEGGEKRALLARYALEDARVTLALAEKFLPLYCELSTIVGQSLNDVARMTSGQLVEWLLTRYATPRGELIPNHPAGEEYAARARATYAGGYVREPKRGLVEHIAVFDFRSFGPSIIVSHNIDPSTLIVGNCEENRAPELEYCFSLEREGFIPAILKELIRRRAEIKRELKRSEGDRRRTLSFAEKALKILANSFYGYMGYPRARWYRRECAESVAAFARMYIKQVMRIAEEEFKLEVVYGDTDSLFVVIPPEKRELAQKFLQKVNESMPGIIELEFEGFYRRGLFVTKKRYALLSEDGKMVVKGLEFVRRDWAPIARETQKEVLRILLEEADPEKAARLVRDVIERIRQRRVSLEDITIYTQLTKRIKSYKSLEPHVVAAQKLKERGREVAPGMIIGYIITKGTKGISQRATPVEFARLEDYDPEYYIDNQILPAIQRIFEAIGYTRDYLKEGITQTSLSRWF

SEQ ID NO: 2209 - protein, 792 aa, unidentified
  REGION 1..792: note = Description of Unknown: Synthetic polypeptide
MPRILKGFLIDADFETVEGRALIRLFLRGEEGSFVVYDDSFSPYFYALPGDEPERVKERILASGAAEAIQKVEIEEKRLFGTPRVALRITVSHPQDVPRIRERIDRVEGVDLILEHDILFVRRYLIDRGIKPLTWLRLEVEERDGRALLRGVEQLEEEPPELRVAAVAIAVYNPKGAPRSSKDEIIMISVATSDGVEKVLTWREVQGLEQVEVLQDEKEMLLRFAELIKEGDYDVIVGYNTDSFDFPYIRDRLKKLGISLPLGRLDAELEVSRRGALPEARIRGRAHVDLYPIVRRHVKLNSYVLESVVEELLGIKKEKLDGERLFTYWDEGGEKRALLARYALEDARVTLALAEKFLPLYCELSTIVGQSLNDVARMTSGQLVEWLLMRYATPRGELIPNHPAGEEYAARARATYAGGYVREPKRGLVEHIAVFDFRSFGPSIIVSHNIDPSTLIVGNCEENRAPELEYCFSLEREGFIPAILKELIRRRAEIKRELKRSEGDRRRTLSFAEKALKILANSFYGYMGYPRARWYRRECAESVAAFARMYIKQVMRIAEEEFKLEVVYGDTDSLFVVIPPEKRELAQKFLQKVNESMPGIIELEFEGFYRRGLFVTKKRYALLSEDGKMVVKGLEFVRRDWAPIARETQKEVLRILLEEADPEKAARLVRDVIERIRQRRVSLEDITIYTQLTKRIKSYKSLEPHVVAAQKLKERGREVAPGMIIGYIITKGTKGISQRATPVEFARLEDYDPEYYIDNQILPAIQRIFEAIGYTRDYLKEGITQTSLSRWF

SEQ ID NO: 2210 - protein, 792 aa, unidentified
  REGION 1..792: note = Description of Unknown: Synthetic polypeptide
MPRILKGFLIDADFETVEGRALIRLFLRGEEGSFVVYDDSFSPYFYALPGDEPERVKERILASGAAEAIQKVEIEEKRLFGTPRVALRITVSHPQDVPRIRERIRRVEGVDLILEHDILFVRRYLIDRGIKPLTWLRLEVEERDGRALLRGVEQLEEEPPELRVAAVAIAVYIPKGAPRSSKDEIIMISVATSDGVEKVLTWREVQGLEQVEVLQDEKEMLLRFAELIKEGDYDVIVGYNTDSFDFPYIRDRLKKLGISLPLGRLDGELEVSRRGALPEARIRGRAHVDLYLIVRRHVKLNSYVLESVVEELLGIKKEKLDGERLFTYWDEGGEKRALLARYALEDARVTLALAEKFLSLYCELSTIVGQSLNDVARMTSGQLVEWLLMRYATPRGELIPNHPAGEEYAARARATYAGGYVREPKRGLVEHIAVFDFRSFGPSIIVSHNIDPSTLIVGNCEENRAPELEYCFSLEREGFIPAILKELIRRRAEIKRELKRSEGDRRRTLSFAEKALKILANSFYGYMGYPRARWYRRECAESVAAFARMYIKQVMRIAEEEFKLEVVYGDTDSLFVVIPPEKRELAQKFLQKVNESMPGIIELEFEGFYRRGLFVTKKRYALLSEDGKMVVKGLEFVRRDWAPIARETQKEVLRILLEEADPEKAARLVRDVIERIRQRRVSLEDITIYTQLTKRIKSYKSLEPHVVAAQKLKERGREVAPGMIIGYIITKGTKGISQRATPVEFARLEDYDPEYYIDNQILPAIQRIFEAIGYTRDYLKEGITQTSLSRWF

SEQ ID NO: 2211 - protein, 789 aa, unidentified; identical to SEQ ID NO: 1824
  REGION 1..789: note = Description of Unknown: Synthetic polypeptide

SEQ ID NO: 2212 - protein, 792 aa, unidentified
  REGION 1..792: note = Description of Unknown: Synthetic polypeptide
MPRILKGFLIDADFETVEGRALIRLFLRGEEGSFVVYDDSFSPYFYALPGDEPERVKERILASGAAEAIQKVEIEEKRLFGTPRVALRITVSHPQDVPRIRERIRRVEGVDLILEHDILFVRRYLIDRGIKPLTWLRLEVEERDGRALLRGVEQLEEEPPELRVAAVAIAVYNPKGAPRSSKDEIIMISVATSDGVEKVLTWREVQGLEQVEVLQDEKEMLLRFAELIKEGDYDVIVGYNTDSFDFPYIRDRLKKLGISLPLGRLDAELEVSRRGALPEARIRGRAHVDLYPIVRRHVKLNSYVLESVVEELLGIKKEKLDGERLFTYWDEGGEKRALLARYALEDARVTLALAEKFLPLYCELSTIVGQSLNDVARMTSGQLVEWLLMRYATPRGELIPNHPAGEEYAARARATYAGGYVREPKRGLVEHIAVFDFRRFGPSIIVSHNIDPSTLIVGNCEENRAPELEYCFSLEREGFIPAILKELIRRRAEIKRELKRSEGDRRRTLSFAEKALKILANSFYGYMGYPRARWYRRECAESVAAFARMYIKQVMRIAEEEFKLEVVYGDTDSLFVVIPPEKRELAQKFLQKVNESMPGIIELEFEGFYRRGLFVTKKRYALLSEDGKMVVKGLEFVRRDWAPIARETQKEVLRILLEEADPEKAARLVRDVIERIRQRRVSLEDITIYTQLTKRIKSYKSLEPHVVAAQKLKERGREVAPGMIIGYIITKGTKGISQRATPVEFARLEDYDPEYYIDNQILPAIQRIFEAIGYTRDYLKEGITQTSLSRWF

SEQ ID NO: 2213 - protein, 792 aa, unidentified
  REGION 1..792: note = Description of Unknown: Synthetic polypeptide
MPRILKGFLIDADFETVEGRALIRLFLRGEEGSFVVYDDSFSPYFYALPGDEPERVKERILASGAAEAIQKVEIEEKRLFGTPRVALRITVSHPQDVPRIRERIRRVEGVDLILEHDILFVRRYLIDRGIKPLTWLRLEVEERDGRALLRGVEQLEEEPPELRVAAVAIAVYNPKGAPRSSKDEIIMISVATSDGVEKVLTWREVQGLEQVEVLQDEKEMLLRFAELIKEGDYDVIVGYNTDSFDFPYIRDRLKKLGISLPLGRLDAELEVSRRGALPEARIRGRAHVDLYPIVRRHVKLNSYVLESVVEELRGIKKEKLDGERLFTYWDEGGEKRALLARYALEDARVTLALAEKFLPLYCELSTIVGQSLNDVARMTSGQLVEWLLMRYATPRGELIPNHPAGEEYAARARATYAGGYVREPKRGLVEHIAVFDFRSFGPSIIVSHNIDPSTLIVGNCEENRAPELEYCFSLEREGFIPAILKELIRRRAEIKRELKRSEGDRRRTLSFAEKALKILANSFYGYMGYPRARWYRRECAESVAAFARMYIKQVMRIAEEEFKLEVVYGDTDSLFVVIPPEKRELAQKFLQKVNESMPGIIELEFEGFYRRGLFVTKKRYALLSEDGKMVVKGLEFVRRDWAPIARETQKEVLRILLEEADPEKAARLVRDVIERIRQRRVSLEDITIYTQLTKRIKSYKSLEPHVVAAQKLKERGREVAPGMIIGYIITKGTKGISQRATPVEFARLEDYDPEYYIDNQILPAIQRIFEAIGYTRDYLKEGITQTSLSRWF

SEQ ID NO: 2214 - protein, 792 aa, unidentified
  REGION 1..792: note = Description of Unknown: Synthetic polypeptide
MPRILKGFLIDADFETVEGRALIRLFLRGEEGSFVVYDDSFSPYFYALPGDEPERVKERILASGAAEAIQKVEIEEKRLFGTPRVALRITVSHPQDVPRIRERIRRVEGVDLILEHDILFVRRYLIDRGIKPLTWLRLEVEERDGRALLRGVEQLEEEPPELRVAAVAIAVYNPKGAPRSSKDEIRMISVATSDGVEKVLTWREVQGLEQVEVLQDEKEMLLRFAELIKEGDYDVIVGYNTDSFDFPYIRDRLKKLGISLPLGRLDAELEVSRRGALPEARIRGRAHVDLYPIVRRHVKLNSYVLESVVEELLGIKKEKLDGERLFTYWDEGGEKRALLARYALEDARVTLALAEKFLPLYCELSTIVGQSLNDVARMTSGQLVEWLLMRYATPRGELIPNHPAGEEYAARARATYAGGYVREPKRGLVEHIAVFDFRSFGPSIIVSHNIDPSTLIVGNCEENRAPELEYCFSLEREGFIPAILKELIRRRAEIKRELKRSEGDRRRTLSFAEKALKILANSFYGYMGYPRARWYRRECAESVAAFARMYIKQVMRIAEEEFKLEVVYGDTDSLFVVIPPEKRELAQKFLQKVNESMPGIIELEFEGFYRRGLFVTKKRYALLSEDGKMVVKGLEFVRRDWAPIARETQKEVLRILLEEADPEKAARLVRDVIERIRQRRVSLEDITIYTQLTKRIKSYKSLEPHVVAAQKLKERGREVAPGMIIGYIITKGTKGISQRATPVEFARLEDYDPEYYIDNQILPAIQRIFEAIGYTRDYLKEGITQTSLSRWF

SEQ ID NO: 2215 - protein, 792 aa, unidentified
  REGION 1..792: note = Description of Unknown: Synthetic polypeptide
MPRILKGFLIDADFETVEGRALIRLFLRGEEGSFVVYDDSFSPYFYALPGDEPERVKERILASGAAEAIQKVEIEEKRLFGTPRVALRITVSHPQDVPRIRERIRRVEGVDLILEHDILFVRRYLIDRGIKPLTWLRLEVEERDGRALLRGVEQLEEEPPELRVAAVAIAVYNPKGAPRSSKDEIIMISVATSDGVEKVLTWREVQGLEQVEVLQDEKEMLLRFAELIKEGDYDVIVGYNTDSFDFPYIRDRLKKLGISLPLGRLDAELEVSRRGYLPEARIRGRAHVDLYPIVRRHVKLNSYVLESVVEELLGIKKEKLDGERLFTYWDEGGEKRALLARYALEDARVTLALAEKFLPLYCELSTIVGQSLNDVARMTSGQLVEWLLMRYATPRGELIPNHPAGEEYAARARATYAGGYVREPKRGLVEHIAVFDFRSFGPSIIVSHNIDPSTLIVGNCEENRAPELEYCFSLEREGFIPAILKELIRRRAEIKRELKRSEGDRRRTLSFAEKALKILANSFYGYMGYPRARWYRRECAESVAAFARMYIKQVMRIAEEEFKLEVVYGDTDSLFVVIPPEKRELAQKFLQKVNESMPGIIELEFEGFYRRGLFVTKKRYALLSEDGKMVVKGLEFVRRDWAPIARETQKEVLRILLEEADPEKAARLVRDVIERIRQRRVSLEDITIYTQLTKRIKSYKSLEPHVVAAQKLKERGREVAPGMIIGYIITKGTKGISQRATPVEFARLEDYDPEYYIDNQILPAIQRIFEAIGYTRDYLKEGITQTSLSRWF

SEQ ID NO: 2216 - protein, 792 aa, unidentified
  REGION 1..792: note = Description of Unknown: Synthetic polypeptide
MPRILKGFLIDADFETVEGRALIRLFLRGEEGSFVVYDDSFSPYFYALPGDEPERVKERILASGAAEAIQKVEIEEKRLFGTPRVALRITVSHPQDVPRIRERIRRVEGVDLILEHDILFVRRYLIDRGIKPLTWLRLEVEERDGRALLRGVEQLEEEPPELRVAAVAIAVYNPKGAPRSSKDEIIMISVATSDGVEKVLTWREVQGLEQVEVLQDEKEMLLRFAELIKEGDYDVIVGYNTDSFDFPYIRDRLKKLGISLPLGRLDAELEVSRRGALPEARIRGRAHVDLYPIVRRHVKLNSYVLESVVEELLGIKKEKLDGERLFTYWDEGGEKRALLARYALEDARVTLALAEKFLPLYCELSTIVGQSLNDVARMTSGQLVEWLLMRYATPRGELIPNHPAGEEYAARARATYAGGYVREPKRGLVEHIAVFDFRSFGPSIIVSHNIDPSTLIVGNCEENRAPELEYCFSLEREGFIPAILKELIRRRAEIKRELKRSEGDRRRTLSFAEKALKILANSFYGYMGYPRARWYRRECAESVAAFARMYIKQVMRIAEEEFKLEVVYGDTDSLFVVIPPEKRELAQKFLQKVNESMPGIIELEFEGFYRRGLFVTKKRYALLSEDGKMVVKGLEFVRRDWAPIARETQKEVLRILLEEADPEKAARLVRDVIERIRQRRVSLEDITIYTQLTKRIKSYKSLEPHVVAAQKLKERGREVAPGMIIGYIITKGTKGISQRATPVEFARLEDYDPEYYIDNQILPAIQRIFEAIGYTRDYLKEGITQTSLSRSF

SEQ ID NO: 2217 - protein, 792 aa, unidentified
  REGION 1..792: note = Description of Unknown: Synthetic polypeptide
MPRILKGFLIDADFETVEGRALIRLFLRGEEGSFVVYDDSFSPYFYALPGDEPERVKERILASGAAEAIQKVEIEEKRLFGTPRVALRITVSHPQDVPRIRERIRRVEGVDLILEHDILFVRRYLIDRGIKPLTWLRLEVEERDGRALLRGVEQLEEEPPELRVAAVAIAVYNPKGAPRSSKDEIIMISVATSDGVEKVLTWREVQGLEQVEVLQDEKEMLLRFAELIKEGDYDVIVGYNTDSFDFPYIRDRLKKLGISLPLGRLDAELEVSRRGALPEARIRGRAHVDLYPIVRRHVKLNSYVLESVVEELLGIKKEKLDGERLFTYWDEGGEKRALLARYALEDARVTLALAEKFLPLYCELSTIVGQSLNDVARMTSGQLVEWLLMRYATPRGELIPNHPAGEEYAARARATYAGGYVREPKRGLVEHIAVFDFRSFGPSIIVSHNIDPSTLIVGNCEENRAPELEYCFSLEREGFIPAILKELIRRRAEIKRELKRSEGDRRRTLSFAEKALKILANSFYGYMGYPRARWYRRECAESVAAFARMYIKQVMRIAEEEFKLEVVYGDTDSLFVVIPPEKRELAQKFLQKVNESMPGIIELEFEGFYRRGLFVTKKRYALLSEDGKMVVKGLEFVRRDWAPIARETQKEVLRILLREADPEKAARLVRDVIERIRQRRVSLEDITIYTQLTKRIKSYKSLEPHVVAAQKLKERGREVAPGMIIGYIITKGTKGISQRATPVEFARLEDYDPEYYIDNQILPAIQRIFEAIGYTRDYLKEGITQTSLSRWF

SEQ ID NO: 2218 - protein, 792 aa, unidentified
  REGION 1..792: note = Description of Unknown: Synthetic polypeptide
MPRILKGFLIDADFETVEGRALIRLFLRGEEGSFVVYDDSFSPYFYALPGDEPERVKERILASGAAEAIQKVEIEEKRLFGTPRVALRITVSHPQDVPRIRERIRRVEGVDLILEHDILFVRRYLIDRGIKPLTWLRLEVEERDGRALLRGVEQLEEEPPELRVAAVAIAVYNPKGAPRSSKDEIIMISVATSDGVEKVLTWREVQGLEQVEVLQDEKEMLLRFAELIKEGDYDVIVGYNTDSFDFPYIRDRLKKLGISLPLGRLDAELEVSRRGALPEARIRGRAHVDLYPIVRRHVKLNSYDLESVVEELLGIKKEKLDGERLFTYWDEGGEKRALLARYALEDARVTLALAEKFLPLYCELSTIVGQSLNDVARMTSGQLVEWLLMRYATPRGELIPNHPAGEEYAARARATYAGGYVREPKRGLVEHIAVFDFRSFGPSIIVSHNIDPSTLIVGNCEENRAPELEYCFSLEREGFIPAILKELIRRRAEIKRELKRSEGDRRRTLSFAEKALKILANSFYGYMGYPRARWYRRECAESVAAFARMYIKQVMRIAEEEFKLEVVYGDTDSLFVVIPPEKRELAQKFLQKVNESMPGIIELEFEGFYRRGLFVTKKRYALLSEDGKMVVKGLEFVRRDWAPIARETQKEVLRILLEEADPEKAARLVRDVIERIRQRRVSLEDITIYTQLTKRIKSYKSLEPHVVAAQKLKEPGREVAPGMIIGYIITKGTKGISQRATPVEFARLEDYDPEYYIDNQILPAIQRIFEAIGYTRDYLKEGITQTSLSRWF

SEQ ID NO: 2219 - protein, 792 aa, unidentified
  REGION 1..792: note = Description of Unknown: Synthetic polypeptide
MPRILKGFLIDADFETVEGRALIRLFLRGEEGSFVVYDDSFSPYFYALPGDEPERVKERILASGAAEAIQKVEIEEKRLFGTPRVALRITVSHPQDVPRIRERIRRVEGVDLILEHDILFVRRYLIDRGIKPLTWLRLEVEERDGRALLRGVEQLEEEPPELRVAAVAIAVYNPKGAPRSSKDEIIMISVATSDGVEKVLTWREVQGLEQVEVLQDEKEMLLRFAELIKEGDYDVIVGYNTDSFDFPYIRDRLKKLGISLPLGRLDAELEVSRRGALPEARIRGRAHVDLYPIVRRHVKLNSYVLESVVEELLGIKKEKLDGERLFTYWDEGGEKRALLARYALEAARVTLALAEKFLPLYLDLSTIVGQSLNDVARMTSGQLVEWLLMRYATPRGELIPNHPAGEEYAARARATYAGGYVREPKRGLVEHIAVFDFRSFGPSIIVSHNIDPSTLIVGNCEENRAPELEYCFSLEREGFIPAILKELIRRRAEIKRELKRSEGDRRRTLSFAEKALKILANSFYGYMGYPRARWYRRECAESVAAFARMYIKQVMRIAEEEFKLEVVYGDTDSLFVVIPPEKRELAQKFLQKVNESMPGIIELEFEGFYRRGLFVTKKRYALLSEDGKMVVKGLEFVRRDWAPIARETQKEVLRILLEEADPEKAARLVRDVIERIRQRRVSLEDITIYTQLTKRIKSYKSLEPHVVAAQKLKERGREVAPGMIIGYIITKGTKGISQRATPVEFARLEDYDPEYYIDNQILPAIQRIFEAIGYTRDYLKEGITQTSLSRWF

SEQ ID NO: 2220 - protein, 792 aa, unidentified
  REGION 1..792: note = Description of Unknown: Synthetic polypeptide
MPRILKGFLIDADFETVEGRALIRLFLRGEEGSFVVYDDSFSPYFYALPGDEPERVKERILASGAAEAIQKVEIEEKRLFGTPRVALRITVSHPQDVPRIRQRIRRVEGVDLILEHDILFVRRYLIDRGIKPLTWLRLEVEERDGRALLRGVEQLEEEPPELRVAAVAIAVYNPKGAPRSSKDEIIMISVATSDGVEKVLTWREVQGLEQVEVLQDEKEMLLRFAELIKEGDYDVIVGYNTDSFDFPYIRDRLKKLGISLPLGRLDAELEVSRRGALPEARIRGRAHVDLYPIVRRHVKLNSYVLESVVEELLGIKKEKLDGERLFTYWDEGGEKRALLARYALEDARVTLALAEKFLPLYCELSTIVGQSLNDVARMTSGQLVEWLLMRYATPRGELIPNHPAGEEYAARARATYAGGYVREPKRGLVEHIAVFDFRSFGPSIIVSHNIDPSTLIVGNCEENRAPELEYCFSLEREGFIPAILKELIRRRAEIKRELKRSEGDRRRTLSFAEKALKILANSFYGYMGYPRARWYRRECAESVAAFARMYIKQVMRIAEEEFKLEVVYGDTDSLFVVIPPEKRELAQKFLQKVNESMPGIIELEFEGFYRRGLFVTKKRYALLSEDGKMVVKGLEFVRRDWAPIARETQKEVLRILLEEADPEKAARLVRDVIERIRQRRVSLEDITIYTQLTKRIKSYKSLEPHVVAAQKLKERGREVAPGMIIGYIITKGTKGISQRATPVEFARLEDYDPEYYIDNQILPAIQRIFEAIGYTRDYLKEGITQTSLSRWF

SEQ ID NO: 2221 - protein, 792 aa, unidentified
  REGION 1..792: note = Description of Unknown: Synthetic polypeptide
MPRILKGFLIDADFETVEGRALIRLFLRGEEGSFVVYDDSFSPYFYALPGDEPERVKERILASGAAEAIQKVEIEEKRLFGTPRVALRITVSHPQDVPRIRERIRRVEGVDLILEHDILFVRRYLIDRGIKPLTWLRLEVEERDGRALLRGVEQLEEEPPELRVAAVAIAVYNPKGAPRSSKDEIIMISVATSDGVEKVLTWREVQGLEQVEVLQDEKEMLLRFAELIKEGDYDVIVGYNTDSFDFPYIRDRLKKLGISLPLGRLDAELEVSRRGALPEARIRGRAHVDLYPIVRRHVKLNSYVLESVVEELLGIKKEKLDGERLFTYWDEGGEKRALLARYALEDARVTLALAEKFLPLYCELSTIVGQSLNDVARMTSGQLVEWLLMRYATPRGELIPNHPAGEEYAARARATYAGGYVREPKRGLVEHIAVFDFRSFGPSIIVSHNIDPSTLIVGNCEENRAPELEYCFSLEREGFIPAILKELIRRRAEIKRELKRSEGDRRRTLSFAEKALKILANSFYGYMGYPRARWYRRECAESVAAFARMYIKQVMRIAEEEFKLEVVYGDTDSLFVVIPPEKRELAQKFLQKVNESMPGIIELEFEGFYRRGLFVTKKRYALLSEDGKMVVKGLEFVRRDWAPIARETQKEVLRILLEEADPEKAARLVRDVIERIRQRRVSLEDITIYTQLTKRIKSYKSLEPHVVAAQKLKERGREVAPGMIIGYIITKGTKGISQRATPVEFARLEDYDPEYYIDNQILPAIQRIFEAIGYTRDYLREGITQTSLSRWF

SEQ ID NO: 2222 - protein, 792 aa, unidentified
  REGION 1..792: note = Description of Unknown: Synthetic polypeptide
MPRILKGFLIDADFETVEGRALIRLFLRGEEGSFVVYDDSFSPYFYALPGDEPERVKERILASGAAEAIQKVEIEEKRLFGTPRVALRITVSHPQDVPRIRERIRRVEGVDLILEHDILFVRRYLIDRGIKPLTWLRLEVEERDGRALLRGVEQLEEEPPELRVAAVAIAVYNPKGAPRSSKDEIIMISVATSDGVEKVLTWREVQGLEQVEVLQDEKEMLLRFAELIKEGDYDVIVGYNTDSFDFPYIRDRLKKLGISLPLGRLDAELEVSRRGALPEARIRGRAHVDLYPIVRRHVKLNSYVLESVVEELLGIKKEKLDGERLFTYWDEGGEKRALLARYALEDARVTLALAEKFLPLYCELSTIVGQSLNDVARMTSGQLVEWLLMRYATPRGELIPNHPAGEEYAARARATYAGGYVREPKRGLVEHIAVFDFRSFGPSIIVSHNIDPSTLIVGNCEENRAPELEYCFSLEREGFIPAILKELIRRRAEIKRELKRSEGDRRRTLSFAEKALKILANSFYGYMGYPRARWYRRECAESVAAFARMYIKQVMRIAEEEFKLEVVYGDTDSLFVVIPPEKRELAQKFLQKVNESMPGIIELEFEGFYRRGLFVTKKRYALLSEDGKMVVKGLEFNRRDWAPIARETQKEVLRILLEEADPEKAARLVRDVIERIRQRRVSLEDITIYTQLTKRIKSYKSLEPHVVAAQKLKERGREVAPGMIIGYIITKGTKGISQRATPVEFARLEDYDPEYYIDNQILPAIQRIFEAIGYTRDYLKEGITQTSLSRWF

SEQ ID NO: 2223 - protein, 792 aa, unidentified
  REGION 1..792: note = Description of Unknown: Synthetic polypeptide
MPRILKGFLIDADFETVEGRALIRLFLRGEEGSFVVYDDSFSPYFYALPGDEPERVKERILASGAAEAIQKVEIEEKRLFGTPRVALRITVSHPQDVPRIRERIRRVEGVDLILEHDILFVRRYLIDRGIKPLTWLRLEVEERDGRALLRGVEQLEEEPPELRVAAVAIAVYNPKGAPRSSKDEIIMISVATSDGVEKVLTWREVQGLEQVEVLQDEKEMLLRFAELIKEGDYDVIVGYNTDSFDFPYIRDRLKKLGISLPLGRLDAELEVSRRGALPEARIRGRAHVDLYPIVRRHVKLNSYDLESVVEELLGIKKERLDGERLFTYWDEGGEKRALLARYALEDARVTLALAEKFLPLYCELSTIVGQSLNDVARMTSGQLVEWLLMRYATPRGELIPNHPAGEEYAARARATYAGGYVREPKRGLVEHIAVFDFRSFGPSIIVSHNIDPSTLIVGNCEENRAPELEYCFSLEREGFIPAILKELIRRRAEIKRELKRSEGDRRRTLSFAEKALKILANSFYGYMGYPRARWYRRECAESVAAFARMYIKQVMRIAEEEFKLEVVYGDTDSLFVVIPPEKRELAQKFLQKVNESMPGIIELEFEGFYRRGLFVTKKRYALLSEDGKMVVKGLEFVRRDWAPIARETQKEVLRILLEEADPEKAARLVRDVIERIRQRRVSLEDITIYTQLTKRIKSYKSLEPHVVAAQKLKERGREVAPGMIIGYIITKGTKGISQRATPVEFARLEDYDPEYYIDNQILPAIQRIFEAIGYTRDYLKEGITQTSLSRWF

SEQ ID NO: 2224 - protein, 792 aa, unidentified
  REGION 1..792: note = Description of Unknown: Synthetic polypeptide
MPRILKGFLIDADFETVEGRALIRLFLRGEEGSFVVYDDSFSPYFYALPGDEPERVKERILASGAAEAIQKVEIEEKRLFGTPRVALRITVSHPQDVPRIRERIRRVEGVDLILEHDILFVRRYLIDRGIKPLTWLRLEVEERDGRALLRGVEQLEEEPPELRVAAVAIAVYNPKGAPRSSKDEIIMISVATSDGVEKVLTWREVQGLEQVEVLQDEKEMLLRFAELIKEGDYDVIVGYNTDSFDFPYIRDRLKKLGISLPLGRLDAELEVSRRGALPEARIRGRAHVDLYPIVRRHVKLNSYVLESVVEELLGIKKEKLDGERLFTYWDEGGEKRALLARYALEDARVTLALAEKFLPLYCELSTIVGQSLNDVARMTSGQLVEWLLMRYATPRGELIPNHPAGEEYAARARATYAGGYVREPKRGLVEHIAVFDFRSFGPSIIVSHNIDPSTLIVGNCEENRAPELEYCFSLEREGFIPAILKELIRRRAEIKRELKRSEGDRRRTLSFAEKALKILANSFYGYMGYPRARWYRRECAESVAAFARMYIKQVMRIAEEEFKLEVVYGDTDSLFVVIPPEKRELAQKFLQKVNESMPGIIELEFEGFYRRGLFVTKKRYALLSEDGKMVVKGLEFVRRDWAPIARETQKEVLRILLEEADPEKAARLVRDVIERIRQRRVSLEDITIYTQLTKRIKSYKSLEPHVVAAQKLKERGREVAPGAIIGYIITKGTKGISQRATPVEFARLEDYDPEYYIDNQILPAIQRIFEAIGYTRDYLKEGITQTSLSRWF

SEQ ID NO: 2225 - protein, 792 aa, unidentified
  REGION 1..792: note = Description of Unknown: Synthetic polypeptide
MPRILKGFLIDADFETVEGRALIRLFLRGEEGSFVVYDDSFSPYFYALPGDEPERVKERILASGAAEAIQKVEIEEKRLFGTPRVALRITVSHPQDVPRIRERIRRVEGVDLILEHDILFVRRYLIDRGIKPLTWLRLEVEERDGRALLRGVEQLEEEPPELRVAAVAIAVYNPKGAPRSSKDEIIMISVATSDGVEKVLTWREVQGLEQVEVLQDEKEMLLRFAELIKEGDYDVIVGYNTDSFDFPYIRDRLKKLGISLPLGRLDAELEVSRRGALPEARIRGRAHVDLYPIVRRHVKLNSYVLESVVEELLGIKKEKLDGERLFTYWDEGGEKRALLARYALEDARVTLALAEKFLPLYCELSTIVGQSLNDVARMTSGQLVEWLLMRYATPRGELIPNHPAGEEYAARARATYAGGYVREPKRGLVEHIAVFDFRSFGPSIIVSHNIDPSTLIVGNCEENRAPELEYCFSLEREGFIPAILKELIRRRAEIKRELKRSEGDRRRTLSFAEKALKILANSFYGYMGYPRARWYRRECAESVAAFARMYIKQVMRIAEEEFKLEVVYGDTDSLFVVIPPEKRELAQKFLQKVNESMPGIIELEFEGFYRRGLFVTKKRYALLSEDGKMVVKGLEFVRRDWAPIARETQKEVLRILLEEADPEKAARLVRDVIERIRQRRVSLEDITIYTQLTKRIKSYKSLEPHVVAAQKLKERGREVAPGMIIGYIITKGTKGISQRATPVEFARLEDYDPEYYIDNLILPAIQRIFEAIGYTRDYLKEGITQTSLSRWF

SEQ ID NO: 2226 - protein, 792 aa, unidentified
  REGION 1..792: note = Description of Unknown: Synthetic polypeptide
MPRILKGFLIDADFETVEGRALIRLFLRGEEGSFVVYDDSFSPYFYALPGDEPERVKERILASGAAEAIQKVEIEEKRLFGTPRVALRITVSHPQDVPRIRERIRRVEGVDLILEHDILFVRRYLIDRGIKPLTWLRLEVEERDGRALLRGVEQLEEEPPELRVAAVAIAVYNPKGAPRSSKDEIIMISVATSDGVEKVLTWHEVQGLEQVEVLQDEKEMLLRFAELIKEGDYDVIVGYNTDSFDFPYIRDRLKKLGISLPLGRLDAELEVSRRGALPEARIRGRAHVDLYPIVRRHVKLNSYVLESVVEELLGIKKEKLDGERLFTYWDEGGEKRALLARYALEDARVTLALAEKFLPLYCELSTIVGQSLNDVARMTSGQLVEWLLMRYATPRGELIPNHPAGEEYAARARATYAGGYVREPKRGLVEHIAVFDFRSFGPSIIVSHNIDPSTLIVGNCEENRAPELEYCFSLEREGFIPAILKELIRRRAEIKRELKRSEGDRRRTLSFAEKALKILANSFYGYMGYPRARWYRRECAESVAAFARMYIKQVMRIAEEEFKLEVVYGDTDSLFVVIPPEKRELAQKFLQKVNESMPGIIELEFEGFYRRGLFVTKKRYALLSEDGKMVVKGLEFVRRDWAPIARETQKEVLRILLEEADPEKAARLVRDVIERIRQRRVSLEDITIYTQLTKRIKSYKSLEPHVVAAQKLKERGREVAPGMIIGYIITKGTKGISQRATPVEFARLEDYDPEYYIDNQILPAIQRIFEAIGYTRDYLKEGITQTSLSRWF

SEQ ID NO: 2227 - protein, 792 aa, unidentified
  REGION 1..792: note = Description of Unknown: Synthetic polypeptide
MPRILKGFLIDADFETVEGRALIRLFLRGEEGSFVVYDDSFSPYFYALPGDEPERVKERILASGAAEAIQKVEIEEKRLFGTPRVALRITVSHPQDVPRIRERIRRVEGVDLILEHDILFVRRYLIDRGIKPLTWLRLEVEEREGRALLRGVEQLEEEPPELRVAAVAIAVYNPKGAPRSSKDEIIMISVATSDGVEKVLTWREVQGLEQVEVLQDEKEMLLRFAELIKEGDYDVIVGYNTDSFDFPYIRDRLKKLGISLPLGRLDAELEVSRRGALPEARIRGRAHVDLYPIVRRHVKLNSYVLESVVEELLGIKKEKLDGERLFTYWDEGGEKRALLARYALEDARVTLALAEKFLPLYCELSTIVGQSLNDVARMTSGQLVEWLLMRYATPRGELIPNHPAGEEYAARARATYAGGYVREPKRGLVEHIAVFDFRSFGPSIIVSHNIDPSTLIVGNCEENRAPELEYCFSLEREGFIPAILKELIRRRAEIKRELKRSEGDRRRTLSFAEKALKILANSFYGYMGYPRARWYRRECAESVAAFARMYIKQVMRIAEEEFKLEVVYGDTDSLFVVIPPEKRELAQKFLQKVNESMPGIIELEFEGFYRRGLFVTKKRYALLSEDGKMVVKGLEFVRRDWAPIARETQKEVLRILLEEADPEKAARLVRDVIERIRQRRVSLEDITIYTQLTKRIKSYKSLEPHVVAAQKLKERGREVAPGMIIGYIITKGTKGISQRATPVEFARLEDYDPEYYIDNQILPAIQRIFEAIGYTRDYLKEGITQTSLSRWF

SEQ ID NO: 2228 - protein, 792 aa, unidentified
  REGION 1..792: note = Description of Unknown: Synthetic polypeptide
MPRILKGFLIDADFETVEGRALIRLFLRGEEGSFVVYDDSFSPYFYALPGDEPERVKERILASGAAEAIQKVEIEEKRLFGTPRVALRITVSHPQDVPRIRERIRRVEGVDLILEHDILFVRRYLIDRGIKPLTWLRLEVEERDGRALLRGVEQLEEEPPELRVAAVAIAVYNPKGAPRSSKDEIIMISVATSDGVEKVLTWREVQGLEQVEVLQDEKEMLLRFAELIKEGDYDVIVGYNTDSFDFPYIRDRLKKLGISLPLGRLDAELEVSRRGALPEARIRGRAHVDLYPIVRRHVKLNSYVLESVVEELLGIKKEKLDGERLFTYWDEGGEKRALLARYALEDARVTLALAEKFLPLYCELSTIVGQSLNDVARMTSGQLVEWLLMRYATPRGELIPNHPAGEEYAARARATYAGGYVREPKRGLVEHIAVFDFRSFGPSIIVSHNIDPSTLIVGNCEENRAPELEYCFSLEREGFIPAILKELIRRRAEIKRELKRSEGDRRRTLSFAEKALKILANSFYGYMGYPRARWYRRECAESVAAFARMYIKQVMRIAEEEFKLEVVYGDTDSLFVVIPPEKRELAQKFLQKVNESMPGIIELEFEGFYRRGLFVTKKRYALLSEDGKMVVKGLEFVRRDWAPIARETQKEVLRILLEEADPEKAARLVRDVIERIRQRRVSLEDITIYTQLTKRIKSYKSLEPHVVAAQKLKERGREVAPGSIIGYIITKGTKGISQRATPVEFARLEDYDPEYYIDNQILPAIQRIFEAIGYTRDYLKEGITQTSLSRWF

SEQ ID NO: 2229 - protein, 792 aa, unidentified
  REGION 1..792: note = Description of Unknown: Synthetic polypeptide
MPRILKGFLIDADFETVEGRALIRLFLRGEEGSFVVYDDSFSPYFYALPGDEPERVKERILASGAAEAIQKVEIEEKRLFGTPRVALRITVSHPQDVPRIRERIRRVEGVDLILEHDILFVRRYLIDRGIKPLTWLRLEVEERDGRALLRGVEQLEEEPPELRVAAVAIAVRNPKGAPRSSKDEIIMISVATSDGVEKVLTWREVQGLEQVEVLQDEKEMLLRFAELIKEGDYDVIVGYNTDSFDFPYIRDRLKKLGISLPLGRLDAELEVSRRGALPEARIRGRAHVDLYPIVRRHVKLNSYDLESVVEELLGIKKEKLDGERLFTYWDEGGEKRALLARYALEDARVTLALAEKFLPLYCELSTIVGQSLNDVARMTSGQLVEWLLMRYATPRGELIPNHPAGEEYAARARATYAGGYVREPKRGLVEHIAVFDFRSFGPSIIVSHNIDPSTLIVGNCEENRAPELEYCFSLEREGFIPAILKELIRRRAEIKRELKRSEGDRRRTLSFAEKALKILANSFYGYMGYPRARWYRRECAESVAAFARMYIKQVMRIAEEEFKLEVVYGDTDSLFVVIPPEKRELAQKFLQKVNESMPGIIELEFEGFYRRGLFVTKKRYALLSEDGKMVVKGLEFVRRDWAPIARETQKEVLRILLEEADPEKAARLVRDVIERIRQRRVSLEDITIYTQLTKRIKSYKSLEPHVVAAQKLKERGREVAPGMIIGYIITKGTKGISQRATPVEFARLEDYDPEYYIDNQILPAIQRIFEAIGYTRDYLKEGITQTSLSRWF

SEQ ID NO: 2230 - protein, 789 aa, unidentified; identical to SEQ ID NO: 1804
  REGION 1..789: note = Description of Unknown: Synthetic polypeptide

SEQ ID NO: 2231 - protein, 792 aa, unidentified
  REGION 1..792: note = Description of Unknown: Synthetic polypeptide
MPRILKGFLIDADFETVEGRALIRLFLRGEEGSFVVYDDSFSPYFYALPGDEPERVKERILASGAAEAIQKVEIEEKRLFGTPRVALRITVSHPQDVPRIRERIRRVEGVDLILEHDILFVRRYLIDRGIKPLTWLRLEVEERDGRALLRGVEQLEEEPPELRVAAVAIAVYNPKGAPRSSKDEIIMISVATSDGVEKVLTWREVQGLEQVEVLQDEKEMLLRFAELIKEGDYDVIVGYNTDSFDFPYIRDRLKKLGISLPLGRLDAELEVSRRGALPEARIRGRAHVDLYPIVRRHVKLNSYVLESVVEELLGIKKEKLDGERLFTYWDEGGEKRALLARYALEDARVTLALAEKFLPLYCELSTIVGQSLNDVARMTSGQLVEWLLMRYATPRGELIPNHPAGEEYAARARATYAGGYVREPKRGLVEHIAVFDFRSFGPSIIVSHNIDPSTLIVGNCEENRAPELEYCFSLEREGFIPAILKELIRRRAEIKRELKRSEGDRRRTLSFAEKALKILANSFYGYMGYPRARWYRRECAESVAAFARMYIKQVMRIAEEEFKLEVVYGDTDSLFVVIPPEKRELAQKFLQKVNESMPGIIELEFEGFYRRGLFVTKKRYALLSEDGKMVVKGLEFVRRDWAPIARETQKEVLRILLEEADPEKVARLVRDVIERIRQRRVSLEDITIYTQLTKRIKSYKSLEPHVVAAQKLKERGREVAPGMIIGYIITKGTKGISQRATPVEFARLEDYDPEYYIDNQILPAIQRIFEAIGYTRDYLKESITQTSLSRWF

SEQ ID NO: 2232 - protein, 792 aa, unidentified; identical to SEQ ID NO: 1848
  REGION 1..792: note = Description of Unknown: Synthetic polypeptide

SEQ ID NO: 2233 - protein, 789 aa, unidentified
  REGION 1..789: note = Description of Unknown: Synthetic polypeptide
MPRILKGFLIDADFETVEGRALIRLFLRGEEGSFVVYDDSFSPYFYALPGDEPERVKERILASGAAEAIQKVEIEEKRLFGTPRVALRITVSHPLDVPRIRERIRRVEGVDLILEHDILFVRRYLIDRGIKPLTWLRLEVEERDGRALLRGVEQLEEEPPELRVAAVAIAVYNPKGAPRSSKDEIIMISVATSDGVEKVLTWREVQGLEQVEVLQDEKEMLLRFAELIKEGDYDVIVGYNTDSFDFPYIRDRLKKLGISLPLGRLDAELEVSRRGALPEARIRGRAHVDLYPIVRRHVKLNSYDLESVVEELLGIKKEKLDGERLFTYWDEGGEKRALLARYALEDARVTLALAEKFLPLYLELSTIVGQSLNDVARMTSGQLVEWLLMRYATPRGELIPNHPAGEEYAARARATYAGGYVREPKRGLVEHIAVFDFRSFGPSIIVSHNIDPSTLIVGNCEENRAPELEYCFSLEREGFIPAILKELIRRRAEIKRELKRSEGDRRRTLSFAEKALKILANSFYGYMGYPRARWYRRECAESVAAFARMYIKQVMRIAEEEFKLEVVYGDTDSLFVVIPPEKRELAQKFLQKVNESMPGIIELEFEGFYRRGLFVTKKRYALLSEDGKMVVKGLEFVRRDWAPIARETQKEVLRILLEEADPEKAARLVRDVIERIRQRRVSLEDITIYTQLTKRIKSYKSLEPHVVAAQKLKERGREVAPGMIIGYIITKGTKGISQRATPVEFARLEDYDPEYYIDNQILPAIQRIFEAIGYTRDYLKEGITQTSLS

SEQ ID NO: 2234 - protein, 792 aa, unidentified; identical to SEQ ID NO: 1727
  REGION 1..792: note = Description of Unknown: Synthetic polypeptide

SEQ ID NO: 2235 - protein, 792 aa, unidentified
  REGION 1..792: note = Description of Unknown: Synthetic polypeptide
MPRILKGFLIDADFETVEGRALIRLFLRGEEGSFVVYDDSFSPYFYALPGDEPERVKERILASGAAEAIQKVEIEEKRLFGTPRVALRITVSHPQDVPRIRERIRRVEGVDLILEHDILFVRRYLIDRGIKPLTWLRLEVEERDGRALLRGVEQLEEEPPELRVAAVAIAVYNPKGAPRSSKDEIIMISVATSDGVEKVLTWREVQGLEQVEVLQDEKEMLLRFAELIKEGDYDVIVGYNTDSFDFPYIRDRLKKLGISLPLGRLDAELEVSRRGALPEARIRGRAHVDLYPIVRRHVKLNSYDLESVVEELLGIKKEKLDGERLFTYFDEGGEKRALLARYALEDARVTLALAEKFLPLYCELSTIVGQSLNDVARMTSGQLVEWLLMRYATPRGELIPNHPAGEEYAARARATYAGGYVREPKRGLVEHIAVFDFRSFGPSIIVSHNIDPSTLIVGNCEENRAPELEYCFSLEREGFIPAILKELIRRRAEIKRELKRSEGDRRRTLSFAEKALKILANSFYGYMGYPRARWYRRECAESVAAFARMYIKQVMRIAEEEFKLEVVYGDTDSLFVVIPPEKRELAQKFLQKVNESMPGIIELEFEGFYRRGLFVTKKRYALLSEDGKMVVKGLEFVRRDWAPIARETQKEVLRILLEEADPEKAARLVRDVIERIRQRRVSLEDITIYTQLTKRIKSYKSLEPHVVAAQKLKERGREVAPGMIIGYIITKGTKGISQRATPVEFARLEDYDPEYYIDNQILPAIQRIFEAIGYTRDYLKEGITQTSLSRWF

SEQ ID NO: 2236 - protein, 792 aa, unidentified
  REGION 1..792: note = Description of Unknown: Synthetic polypeptide
MPRILKGFLIDADFETVEGRALIRLFLRGEEGSFVVYDDSFSPYFYALPGDEPERVKERILASGAAEAIQKVEIEEKRLFGTPRVALRITVSHPQDVPRIRERIRRVEGVDLILEHDILFVRRYLIDRGIKPLTWLRLEVEERDGRALLRGVEQLEEEPPELRVAAVAIAVYNPKGAPRSSKDEIIMISVATSDGVEKVLTWREVQGLEQVEVLQDEKEMLLRFAELIKEGDYDVIVGYNTDSFDFPYIRDRLKKLGISLPLGRLDAELEVSRRGALPEARIRGRAHVDLYPIVRRHVKLNSYDLESVVEELLGIKKEKLDGERLFTYWDEGGEKRALLARYALEDARVTLALAEKFLPLYLELSTIVGQSLNDVARMTSGQLVEWLLMRYATPRGELIPNHPAGEEYAARARATYAGGYVREPKRGLVEHIAVFDFRSFGPSIIVSHNIDPSTLIVGNCEENRAPELEYCFSLEREGFIPAILKELIRRRAEIKRELKRSEGDRRRTLSFAEKALKILANSFYGYMGYPRARWYRRECAESVAAFARMYIKQVMRIAEEEFKLEVVYGDTDSLFVVIPPEKRELAQKFLQKVNESMPGIIELEFEGFYRRGLFVTKKRYALLSEDGKMVVKGLEFVRRDWAPIARETQKEVLRILLEEADPEKAARLVRDVIERIRQRRVSLEDITIYTQLTKRIKSYKSLEPHVVAAQKLKERGREVAPGMIIGYIITKGTKGISQRATPVEFARLEDYDPEYYINNQILPAIQRIFEAIGYTRDYLKEGITQTSLSRWF

SEQ ID NO: 2237 - protein, 792 aa, unidentified
  REGION 1..792: note = Description of Unknown: Synthetic polypeptide
MPRILKGFLIDADFETVEGRALIRLFLRGEEGSFVVYDDSFSPYFYALPGDEPERVKERILASGAAEAIQKVEIEEKRLFGTPRVALRITVSHPQDVPRIRERIRRVEGVDLILEHDILFVRRYLIDRGIKPLTWLRLEVEERDGRALLRGVEQLEEEPPELRVAAVAIAVYNPKGAPRSSKDEIIMISVATSDGVEKVLTWREVQGLEQVEVLQDEKEMLLRFAELIKEGDYDVIVGYNTDSFDFPYIRDRLKKLGISLPLGRLDAELEVSRRGALPEARIRGRAHVDLYPIVRRHVKLNSYDLESVVEELLGIKKEKLDGERLFTYWDEGGEKRALLARYALEDARVTLALAEKFLPLYCELSTIVGQSLNDVARMTSGQLVEWLLMRYATPRGELIPNHPAGEEYAARARATYAGGYVREPKRGLVEHIAVFDFRSFGPSIIVSHNIDPSTLIVGNCEENRAPELEYCFSLEREGFIPAILKELIRRRAEIKRELKRSEGDRRRTLSFAEKALKILANSFYGYMGYPRARWYRRECAESVAAFLRMYIKQVMRIAEEEFKLEVVYGDTDSLFVVIPPEKRELAQKFLQKVNESMPGIIELEFEGFYRRGLFVTKKRYALLSEDGKMVVKGLEFVRRDWAPIARETQKEVLRILLEEADPEKAARLVRDVIERIRQRRVSLEDITIYTQLTKRIKSYKSLEPHVVAAQKLKERGREVAPGMIIGYIITKGTKGISQRATPVEFARLEDYDPEYYIDNQILPAIQRIFEAIGYTRDYLKEGITQTSLSRWF

SEQ ID NO: 2238 - protein, 792 aa, unidentified
  REGION 1..792: note = Description of Unknown: Synthetic polypeptide
MPRILKGFLIDADFETVEGRALIRLFLRGEEGSFVVYDDSFSPYFYALPGDEPERVKERILASGAAEAIQKVEIEEKRLFGTPRVALRITVSHPQDVPRIRERIRRVEGVDLILEHDILFVRRYLIDRGIKPLTWLRLEVEERDGRALLRGVEQLEEEPPELRVAAVAIAVYNPKGAPRSSKDEIIMISVATSDGVEKVLTWREVQGLEQVEVLQDEKEMLLRFAELIKEGDYDVIVGYNTDSFDFPYIRDRLKKLGISLPLGRLDAELEVSRRGALPEARIRGRAHVDLYPIVRRHVKLNSYVLESVVEELLGIKKEKLDGERLFTYWDEGGEKRALLARYALEDARVTLALAEKFLPLYCELSTIVGQSLNDVARMTSGQLVEWLLMRYATPRGELIPNHPAGEEYAARARATYAGGYVREPKRGLVEHIAVFDFRSFGPSIIVSHNIDPSTLIVGNCEENRAPELEYCFALEREGFIPAILKELIRRRAEIKRELKRSEGDRRRTLSFAEKALKILANSFYGYMGYPRARWYRRECAESVAAFARMYIKQVMRIAEEEFKLEVVYGDTDSLFVVIPPEKRELAQKFLQKVNESMPGIIELEFEGFYRRGLFVTKKRYALLSEDGKMVVKGLEFVRRDWAPIARETQKEVLRILLEEADPEKAARLVRDVIERIRQRRVSLEDITIYTQLTKRIKSYKSLEPHVVAAQKLKERGREVAPGMIIGYIITKGTKGISQRATPVEFARLEDYDPEYYIDNQILPAIQRIFEAIGYTRDYLKEGITQTSLSRWF

SEQ ID NO: 2239 - protein, 789 aa, unidentified
  REGION 1..789: note = Description of Unknown: Synthetic polypeptide
MPRILKGFLIDADFETVEGRALIRLFLRGEEGSFVVYDDSFSPYFYALPGDEPERVKERILASGAAEAIQKVEIEEKRLFGTPRVALRITVSHPQDVPRIRERIRRVEGVDLILEHDILFVRRYLIDRGIKPLTWLRLEVEERDGRALLRGVEQLEEEPPELRVAAVAIAVYNPKGAPRSSKDEIIMISVATSDGVEKVLTWREVQGLEQVEVLQDEKEMLLRFAELIKEGDYDVIVGYNTDSFDFPYIRDRLKKLGISLPLGRLDAELEVSRRGALPEARIRGRAHVDLYPIVRRHVKLNSYDLESVVEELLGIKKEKLDGERLFTYWDEGGEKRALLARYALEDARVTLALAEKFLPLYCELSTIVGQSLNDVARMTSGQLVEWLLMRYATPRGELIPNHPAGEEYAARARATYAGGYVREPKRGLVEHIAVFDFRSFGPSIIVSHNIDPSRLIVGNCEENRAPELEYCFSLEREGFIPAILKELIRRRAEIKRELKRSEGDRRRTLSFAEKALKILANSFYGYMGYPRARWYRRECAESVAAFARMYIKQVMRIAEEEFKLEVVYGDTDSLFVVIPPEKRELAQKFLQKVNESMPGIIELEFEGFYRRGLFVTKKRYALLSEDGKMVVKGLEFVRRDWAPIARETQKEVLRILLEEADPEKAARLVRDVIERIRQRRVSLEDITIYTQLTKRIKSYKSLEPHVVAAQKLKERGREVAPGMIIGYIITKGTKGISQRATPVEFARLRDYDPEYYIDNQILPAIQRIFEAIGYTRDYLKEGITQTSLS

SEQ ID NO: 2240 - protein, 792 aa, unidentified
  REGION 1..792: note = Description of Unknown: Synthetic polypeptide
MPRILKGFLIDADFETVEGRALIRLFLRGEEGSFVVYDDSFSPYFYALPGDEPERVKERILASGAAEAIQKVEIEEKRLFGTPRVALRITVSHPQDVPRIRERIRRVEGVDLILEHDILFVRRYLIDRGIKPLTWLRLEVEERDGRALLRGVEQLEEEPPELRVAAVSISVYNPKGAPRSSKDEIIMISVATSDGVEKVLTWREVQGLEQVEVLQDEKEMLLRFAELIKEGDYDVIVGYNTDSFDFPYIRDRLKKLGISLPLGRLDAELEVSRRGALPEARIRGRAHVDLYPIVRRHVKLNSYVLESVVEELLGIKKEKLDGERLFTYWDEGGEKRALLARYALEDARVTLALAEKFLPLYCELSTIVGQSLNDVARMTSGQLVEWLLMRYATPRGELIPNHPAGEEYAARARATYAGGYVREPKRGLVEHIAVFDFRSFGPSIIVSHNIDPSTLIVGNCEENRAPELEYCFSLEREGFIPAILKELIRRRAEIKRELKRSEGDRRRTLSFAEKALKILANSFYGYMGYPRARWYRRECAESVAAFARMYIKQVMRIAEEEFKLEVVYGDTDSLFVVIPPEKRELAQKFLQKVNESMPGIIELEFEGFYRRGLFVTKKRYALLSEDGKMVVKGLEFVRRDWAPIARETQKEVLRILLEEADPEKAARLVRDVIERIRQRRVSLEDITIYTQLTKRIKSYKSLEPHVVAAQKLKERGREVAPGMIIGYIITKGTKGISQRATPVEFARLEDYDPEYYIDNQILPAIQRIFEAIGYTRDYLKEGITQTSLSRWF

SEQ ID NO: 2241 - protein, 792 aa, unidentified
  REGION 1..792: note = Description of Unknown: Synthetic polypeptide
MPRILKGFLIDADFETVEGRALIRLFLRGEEGSFVVYDDSFSPYFYALPGDEPERVKERILASGAAEAIQKVEIEEKRLFGTPRVALRITVSHPQDVPRIRERIRRVEGVDLILEHDILFVRRYLIDRGIKPLTWLRLEVEERDGRALLRGVEQLEEEPPELRVAAVAIAVYNPKGAPRSSKDEIIMISVATSDGVEKVLTWREVQGLEQVEVLQDEKEMLLRFAELIKEGDYDVIVGYNTDSFDFPYIRDRLKKLGISLPLGRLDAELEVSRRGALPEARIRGRAHVDLYPIVRRHVKLNSYDLESVVEELLGIKKEKLDGERLFTYWDEGGEKRALLARYALEDARVTLALAEKFLPLYCELSTIVGQSLNDVARMTSGQLVEWLLMRYATPRGELIPNHPAGEEYAARARATYAGGYVREPKRGLVEHIAVFDFRSFGPSIIVSHNIDPSTLIVGNCEENRAPELEYCFSLEREGFIPAILKELIRRRAEIKRELKRSEGDRRRTLSFAEKALKILANSFYGYMGYPRARWYRRECAESVAAFARMYITQVMRIAEEEFKLEVVYGDTDSLFVVIPPEKRELAQKFLQKVNESMPGIIELEFEGFYRRGLFVTKKRYALLSEDGKMVVKGLEFVRRDWAPIARETQKEVLRILLEEADPEKAARLVRDVIERIRQRRVSLEDITIYTQLTKRIKSYKSLEPHVVAAQKLKERGREVAPGMIIGYIITKGTKGISQRATPVEFARLEDYDPEYYIDNQILPAIQRIFEAIGYTRDYLKEGITQTSLSRWF

SEQ ID NO: 2242 - protein, 792 aa, unidentified
  REGION 1..792: note = Description of Unknown: Synthetic polypeptide
MPRILKGFLIDADFETVEGRALIRLFLRGEEGSFVVYDDSFSPYFYALPGDEPERVKERILASGAAEAIQKVEIEEKRLFGTPRVALRITVSHPQDVPRIRERIRRVEGVDLILEHDILFVRRYLIDRGIKPLTWLRLEVEERDGRALLRGVEQLEEEPPELRVAAVAIAVYNPKGAPRSSKDEIIMISVATSDGVEKVLTWREVQGLEQVEVLQDEKEMLLRFAELIKEGDYDVIVGYNTDSFDFPYIRDRLKKLGISLPLGRLDAELEVSRRGALPEARIRGRAHVDLYPIVRRHVKLNSYVLESVVEELLGIKKEKLDGERLFTYWDEGGEKRALLARYALEDARVTLALAEKFLPLYCELSTIVGQSLNDVARMTSGQLVEWLLMRYATPRGELIPNHPAGEEYAARARATYAGGYVREPKRGLVEHIAVFDFRSFGPSIIVSHNIDPSTLIVGNCEENRAPELEYCFSLEREGFIPAILKELIRRRAEIKRELKRSEGDRRRTLSFAEKALKILANSFYGYMGYPRARWYRRECAESVAAFARMYIKQVMRIAEEEFKLEVVYGDTDSLFVVIPPEKRELAQKFLQKVNESMPGIIELEFEGFYRRGLFVTKKRYALLSEDGKMVVKGLEFVRRDWAPIARETQKEVLRILLEEADPEKAARLVRDVIERIRQRRVSLEDITIYTQLTKRIKSYKSLEPHVVAAQKLKERGREVAPGMIIGYIITKGTKGISQRATPVEFARLEDYDPEYYIDNQILPAIQRIFEAIGYTRDYLKEGITQTSLNRWF

SEQ ID NO: 2243 - protein, 792 aa, unidentified
  REGION 1..792: note = Description of Unknown: Synthetic polypeptide
MPRILKGFLIDADFETVEGRALIRLFLRGEEGSFVVYDDSFSPYFYALPGDEPERVKERILASGAAEAIQKVEIEEKRLFGTPRVALRITVSHPQDVPRIRERIRRVEGVDLILEHDILFVRRYLIDRGIKPLTWLRLEVEERDGRALLRGVEQLEEEPPELRVAAVAIAVRNPKGAPRSSKDEIIMISVATSDGVEKVLTWREVQGLEQVEVLQDEKEMLLRFAELIKEGDYDVIVGYNTDSFDFPYIRDRLKKLGISLPLGRLDAELEVSRRGALPEARIRGRAHVDLYPIVRRHVKLNSYVLESVVEELLGIKKEKLDGERLFTYWDEGGEKRALLARYALEDARVTLALAEKFLPLYLELSTIVGQSLNDVARMTSGQLVEWLLMRYATPRGELIPNHPAGEEYAARARATYAGGYVREPKRGLVEHIAVFDFRSFGPSIIVSHNIDPSTLIVGNCEENRAPELEYCFSLEREGFIPAILKELIRRRAEIKRELKRSEGDRRRTLSFAEKALKILANSFYGYMGYPRARWYRRECAESVAAFARMYIKQVMRIAEEEFKLEVVYGDTDSLFVVIPPEKRELAQKFLQKVNESMPGIIELEFEGFYRRGLFVTKKRYALLSEDGKMVVKGLEFVRRDWAPIARETQKEVLRILLEEADPEKAARLVRDVIERIRQRRVSLEDITIYTQLTKRIKSYKSLEPHVVAAQKLKERGREVAPGMIIGYIITKGTKGISQRATPVEFARLEDYDPEYYIDNQILPAIQRIFEAIGYTRDYLKEGITQTSLSRWF

SEQ ID NO: 2244 - protein, 792 aa, unidentified
  REGION 1..792: note = Description of Unknown: Synthetic polypeptide
MPRILIGFLIDADFETVEGRALIRLFLRGEEGSFVVYDDSFSPYFYALPGDEPERVKERILASGAAEAIQKVEIEEKRLFGTPRVALRITVSHPQDVPRIRERIRRVEGVDLILEHDILFVRRYLIDRGIKPLTWLRLEVEERDGRALLRGVEQLEEEPPELRVAAVAIAVYNPKGAPRSSKDEIIMISVATSDGVEKVLTWREVQGLEQVEVLQDEKEMLLRFAELIKEGDYDVIVGYNTDSFDFPYIRDRLKKLGISLPLGRLDAELEVSRRGALPEARIRGRAHVDLYPIVRRHVKLNSYDLESVVEELLGIKKEKLDGERLFTYWDEGGEKRALLARYALEDARVTLALAEKFLPLYCELSTIVGQSLNDVARMTSGQLVEWLLMRYATPRGELIPNHPAGEEYAARARATYAGGYVREPKRGLVEHIAVFDFRSFGPSIIVSHNIDPSTLIVGNCEENRAPELEYCFSLEREGFIPAILKELIRRRAEIKRELKRSEGDRRRTLSFAEKALKILANSFYGYMGYPRARWYRRECAESVAAFARMYIKQVMRIAEEEFKLEVVYGDTDSLFVVIPPEKRELAQKFLQKVNESMPGIIELEFEGFYRRGLFVTKKRYALLSEDGKMVVKGLEFVRRDWAPIARETQKEVLRILLEEADPEKAARLVRDVIERIRQRRVSLEDITIYTQLTKRIKSYKSLEPHVVAAQKLKERGREVAPGMIIGYIITKGTKGISQRATPVEFARLEDYDPEYYIDNQILPAIQRIFEAIGYTRDYLKEGITQTSLSRWF

SEQ ID NO: 2245 - protein, 792 aa, unidentified
  REGION 1..792: note = Description of Unknown: Synthetic polypeptide
MPRILKGFLIDADFETVEGRALIRLFLRGEEGSFVVYDDSFSPYFYALPGDEPERVKERILASGAAEAIQKVEIEEKRLFGTPRVALRITVSHPQDVPRIRERIRRVEGVDLILEHDILFVRRYLIDRGIKPLTWLRLEVEERDGRALLRGVEQLEEEPPELRVAAVAIAVYNPKGAPRSSKDEIIMISVATSDGVEKVLTWREVQGLEQVEVLQDEKEMLLRFAELIKEGDYDVIVGYNTDSFDFPYIRDRLKKLGISLPLGRLDAELEVSRRGALPEARIRGRAHVDLYPIVRRHVKLNSYVLESVVEELLGIKKEKLDGERLFTYWDEGGEKRALLARYALEAARVTLALAEKFLPLYCELSTIVGQSLNDVARMTSGQLVEWLLMRYATPRGELAPNHPAGEEYAARARATYAGGYVREPKRGLVEHIAVFDFRSFGPSIIVSHNIDPSTLIVGNCEENRAPELEYCFSLEREGFIPAILKELIRRRAEIKRELKRSEGDRRRTLSFAEKALKILANSFYGYMGYPRARWYRRECAESVAAFARMYIKQVMRIAEEEFKLEVVYGDTDSLFVVIPPEKRELAQKFLQKVNESMPGIIELEFEGFYRRGLFVTKKRYALLSEDGKMVVKGLEFVRRDWAPIARETQKEVLRILLEEADPEKAARLVRDVIERIRQRRVSLEDITIYTQLTKRIKSYKSLEPHVVAAQKLKERGREVAPGMIIGYIITKGTKGISQRATPVEFARLEDYDPEYYIDNQILPAIQRIFEAIGYTRDYLKEGITQTSLSRWF

SEQ ID NO: 2246 - protein, 791 aa, unidentified; identical to SEQ ID NO: 1802
  REGION 1..791: note = Description of Unknown: Synthetic polypeptide

SEQ ID NO: 2247 - protein, 792 aa, unidentified
  REGION 1..792: note = Description of Unknown: Synthetic polypeptide
MPRILKGFLIDADFETVEGRALIRLFLRGEEGSFVVYDDSFSPYFYALPGDEPERVKERILASGAAEAIQKVEIEEKRLFGTPRVALRITVSHPQDVPRIRERIRRVEGVDLILEHDILFVRRYLIDRGIKPLTWLRLEVEERDGRALLRGVEQLEEEPPELRVAAVAIAVYNPKGAPRSSKDEIIMISVATSDGVEKVLTWREVQGLEQVEVLQDEKEMLLRFAELIKEGDYDVIVGYNTDSFDFPYIRDRLKKLGISLPLGRLDAELEVSRRGALPEARIRGRAHVDLYPIVRRHVKLNSYDLESVVEELLGIKKEKLDGERLFTYWDEGGEKRALLARYALEDARVTLALAEKFLPLYCELSTIVGQSLNDVARMTSGQLVEWLLMRYATPRGELIPNHPAGEEYAARARATYAGGYVREPKRGLVEHIAVFDFRSFGPSIIVSHNIDPSTLIVGNCEENRAPELEYCFSLEDEGFIPAILKELIRRRAEIKRELKRSEGDRRRTLSFAEKALKILANSFYGYMGYPRARWYRRECAESVAAFARMYIKQVMRIAEEEFKLEVVYGDTDSLFVVIPPEKRELAQKFLQKVNESMPGIIELEFEGFYRRGLFVTKKRYALLSEDGKMVVKGLEFVRRDWAPIARETQKEVLRILLEEADPEKAARLVRDVIERIRQRRVSLEDITIYTQLTKRIKSYKSLEPHVVAAQKLKERGREVAPGMIIGYIITKGTKGISQRATPVEFARLEDYDPEYYIDNQILPAIQRIFEAIGYTRDYLKEGITQTSLSRWF

SEQ ID NO: 2248 - protein, 792 aa, unidentified
  REGION 1..792: note = Description of Unknown: Synthetic polypeptide
MPRILKGFLIDADFETVEGRALIRLFLRGEEGSFVVYDDSFSPYFYALPGDEPERVKERILASGAAEAIQKVEIEEKRLFGTPRVALRITVSHPQDVPRIRERIRRVEGVDLILEHDILFVRRYLIDRGIKPLTWLRLEVEERDGRALLRGVEQLEEEPPELRVAAVAIAVYNPKGAPRSSKDEIIMISVATSDGVEKVLTWREVQGLEQVEVLQDEKEMLLRFAELIKEGDYDVIVGYNTDSFDFPYIRDRLKKLGISLPLGRLDAELEVSRRGALPEARIRGRAHVDLYPIVRRHVKLNSYVLESVVEELLGIKKEKLDGERLFTYWDEGGEKRALLARYALEDARVTLALAEKFLPLYCELSTIVGQSLNDVARMTSGQLVEWLLMRYATPRGELIPNHPAGEEYAARARATYAGGYVREPKRGLVEHIAVFDFRSFGPSIIVSHNIDPSTLIVGNCEENRAPELEYCFSLEREGFIPAILKELIRRRAEIKRELKRSEGDRRRTLSFAEKALKILANSFYGYMGYPRARWYRRECAESVAAFARMYIKQVMRIAEEEQKLEVVYGDTDSLFVVIPPEKRELAQKFLQKVNESMPGIIELEFEGFYRRGLFVTKKRYALLSEDGKMVVKGLEFVRRDWAPIARETQKEVLRILLEEADPEKAARLVRDVIERIRQRRVSLEDITIYTQLTKRIKSYKSLEPHVVAAQKLKERGREVAPGMIIGYIITKGTKGISQRATPVEFARLEDYDPEYYIDNQILPAIQRIFEAIGYTRDYLKEGITQTSLSRWF

SEQ ID NO: 2249 - protein, 792 aa, unidentified
  REGION 1..792: note = Description of Unknown: Synthetic polypeptide
MPRILKGFLIDADFETVEGRALIRLFLRGEEGSFVVYDDSFSPYFYALPGDEPERVKERILASGAAEAIQKVEIEEKRLFGTPRVALRITVSHPQDVPRIRERIRRVEGVDLILEHDILFVRRYLIDRGIKPLTWLRLEVEERDGRALLRGVEQLEEEPPELRVAAVAIAVYNPKGAPRSSKDEIIMISVATSDGVEKVLTWREVQGLEQVEVLQDEKEMLLRFAELIKEGDYDVIVGYNTDSFDFPYIRDRLKKLGISLPLGRLDAELEVSRRGALPEARIRGRAHVDLYPIVRRHVKLNSYVLESVVEELLGIKKEKLDGERLFTYWDEGGEKRALLARAALEDARVTLALAEKFLPLYCELSTIVGQSLNDVARMTSGQLVEWLLMRYATPRGELIPNHPAGEEYAARARATYAGGYVREPKRGLVEHIAVFDFRSFGPSIIVSHNIDPSTLIVGNCEENRAPELEYCFSLEREGFIPAILKELIRRRAEIKRELKRSEGDRRRTLSFAEKALKILANSFYGYMGYPRARWYRRECAESVAAFARMYIKQVMRIAEEEFKLEVVYGDTDSLFVVIPPEKRELAQKFLQKVNESMPGIIELEFEGFYRRGLFVTKKRYALLSEDGKMVVKGLEFVRRDWAPIARETQKEVLRILLEEADPEKAARLVRDVIERIRQRRVSLEDITIYTQLTKRIKSYKSLEPHVVAAQKLKERGREVAPGMIIGYIITKGTKGISQRATPVEFARLEDYDPEYYIDNQILPAIQRIFEAIGYTRDYLKEGITQTSLSRWF

SEQ ID NO: 2250 - protein, 789 aa, unidentified
  REGION 1..789: note = Description of Unknown: Synthetic polypeptide
MPRILKGFLIDADFETVEGRALIRLFLRGEEGSFVVYDDSFSPYFYALPGDEPERVKERILASGAAVAIQKVEIEEKRLFGTPRVALRITVSHPQDVPRIRERIRRVEGVDLILEHDILFVRRYLIDRGIKPLTWLRLEVEERDGRALLRGVEQLEEEPPELRVAAVAIAVYNPKGAPRSSKDEIIMISVATSDGVEKVLTWREVQGLEQVEVLQDEKEMLLRFAELIKEGDYDVIVGYNTDSFDFPYIRDRLKKLGISLPLGRLDAELEVSRRGALPEARIRGRAHVDLYPIVRRHVKLNSYVLESVVEELLGIKKEKLDGERLFTYWDEGGEKRALLARYALEDARVTLALAEKFLPLYLELSTIVGQSLNDVARMTSGQLVEWLLMRYATPRGELIPNHPAGEEYAARARATYAGGYVREPKRGLVEHIAVFDFRSFGPSIIVSHNIDPSTLIVGNCEENRAPELEYCFSLEREGFIPAILKELIRRRAEIKRELKRSEGDRRRTLSFAEKALKILANSFYGYMGYPRARWYRRECAESVAAFARMYIKQVMRIAEEEFKLEVVYGDTDSLFVVIPPEKRELAQKFLQKVNESMPGIIELEFEGFYRRGLFVTKKRYALLSEDGKMVVKGLEFVRRDWAPIARETQKEVLRILLEEADPEKAARLVRDVIERIRQRRVSLEDITIYTQLTKRIKSYKSLEPHVVAAQKLKERGREVAPGMIIGYIITKGTKGISQRATPVEFARLEDYDPEYYIDNQILPAIQRIFEAIGYTRDYLKEGITQTSLS

SEQ ID NO: 2251 - protein, 792 aa, unidentified
  REGION 1..792: note = Description of Unknown: Synthetic polypeptide
MPRILKGFLIDADFETVEGRALIRLFLRGEEGSFVVYDDSFSPYFYALPGDEPERVKERILASGAAVAIQKVEIEEKRLFGTPRVALRITVSHPQDVPRIRERIRRVEGVDLILEHDILFVRRYLIDRGIKPLTWLRLEVEERDGRALLRGVEQLEEEPPELRVAAVAIAVYNPKGAPRSSKDEIIMISVATSDGVEKVLTWREVQGLEQVEVLQDEKEMLLRFAELIKEGDYDVIVGYNTDSFDFPYIRDRLKKLGISLPLGRLDAELEVSRRGALPEARIRGRAHVDLYPIVRRHVKLNSYDLESVVEELLGIKKEKLDGERLFTYWDEGGEKRALLARYALEDARVTLALAEKFLPLYCELSTIVGQSLNDVARMTSGQLVEWLLMRYATPRGELIPNHPAGEEYAARARATYAGGYVREPKRGLVEHIAVFDFRSFGPSIIVSHNIDPSTLIVGNCEENRAPELEYCFSLEREGFIPAILKELIRRRAEIKRELKRSEGDRRRTLSFAEKALKILANSFYGYMGYPRARWYRRECAESVAAFARMYIKQVMRIAEEEFKLEVVYGDTDSLFVVIPPEKRELAQKFLQKVNESMPGIIELEFEGFYRRGLFVTKKRYALLSEDGKMVVKGLEFVRRDWAPIARETQKEVLRILLEEADPEKAARLVRDVIERIRQRRVSLEDITIYTQLTKRIKSYKSLEPHVVAAQKLKERGREVAPGMIIGYIITKGTKGISQRATPVEFARLEDYDPEYYIDNQILPAIQRIFEAIGYTRDYLKEGITQTSLSRWF

SEQ ID NO: 2252 - protein, 789 aa, unidentified; identical to SEQ ID NO: 2195
  REGION 1..789: note = Description of Unknown: Synthetic polypeptide

SEQ ID NO: 2253 - protein, 792 aa, unidentified
  REGION 1..792: note = Description of Unknown: Synthetic polypeptide
MPRILKGFLIDADFETVEGRALIRLFLRGEEGSFVVYDDSFSPYFYALPGDEPERVKERILASGAAEAIQKVEIEEKRLFGTPRVALRITVSHPQDVPRIRERIRRVEGVDLILEHDILFVRRYLIDRGIKPLTWLRLEVEERDGRALLRGVEQLEEEPPELRVAAVNIAVYNPKGAPRSSKDEIIMISVATSDGVEKVLTWREVQGLEQVEVLQDEKEMLLRFAELIKEGDYDVIVGYNTDSFDFPYIRDRLKKLGISLPLGRLDAELEVSRRGALPEARIRGRAHVDLYPIVRRHVKLNSYVLESVVEELLGIKKEKLDGERLFTYWDEGGEKRALLARYALEDARVTLALAEKFLPLYCELSTIVGQSLNDVARMTSGQLVEWLLMRYATPRGELIPNHPAGEEYAARARATYAGGYVREPKRGLVEHIAVFDFRSFGPSIIVSHNIDPSTLIVGNCEENRAPELEYCFSLEREGFIPAILKELIRRRAEIKRELKRSEGDRRRTLSFAEKALKILANSFYGYMGYPRARWYRRECAESVAAFARMYIKQVMRIAEEEFKLEVVYGDTDSLFVVIPPEKRELAQKFLQKVNESMPGIIELEFEGFYRRGLFVTKKRYALLSEDGKMVVKGLEFVRRDWAPIARETQKEVLRILLEEADPEKAARLVRDVIERIRQRRVSLEDITIYTQLTKRIKSYKSLEPHVVAAQKLKERGREVAPGMIIGYIITKGTKGISQRATPVEFARLEDYDPEYYIDNQILPAIQRIFEAIGYTRDYLKEGITQTSLSRWF

SEQ ID NO: 2254 - protein, 792 aa, unidentified
  REGION 1..792: note = Description of Unknown: Synthetic polypeptide
MPRILKGFLIDADFETVEGRALIRLFLRGEEGSFVVYDDSFSPYFYALPGDEPERVKERILASGAAEAIQKVEIEEKRLFGTPRVALRITVSHPQDVPRIRERIRRVEGVDLILEHDILFVRRYLIDRGIKPLTWLRLEVEERDGRALLRGVEQLEEEPPELRVAAVAIAVYNPKGAPRSSKDEIIMISVATSDGVEKVLTWREVQGLEQVEVLQDEKEMLLRFAELIKEGDYDVIVGYNTDSFDFPYIRDALKKLGISLPLGRLDAELEVSRRGALPEARIRGRAHVDLYPIVRRHVKLNSYVLESVVEELLGIKKEKLDGERLFTYWDEGGEKRALLARYALEDARVTLALAEKFLPLYCELSTIVGQSLNDVARMTSGQLVEWLLMRYATPRGELIPNHPAGEEYAARARATYAGGYVREPKRGLVEHIAVFDFRSFGPSIIVSHNIDPSTLIVGNCEENRAPELEYCFSLEREGFIPAILKELIRRRAEIKRELKRSEGDRRRTLSFAEKALKILANSFYGYMGYPRARWYRRECAESVAAFARMYIKQVMRIAEEEFKLEVVYGDTDSLFVVIPPEKRELAQKFLQKVNESMPGIIELEFEGFYRRGLFVTKKRYALLSEDGKMVVKGLEFVRRDWAPIARETQKEVLRILLEEADPEKAARLVRDVIERIRQRRVSLEDITIYTQLTKRIKSYKSLEPHVVAAQKLKERGREVAPGMIIGYIITKGTKGISQRATPVEFARLEDYDPEYYIDNQILPAIQRIFEAIGYTRDYLKEGITQTSLSRWF

SEQ ID NO: 2255 - protein, 792 aa, unidentified; identical to SEQ ID NO: 1725
  REGION 1..792: note = Description of Unknown: Synthetic polypeptide

SEQ ID NO: 2256 - protein, 792 aa, unidentified; identical to SEQ ID NO: 1805
  REGION 1..792: note = Description of Unknown: Synthetic polypeptide

SEQ ID NO: 2257 - protein, 792 aa, unidentified; identical to SEQ ID NO: 1805
  REGION 1..792: note = Description of Unknown: Synthetic polypeptide

SEQ ID NO: 2258 - protein, 792 aa, unidentified
  REGION 1..792: note = Description of Unknown: Synthetic polypeptide
MPRILKGFLIDADFETVEGRALIRLFLRGEERSFVVYDDSFSPYFYALPGDEPERVKERILASGAAEAIQKVEIEEKRLFGTPRVALRITVSHPQDVPRIRERIRRVEGVDLILEHDILFVRRYLIDRGIKPLTWLRLEVEERDGRALLRGVEQLEEEPPELRVAAVAIAVYNPKGAPRSSKDEIIMISVATSDGVEKVLTWREVQGLEQVEVLQDEKEMLLRFAELIKEGDYDVIVGYNTDSFDFPYIRDRLKKLGISLPLGRLDAELEVSRRGALPEARIRGRAHVDLYPIVRRHVKLNSYVLESVVEELLGIKKEKLDGERLFTYWDEGGEKRALLARYALEDARVTLALAEKFLPLYCELSTIVGQSLNDVARMTSGQLVEWLLMRYATPRGELIPNHPAGEEYAARARATYAGGYVREPKRGLVEHIAVFDFRSFGPSIIVSHNIDPSTLIVGNCEENRAPELEYCFSLEREGFIPAILKELIRRRAEIKRELKRSEGDRRRTLSFAEKALKILANSFYGYMGYPRARWYRRECAESVAAFARMYIKQVMRIAEEEFKLEVVYGDTDSLFVVIPPEKRELAQKFLQKVNESMPGIIELEFEGFYRRGLFVTKKRYALLSEDGKMVVKGLEFVRRDWAPIARETQKEVLRILLEEADPEKAARLVRDVIERIRQRRVSLEDITIYTQLTKRIKSYKSLEPHVVAAQKLKERGREVAPGMIIGYIITKGTKGISQRATPVEFARLEDYDPEYYIDNQILPAIQRIFEAIGYTRDYLKEGITQTSLSRWF

SEQ ID NO: 2259 - protein, 792 aa, unidentified
  REGION 1..792: note = Description of Unknown: Synthetic polypeptide
MPRILKGFLIDADFETVEGRALIRLFLRGEEGSFVVYDDSFSPYFYALPGDEPERVKERILASGAAEAIQKVEIEEKRLFGTPRVALRITVSHPQDVPRIRERIRRVEGVDLILEHDILFVRRYLIDRGIKPLTWLRLEVEERDGRALLRGVEQLEEEPPELRVAAVAIAVYNPKGAPRSSKDEIIMISVATSDGVEKVLTWREVQGLEQVEVLQDEKEMLLRFAELIKEGDYDVIVGYNTDSFDFPYIRDRLKKLGISLPLGRLDAELEVSRRGALPEARIRGRAHVDLYPIVRRHVKLNSYVLESVVEELLGIKKEKLDGERLFTYWDEGGEKRALLARYALEDARVTLALAEKFLPLYLELSTIVGQSLNDVARMTSGQLVEWLLMRYATPRGELIPNHPAGEEYAARARATYAGGYVREPKRGLVEHIAVFDFRSFGPSIIVSHNIDPSTLIVGNCEENRAPELEYCFSLEREGFIPAILKELIRRRAEIKRELKRSEGDRRRTLSFAEKALKILANSFYGYMGYPRARWYRRESAESVAAFARMYIKQVMRIAEEEFKLEVVYGDTDSLFVVIPPEKRELAQKFLQKVNESMPGIIELEFEGFYRRGLFVTKKRYALLSEDGKMVVKGLEFVRRDWAPIARETQKEVLRILLEEADPEKAARLVRDVIERIRQRRVSLEDITIYTQLTKRIKSYKSLEPHVVAAQKLKERGREVAPGMIIGYIITKGTKGISQRATPVEFARLEDYDPEYYIDNQILPAIQRIFEAIGYTRDYLKEGITQTSLSRWF

SEQ ID NO: 2260 - protein, 792 aa, unidentified
  REGION 1..792: note = Description of Unknown: Synthetic polypeptide
MPRILKGFLIDADFETVEGRALIRLFLRGEEGSFVVYDDNFSPYFYALPGDEPERVKERILASGAAEAIQKVEIEEKRLFGTPRVALRITVSHPQDVPRIRERIRRVEGVDLILEHDILFVGRYLIDRGIKPLTWLRLEVGERDGRALLRGVEQLEEEPPELRVAAVAIAVYNPKGAPRSSKDEIIMISVATSDGVEKVLTWREVQGLEQVEVLQDEKEMLLRFAELIKEGDYDVIVGYNTDSFDFPYIRDRLKKLGISLPLGRLDAELEVSRRGALPEARIRGRAHVDLYPIVRRHVKLNSYVLESVVEELLGIKKEKLDGERLFTYWDEGGEKRALLARYALEDARVTLALAEKFLPLYCELSTIVGQSLNDVARMTSGQLVEWLLMRYATPRGELIPNHPAGEEYAARARATYAGGYVREPKRGLVEHIAVFDFRSFGPSIIVSHNIDPSTLIVGNCEENRAPELEYCFSLEREGFIPAILKELIRRRAEIKRELKRSEGDRRRTLSFAEKALKILANSFYGYMGYPRARWYRRECAESVAAFARMYIKQVMRIAEEEFKLEVVYGDTDSLFVVIPPEKRELAQKFLQKVNESMPGIIELEFEGFYRRGLFVTKKRYALLSEDGKMVVKGLEFVRRDWAPIARETQKEVLRILLEEADPEKAARLVRDVIERIRQRRVSLEDITIYTQLTKRIKSYKSLEPHVVAAQKLKERGREVAPGMIIGYIITKGTKGISQRATPVEFARLEDYDPEYYIDNQILPAIQRIFEAIGYTRDYLKEGITQTSLSRWF

SEQ ID NO: 2261 - protein, 792 aa, unidentified
  REGION 1..792: note = Description of Unknown: Synthetic polypeptide
MPRILKGFLIDADFETVEGRALIRLFLRGEEGSFVVYDDSFSPYFYALPGDEPERVKERILASGAAEAIQKVEIEEKRLFGTPRVALRITVSHPQDVPRIRERIRRVEGVDLILEHDILFVRRYLIDRGIKPLTWLRLEVEERDGRALLRGVEQLEEEPPELRVAAVAIAVYNPKGAPRSSKDEIIMISVATSDGVEKVLTWREVQGLEQVEVLQDEKEMLLRFAELIKEGDYDVIVGYNTDSFDFPYIRDRLKKLGISLPLGRLDAELEVSRRGALPEARIRGRAHVDLYPIVRRHVKLNSYVLESVVEELLGIKKEKLDGERLFTYWDEGGEKRALLARYALEDARVTLALAEKFLPLYCELSTIVGQSLNDVARMTSGQLVEWLLMRYATPRGELIPNHPAGEEYAARARATYAGGYVREPKRGLVEHIAVFDFRSFGPSIIVSHNIDPSTLIVGNCEENRAPELEYCFSLEREGFIPAILKELIRRRAEIKRELKRSEGDRRRTLSFAEKALKILANSFYGYMGYPRARWYRRECAESVAAFARMYIKQVMRIAEEEFKLEVVYGDTDSLFVVIPPEKRELAQKFLQGVNESMPGIIELEFEGFYRRGLFVTKKRYALLSEDGKMVVKGLEFVRRDWAPIARETQKEVLRILLEEADPEKAARLVRDVIERIRQRRVSLEDITIYTQLTKRIKSYKSLEPHVVAAQKLKERGREVAPGMIIGYIITKGTKGISQRATPVEFARLEDYDPEYYIDNQILPAIQRIFEAIGYTRDYLKEGITQTSLSRWF

SEQ ID NO: 2262 - protein, 792 aa, unidentified
  REGION 1..792: note = Description of Unknown: Synthetic polypeptide
MPRILKGFLIDADFETVEGRALIRLFLRGEEGSFVVYDDSFSPYFYALPGDEPERVKERILASGAAEAIQKVEIEEKRLFGTPRVALRITVSHPQDVPRIRERIRRVEGVDLILEHDILFVRRYLIDRGIKPLTWLRLEVEERDGRALLRGVEQLEEEYPELRVAAVAIAVYNPKGAPRSSKDEIIMISVATSDGVEKVLTWREVQGLEQVEVLQDEKEMLLRFAELIKEGDYDVIVGYNTDSFDFPYIRDRLKKLGISLPLGRLDAELEVSRRGALPEARIRGRAHVDLYPIVRRHVKLNSYDLESVVEELLGIKKEKLDGERLFTYWDEGGEKRALLARYALEDARVTLALAEKFLPLYCELSTIVGQSLNDVARMTSGQLVEWLLMRYATPRGELIPNHPAGEEYAARARATYAGGYVREPKRGLVEHIAVFDFRSFGPSIIVSHNIDPSTLIVGNCEENRAPELEYCFSLEREGFIPAILKELIRRRAEIKRELKRSEGDRRRTLSFAEKALKILANSFYGYMGYPRARWYRRECAESVAAFARMYIKQVMRIAEEEFKLEVVYGDTDSLFVVIPPEKRELAQKFLQKVNESMPGIIELEFEGFYRRGLFVTKKRYALLSEDGKMVVKGLEFVRRDWAPIARETQKEVLRILLEEADPEKAARLVRDVIERIRQRRVSLEDITIYTQLTKRIKSYKSLEPHVVAAQKLKERGREVAPGMIIGYIITKGTKGISQRATPVEFARLEDYDPEYYIDNQILPAIQRIFEAIGYTRDYLKEGITQTSLSRWF

SEQ ID NO: 2263 - protein, 789 aa, unidentified; identical to SEQ ID NO: 2086
  REGION 1..789: note = Description of Unknown: Synthetic polypeptide

SEQ ID NO: 2264 - protein, 789 aa, unidentified; identical to SEQ ID NO: 1988
  REGION 1..789: note = Description of Unknown: Synthetic polypeptide

SEQ ID NO: 2265 - protein, 789 aa, unidentified
  REGION 1..789: note = Description of Unknown: Synthetic polypeptide
MPRILKGFLIDADFETVEGRALIRLFLRGEEGSFVVYDDSFSPYFYALPGDEPERVKERILASGAAEAIQKVEIEEKRLFGTPRVALRITVSHPQDVPRIRERIRRVEGVDLILEHDILFVSRYLIDRGIKPLTWLRLEVEERDGRALLRGVEQLEEEPPELRVAAVAIAVYNPKGAPRSSKDEIIMISVATSDGVEKVLTWREVQGLEQVEVLQDEKEMLLRFAELIKEGDYDVIVGYNTDSFDFPYIRDRLKKLGISLPLGRLDAELEVSRRGALPEARIRGRAHVDLYPIVRRHVKLNSYDLESVVEELLGIKKEKLDGERLFTYWDEGGEKRALLARYALEDARVTLALAEKFLPLYLELSTIVGQSLNDVARMTSGQLVEWLLMRYATPRGELIPNHPAGEEYAARARATYAGGYVREPKRGLVEHIAVFDFRSFGPSIIVSHNIDPSTLIVGNCEENRAPELEYCFSLEREGFIPAILKELIRRRAEIKRELKRSEGDRRRTLSFAEKALKILANSFYGYMGYPRARWYRRECAESVAAFARMYIKQVMRIAEEEFKLEVVYGDTDSLFVVIPPEKRELAQKFLQKVNESMPGIIELEFEGFYRRGLFVTKKRYALLSEDGKMVVKGLEFVRRDWAPIARETQKEVLRILLEEADPEKAARLVRDVIERIRQRRVSLEDITIYTQLTKRIKSYKSLEPHVVAAQKLKERGREVAPGMIIGYIITKGTKGISQRATPVEFARLEDYDPEYYIDNQILPAIQRIFEAIGYTRDYLKEGITQTSLS

SEQ ID NO: 2266 - protein, 792 aa, unidentified
  REGION 1..792: note = Description of Unknown: Synthetic polypeptide
MPRILKGFLIDADFETVEGRALIRLFLRGEEGSFVVYDDSFSPYFYALPGDEPERVKERILASGAAEAIQKVEIEEKRLFGTPRVALRITVSHPQDVPRIRERIRRVEGVDLILEHDILFVRRYLIDRGIKPLTWLRLEVEERDGRALLRGVEQLEEEPPELRVAAVAIAVYNPKGAPRSSKDEIIMISVATSDGVEKVLTWREVQGLEQVEVLQDEKEMLLRFAELIKEGDYDVIVGYNTDSFDFPYIRDRLKKLGISLPLGRLDAELEVSRRGALPEARIRGRAHVDLYPIVRRHVKLNSYDLESVVEELLGIKKEKLDGERLFTYWDEGGEKRALLARYALEDARVTLALAEKFLPLYLELSTIVGQSLNDVARMTSGQLVEWLLMRYATPRGELIPNHPAGEEYAARARATYAGGYVREPKRGLVEHIAVFDFRSFGPSIIVSHNICPSTLIVGNCEENRAPELEYCFSLEREGFIPAILKELIRRRAEIKRELKRSEGDRRRTLSFAEKALKILANSFYGYMGYPRARWYRRECAESVAAFARMYIKQVMRIAEEEFKLEVVYGDTDSLFVVIPPEKRELAQKFLQKVNESMPGIIELEFEGFYRRGLFVTKKRYALLSEDGKMVVKGLEFVRRDWAPIARETQKEVLRILLEEADPEKAARLVRDVIERIRQRRVSLEDITIYTQLTKRIKSYKSLEPHVVAAQKLKERGREVAPGMIIGYIITKGTKGISQRATPVEFARLRDYDPEYYIDNQILPAIQRIFEAIGYTRDYLKEGITQTSLSRWF

SEQ ID NO: 2267 - protein, 792 aa, unidentified
  REGION 1..792: note = Description of Unknown: Synthetic polypeptide
MPRILKGFLIDADFETVEGRALIRLFLRGEEGSFVVYDDSFSPYFYALPGDEPERVKERILASGAAEAIQKVEIEEKRLFGTPRVALRITVSHPQDVPRIRERIRRVEGVDLILEHDILFVRRYLIDRGIKPLTWLRLEVEERDGRALLRGVEQLEEEPPELRVAAVAIARYNPKGAPRSSKDEIIMISVATSDGVEKVLTWREVQGLEQVEVLQDEKEMLLRFAELIKEGDYDVIVGYNTDSFDFPYIRDRLKKLGISLPLGRLDAELEVSRRGALPEARIRGRAHVDLYPIVRRHVKLNSYVLESVVEELLGIKKEKLDGERLFTYWDEGGEKRALLARYALEDARVTLALAEKFLPLYCELSTIVGQSLNDVARMTSGQLVEWLLMRYATPRGELIPNHPAGEEYAARARATYAGGYVREPKRGLVEHIAVFDFRSFGPSIIVSHNIDPSTLIVGNCEENRAPELEYCFSLEREGFIPAILKELIRRRAEIKRELKRSEGDRRRTLSFAEKALKILANSFYGYMGYPRARWYRRECAESVAAFARMYIKQVMRIAEEEFKLEVVYGDTDSLFVVIPPEKRELAQKFLQKVNESMPGIIELEFEGFYRRGLFVTKKRYALLSEDGKMVVKGLEFVRRDWAPIARETQKEVLRILLEEADPEKAARLVRDVIERIRQRRVSLEDITIYTQLTKRIKSYKSLEPHVVAAQKLKERGREVAPGMIIGYIITKGTKGISQRATPVEFARLEDYDPEYYIDNQILPAIQRIFEAIGYTRDYLKEGITQTSLSRWF

SEQ ID NO: 2268 - protein, 792 aa, unidentified
  REGION 1..792: note = Description of Unknown: Synthetic polypeptide
MPRILKGFLIDADFETVEGRALIRLFLRGEEGSFVVYDDSFSPYFYALPGDEPERVKERILASGAAEAIQKVEIEEKRLFGTPRVALRITVSHPQDVPRIRERIRRVEGVDLILEHDILFVRRYLIDRGIKPLTWLRLEVEERDGRALLRGVEQLEEEPPELRVAAVAIAVYNPKGAPRSSKDEIRMISVATSDGVEKVLTWREVQGLEQVEVLQDEKEMLLRFAELIKEGDYDVIVGYNTDSFDFPYIRDRLKKLGISLPLGRLDAELEVSRRGALPEARIRGRAHVDLYPIVRRHVKLNSYDLESVVEELLGIKKEKLDGERLFTYWDEGGEKRALLARYALEDARVTLALAEKFLPLYCELSTIVGQSLNDVARMTSGQLVEWLLMRYATPRGELIPNHPAGEEYAARARATYAGGYVREPKRGLVEHIAVFDFRSFGPSIIVSHNIDPSTLIVGNCEENRAPELEYCFSLEREGFIPAILKELIRRRAEIKRELKRSEGDRRRTLSFAEKALKILANSFYGYMGYPRARWYRRECAESVAAFARMYIKQVMRIAEEEFKLEVVYGDTDSLFVVIPPEKRELAQKFLQKVNESMPGIIELEFEGFYRRGLFVTKKRYALLSEDGKMVVKGLEFVRRDWAPIARETQKEVLRILLEEADPEKAARLVRDVIERIRQRRVSLEDITIYTQLTKRIKSYKSLEPHVVAAQKLKERGREVAPGMIIGYIITKGTKGISQRATPVEFARLEDYDPEYYIDNQILPAIQRIFEAIGYTRDYLKEGITQTSLSRWF

SEQ ID NO: 2269 - protein, 792 aa, unidentified
  REGION 1..792: note = Description of Unknown: Synthetic polypeptide
MPRILKGFLIDADFETVEGRALIRLFLRGEEGSFVVYDDSFSPYFYALPGDEPERVKERILASGAAEAIQKVEIEEKRLFGTPRVALRITVSHPQDVPRIRERIRRVEGVDLILEHDILFVRRYLIDRGIKPLTWLRLEVEERDGRALLRGVEQLEEEPPELRVAAVAIAVYNPKGAPRSSKDEIIMISVATSDGVEKVLTWREVQGLEQVEVLQDEKEMLLRFAELIKEGDYDVIVGYNTDSFDFPYIRDRLKKLGISLPLGRLDAELEVSRRGALPEARIRGRAHVDLYPIVRRHVKLNSYDLESVVEELLGIKKEKLDGERLFTYWDEGGEKRALLARYALEDARVTLALAEKFLPLYCELSTIVGQSLNDVARMTSGQLVEWLLMRYATPRGELIPNHPAGEEYAARARATYAGGYVREPKRGLVEHIAVFDFRSFGPSIIVSHNIDPSTLIVGNCEENRAPELEYCFSLEREGFIPAILKELIRRRAEIKRELKRSEGDRRRTLSFAEKALKILANSFYGYMGYPRARWYRRECAESVAAFARMYIKQVMRIAEEEFKLEVVYGDTDSLFVVIPPEKRELAQKFLQKVNESMPGIIELEFEGFYRRGLFVTKKRYALLSEDGKMVVKGLEFVRRDWAPIARETQKEVLRILLEEADPEKAARLVRDVIERIRQRRVSLEDITIYTQLTKRIKSYKSLEPHVVAAQLLKERGREVAPGMIIGYIITKGTKGISQRATPVEFARLEDYDPEYYIDNQILPAIQRIFEAIGYTRDYLKEGITQTSLSRWF

SEQ ID NO: 2270 - protein, 792 aa, unidentified
  REGION 1..792: note = Description of Unknown: Synthetic polypeptide
MPRILKGFLIDADFETVEGRALIRLFLRGEEGSFVVYDDSFSPYFYALPGDEPERVKERILASGAAEAIQKVEIEEKRLFGTPRVALRITVSHPQDVPRIRERIRRVEGVDLILEHDILFVRRYLIDRGIKPLTWLRLEVEERDGRALLRGVEQLEEEPPELRVAAVAIAVYNPKGAPRSSKDEIIMISVATSDGVEKVLTWREVQGLEQVEVLQDEKEMLLRFAELIKEGDYDVIVGYNTDSFDFPYIRDRLKKLGISLPLGRLDAELEVSRRGAAPEARIRGRAHVDLYPIVRRHVKLNSYDLESVVEELLGIKKEKLDGERLFTYWDEGGEKRALLARYALEDARVTLALAEKFLPLYCELSTIVGQSLNDVARMTSGQLVEWLLMRYATPRGELIPNHPAGEEYAARARATYAGGYVREPKRGLVEHIAVFDFRSFGPSIIVSHNIDPSTLIVGNCEENRAPELEYCFSLEREGFIPAILKELIRRRAEIKRELKRSEGDRRRTLSFAEKALKILANSFYGYMGYPRARWYRRECAESVAAFARMYIKQVMRIAEEEFKLEVVYGDTDSLFVVIPPEKRELAQKFLQKVNESMPGIIELEFEGFYRRGLFVTKKRYALLSEDGKMVVKGLEFVRRDWAPIARETQKEVLRILLEEADPEKAARLVRDVIERIRQRRVSLEDITIYTQLTKRIKSYKSLEPHVVAAQKLKERGREVAPGMIIGYIITKGTKGISQRATPVEFARLEDYDPEYYIDNQILPAIQRIFEAIGYTRDYLKEGITQTSLSRWF

SEQ ID NO: 2271 - protein, 792 aa, unidentified
  REGION 1..792: note = Description of Unknown: Synthetic polypeptide
MPRILKGFLIDADFETVEGRALIRLFLRGEEGSFVVYDDSFSPYFYALPGDEPERVKERILASGAAEAIQKVEIEEKRLFGTPRVALRITVSHPQDVPRIRERIRRVEGVDLILEHDILFVRRYLIDRGIKPLTWLRLEVEERDGRALLRGVEQLEEEPPELRVAAVAIAVYNPKGAPRSSKDEIIMISVATSDGVEKVLTWREVQGLEQVEVLQDEKEMLLRFAELIKEGDYDVIVGYNTDSFDFPYIRDRLKKLGISLPLGRLDAELEVSRRGALPEARIRGRAHVDLYPIVRRHVKLNSYVLESVVEELKGIKKEKLDGERLFTYWDEGGEKRALLARYALEDARVTLALAEKFLPLYCELSTIVGQSLNDVARMTSGQLVEWLLMRYATPRGELIPNHPAGEEYAARARATYAGGYVREPKRGLVEHIAVFDFRSFGPSIIVSHNIDPSTLIVGNCEENRAPELEYCFSLEREGFIPAILKELIRRRAEIKRELKRSEGDRRRTLSFAEKALKILANSFYGYMGYPRARWYRRECAESVAAFARMYIKQVMRIAEEEFKLEVVYGDTDSLFVVIPPEKRELAQKFLQKVNESMPGIIELEFEGFYRRGLFVTKKRYALLSEDGKMVVKGLEFVRRDWAPIARETQKEVLRILLEEADPEKAARLVRDVIERIRQRRVSLEDITIYTQLTKRIKSYKSLEPHVVAAQKLKERGREVAPGMIIGYIITKGTKGISQRATPVEFARLEDYDPEYYIDNQILPAIQRIFEAIGYTRDYLKEGITQTSLSRWF

SEQ ID NO: 2272 - protein, 792 aa, unidentified
  REGION 1..792: note = Description of Unknown: Synthetic polypeptide
MPRILKGFLIDADFETVEGRALIRLFLRGEEGSFVVYDDSFSPYFYALPGDEPERVKERILASGAAEAIQKVEIEEKRLFGTPRVALRITVSHPQDVPRIRERIRRVEGVDLILEHDILFVRRYLIDRGIKPLTWLRLEVEERDGRALLRGVEQLEEEPPELRVAAVAIAVQNPKGAPRSSKDEIIMISVATSDGVEKVLTWREVQGLEQVEVLQDEKEMLLRFAELIKEGDYDVIVGYNTDSFDFPYIRDRLKKLGISLPLGRLDAELEVSRRGALPEARIRGRAHVDLYPIVRRHVKLNSYDLESVVEELLGIKKEKLDGERLFTYWDEGGEKRALLARYALEDARVTLALAEKFLPLYCELSTIVGQSLNDVARMTSGQLVEWLLMRYATPRGELIPNHPAGEEYAARARATYAGGYVREPKRGLVEHIAVFDFRSFGPSIIVSHNIDPSTLIVGNCEENRAPELEYCFSLEREGFIPAILKELIRRRAEIKRELKRSEGDRRRTLSFAEKALKILANSFYGYMGYPRARWYRRECAESVAAFARMYIKQVMRIAEEEFKLEVVYGDTDSLFVVIPPEKRELAQKFLQKVNESMPGIIELEFEGFYRRGLFVTKKRYALLSEDGKMVVKGLEFVRRDWAPIARETQKEVLRILLEEADPEKAARLVRDVIERIRQRRVSLEDITIYTQLTKRIKSYKSLEPHVVAAQKLKERGREVAPGMIIGYIITKGTKGISQRATPVEFARLEDYDPEYYIDNQILPAIQRIFEAIGYTRDYLKEGITQTSLSRWF

SEQ ID NO: 2273 - protein, 792 aa, unidentified
  REGION 1..792: note = Description of Unknown: Synthetic polypeptide
MPRILKGFLIDADFETVEGRALIRLFLRGEEGSFVVYDDSFSPYFYALPGDEPERVKERILASGAAEAIQKVEIEEKRLFGTPRVALRITVSHPQDVPRIRERIRRVEGVDLILEHDILFVRRYLIDRGIKPLTWLRLEVEERDGRALLRGVEQLEEEPPELRVAAVAIAVYNPKGAPRSSKDEIIMISVATSDGVEKVLTWREVQGLEQVEVLQDEKEMLLRFAELIKEGDYDVIVGYNTDSFDFPYIRDRLKKLGISLPLGRLDAELEVSRRGALPEARIRGRAHVDLYPIVRRHVKLNSYDLESVVEELLGIKKEKLDGERLFTYWDEGGEKRALLARYALEDARVTLALAEKFLPLYCELSTIVGQSLNDVARMTSGQLVEWLLMRYATPRGELIPNHPAGEEYAARARATYAGGYVREPKRGLVEHIAVFDFRSFGPSIIVSHNIDPSRLIVGNCEENRAPELEYCFSLEREGFIPAILKELIRRRAEIKRELKRSEGDRRRTLSFAEKALKILANSFYGYMGYPRARWYRRECAESVAAFARMYIKQVMRIAEEEFKLEVVYGDTDSLFVVIPPEKRELAQKFLQKVNESMPGIIELEFEGFYRRGLFVTKKRYALLSEDGKMVVKGLEFVRRDWAPIARETQKEVLRILLEEADPEKAARLVRDVIERIRQRRVSLEDITIYTQLTKRIKSYKSLEPHVVAAQKLKERGREVAPGMIIGYIITKGTKGISQRATPVEFARLEDYDPEYYIDNQILPAIQRIFEAIGYTRDYLKEGITQTSLSRWF

SEQ ID NO: 2274 - protein, 792 aa, unidentified
  REGION 1..792: note = Description of Unknown: Synthetic polypeptide
MPRILKGFLIDADFETVEGRALIRLFLRGEEGSFVVYDDSFSPYFYALPGDEPERVKERILASGAAEAIQKVEIEEKRLFGTPRVALRITVSHPQDVPRIRERIRRVEGVDLILEHDILFVRRYLIDRGIKPLTWLRLEVEERDGRALLRGVEQLEEEPPELRVAAVAIAVYNPKGAPRSSKDEIIMISVATSDGVEKVLTWREVQGLEQVEVLQDEKEMLLRFAELIKEGDYDVIVGYNTDSFDFPYIRDRLKKLGISLPLGRLDAELEVSRRGALPEARIRGRAHVDLYPIVRRHVKLNSYVLESVVEELLGIKKEKLDGERLFTYWDEGGEKRALLARYALEDARVTLALAEKFLPLYLELSTIVGQSLNDVARMTSGQLVEWLLMRYATPRGELIPNHPAGEEYAARARATYAGGYVREPKRGLVEHIAVFDFRSFGPSIIVSHNIDPSTLIVGNCEENRAPELEYCFSLEREGFIPAILKELIRRRAEIKRELKRSEGDRRRTLSFAEKALKILANSFYGYMGYPRARWYRRECAESVAAFARMYIKQVMRIAEEEFKLEVVYGDTDSLFVVIPPEKRELAQKFLQNVNESMPGIIELEFEGFYRRGLFVTKKRYALLSEDGKMVVKGLEFVRRDWAPIARETQKEVLRILLEEADPEKAARLVRDVIERIRQRRVSLEDITIYTQLTKRIKSYKSLEPHVVAAQKLKERGREVAPGMIIGYIITKGTKGISQRATPVEFARLEDYDPEYYIDNQILPAIQRIFEAIGYTRDYLKEGITQTSLSRWF

SEQ ID NO: 2275 - protein, 792 aa, unidentified
  REGION 1..792: note = Description of Unknown: Synthetic polypeptide
MPRILKGFLIDADFETVEGRALIRLFLRGEEGSFVVYDDSYSPYFYALPGDEPERVKERILASGAAEAIQKVEIEEKRLFGTPRVALRITVSHPQDVPRIRERIRRVEGVDLILEHDILFVRRYLIDRGIKPLTWLRLEVEERDGRALLRGVEQLEEEPPELRVAAVAIAVYNPKGAPRSSKDEIIMISVATSDGVEKVLTWREVQGLEQVEVLQDEKEMLLRFAELIKEGDYDVIVGYNTDSFDFPYIRDRLKKLGISLPLGRLDAELEVSRRGALPEARIRGRAHVDLYPIVRRHVKLNSYVLESVVEELLGIKKEKLDGERLFTYWDEGGEKRALLARYALEDARVTLALAEKFLPLYCELSTIVGQSLNDVARMTSGQLVEWLLMRYATPRGELIPNHPAGEEYAARARATYAGGYVREPKRGLVEHIAVFDFRSFGPSIIVSHNIDPSTLIVGNCEENRAPELEYCFSLEREGFIPAILKELIRRRAEIKRELKRSEGDRRRTLSFAEKALKILANSFYGYMGYPRARWYRRECAESVAAFARMYIKQVMRIAEEEFKLEVVYGDTDSLFVVIPPEKRELAQKFLQKVNESMPGIIELEFEGFYRRGLFVTKKRYALLSEDGKMVVKGLEFVRRDWAPIARETQKEVLRILLEEADPEKAARLVRDVIERIRQRRVSLEDITIYTQLTKRIKSYKSLEPHVVAAQKLKERGREVAPGMIIGYIITKGTKGISQRATPVEFARLEDYDPEYYIDNQILPAIQRIFEAIGYTRDYLKEGITQTSLSRWF

SEQ ID NO: 2276 - protein, 792 aa, unidentified
  REGION 1..792: note = Description of Unknown: Synthetic polypeptide
MPRILKGFLIDADFETVEGRALIRLFLRGEEGSFVVYDDSFSPYFYALPGDEPERVKERILASGAAEAIQKVEIEEKRLFGTPRVALRITVSHPQDVPRIRERIRRVEGVDLILEHDILFVRRYLIDRGIKPLTWLRLEVEERDGRALLRGVEQLEEEPPELRVAAVAIAVYNPKGAPRSSKDEIIMISVATSDGVEKVLTWREVQGLEQVEVLQDEKEMLLRFAELIKEGDYDVIVGYNTDSFDFPYIRDRLKKLGISLPLGRLDAELEVSRRGALPEARIRGRAHVDLYPIVRRHVKLNSYVLESVVEELLGIKKEKLDGERLFTYWDEGGEKRALLARYALEDARVTLALAEKFLPLYCELSTIVGQSLNDVARMTSGQLVEWLLMRYATPRGELIPNHPAGEEYAARARATYAGGYVREPKRGLVEHIAVFDFRSFGPSIIVSHNIDPSTLIVGNCEENRAPELEYCFSLEREGFIPAILKELIRRRAEIKRELKRSEGDRRRTLSFAEKALKILANSFYGYMGYPRARWYRRECAESVAAFARMYIKQVMRIAEEENKLEVVYGDTDSLFVVIPPEKRELAQKFLQKVNESMPGIIELEFEGFYRRGLFVTKKRYALLSEDGKMVVKGLEFVRRDWAPIARETQKEVLRILLEEADPEKAARLVRDVIERIRQRRVSLEDITIYTQLTKRIKSYKSLEPHVVAAQKLKERGREVAPGMIIGYIITKGTKGISQRATPVEFARLEDYDPEYYIDNQILPAIQRIFEAIGYTRDYLKEGITQTSLSRWF

SEQ ID NO: 2277 - protein, 792 aa, unidentified
  REGION 1..792: note = Description of Unknown: Synthetic polypeptide
MPRILKGFLIDADFETVEGRALIRLFLRGEEGSFVVYDDSFSPYFYALPGDEPERVKERILASGAAEAIQKVEIEEKRLFGTPRVALRITVSHPQDVPRIRERIRRVEGVDLILEHDILFVRRYLIDRGIKPLTWLRLEVEERDGRALLRGVEQLEEEPPELRVAAVAIAVYNPKGAPRSSKDEIIMISVATSDGVEKVLTWREVQGLEQVEVLQDEKEMLLRFAELIKEGDYDVIVGYNTDSFDFPYIRDRLKKLGISLPLGRLDAELEVSRRGALPEARIRGRAHVDLYPIVRRHVKLNSYDLESVVEELLGIKKEKLDGERLFTYWDEGGEKRALLARYALEDARVTLALAEKFLPLYCELSTIVGQSLNDVARMTSGQLVEWLLMRYATPRGELIPNHPAGEEYAARARATYAGGYVREPKRGLVEHIAVFDFRSFGPSIIVSHNIDPSTLIVGNCEENRAPELEYCFSLEREGFIPAILKELIRRRAEIKRELKRSEGDRRRTLSFAEKALKILAESFYGYMGYPRARWYRRECAESVAAFARMYIKQVMRIAEEEFKLEVVYGDTDSLFVVIPPEKRELAQKFLQKVNESMPGIIELEFEGFYRRGLFVTKKRYALLSEDGKMVVKGLEFVRRDWAPIARETQKEVLRILLEEADPEKAARLVRDVIERIRQRRVSLEDITIYTQLTKRIKSYKSLEPHVVAAQKLKERGREVAPGMIIGYIITKGTKGISQRATPVEFARLEDYDPEYYIDNQILPAIQRIFEAIGYTRDYLKEGITQTSLSRWF

SEQ ID NO: 2278 - protein, 792 aa, unidentified
  REGION 1..792: note = Description of Unknown: Synthetic polypeptide
MPRILKGFLIDADFETVEGRALIRLFLRGEEGSFVVYDDSFSPYFYALPGDEPERVKERILASGAAEAIQKVEIEEKRLFGTPRVALRITVSHPQDVPRIRERIRRVEGVDLILEHDILFVRRYLIDRGIKPLTWLRLEVEERDGRALLRGVEQLEEEPPELRVAAVAIAVYNPKGAPRSSKDEIIMISVATSDGVEKVLTWREVQGLEQVEVLQDEKEMLLRFAELIKEGDYDVIVGYNTDSFDFPYIRDRLKKLGISLPLGRLDAELEVSRRGALPEARIRGRAHVDLYPIVRRHVKLNSYDLESVVEELLGIKKEKLDGERLFTYWDEGGEKRALLARYALEDARVTLALAEKFLPLYCELSTIVGQSLNDVARMTSGQLVEWLLMRYATPRGELIPNHPAGEEYAARARATYAGGYVREPKRGLVEHIAVFDFRSFGPSIIVSHNIDPSTLIVGNCEENRAPELEYCFSLEREGFIPAILKELIRRRAEIKRELKRSEGDRRRTLSFAEKALKILANSFYGYMGYPRARWYRRECAESVAAFARMYIKQVMRIAEEEFKLEVVYGDTDSLFVVIPPEKRELAQKFLQKVNESMPGIIELEFEGFYRRGLFVTKKRYALLSEDGKMVVKGLEFVRRDWAPIARETQKEVLRILLEEADPEKAARLVRDVIERIRQRRVSLEDITIYTQLTKRIKSYKSLEPHVVAAQDLKERGREVAPGMIIGYIITKGTKGISQRATPVEFARLEDYDPEYYIDNQILPAIQRIFEAIGYTRDYLKEGITQTSLSRWF

SEQ ID NO: 2279 - protein, 789 aa, unidentified; identical to SEQ ID NO: 2023
  REGION 1..789: note = Description of Unknown: Synthetic polypeptide

SEQ ID NO: 2280 - protein, 792 aa, unidentified; identical to SEQ ID NO: 1753
  REGION 1..792: note = Description of Unknown: Synthetic polypeptide

SEQ ID NO: 2281 - protein, 792 aa, unidentified
  REGION 1..792: note = Description of Unknown: Synthetic polypeptide
MPRILKGFLIDADFETVEGRALIRLFLRGEEGSFVVYDDSFSPYFYALPGDEPERVKERILASGAAEAIQKVEIEEKRLFGTPRVALRITVSHPQDVPRIRERIRRVEGVDLILEHDILFVRRYLIDRGIKPLTWLRLEVEERDGRALLRGVEQLEEEPPELRVAAVAIAVYNPKGAPRSSKDEIIMISVATSDGVEKVLTWREVQGLKQVEVLQDEKEMLLRFAELIKEGDYDVIVGYNTDSFDFPYIRDRLKKLGISLPLGRLDAELEVSRRGALPEARIRGRAHVDLYPIVRRHVKLNSYVLESVVEELLGIKKEKLDGERLFTYWDEGGEKRALLARYALEDARVTLALAEKFLPLYCELSTIVGQSLNDVARMTSGQLVEWLLMRYATPRGELIPNHPAGEEYAARARATYAGGYVREPKRGLVEHIAVFDFRSFGPSIIVSHNIDPSTLIVGNCEENRAPELEYCFSLEREGFIPAILKELIRRRAEIKRELKRSEGDRRRTLSFAEKALKILANSFYGYMGYPRARWYRRECAESVAAFARMYIKQVMRIAEEEFKLEVVYGDTDSLFVVIPPEKRELAQKFLQKVNESMPGIIELEFEGFYRRGLFVTKKRYALLSEDGKMVVKGLEFVRRDWAPIARETQKEVLRILLEEADPEKAARLVRDVIERIRQRRVSLEDITIYTQLTKRIKSYKSLEPHVVAAQKLKERGREVAPGMIIGYIITKGTKGISQRATPVEFARLEDYDPEYYIDNQILPAIQRIFEAIGYTRDYLKEGITQTSLSRWF

SEQ ID NO: 2282 - protein, 792 aa, unidentified; identical to SEQ ID NO: 1805
  REGION 1..792: note = Description of Unknown: Synthetic polypeptide

SEQ ID NO: 2283 - protein, 792 aa, unidentified
  REGION 1..792: note = Description of Unknown: Synthetic polypeptide
MPRILKGFLIDADFETVEGRALIRLFLRGEEGSFVVYDDSFSPYFYALPGDEPERVKERILASGAAEAIQKVEIEEKRLFGTPRVALRITVSHPQDVPRIRERIRRVEGVDLILEHDILFVRRYLIDRGIKPLTWLRLEVEERDGRALLRGVEQLEEEPPELRVAAVKIKVYNPKGAPRSSKDEIIMISVATSDGVEKVLTWREVQGLEQVEVLQDEKEMLLRFAELIKEGDYDVIVGYNTDSFDFPYIRDRLKKLGISLPLGRLDAELEVSRRGALPEARIRGRAHVDLYPIVRRHVKLNSYVLESVVEELLGIKKEKLDGERLFTYWDEGGEKRALLARYALEDARVTLALAEKFLPLYCELSTIVGQSLNDVARMTSGQLVEWLLMRYATPRGELIPNHPAGEEYAARARATYAGGYVREPKRGLVEHIAVFDFRSFGPSIIVSHNIDPSTLIVGNCEENRAPELEYCFSLEREGFIPAILKELIRRRAEIKRELKRSEGDRRRTLSFAEKALKILANSFYGYMGYPRARWYRRECAESVAAFARMYIKQVMRIAEEEFKLEVVYGDTDSLFVVIPPEKRELAQKFLQKVNESMPGIIELEFEGFYRRGLFVTKKRYALLSEDGKMVVKGLEFVRRDWAPIARETQKEVLRILLEEADPEKAARLVRDVIERIRQRRVSLEDITIYTQLTKRIKSYKSLEPHVVAAQKLKERGREVAPGMIIGYIITKGTKGISQRATPVEFARLEDYDPEYYIDNQILPAIQRIFEAIGYTRDYLKEGITQTSLSRWF

SEQ ID NO: 2284 - protein, 792 aa, unidentified
  REGION 1..792: note = Description of Unknown: Synthetic polypeptide
MPRILKGFLIDADFETVEGRALIRLFLRGEEGSFVVYDDSFSPYFYALPGDEPERVKERILASGAAEAIQKVEIEEKRLFGTPRVALRITVSHPQDVPRIRERIRRVEGVDLILEHDILFVRRYLIDRGIKPLTWLRLEVEERDGRALLRGVEQLEEEPPELRVAAVAIAVYNPKGAPRSSKDEIRMISVATSDGVEKVLTWREVQGLEQVEVLQDEKEMLLRFAELIKEGDYDVIVGYNTDSFDFPYIRDRLKKLGISLPLGRLDAELEVSRRGALPEARIRGRAHVDLYPIVRRHVKLNSYVLESVVEELLGIKKEKLDGERLFTYWDEGGEKRALLARYALEAARVTLALAEKFLPLYCELSTIVGQSLNDVARMTSGQLVEWLLMRYATPRGELIPNHPAGEEYAARARATYAGGYVREPKRGLVEHIAVFDFRSFGPSIIVSHNIDPSTLIVGNCEENRAPELEYCFSLEREGFIPAILKELIRRRAEIKRELKRSEGDRRRTLSFAEKALKILANSFYGYMGYPRARWYRRECAESVAAFARMYIKQVMRIAEEEFKLEVVYGDTDSLFVVIPPEKRELAQKFLQKVNESMPGIIELEFEGFYRRGLFVTKKRYALLSEDGKMVVKGLEFVRRDWAPIARETQKEVLRILLEEADPEKAARLVRDVIERIRQRRVSLEDITIYTQLTKRIKSYKSLEPHVVAAQKLKERGREVAPGMIIGYIITKGTKGISQRATPVEFARLEDYDPEYYIDNQILPAIQRIFEAIGYTRDYLKEGITQTSLSRWF

SEQ ID NO: 2285 - protein, 792 aa, unidentified
  REGION 1..792: note = Description of Unknown: Synthetic polypeptide
MPRILKGFLIDADFETVEGRALIRLFLRGEEGSFVVYDDSFSPYFYALPGDEPERVKERILASGAAEAIQKVEIEEKRLFGTPRVALRITVSHPQDVPRIRERIRRVEGVDLILEHDILFVRRYLIDRGIKPLTWLRLEVEERDGRALLRGVEQLEEEPPELRVAAVAIAVYNPKGAPRSSKDEIIMISVATSDGVEKVLTWREVQGLEQVEVLQDEKEMLLRFAELIKEGDYDVIVGYNTDSFDFPYIRDRLKKLGISLPLGRLDAELEVSRRGALPEARIRGRAHVDLYPIVRRHVKLNSYVLESVVEELLGIKKEKLDGERLFTYFDEGGEKRALLARYALEDARVTLALAEKFLPLYCELSTIVGQSLNDVARMTSGQLVEWLLMRYATPRGELIPNHPAGEEYAARARATYAGGYVREPKRGLVEHIAVFDFRSFGPSIIVSHNIDPSTLIVGNCEENRAPELEYCFSLEREGFIPAILKELIRRRAEIKRELKRSEGDRRRTLSFAEKALKILANSFYGYMGYPRARWYRRECAESVAAFARMYIKQVMRIAEEEFKLEVVYGDTDSLFVVIPPEKRELAQKFLQKVNESMPGIIELEFEGFYRRGLFVTKKRYALLSEDGKMVVKGLEFVRRDWAPIARETQKEVLRILLEEADPEKAARLVRDVIERIRQRRVSLEDITIYTQLTKRIKSYKSLEPHVVAAQKLKERGREVAPGMIIGYIITKGTKGISQRATPVEFARLEDYDPEYYIDNQILPAIQRIFEAIGYTRDYLKEGITQTSLSRWF

SEQ ID NO: 2286 - protein, 792 aa, unidentified
  REGION 1..792: note = Description of Unknown: Synthetic polypeptide
MPRILKGFLIDADFETVEGRALIRLFLRGEEGSFVVYDDSFSPYFYALPGDEPERVKERILASGAAEAIQKVEIEEKRLFGTPRVALRITVSHPQDVPRIRERIRRVEGVDLILEHDILFVRRYLIDRGIKPLTWLRLEVEERDGRALLRGVEQLEEEPPELRVAAVAIAVYNPKGAPRSSKDEIIMISVATSDGVEKVLTWREVQGLEQVEVLQDEKEMLLRFAELIKEGDYDVIVGYNTDSFDFPYIRDRLKKLGISLPLGRLDAELEVSRRGALPEARIRGRAHVDLYPIVRRHVKLNSYVLESVVEELLGIKKEKLDGERLFTYWDEGGESRALLARYALEDARVTLALAEKFLPLYCELSTIVGQSLNDVARMTSGQLVEWLLMRYATPRGELIPNHPAGEEYAARARATYAGGYVREPKRGLVEHIAVFDFRSFGPSIIVSHNIDPSTLIVGNCEENRAPELEYCFSLEREGFIPAILKELIRRRAEIKRELKRSEGDRRRTLSFAEKALKILANSFYGYMGYPRARWYRRECAESVAAFARMYIKQVMRIAEEEFKLEVVYGDTDSLFVVIPPEKRELAQKFLQKVNESMPGIIELEFEGFYRRGLFVTKKRYALLSEDGKMVVKGLEFVRRDWAPIARETQKEVLRILLEEADPEKAARLVRDVIERIRQRRVSLEDITIYTQLTKRIKSYKSLEPHVVAAQKLKERGREVAPGMIIGYIITKGTKGISQRATPVEFARLEDYDPEYYIDNQILPAIQRIFEAIGYTRDYLKEGITQTSLSRWF

SEQ ID NO: 2287 - protein, 789 aa, unidentified
  REGION 1..789: note = Description of Unknown: Synthetic polypeptide
MPRILKGFLIDADFETVEGRALIRLFLRGEEGSFVVYDDSFSPYFYALPGDEPERVKERILASGAAEAIQKVEIEEKRLFGTPRVALRITVSHPLDVPRIRERIRRVEGVDLILEHDILFVRRYLIDRGIKPLTWLRLEVEERDGRALLRGVEQLEEEPPELRVAAVAIAVYNPKGAPRSSKDEIIMISVATSDGVEKVLTWREVQGLEQVEVLQDEKEMLLRFAELIKEGDYDVIVGYNTDSFDFPYIRDRLKKLGISLPLGRLDAELEVSRRGALPEARIRGRAHVDLYPIVRRHVKLNSYDLESVVEELLGIKKVKLDGERLFTYWDEGGEKRALLARYALEDARVTLALAEKFLPLYCELSTIVGQSLNDVARMTSGQLVEWLLMRYATPRGELIPNHPAGEEYAARARATYAGGYVREPKRGLVEHIAVFDFRSFGPSIIVSHNIDPSTLIVGNCEENRAPELEYCFSLEREGFIPAILKELIRRRAEIKRELKRSEGDRRRTLSFAEKALKILANSFYGYMGYPRARWYRRECAESVAAFARMYIKQVMRIAEEEFKLEVVYGDTDSLFVVIPPEKRELAQKFLQKVNESMPGIIELEFEGFYRRGLFVTKKRYALLSEDGKMVVKGLEFVRRDWAPIARETQKEVLRILLEEADPEKAARLVRDVIERIRQRRVSLEDITIYTQLTKRIKSYKSLEPHVVAAQKLKERGREVAPGMIIGYIITKGTKGISQRATPVEFARLEDYDPEYYIDNQILPAIQRIFEAIGYTRDYLKEGITQTSLS

SEQ ID NO: 2288 - protein, 792 aa, unidentified
  REGION 1..792: note = Description of Unknown: Synthetic polypeptide
MPRILKGFLIDADFETVEGRALIRLFLRGEEGSFVVYDDSFSPYFYALPGDEPERVKERILASGAAEAIQKVEIEEKRLFGTPRVALRITVSHPQDVPRIRERIRRVEGVDLILEHDILFVRRYLIDRGIKPLTWLRLEVEERDGRALLRGVEQLEEEPPELRVAAVKIKVYNPKGAPRSSKDEIIMISVATSDGVEKVLTWREVQGLEQVEVLQDEKEMLLRFAELIKEGDYDVIVGYNTDSFDFPYIRDRLKKLGISLPLGRLDAELEVSRRGALPEARIRGRAHVDLYPIVRRHVKLNSYVLESVVEELLGIKKEKLDGERLFTYWDEGGEKRALLARYALEDARVTLALAEKFLPLYVELSTIVGQSLNDVARMTSGQLVEWLLMRYATPRGELIPNHPAGEEYAARARATYAGGYVREPKRGLVEHIAVFDFRSFGPSIIVSHNIDPSTLIVGNCEENRAPELEYCFSLEREGFIPAILKELIRRRAEIKRELKRSEGDRRRTLSFAEKALKILANSFYGYMGYPRARWYRREVAESVAAFARMYIKQVMRIAEEEFKLEVVYGDTDSLFVVIPPEKRELAQKFLQKVNESMPGIIELEFEGFYRRGLFVTKKRYALLSEDGKMVVKGLEFVRRDWAPIARETQKEVLRILLEEADPEKAARLVRDVIERIRQRRVSLEDITIYTQLTKRIKSYKSLEPHVVAAQKLKERGREVAPGMIIGYIITKGTKGISQRATPVEFARLEDYDPEYYIDNQILPAIQRIFEAIGYTRDYLKEGITQTSLSRWF

SEQ ID NO: 2289 - protein, 792 aa, unidentified
  REGION 1..792: note = Description of Unknown: Synthetic polypeptide
MPRILKGFLIDADFETVEGRALIRLFLRGEEGSFVVYDDSFSPYFYALPGDEPERVKERILASGAAEAIQKVEIEEKRLFGTPRVALRITVSHPQDVPRIRERIRRVEGVDLILEHDILFVRRYLIDRGIKPLTWLRLEVEERDGRALLRGVEQLEEEPPELRVAAVAIAVYNPKGAPRSSKDEIIMISVATSDGVEKVLTWREVQGLEQVEVLQDEKEMLLRFAELIKEGDYDVIVGYNTDSFDFPYIRDRLKKLGISLPVGRLDAELEVSRRGALPEARIRGRAHVDLYPIVRRHVKLNSYDLESVVEELLGIKKEKLDGERLFTYWDEGGEKRALLARYALEDARVTLALAEKFLPLYCELSTIVGQSLNDVARMTSGQLVEWLLMRYATPRGELIPNHPAGEEYAARARATYAGGYVREPKRGLVEHIAVFDFRSFGPSIIVSHNIDPSTLIVGNCEENRAPELEYCFSLEREGFIPAILKELIRRRAEIKRELKRSEGDRRRTLSFAEKALKILANSFYGYMGYPRARWYRRECAESVAAFARMYIKQVMRIAEEEFKLEVVYGDTDSLFVVIPPEKRELAQKFLQKVNESMPGIIELEFEGFYRRGLFVTKKRYALLSEDGKMVVKGLEFVRRDWAPIARETQKEVLRILLEEADPEKAARLVRDVIERIRQRRVSLEDITIYTQLTKRIKSYKSLEPHVVAAQKLKERGREVAPGMIIGYIITKGTKGISQRATPVEFARLEDYDPEYYIDNQILPAIQRIFEAIGYTRDYLKEGITQTSLSRWF

SEQ ID NO: 2290 - protein, 789 aa, unidentified; identical to SEQ ID NO: 2143
  REGION 1..789: note = Description of Unknown: Synthetic polypeptide

SEQ ID NO: 2291 - protein, 792 aa, unidentified
  REGION 1..792: note = Description of Unknown: Synthetic polypeptide
MPRILKGFLIDADFETVEGRALIRLFLRGEEGSFVVYDDSFSPYFYALPGDEPERVKERILASGAAEAIQKVEIEEKRLFGTPRVALRITVSHPLDVPRIRERIRRVEGVDLILEHDILFVRRYLIDRGIKPLTWLRLEVEERDGRALLRGVEQLEEEPPELRVAAVAIAVYNPKGAPRSSKDEIIMISVATSDGVEKVLTWREVQGLEQVEVLQDEKEMLLRFAELIKEGDYDVIVGYNTDSFDFPYIRDRLKKLGISLPLGRLDAELEVSRRGALPEARIRGRAHVDLYPIVRRHVKLNSYDLESVVEELLGIKKEKLDGERLFTYWDEGGEKRALLARYALEDARVTLALAEKFLPLYCELSTIVGQSLNDVARMTSGQLVEWLLMRYATPRGELIPNHPAGEEYAARARATYAGGYVREPKRGLVEHIAVFDFRSFGPSIIVSHNIDPSTLIVGNCEENRAPELEYCFSLEREGFIPAILKELIRRRAEIKRELKRSEGDRRRTLSFAEKALKILANSFYGYMGYPRARWYRRECAESVAAFARMYIKQVMRIAEEEFKLEVVYGDTDSLFVVIPPEKRELAQKFLQKVNESMPGIIELEFEGFYRRGLFVTKKRYALLSEDGKMVVKGLEFVRRDWAPIARETQKEVLRILLEEADPEKAARLVRDVIERIRQRRVSLEDITIYTQLTKRIKSYKSLEPHVVAAQKLKERGREVAPGMIIGYIITKGTKGISQRATPVEFARLEDYDPEYYIDNQILPAIQRIFEAIGYTRDYLKEGITQTSLSRWF

SEQ ID NO: 2292 - protein, 792 aa, unidentified
  REGION 1..792: note = Description of Unknown: Synthetic polypeptide
MPRILKGFLIDADFETVEGRALIRLFLRGEEGSFVVYDDSFSPYFYALPGDEPERVKERILASGAAEAIQKVEIEEKRLFGTPRVALRITVSHPQDVPRIRERIRRVEGVDLILEHDILFVRRYLIDRGIKPLTWLRLEVEERDGRALLRGVEQLEEEPPELRVAAVAIAVRNPKGAPRSSKDEIIMISVATSDGVEKVLTWREVQGLEQVEVLQDEKEMLLRFAELIKEGDYDVIVGYNTDSFDFPYIRDRLKKLGISLPLGRLDAELEVSRRGALPEARIRGRAHVDLYPIVRRHVKLNSYVLESVVEELLGIKKEKLDGERLFTYWDEGGEKRALLARYALEDARVTLALAEKFLPLYLELSTIVGQSLNDVARMTSGQLVEWLLMRYATPRGELIPNHPAGEEYAARARATYAGGYVREPKRGLVEHIAVFDFRSFGPSIIVSHNIDPSTLIVGNCEENRAPELEYCFSLEREGFIPAILKELIRRRAEIKRELKRSEGDRRRTLSFAEKALKILANSFYGYMGYPRARWYRRECAESVAAFARMYIKQVMRIAEEEFKLEVVYGDTDSLFVVIPPEKRELAQKFLQKVNESMPGIIELEFEGFYRRGLFVTKKRYALLSEDGKMVVKGLEFVRRDWAPIARETQKEVLRILLEEADPEKAARLVRDVIERIRQRRVSLEDITIYTQLTKRIKSYKSLEPHVVAAQKLKERGREVAPGMIIGYIITKGTKGISQRATPVEFARLEDYDPEYYIDNQILPAIQRIFEAIGYTRDYLKEGITQTSLSRRR

SEQ ID NO: 2293 - protein, 792 aa, unidentified
  REGION 1..792: note = Description of Unknown: Synthetic polypeptide
MPRILKGFLIDADFETVEGRALIRLFLRGEEGSFVVYDDSFSPYFYALPGDEPERVKERILASGAAEAIQKVEIEEKRLFGTPRVALRITVSHPQDVPRIRERIRRVEGVDLILEHDILFVRRYLIDRGIKPLTWLRLEVEERDGRALLRGVEQLEEEPPELRVAAVAIAVYNPKGAPRSSKDEIIMISVATSDGVEKVLTWREVQGLEQVEVLQDEKEMLLRFAELIKEGDYDVIVGYNTDSFDFPYIRDRLKKLGISLPLGRLDAELEVSRRGALPEARIRGRAHVDLYPIVRRHVKLNSYVLESVVEELLGIKKEKLDGERLFTYWDEGGEKRALLARYALEDARVTLALAEKFLPLYCELSTIVGQSLNDVARMTSGQLVEWLLMRYATPRGELIPNHPAGEEYAARARATYAGGYVREPKRGLVEHIAVFDFRSFGPSIIVSHNIDPSTLIVGNCEENRAPELEYCFSLEREGFIPAILKELIRRRAEIKRELKRSEGDRRRTLSFAEKALKILANSFYGYMGYPRARWYRRECAESVAAFARMYIKQVMRIAEEEFKLEVVYGDTDSLFVVIPPEKRELAQKFLQSVNESMPGIIELEFEGFYRRGLFVTKKRYALLSEDGKMVVKGLEFVRRDWAPIARETQKEVLRILLEEADPEKAARLVRDVIERIRQRRVSLEDITIYTQLTKRIKSYKSLEPHVVAAQKLKERGREVAPGMIIGYIITKGTKGISQRATPVEFARLEDYDPEYYIDNQILPAIQRIFEAIGYTRDYLKEGITQTSLSRWF

SEQ ID NO: 2294 - protein, 792 aa, unidentified
  REGION 1..792: note = Description of Unknown: Synthetic polypeptide
MPRILKGFLIDADFETVEGRALIRLFLRGEEGSFVVYDDSFSPYFYALPGDEPERVKERILASGAAEAIQKVEIEEKRLFGTPRVALRITVSHPQDVPRIRERIRRVEGVDLILEHDILFVRRYLIDRGIKPLTWLRLEVEERDGRALLRGVEQLEEEPPELRVAAVAIAVYNPKGAPRSSKDEIIMISVATSDGVEKVLTWREVQGLEQVEVLQDEKEMLLRFAELIKEGDYDVIVGYNTDSFDFPYIRDRLKKLGISLPLGRLDAELEVSRRGALPEARIRGRAHVDLYPIVRRHVKLNSYVLESVVEELLGIKKEKLDGERLFTYWDEGGEKRALLARYALEDARVTLALAEKFLPLYCELSTIVGQSLNDVARMTSGQLVEWLLMRYATPRGELIPNHPAGEEYAARARATYAGGYVREPKRGLVEHIAVFDFRSFGPSIIVSHNIDPSTLIVGNCEEDRAPELEYCFSLEREGFIPAILKELIRRRAEIKRELKRSEDDRRRTLSFAEKTLKILANSFYGYMGYPRARWYRRECAESVAAFARMYIKQVMRIAEEEFKLEVVYGDTDSLFVVIPPEKRELTQKFLQKVNESMPGIIELEFEGFYRRGLFVTKKRYVLLSEDGKMVVKGLEFVRRDWAPIARETQKEVLRILLEEADPEKAARLVRDVIERIRQRRVSLEDITIYTQLTKRIKSYKSLEPHVVAAQKLKERGREVAPGMIIGYIITKGTKGISQRATPVEFARLEDYDPEYYIDNQILPAIQRIFEAIGYTRDYLKEGITQTSLSRWF

SEQ ID NO: 2295 - protein, 792 aa, unidentified
  REGION 1..792: note = Description of Unknown: Synthetic polypeptide
MPRILKGFLIDADFETVEGRALIRLFLRGEEGSFVVYDDSFSPYFYALPGDEPERVKERILASGAAEAIQKVEIEEKRLFGTPRVALRITVSHPQDVPRIRERIRRVEGVDLILEHDILFVRRYLIDRGIKPLTWLRLEVEERDGRALLRGVEQLEEEPPELRVAAVAIAVYNPKGAPRSSKDEIIMISVATSDGVEKVLTWREVQGLEQVEVLQDEKEMLLRFAELIKEGDYDVIVGYNTDSFDFPYIRDRLKKLGISLPLGRLDAELEVSRRGALPEARIRGRAHVDLYPIVRRHVKLNSYVLESVVEELLGIKKEKLDGERLFTYWDEGGEKRALLARYALEDARVTLALAEKFLPLYCELSTIVGQSLNDVARMTSGQLVEWLLMRYATPRGELIPNHPAGEEYAARARATYAGGYVREPKRGLVEHIAVFDFRSFGPSIIVSHNIDPSTLIVGNCEENRAPELEYCFSLEREGFIPAILKELIRRRAEIKRELKRSEGDRRRTLSFAEKALKILASSFYGYMGYPRARWYRRECAESVAAFARMYIKQVMRIAEEEFKLEVVYGDTDSLFVVIPPEKRELAQKFLQKVNESMPGIIELEFEGFYRRGLFVTKKRYALLSEDGKMVVKGLEFVRRDWAPIARETQKEVLRILLEEADPEKAARLVRDVIERIRQRRVSLEDITIYTQLTKRIKSYKSLEPHVVAAQKLKERGREVAPGMIIGYIITKGTKGISQRATPVEFARLEDYDPEYYIDNQILPAIQRIFEAIGYTRDYLKEGITQTSLSRWF

SEQ ID NO: 2296 - protein, 792 aa, unidentified
  REGION 1..792: note = Description of Unknown: Synthetic polypeptide
MPRILKGFLIDADFETVEGRALIRLFLRGEEGSFVVYDDSFSPYFYALPGDEPERVKERILASGAAEAIQKVEIEEKRLFGTPRVALRITVSHPQDVPRIRERIRRVEGVDLILEHDILFVRRYLIDRGIKPLTWLRLEVEERDGRALLRGVEQLEEEPPELRVAAVAIAVYNPKGAPRSSKDEIIMISVATSDGVEKVLTWREVQGLEQVEVLQDEKEMLLRFAELIKEGDYDVIVGYNTDSFDFPYIRDRLKKLGISLPLGRLDAELEVSRRGALPEARIRGRAHVDLYPIVRRHVKLNSYVLESVVEELLGIKKEKLDGERLFTYWDEGGEKRALLARYALEDARVTLALAEKFLPLYCDLSTIVGQSLNDVARMTSGQLVEWLLMRYATPRGELAPNHPAGEEYAARARATYAGGYVREPKRGLVEHIAVFDFRSFGPSIIVSHNIDPSTLIVGNCEENRAPELEYCFSLEREGFIPAILKELIRRRAEIKRELKRSEGDRRRTLSFAEKALKILANSFYGYMGYPRARWYRRECAESVAAFARMYIKQVMRIAEEEFKLEVVYGDTDSLFVVIPPEKRELAQKFLQKVNESMPGIIELEFEGFYRRGLFVTKKRYALLSEDGKMVVKGLEFVRRDWAPIARETQKEVLRILLEEADPEKAARLVRDVIERIRQRRVSLEDITIYTQLTKRIKSYKSLEPHVVAAQKLKERGREVAPGMIIGYIITKGTKGISQRATPVEFARLEDYDPEYYIDNQILPAIQRIFEAIGYTRDYLKEGITQTSLSRWF

SEQ ID NO: 2297 - protein, 792 aa, unidentified
  REGION 1..792: note = Description of Unknown: Synthetic polypeptide
MPRILKGFLIDADFETVEGRALIRLFLRGEEGSFVVYDDSFSPYFYALPGDEPERVKERILASGAAEAIQKVEIEEKRLFGTPRVALRITVSHPQDVPRIRERIRRVEGVDLILEHDILFVRRYLIDRGIKPLTWLRLEVEERDGRALLRGVEQLEEEPPELRVAAVAIAVYNPKGAPRSSKDEIIMISVATSDGVEKVLTWREVQGLEQVEVLQDEKEMLLRFAELIKEGDYDVIVGYNTDSFDFPYIRDRLKKLGISLPLGRLDAELEVSRRGALPEARIRGRAHVDLYPIVRRHVKLNSYVLESVVEELLGIKKEKLDGERLFTYWDEGGEKRALLARYALEDARVTLALAEKFLPLYCELSTIVGQSLNDVARMTSGQLVEWLLMRYATPRGELIPNHPAGEEYAARARATYAGGYVREPKRGLVEHIAVFDFRSFGPSIIVSHNIDPSTLIVGNCEENRAPELEYCFSLEREGFIPAILKELIRRRAEIKRELKRSEGDRRRTLSFAEKALKILANSFYGYMGYPRARWYRRECAESVAAFARMYIKQVMRIAEEEFKLEVVYGDTDSLFVVIPPEKRELAQKFLQKVNESMPGIIELEFEGFYRRGLFVTKKRYALLSEDGKDVVKGLEFVRRDWAPIARETQKEVLRILLEEADPEKAARLVRDVIERIRQRRVSLEDITIYTQLTKRIKSYKSLEPHVVAAQKLKERGREVAPGMIIGYIITKGTKGISQRATPVEFARLEDYDPEYYIDNQILPAIQRIFEAIGYTRDYLKEGITQTSLSRWF

SEQ ID NO: 2298 - protein, 792 aa, unidentified
  REGION 1..792: note = Description of Unknown: Synthetic polypeptide
MPRILKGFLIDADFETVEGRALIRLFLRGEEGSFVVYDDSFSPYFYALPGDEPERVKERILASGAAEAIQKVEIEEKRLFGTPRVALRITVSHPQDVPRIRERIRRVEGVDLILEHDILFVRRYLIDRGIKPLTWLRLEVEERDGRALLRGVEQLEEEPPELRVAAVAIAVYNPKGAPRSSKDEIIMISVATSDGVEKVLTWREVQGLEQVEVLQDEKEMRLRFAELIKEGDYDVIVGYNTDSFDFPYIRDRLKKLGISLPLGRLDAELEVSRRGALPEARIRGRAHVDLYPIVRRHVKLNSYDLESVVEELLGIKKEKLDGERLFTYWDEGGEKRALLARYALEDARVTLALAEKFLPLYCELSTIVGQSLNDVARMTSGQLVEWLLMRYATPRGELIPNHPAGEEYAARARATYAGGYVREPKRGLVEHIAVFDFRSFGPSIIVSHNIDPSTLIVGNCEENRAPELEYCFSLEREGFIPAILKELIRRRAEIKRELKRSEGDRRRTLSFAEKALKILANSFYGYMGYPRARWYRRECAESVAAFARMYIKQVMRIAEEEFKLEVVYGDTDSLFVVIPPEKRELAQKFLQKVNESMPGIIELEFEGFYRRGLFVTKKRYALLSEDGKMVVKGLEFVRRDWAPIARETQKEVLRILLEEADPEKAARLVRDVIERIRQRRVSLEDITIYTQLTKRIKSYKSLEPHVVAAQKLKERGREVAPGMIIGYIITKGTKGISQRATPVEFARLEDYDPEYYIDNQILPAIQRIFEAIGYTRDYLKEGITQTSLSRWF

SEQ ID NO: 2299 - protein, 792 aa, unidentified
  REGION 1..792: note = Description of Unknown: Synthetic polypeptide
MPRILKGFLIDADFETVEGRALIRLFLRGEEGSFVVYDDSFSPYFYALPGDEPERVKERILASGAAEAIQKVEIEEKRLFGTPRVALRITVSHPQDVPRIRERIRRVEGVDLILEHDILFVRRYLIDRGIKPLTWLRLEVEERDGRALLRGVEQLEEEPPELRVAAVAILVYNPKGAPRSSKDEIIMISVATSDGVEKVLTWREVQGLEQVEVLQDEKEMLLRFAELIKEGDYDVIVGYNTDSFDFPYIRDRLKKLGISLPLGRLDAELEVSRRGALPEARIRGRAHVDLYPIVRRHVKLNSYVLESVVEELLGIKKEKLDGERLFTYWDEGGEKRALLARYALEDARVTLALAEKFLPLYIELSTIVGQSLNDVARMTSGQLVEWLLMRYATPRGELIPNHPAGEEYAARARATYAGGYVREPKRGLVEHIAVFDFRSFGPSIIVSHNIDPSTLIVGNCEENRAPELEYCFSLEREGFIPAILKELIRRRAEIKRELKRSEGDRRRTLSFAEKALKILANSFYGYMGYPRARWYRREVAESVAAFARMYIKQVMRIAEEEFKLEVVYGDTDSLFVVIPPEKRELAQKFLQKVNESMPGIIELEFEGFYRRGLFVTKKRYALLSEDGKMVVKGLEFVRRDWAPIARETQKEVLRILLEEADPEKAARLVRDVIERIRQRRVSLEDITIYTQLTKRIKSYKSLEPHVVAAQKLKERGREVAPGMIIGYIITKGTKGISQRATPVEFARLEDYDPEYYIDNQILPAIQRIFEAIGYTRDYLKEGITQTSLSRWF

SEQ ID NO: 2300 - protein, 792 aa, unidentified
  REGION 1..792: note = Description of Unknown: Synthetic polypeptide
MPRILKGFLIDADFETVEGRALIRLFLRGEEGSFVVYDDSFSPYFYALPGDEPERVKERILASGAAEAIQKVEIEEKRLFGTPRVALRITVSHPQDVPRIRERIRRVEGVDLILEHDILFVRRYLIDRGIKPLTWLRLEVEERDGRALLRGVEQLEEEPPELRVAAVAIAVYNPKGAPRSSKDEIILISVATSDGVEKVLTWREVQGLEQVEVLQDEKEMLLRFAELIKEGDYDVIVGYNTDSFDFPYIRDRLKKLGISLPLGRLDAELEVSRRGALPEARIRGRAHVDLYPIVRRHVKLNSYDLESVVEELLGIKKEKLDGERLFTYWDEGGEKRALLARYALEDARVTLALAEKFLPLYCELSTIVGQSLNDVARMTSGQLVEWLLMRYATPRGELIPNHPAGEEYAARARATYAGGYVREPKRGLVEHIAVFDFRSFGPSIIVSHNIDPSTLIVGNCEENRAPELEYCFSLEREGFIPAILKELIRRRAEIKRELKRSEGDRRRTLSFAEKALKILANSFYGYMGYPRARWYRRECAESVAAFARMYIKQVMRIAEEEFKLEVVYGDTDSLFVVIPPEKRELAQKFLQKVNESMPGIIELEFEGFYRRGLFVTKKRYALLSEDGKMVVKGLEFVRRDWAPIARETQKEVLRILLEEADPEKAARLVRDVIERIRQRRVSLEDITIYTQLTKRIKSYKSLEPHVVAAQKLKERGREVAPGMIIGYIITKGTKGISQRATPVEFARLEDYDPEYYIDNQILPAIQRIFEAIGYTRDYLKEGITQTSLSRWF

SEQ ID NO: 2301 - protein, 792 aa, unidentified
  REGION 1..792: note = Description of Unknown: Synthetic polypeptide
MPRILKGFLIDADFETVEGRALIRLFLRGEEGSFVVYDDSFSPYFYALPGDEPERVKERILASGAAEAIQKVEIEEKRLFGTPRVALRITVSHPQDVPRIRERIRRVEGVDLILEHDILFVRRYLIDRGIKPLTWLRLEVEERDGRALLRGVEQLEEEPPELRVAAVAIAVYNPKGAPRSSKDEIIMISIATSDGVEKVLTWREVQGLEQVEVLQDEKEMLLRFAELIKEGDYDVIVGYNTDSFDFPYIRDRLKKLGISLPLGRLDAELEVSRRGALPEARIRGRAHVDLYPIVRRHVKLNSYVLESVVEELLGIKKEKLDGERLFTYWDEGGEKRALLARYALEDARVTLALAEKFLPLYCELSTIVGQSLNDVARMTSGQLVEWLLMRYATPRGELIPNHPAGEEYAARARATYAGGYVREPKRGLVEHIAVFDFRSFGPSIIVSHNIDPSTLIVGNCEENRAPELEYCFSLEREGFIPAILKELIRRRAEIKRELKRSEGDRRRTLSFAEKALKILANSFYGYMGYPRARWYRRECAESVAAFARMYIKQVMRIAEEEFKLEVVYGDTDSLFVVIPPEKRELAQKFLQKVNESMPGIIELEFEGFYRRGLFVTKKRYALLSEDGKMVVKGLEFVRRDWAPIARETQKEVLRILLEEADPEKAARLVRDVIERIRQRRVSLEDITIYTQLTKRIKSYKSLEPHVVAAQKLKERGREVAPGMIIGYIITKGTKGISQRATPVEFARLEDYDPEYYIDNQILPAIQRIFEAIGYTRDYLKEGITQTSLSRWF

SEQ ID NO: 2302 - protein, 792 aa, unidentified
  REGION 1..792: note = Description of Unknown: Synthetic polypeptide
MPRILKGFLIDADFETVEGRALIRLFLRGEEGSFVVYDDSFSPYFYALPGDEPERVKERILASGAAEAIQKVEIEEKRLFGTPRVALRITVSHPQDVPRIRERIRRVEGVDLILEHDILFVRRYLIDRGIKPLTWLRLEVEERDGRALLRGVEQLEEEPPELRVAAVAIAVYNPKGAPRSSKDEIIRISVATSDGVEKVLTWREVQGLEQVEVLQDEKEMLLRFAELIKEGDYDVIVGYNTDSFDFPYIRDRLKKLGISLPLGRLDAELEVSRRGALPEARIRGRAHVDLYPIVRRHVKLNSYVLESVVEELLGIKKEKLDGERLFTYWDEGGEKRALLARYALEDARVTLALAEKFLPLYCELSTIVGQSLNDVARMTSGQLVEWLLMRYATPRGELIPNHPAGEEYAARARATYAGGYVREPKRGLVEHIAVFDFRSFGPSIIVSHNIDPSTLIVGNCEENRAPELEYCFSLEREGFIPAILKELIRRRAEIKRELKRSEGDRRRTLSFAEKALKILANSFYGYMGYPRARWYRRECAESVAAFARMYIKQVMRIAEEEFKLEVVYGDTDSLFVVIPPEKRELAQKFLQKVNESMPGIIELEFEGFYRRGLFVTKKRYALLSEDGKMVVKGLEFVRRDWAPIARETQKEVLRILLEEADPEKAARLVRDVIERIRQRRVSLEDITIYTQLTKRIKSYKSLEPHVVAAQKLKERGREVAPGMIIGYIITKGTKGISQRATPVEFARLEDYDPEYYIDNQILPAIQRIFEAIGYTRDYLKEGITQTSLSRWF

SEQ ID NO: 2303 - protein, 792 aa, unidentified
  REGION 1..792: note = Description of Unknown: Synthetic polypeptide
MPRILKGFLIDADFETVEGRALIRLFLRGEEGSFVVYDDSFSPYFYALPGDEPERVKERILASGAAEAIQKVEIEEKRLFGTPRVALRITVSHPQDVPRIRERIRRVEGVDLILEHDILFVRRYLIDRGIKPLTWLRLEVEERDGRALLRGVEQLEEEPPELRVAAVAIAVYNPKGAPRSSKDEIIMISVATSDGVEKVLTWREVQGLEQVEVLQDEKEMLLRFAELIKEGDYDVIVGYNTDSFDFPYIRDRLKKLGISLPLGRLDAELEVSRRGALPEARIRGRAHVDLYPIVRRHVKLNSYVLESVVEELLGIKKEKLDGERLFTYWDEGGEKRALLARYALEDARVTLALAEKFLPLYCELSTIVGQSLNDVARMTSGQLVEWLLMRYATPRGELIPNHPAGEEYAARARATYAGGYVREPKRGLVEHIAVFDFRSFGPSIIVSHNIDPSTLIVGNCEENRAPELEYCFSLEREGFIPAILKELIRRRAEIKRELKRSEGDRRRTLSFAEKALKILANSFYGYMGYPRARWYRRECAESVAAFARMYIKQVMRIAEEEFKLEVVYGDTDSLFVVIPPEKRELAQKFLQKVNESMPGIIELEFEGFYRRGLFVTKKRYALLSEDGKMVVKGLEFVRRDWAPIARETQKEVLRILLEEADPEKAARLVRDVIERIRQRRVSLEDITIYTQLTKRIKSYKSLEPHVVAAQLLKERGREVAPGMIIGYIITKGTKGISQRATPVEFARLEDYDPEYYIDNQILPAIQRIFEAIGYTRDYLKEGITQTSLSRWF

SEQ ID NO: 2304 - protein, 792 aa, unidentified
  REGION 1..792: note = Description of Unknown: Synthetic polypeptide
MPRILKGFLIDADFETVEGRALIRLFLRGEEGSFVVYDDSFSPYFYALPGDEPERVKERILASGAAEAIQKVEIEEKRLFGTPRVALRITVSHPQDVPRIRERIRRVEGVDLILEHDILFVRRYLIDRGIKPLTWLRLEVEERDGRALLRGVEQLEEEPPELRVAAVAIAVYNPKGAPRSSKDEIIMISVATSDGVEKVLTWREVQGLEQVEVLQDEKEMLLRFAELIKEGDYDVIVGYNTDSFDFPYIRDRLKKLGISLPLGRLDAELEVSRRGALPEARIRGRAHVDLYPIVRRHVKLNSYDLESVVEELLGIKKEKLDGERLFTYWDEGGEKRALLARYALEDARVTLALAEKFLPLYCELSTIVGQSLNDVARMTSGQLVEWLLMRYATPRGELIPNHPAGEEYAARARATYAGGYVREPKRGLVEHIAVFDFRSFGPSIIVSHNIDPSTLIVGNCEENRAPELEYCFSLEREGFIPAILKELIRRRAEIKRELKRSEGDRRRTLSFAEKALKILANSFYGYMGYPRARWYRRECAESVAAFARMYIKQVMRIAEEEFKLEVVYGDTDSLFVVIPPEKRELAQKFLQKVNESMPGIIELEFEGFYRRGLFVTKKRYALLSEDGKMVVKGLEFVRRDWAPIARETQAEVLRILLEEADPEKAARLVRDVIERIRQRRVSLEDITIYTQLTKRIKSYKSLEPHVVAAQKLKERGREVAPGMIIGYIITKGTKGISQRATPVEFARLEDYDPEYYIDNQILPAIQRIFEAIGYTRDYLKEGITQTSLSRWF

SEQ ID NO: 2305 - protein, 792 aa, unidentified
  REGION 1..792: note = Description of Unknown: Synthetic polypeptide
MPRILKGFLIDADFETVEGRALIRLFLRGEEGSFVVYDDSFSPYFYALPGDEPERVKERILASGAAEAIQKVEIEEKRLFGTMRVALRITVSHPQDVPRIRERIRRVEGVDLILEHDILFVRRYLIDRGIKPLTWLRLEVEERDGRALLRGVEQLEEEPPELRVAAVAIAVYNPKGAPRSSKDEIIMISVATSDGVEKVLTWREVQGLEQVEVLQDEKEMLLRFAELIKEGDYDVIVGYNTDSFDFPYIRDRLKKLGISLPLGRLDAELEVSRRGALPEARIRGRAHVDLYPIVRRHVKLNSYDLESVVEELLGIKKEKLDGERLFTYWDEGGEKRALLARYALEDARVTLALAEKFLPLYCELSTIVGQSLNDVARMTSGQLVEWLLMRYATPRGELIPNHPAGEEYAARARATYAGGYVREPKRGLVEHIAVFDFRSFGPSIIVSHNIDPSTLIVGNCEENRAPELEYCFSLEREGFIPAILKELIRRRAEIKRELKRSEGDRRRTLSFAEKALKILANSFYGYMGYPRARWYRRECAESVAAFARMYIKQVMRIAEEEFKLEVVYGDTDSLFVVIPPEKRELAQKFLQKVNESMPGIIELEFEGFYRRGLFVTKKRYALLSEDGKMVVKGLEFVRRDWAPIARETQKEVLRILLEEADPEKAARLVRDVIERIRQRRVSLEDITIYTQLTKRIKSYKSLEPHVVAAQKLKERGREVAPGMIIGYIITKGTKGISQRATPVEFARLEDYDPEYYIDNQILPAIQRIFEAIGYTRDYLKEGITQTSLSRWF

SEQ ID NO: 2306 - protein, 792 aa, unidentified
  REGION 1..792: note = Description of Unknown: Synthetic polypeptide
MPRILKGFLIDADFETVEGRALIRLFLRGEEGSFVVYDDSFSPYFYALPGDEPERVKERILASGAAEAIQKVEIEEKRLFGTPRVALRITVSHPQDVPRIRERIRRVEGVDLILEHDILFVRRYLIDRGIKPLTWLRLEVEERDGRALLRGVEQLEEEPPELRVAAVAIAVYNPKGAPRSSKDEIIMISVATSDGVEKVLTWREVQGLEQVEVLQDEKEMLLRFAELIKEGDYDVIVGYNTDSFDFPYIRDRLKKLGISLPLGRLDAELEVSRRGALPEARIRGRAHVDLYPIVRRHVKLNSYVLESVVEELLGIKKEKLDGERLFTYWDEGGEKRALLARYALEDARVTLALAEKFLPLYCELSTIVGQSLNDVARMTSGQLVEWLLDRYATPRGELIPNHPAGEEYAARARATYAGGYVREPKRGLVEHIAVFDFRSFGPSIIVSHNIDPSTLIVGNCEENRAPELEYCFSLEREGFIPAILKELIRRRAEIKRELKRSEGDRRRTLSFAEKALKILANSFYGYMGYPRARWYRRECAESVAAFARMYIKQVMRIAEEEFKLEVVYGDTDSLFVVIPPEKRELAQKFLQKVNESMPGIIELEFEGFYRRGLFVTKKRYALLSEDGKMVVKGLEFVRRDWAPIARETQKEVLRILLEEADPEKAARLVRDVIERIRQRRVSLEDITIYTQLTKRIKSYKSLEPHVVAAQKLKERGREVAPGMIIGYIITKGTKGISQRATPVEFARLEDYDPEYYIDNQILPAIQRIFEAIGYTRDYLKEGITQTSLSRWF

SEQ ID NO: 2307 - protein, 792 aa, unidentified
  REGION 1..792: note = Description of Unknown: Synthetic polypeptide
MPRILKGFLIDADFETVEGRALIRLFLRGEEGSFVVYDDSFSPYFYALPGDEPERVKERILASGAAEAIQKVEIEEKRLFGTPRVALRITVSHPQDVPRIRERIRRVEGVDLILEHDILFVRRYLIDRGIKPLTWLRLEVEERDGRALLRGVEQLEEEPPELRVAAVAIAVYNPKGAPRSSKDEIIMISVATSDGVEKVLTWREVQGLEQVEVLQDEKEMLLRFAELIKEGDYDVIVGYNTDSFDFPYIRDRLKKLGISLPLGRLDAELEVSRRGALPEARIRGRAHVDLYPIVRRHVKLNSYDLESVVEELLGIKKEKLDGERLFTYWDEGGEKRALLARYALEDARVTLALAEKFLPLYCELSTIVGQSLNDVARMTSGQLVEWLLMRYATPRGELIPNHPAGEEYAARARATYAGGYVREPKRGLVEHIAVFDFRSFGPSIIVSHNIDPSTLIVGNCEENRAPELEYCFSLEREGFIPAILKELIRRRAEIKRELKRSEGDRRRTLSFAEKALKILAYSFYGYMGYPRARWYRRECAESVAAFARMYIKQVMRIAEEEFKLEVVYGDTDSLFVVIPPEKRELAQKFLQKVNESMPGIIELEFEGFYRRGLFVTKKRYALLSEDGKMVVKGLEFVRRDWAPIARETQKEVLRILLEEADPEKAARLVRDVIERIRQRRVSLEDITIYTQLTKRIKSYKSLEPHVVAAQKLKERGREVAPGMIIGYIITKGTKGISQRATPVEFARLEDYDPEYYIDNQILPAIQRIFEAIGYTRDYLKEGITQTSLSRWF

SEQ ID NO: 2308 - protein, 792 aa, unidentified
  REGION 1..792: note = Description of Unknown: Synthetic polypeptide
MPRILKGFLIDADFETVEGRALIRLFLRGEEGSFVVYDDSFSPYFYALPGDEPERVKERILASGAAEAIQKVEIEEKRLFGTPRVALRITVSHPQDVPRIRERIRRVEGVDLILEHDILFVRRYLIDRGIKPLTWLRLEVEERDGRALLRGVEQLEEEPPELRVAAVAIAVYNPKGAPRSSKDEIIMISVATSDGVEKVLTWREVQGLEQVEVLQDEKEMLLRFAELIKEGDYDVIVGYNTDSFDFPYIRDRLKKLGISLPLGRLDAELEVSRRGALPEARIRGRAHVDLYPIVRRHVKLNSYVLESVVEELLGIKKEKLDGERLFTYWDEGGEKRALLARYALEDARVTLALAEKFLPLYCELSTIVGQSLNDVARMTSGQLVEWLLMRYATPRGELIPNHPAGEEYAARARATYAGGYVREPKRGLVEHIAVFDFRSFGPSIIVSHNIDPSTLIVGNCEENRAPELEYCFSLEREGFIPAILKELIRRRAEIKRELKRSEGDRRRTLSFAEKALKILANSFYGYMGYPRARWYRRECAESVAAFARMYIKQVMRIAEEEFKLEVVYGDTDSLFVVIPPEKRELAQKFLQKVNESMPGIIELEFEGFYRRGLFVTKKRYALLSEDGKMVVKGLEFVRRDWAPIARETQKEVLRILLEEADPEKAARLVRDVIERIRQRRVSLEDITINTQLTKRIKSYKSLEPHVVAAQKLKERGREVAPGMIIGYIITKGTKGISQRATPVEFARLEDYDPEYYIDNQILPAIQRIFEAIGYTRDYLKEGITQTSLSRWF

SEQ ID NO: 2309 - protein, 792 aa, unidentified
  REGION 1..792: note = Description of Unknown: Synthetic polypeptide
MPRILKGFLIDADFETVEGRALIRLFLRGEEGSFVVYDDSFSPYFYALPGDEPERVKERILASGAAEAIQKVEIEEKRLFGTPRVALRITVSHPQDVPRIRERIRRVEGVDLILEHDILFVRRYLIDRGIKPLTWLRLEVEERDGRALLRGVEQLEEEPPELRVAAVAIAVYNPKGAPRSSKDEIIMISVATSDGVEKVLTWREVQGLEQVEVLQDEKEMLLRFAELIKEGDYDVIVGYNTDSFDFPYIRDRLKKLGISLPLGRLDAELEVSRRGALPEARIRGRAHVDLYPIVRRHVKLNSYVLESVVEELLGIKKEKLDGERLFTYWDEGGEKRALLARYALEDARVTLALAEKFLPLYCELSTIVGQSLNDVARMTSGQLVEWLLMRYATPRGELIPNHPAGEEYAARARATYAGGYVREPKRGLVEHIAVFDFRSFGPSIIVSHNIDPSTLIVGNCEENRAPELEYCFSLEREGFIPAILKELIRRRAEIKRELKRSEGDRRRTLSFAEKALKILANSFYGYMGYPRARWYRRECAESVAAFARMYIKQVMRIAEEEFKLEVVYGDTDSLFVVIPPEKREVAQKFLQKVNESMPGIIELEFEGFYRRGLFVTKKRYALLSEDGKMVVKGLEFVRRDWAPIARETQKEVLRILLEEADPEKAARLVRDVIERIRQRRVSLEDITIYTQLTKRIKSYKSLEPHVVAAQKLKERGREVAPGMIIGYIITKGTKGISQRATPVEFARLEDYDPEYYIDNQILPAIQRIFEAIGYTRDYLKEGITQTSLSRWF

SEQ ID NO: 2310 - protein, 792 aa, unidentified; identical to SEQ ID NO: 2080
  REGION 1..792: note = Description of Unknown: Synthetic polypeptide

SEQ ID NO: 2311 - protein, 792 aa, unidentified; identical to SEQ ID NO: 1725
  REGION 1..792: note = Description of Unknown: Synthetic polypeptide

SEQ ID NO: 2312 - protein, 792 aa, unidentified
  REGION 1..792: note = Description of Unknown: Synthetic polypeptide
MPRILKGFLIDADFETVEGRALIRLFLRGEEGSFVVYDDSFSPYFYTLPGDEPERVKERILASGAAEAIQKVEIEEKRLFGTPRVALRITVSHPQDVPRIRERIRRVEGVDLILEHDILFVRRYLIDRGIKPLTWLRLEVEERDGRALLRGVEQLEEEPPELRVAAVAIAVYNPKGAPRSSKDEIIMISVATSDGVEKVLTWREVQGLEQVEVLQDEKEMLLRFAELIKEGDYDVIVGYNTDSFDFPYIRDRLKKLGISLPLGRLDAELEVSRRGALPEARIRGRAHVDLYPIVRRHVKLNSYVLESVVEELLGIKKEKLDGERLFTYWDEGGEKRALLARYALEDARVTLALAEKFLPLYCELSTIVGQSLNDVARMTSGQLVEWLLMRYATPRGELIPNHPAGEEYAARARATYAGGYVREPKRGLVEHIAVFDFRSFGPSIIVSHNIDPSTLIVGNCEENRAPELEYCFSLEREGFIPAILKELIRRRAEIKRELKRSEGDRRRTLSFAEKALKILANSFYGYMGYPRARWYRRECAESVAAFARMYIKQVMRIAEEEFKLEVVYGDTDSLFVVIPPEKRELAQKFLQKVNESMPGIIELEFEGFYRRGLFVTKKRYALLSEDGKMVVKGLEFVRRDWAPIARETQKEVLRILLEEADPEKAARLVRDVIERIRQRRVSLEDITIYTQLTKRIKSYKSLEPHVVAAQKLKERGREVAPGMIIGYIITKGTKGISQRATPVEFARLEDYDPEYYIDNQILPAIQRIFEAIGYTRDYLKEGITQTSLSRWF

SEQ ID NO: 2313 - protein, 792 aa, unidentified
  REGION 1..792: note = Description of Unknown: Synthetic polypeptide
MPRILKGFLIDADFETVEGRALIRLFLRGEEGSFVVYDDSFSPYFYALPGDEPERVKERILASGAAEAIQKVEIEEKRLFGTPRVALRITVSHPQDVPRIRERIRRVEGVDLDLEHDILFVRRYLIDRGIKPLTWLRLEVEERDGRALLRGVEQLEEEPPELRVAAVAIAVYNPKGAPRSSKDEIIMISVATSDGVEKVLTWREVQGLEQVEVLQDEKEMLLRFAELIKEGDYDVIVGYNTDSFDFPYIRDRLKKLGISLPLGRLDAELEVSRRGALPEARIRGRAHVDLYPIVRRHVKLNSYDLESVVEELLGIKKEKLDGERLFTYWDEGGEKRALLARYALEDARVTLALAEKFLPLYLELSTIVGQSLNDVARMTSGQLVEWLLMRYATPRGELIPNHPAGEEYAARARATYAGGYVREPKRGLVEHIAVFDFRSFGPSIIVSHNIDPSTLIVGNCEENRAPELEYCFSLEREGFIPAILKELIRRRAEIKRELKRSEGDRRRTLSFAEKALKILANSFYGYMGYPRARWYRRECAESVAAFARMYIKQVMRIAEEEFKLEVVYGDTDSLFVVIPPEKRELAQKFLQKVNESMPGIIELEFEGFYRRGLFVTKKRYALLSEDGKMVVKGLEFVRRDWAPIARETQKEVLRILLEEADPEKAARLVRDVIERIRQRRVSLEDITIYTQLTKRIKSYKSLEPHVVAAQKLKERGREVAPGMIIGYIITKGTKGISQRATPVEFARLEDYDPEYYIDNQILPAIQRIFEAIGYTRDYLKEGITQTSLSRWF

SEQ ID NO: 2314 - protein, 792 aa, unidentified
  REGION 1..792: note = Description of Unknown: Synthetic polypeptide
MPRILKGFLIDADFETVEGRALIRLFLRGEEGSFVVYDDSFSPYFYALPGDEPERVKERILASGAAEAIQKVEIEEKRLFGTPRVALRITVSHPQDVPRIRERIRRVEGVDLILEHDILFVRRYLIDRGIKPLTWLRLEVEERDGRALLRGVEQLEEEPPELRVAAVAIAVYNPKGAPRSSKDEIIMISVATSDGVEKVLTWREVQGLEQVEVLQDEKEMLLRFAELIKEGDYDVIVGYNTDSFDFPYIRDRLKKLGISLPLGRLDAELEVSRRGALPEARIRGRAHVDLYPIVRRHVKLNSYVLESVVEELLRIKKEKLDGERLFTYWDEGGEKRALLARYALEDARVTLALAEKFLPLYCELSTIVGQSLNDVARMTSGQLVEWLLMRYATPRGELIPNHPAGEEYAARARATYAGGYVREPKRGLVEHIAVFDFRSFGPSIIVSHNIDPSTLIVGNCEENRAPELEYCFSLEREGFIPAILKELIRRRAEIKRELKRSEGDRRRTLSFAEKALKILANSFYGYMGYPRARWYRRECAESVAAFARMYIKQVMRIAEEEFKLEVVYGDTDSLFVVIPPEKRELAQKFLQKVNESMPGIIELEFEGFYRRGLFVTKKRYALLSEDGKMVVKGLEFVRRDWAPIARETQKEVLRILLEEADPEKAARLVRDVIERIRQRRVSLEDITIYTQLTKRIKSYKSLEPHVVAAQKLKERGREVAPGMIIGYIITKGTKGISQRATPVEFARLEDYDPEYYIDNQILPAIQRIFEAIGYTRDYLKEGITQTSLSRWF

SEQ ID NO: 2315 - protein, 792 aa, unidentified; identical to SEQ ID NO: 1892
  REGION 1..792: note = Description of Unknown: Synthetic polypeptide

SEQ ID NO: 2316 - protein, 792 aa, unidentified
  REGION 1..792: note = Description of Unknown: Synthetic polypeptide
MPRILKGFLIDADFETVEGRALIRLFLRGEEGSFVVYDDSFSPYFYALPGDEPERVKERILASGAAEAIQKVEIEEKRLFGTPRVALRITVSHPQDVPRIRERIRRVEGVDLILEHDILFVRRYLIDRGIKPLTWLRLEVEERDGRALLRGVEQLEEEPPELRVAAVAIAVYNPKGAPRSSKDEIITISVATSDGVEKVLTWREVQGLEQVEVLQDEKEMLLRFAELIKEGDYDVIVGYNTDSFDFPYIRDRLKKLGISLPLGRLDAELEVSRRGALPEARIRGRAHVDLYPIVRRHVKLNSYVLESVVEELLGIKKEKLDGERLFTYWDEGGEKRALLARYALEDARVTLALAEKFLPLYCELSTIVGQSLNDVARMTSGQLVEWLLMRYATPRGELIPNHPAGEEYAARARATYAGGYVREPKRGLVEHIAVFDFRSFGPSIIVSHNIDPSTLIVGNCEENRAPELEYCFSLEREGFIPAILKELIRRRAEIKRELKRSEGDRRRTLSFAEKALKILANSFYGYMGYPRARWYRRECAESVAAFARMYIKQVMRIAEEEFKLEVVYGDTDSLFVVIPPEKRELAQKFLQKVNESMPGIIELEFEGFYRRGLFVTKKRYALLSEDGKMVVKGLEFVRRDWAPIARETQKEVLRILLEEADPEKAARLVRDVIERIRQRRVSLEDITIYTQLTKRIKSYKSLEPHVVAAQKLKERGREVAPGMIIGYIITKGTKGISQRATPVEFARLEDYDPEYYIDNQILPAIQRIFEAIGYTRDYLKEGITQTSLSRWF

SEQ ID NO: 2317 - protein, 792 aa, unidentified
  REGION 1..792: note = Description of Unknown: Synthetic polypeptide
MPRILKGFLIDADFETVEGRALIRLFLRGEEGSFVVYDDSFSPYFYALPGDEPERVKERILASGAAEAIQKVEIEEKRLFGTPRVALRITVSHPQDVPRIRERIRRVEGVDLILEHDILFVRRYLIDRGIKPLTWLRLEVEERDGRALLRGVEQLEEEPPELRVAAVAIAVYNPKGAPRSSKDEIIMISVATSDGVEKVLTWREVQGLEQVEVLQDEKEMLLRFAELIKEGDYDVIVGYNTDSFDFPYIRDRLKKLGISLPLGRLDAELEVSRRGALPEARIRGRAHVDLYPIVRRHVKLNSYDLESVVEELLGIKKEKLDGERLFTYWDEGGEKRALLARYALEDARVTLALAEKFLPLYCELSTIVGQSLNDVARMTSGQLVEWLLMRYATPRGELIPNHPAGEEYAARARATYAGGYVREPKRGLVEHIAVFDFRSFGPSIIVSHNIDPSTLIVGNCEENRAPELEYCFSLEREGFIPAILKELIRRRAEIKRELKRSEGDRRRTLSFAEKALKILANSFYGYMGYPRARWYRRECAESVAAFARMYIKQVMRIAEEEFKLEVVYGDTDSLFVVIPPEKRELAQKFLQKVNESMPGIIELEFEGFYRRGLFVTKKRYALLSEDGKMVVKGLEFVRRDWAPIARETQKEVLRILLEEADPEKAARLVRDVIERIRQRRVSLEDITIYTQLTKRIKSYKSLEPHVVAAQKLKERGREVAPGRIIGYIITKGTKGISQRATPVEFARLEDYDPEYYIDNQILPAIQRIFEAIGYTRDYLKEGITQTSLSRWF

SEQ ID NO: 2318 - protein, 792 aa, unidentified
  REGION 1..792: note = Description of Unknown: Synthetic polypeptide
MPRILKGFLIDADFETVEGRALIRLFLRGEEGSFVVYDDSFSPYFYALPGDEPERVKERILASGAAEAIQKVEIEEKRLFGTPRVALRITVSHPQDVPRIRERIRRVEGVDLILEHDILFVRRYLIDRGIKPLTWLRLEVEERDGRALLRGVEQLEEEPPELRVAAVAIAVYNPKGAPRSSKDEIIMISVATSDGVEKVLTWREVQGLEQVEVLQDEKEMLLRFAELIKEGDYDVIVGYNTDSFDFPYIRDRLKKLGISLPLGRLDAELEVSRRGALPEARIRGRAHVDLYPIVRRHVKLNSYVLESVVEELLGIKKEKLDGERLFTYWDEGGEKRALLARYALEDARVTLALAEKFLPLYLELSTIVGQSLNDVARMTSGQLVEWLLMRYATPRGELIPNHPAGEEYAARARATYAGGYVREPKRGLVEHIAVFDFRSFGPSIIVSHNIDPSTLIVGNCEENRAPELEYCFSLEREGFIPAILKELIRRRAEIKRELKRSEGDRRRTLSFAEKALKILANSFYGYMGYPRARWYRRECAESVAAFARMYIKQVMRIAEEEFKLEVVYGDTDSLFVVEPPEKRELAQKFLQKVNESMPGIIELEFEGFYRRGLFVTKKRYALLSEDGKMVVKGLEFVRRDWAPIARETQKEVLRILLEEADPEKAARLVRDVIERIRQRRVSLEDITIYTQLTKRIKSYKSLEPHVVAAQKLKERGREVAPGMIIGYIITKGTKGISQRATPVEFARLEDYDPEYYIDNQILPAIQRIFEAIGYTRDYLKEGITQTSLSRWF

SEQ ID NO: 2319 - protein, 792 aa, unidentified; identical to SEQ ID NO: 2168
  REGION 1..792: note = Description of Unknown: Synthetic polypeptide

SEQ ID NO: 2320 - protein, 792 aa, unidentified
  REGION 1..792: note = Description of Unknown: Synthetic polypeptide
MPRILKGFLIDADFETVEGRALIRLFLRGEEGSFVVYDDSFSPYFYALPGDEPERVKERILASGAAEAIQKVEIEEKRLFGTPRVALRITVSHPQDVPRIRERIRRVEGVDLILEHDILFVRRYLIDRGIKPLTWLRLEVEERDGRALLRGVEQLEEEPPELRVAAVAIAVYNPKGAPRSSKDEIIMISVATSDGVEKVLTWREVQGLEQVEVLQDEKEMLLRFAELIKEGDYDVIVGYNTDSFDFPYIRDRLKKLGISLPLGRLDAELEVSRRGALPEARIRGRAHVDLYPIVRRHVKLNSYVLESVVEELLGIKKEKLDGERLFTYWDEGGEKRALLARYALEDARVTLALAEKFLPLYCELSTIVGQSLNDVARMTSGQLVEWLLMRYATPRGELIPNHPAGEEYAARARATYAGGYVREPKRGLVEHIAVFDFRSSGPSIIVSHNIDPSTLIVGNCEENRAPELEYCFSLEREGFIPAILKELIRRRAEIKRELKRSEGDRRRTLSFAEKALKILANSFYGYMGYPRARWYRRECAESVAAFARMYIKQVMRIAEEEFKLEVVYGDTDSLFVVIPPEKRELAQKFLQKVNESMPGIIELEFEGFYRRGLFVTKKRYALLSEDGKMVVKGLEFVRRDWAPIARETQKEVLRILLEEADPEKAARLVRDVIERIRQRRVSLEDITIYTQLTKRIKSYKSLEPHVVAAQKLKERGREVAPGMIIGYIITKGTKGISQRATPVEFARLEDYDPEYYIDNQILPAIQRIFEAIGYTRDYLKEGITQTSLSRWF

SEQ ID NO: 2321 - protein, 792 aa, unidentified
  REGION 1..792: note = Description of Unknown: Synthetic polypeptide
MPRILKGFLIDADFETVEGRALIRLFLRGEEGSFVVYDDSFSPYFYALPGDEPERVKERILASGAAEAIQKVEIEEKRLFGTPRVALRITVSHPQDVPRIRERIRRVEGVDLILEHDILFVRRYLIDRGIKPLTWLRLEVEERDGRALLRGVEQLEEEPPELRVAAVAIAVYNPKGAPRSSKDEIIMISVATSDGVEKVLTWREVQGLEQVEVLQDEKEMLLRFAELIKEGDYDVIVGYNTDSFDFPYIRDRLKKLGISLPLGRLDAELEVSRRGALPEARIRGRAHVDLYPIVRRHVKLNSYVLESVVEELLGIKKEKLDGERLFTYWDEGGEKRALLARYALEDARVTLALAEKFLPLYCELSTIVGQSLNDVARMTSGQLVEWLLMRYATPRGELIPNHPAGEEYAARARATYAGGYVREPKRGLVEHIAVFDFRSFGPSIIVSHNIDPSTLIVGNCEENRAPELEYCFSLEREGFIPAILKELIRRRAEIKRELKRSEGDRRRTLSFAEKALKILANSFYGYMGYPRARWYRRECAESVAAFARMYIKQVMRIAEEEFKLEVVYGDTDSLFVVIPPEKRELAQKFLQKVNESMPGIIELEFEGFYRRGLFVTKKRYALLSEDGKMVVKGLEFVRRDWAPIARETQKEVLRILLEEADPEKAARLVRDVIERIRQRRVSLEDITIYTQLTKRIKSYKSLEPHVVAAQKLKERGREVAPGMIIGYIITKGTKGISRRATPVEFARLEDYDPEYYIDNQILPAIQRIFEAIGYTRDYLKEGITQTSLSRWF

SEQ ID NO: 2322 - protein, 792 aa, unidentified
  REGION 1..792: note = Description of Unknown: Synthetic polypeptide
MPRILKGFLIDADFETVEGRALIRLFLRGEEGSFVVYDDSFSPYFYALPGDEPERVKERILASGAAEAIQKVEIEEKRLFGTPRVALRITVSHPQDVPRIRERIRRVEGVDLILEHDILFVRRYLIDRGIKPLTWLRLEVEERDGRALLRGVEQLEEEPPELRVAAVAIAVYNPKGAPRSSKDEIIMISVATSDGVEKVLTWREVQGLEQVEVLQDEKEMLLRFAELIKEGDYDVIVGYNTDSFDFPYIRDRLKKLGISLPLGRLDAELEVSRRGALPEARIRGRAHVDLYPIVRRHVKLNSYVLESVVEELLGIKKEKLDGERLFTYWDEGGEKRALLARYALEDARVTLALAEKFLPLYCELSTIVGQSLNDVARMTSGQLVEWLLMRYATPRGELIPNHPAGEEYAARARATYAGGYVREPKRGLVEHIAVFDFRSFGPSIIVSHNIDPSTLIVGNCEENRAPELEYCFSLEREGFIPAILKELIRRRAEIKRELKRSEGDRRRTLSFAEKALKILANSFYGYMGYPRARWYRRECAESVAAFARMYIKQVMRIAEEEFKLEVVYGDTDSLFVVIPPEKRELAQNFLQKVNESMPGIIELEFEGFYRRGLFVTKKRYALLSEDGKMVVKGLEFVRRDWAPIARETQKEVLRILLEEADPEKAARLVRDVIERIRQRRVSLEDITIYTQLTKRIKSYKSLEPHVVAAQKLKERGREVAPGMIIGYIITKGTKGISQRATPVEFARLEDYDPEYYIDNQILPAIQRIFEAIGYTRDYLKEGITQTSLSRWF

SEQ ID NO: 2323 - protein, 792 aa, unidentified
  REGION 1..792: note = Description of Unknown: Synthetic polypeptide
MPRILKGFLIDADFETVEGRALIRLFLRGEEGSFVVYDDSFSPYFYALPGDEPERVKERILASGAAEAIQKVEIEEKRLFGTPRVALRITVSHPQDVPRIRERIRRVEGVDLILEHDILFVRRYLIDRGIKPLTWLRLEVEERDGRALLRGVEQLEEEPPELRVAAVAIAVYNPKGAPRSSKDEIIMISVATSDGVEKVLTWREVQGLEQVEVLQDEKEMLLRFAELIKEGDYDVIVGYNTDSFDFPYIRDRLKKLGISLPLGRLDAELEVSRRGALPEARIRGRAHVDLYPIVRRHVKLNSYVLESVVEELLGIKKEKLDGERLFAYWDEGGEKRALLARYALEDVRVTLALAEKFLPLYCELSTIVGQSLNDVARMTSGQLVEWLLMRYATPRGELIPNHPAGEEYAARARATYAGGYVREPKRGLVEHIAVFDFRSFGPSIIVSHNIDPSTLIVGNCEENRAPELEYCFSLEREGFIPAILKELIRRRAEIKRELKRSEGDRRRTLSFAEKALKILANSFYGYMGYPRARWYRRECAESVAAFARMYIKQVMRIAEEEFKLEVVYGDTDSLFVVIPPEKRELAQKFLQKVNESMPGIIELEFEGFYRRGLFVTKKRYALLSEDGKMVVKGLEFVRRDWAPIARETQKEVLRILLEEADPEKAARLVRDVIERIRQRRVSLEDITIYTQLTKRIKSYKSLEPHVVAAQKLKERGREVAPGMIIGYIITKGTKGISQRATPVEFARLEDYDPEYYIDNQILPAIQRIFEAIGYTRDYLKEGITQTSLSRWF

SEQ ID NO: 2324 - protein, 792 aa, unidentified
  REGION 1..792: note = Description of Unknown: Synthetic polypeptide
MPRILKGFLIDADFETVEGRALIRLFLRGEEGSFVVYDDSFSPYFYALPGDEPERVKERILASGAAEAIQKVEIEEKRLFGTPRVALRITVSHPQDVPRIRERIRRVEGVDLILEHDILFVRRYLIDRGIKPLTWLRLEVEERDGRALLRGVEQLEEEPPELRVAAVAIAVYNPKGAPRSSKDEIIMISVATSDGVEKVLTWREVQGLEQVEVLQDEKEMLLRFAELIKEGDYDVIVGYNTDSFDFPYIRDRLKKLGISLPLGRLDAELEVSRRGALPEARIRGRAHVDLYPIVRRHVKLNSYVLESVVEELLGIKKEKLDGERLFTYWDEGGEKRALLARYALEDARVTLALAEKFLPMYCELSTIVGQSLNDVARMTSGQLVEWLLMRYATPRGELIPNHPAGEEYAARARATYAGGYVREPKRGLVEHIAVFDFRSFGPSIIVSHNIDPSTLIVGNCEENRAPELEYCFSLEREGFIPAILKELIRRRAEIKRELKRSEGDRRRTLSFAEKALKILANSFYGYMGYPRARWYRRECAESVAAFARMYIKQVMRIAEEEFKLEVVYGDTDSLFVVIPPEKRELAQKFLQKVNESMPGIIELEFEGFYRRGLFVTKKRYALLSEDGKMVVKGLEFVRRDWAPIARETQKEVLRILLEEADPEKAARLVRDVIERIRQRRVSLEDITIYTQLTKRIKSYKSLEPHVVAAQKLKERGREVAPGMIIGYIITKGTKGISQRATPVEFARLEDYDPEYYIDNQILPAIQRIFEAIGYTRDYLKEGITQTSLSRWF

SEQ ID NO: 2325 - protein, 790 aa, unidentified
  REGION 1..790: note = Description of Unknown: Synthetic polypeptide
MPRILKGFLIDADFETVEGRALIRLFLRGEEGSFVVYDDSFSPYFYALPGDEPERVKERILASGAAEAIQKVEIEEKRLFGTPRVALRITVSHPQDVPRIRERIRRVEGVDLILEHDILFVRRYLIDRGIKPLTWLRLEVEERDGRALLRGVEQLEEEPPELRVAAVAIAVYNPKGAPRSSKDEIIMISVATSDGVEKVLTWREVQGLEQVEVLQDEKEMLLRFAELIKEGDYDVIVGYNTDSFDFPYIRDRLKKLGISLPLGRLDAELEVSRRGALPEARIRGRAHVDLYPIVRRHVKLNSYVLESVVEELLGIKKEKLDGERLFTYWDEGGEKRALLARYALEDARVTLALAEKFLPLYCELSTIVGQSLNDVARMTSGQLVEWLLMRYATPRGELIPNHPAGEEYAARARATYAGGYVREPKRGLVEHIAVFDFRSFGPSIIVSHNIDPSTLIVGNCEENRAPELEYCFSLEREGFIPAILKELIRRRAEIKRELKRSEGDRRRTLSFAEKALKILANSFYGYMGYPRARWYRRECAESVAAFARMYIKQVMRIAEEEFKLEVVYGDTDSLFVVIPPEKRELAQKFLQKVNESMPGIIELEFEGFYRRGLFVTKKRYALLSEDGKMVVKGLEFVRRDWAPIARETQKEVLRILLEEADPEKAARLVRDVIERIRQRRVSLEDITIYTQLTKRIKSYKSLEPHVVAAQKLKERGREVAPGMIIGYIITKGTKGISQRATPVEFARLEDYDPEYYIDNQILPAIQRIFEAIGYTRDYLKEGITQTSLSR

SEQ ID NO: 2326 - protein, 792 aa, unidentified
  REGION 1..792: note = Description of Unknown: Synthetic polypeptide
MPRILKGFLIDADFETVEGRALIRLFLRGEEGSFVVYDDSFSPYFYALPGDEPERVKERILASGAAEAIQKVEIEEKRLFGTPRVALRITVSHPQDVPRIRERIRRVEGVDLILEHDILFVRRYLIDRGIKPLTWLRLEVEERDGRALLRGVEQLEEEPPELRVAAVAIAVYNPKGAPRSSKDEIIMISVATSDGVEKVLTWREVQGLEQVEVLQDEKEMLLRFAELIKEGDYDVIVGYNTDSFDFPYIRDRLKKLGISLPLGRLDAELEVSRRGALPEARIRGRAHVDLYPIVRRHVKLNSYVLESVVEELDGIKKEKLDGERLFTYWDEGGEKRALLARYALEDARVTLALAEKFLPLYCELSTIVGQSLNDVARMTSGQLVEWLLMRYATPRGELIPNHPAGEEYAARARATYAGGYVREPKRGLVEHIAVFDFRSFGPSIIVSHNIDPSTLIVGNCEENRAPELEYCFSLEREGFIPAILKELIRRRAEIKRELKRSEGDRRRTLSFAEKALKILANSFYGYMGYPRARWYRRECAESVAAFARMYIKQVMRIAEEEFKLEVVYGDTDSLFVVIPPEKRELAQKFLQKVNESMPGIIELEFEGFYRRGLFVTKKRYALLSEDGKMVVKGLEFVRRDWAPIARETQKEVLRILLEEADPEKAARLVRDVIERIRQRRVSLEDITIYTQLTKRIKSYKSLEPHVVAAQKLKERGREVAPGMIIGYIITKGTKGISQRATPVEFARLEDYDPEYYIDNQILPAIQRIFEAIGYTRDYLKEGITQTSLSRWF

SEQ ID NO: 2327 - protein, 792 aa, unidentified
  REGION 1..792: note = Description of Unknown: Synthetic polypeptide
MPRILKGFLIDADFETVEGRALIRLFLRGEEGSFVVYDDSFSPYFYALPGDEPERVKERILASGAAEAIQKVEIEEKRLFGTPRVALRITVSHPQDVPRIRERIRRVEGVDLILEHDILFVRRYLIDRGIKPLTWLRLEVEERDGRALLRGVEQLEEEPPELRVAAVAIAVYNPKGAPRSSKDEIIMISVATSDGVEKVLTWREVQGLEQVEVLQDEKEMLLRFAELIKEGDYDVIVGYNTDSFDFPYIRDRLKKLGISLPLGRLDAELEVSRRGALPEARIRGRAHVDLYPIVRRHVKLNSYVLESVVEELLGIKKEKLDGERLFTYWDEGGEKRALLARYALEDARVTLALAEKFLPLYCELSTIVGQSLNDVARMTSGQLVEWLLSRYATPRGELIPNHPAGEEYAARARATYAGGYVREPKRGLVEHIAVFDFRSFGPSIIVSHNIDPSTLIVGNCEENRAPELEYCFSLEREGFIPAILKELIRRRAEIKRELKRSEGDRRRTLSFAEKALKILANSFYGYMGYPRARWYRRECAESVAAFARMYIKQVMRIAEEEFKLEVVYGDTDSLFVVIPPEKRELAQKFLQKVNESMPGIIELEFEGFYRRGLFVTKKRYALLSEDGKMVVKGLEFVRRDWAPIARETQKEVLRILLEEADPEKAARLVRDVIERIRQRRVSLEDITIYTQLTKRIKSYKSLEPHVVAAQKLKERGREVAPGMIIGYIITKGTKGISQRATPVEFARLEDYDPEYYIDNQILPAIQRIFEAIGYTRDYLKEGITQTSLSRWF

SEQ ID NO: 2328 - protein, 792 aa, unidentified
  REGION 1..792: note = Description of Unknown: Synthetic polypeptide
MPRILKGFLIDADFETVEGRALIRLFLRGEEGSFVVYDDSFSPYFYALPGDEPERVKERILASGAAEAIQKVEIEEKRLFGTPRVALRITVSHPQDVPRIRERIRRVEGVDLILEHDILFVRRYLIDRGIKPLTWLRLEVEERDGRALLRGVEQLEEEPPELRVAAVAIAVYNPKGAPRSSKDEIIMISVATSDGVEKVLTWREVQGLEQVEVLQDEKEMLLRFAELIKEGDYDVIVGYNTDSFDFPYIRDRLKKLGISLPLGRLDAELEVSRRGALPEARIRGRAHVDLYPIVRRHVKLNSYDLESVVEELLGIKKEKLDGERLFTYWDEGGEKRALLARYALEDARVTLALAEKFLPLYCELSTIVGQSLNDVARMTSGQLVEWLLMRYATPRGELIPNHPAGEEYAARARATYAGGYVREPKRGLVEHIAVFDFRSFGPSIIVSHNIDPSTLIVGNCEENRAPELEYCFSLEREGFIPAILKELIRRRAEIKRELKRSEGDRRRTLSFAEKALKILARSFYGYMGYPRARWYRRECAESVAAFARMYIKQVMRIAEEEFKLEVVYGDTDSLFVVIPPEKRELAQKFLQKVNESMPGIIELEFEGFYRRGLFVTKKRYALLSEDGKMVVKGLEFVRRDWAPIARETQKEVLRILLEEADPEKAARLVRDVIERIRQRRVSLEDITIYTQLTKRIKSYKSLEPHVVAAQKLKERGREVAPGMIIGYIITKGTKGISQRATPVEFARLEDYDPEYYIDNQILPAIQRIFEAIGYTRDYLKEGITQTSLSRWF

SEQ ID NO: 2329 - protein, 792 aa, unidentified; identical to SEQ ID NO: 1760
  REGION 1..792: note = Description of Unknown: Synthetic polypeptide

SEQ ID NO: 2330 - protein, 792 aa, unidentified
  REGION 1..792: note = Description of Unknown: Synthetic polypeptide
MPRILKGFLIDADFETVEGRALIRLFLRGEEGSFVVYDDSFSPYFYALPGDEPERVKERILASGAAEAIQKVEIEEKRLFGTPRVALRITVSHPQDVPRIRERIRRVEGVDLILEHDILFVRRYLIDRGIKPLTWLRLEVEERDGRALLRGVEQLEEEPPELRVAAVAIAVYNPKGAPRSSKDEIIMISVATSDGVEKVLTWREVQGLEQVEVLQDEKEMLLRFAELIKEGDYDVIVGYNTDSFDFPYIRDRLKKLGISLPLGRLDAELEVSRRGALPEARIRGRAHVDLYPIVRRHVKLNSYDLESVVEELLGIKKEKLDGERLFTYWDEGGEKRALLARYALEDARVTLALAEKFLPLYCELSTIVGQSLNDVARMTSGQLVEWLLMRYATPRGELIPNHPAGEEYAARARATYAGGYVREPKRGLVEHIAVFDFRSFGPSIIVSHNIDPSTLIVGNCEENRAPELEYCFSLEREGFIPAILKELIRRRAEIKRELKRSEGDRRRTLSFAEKALKILANSFYGYMGYPRARWYRRECAESVAAFARMYIKQVMRIAEEEFKLEVVYGDTDSLFVVIPPEKRELAQKFLQKVNESMPGIIELEFEGFYRRGLFVTKKRYALLSEDGKDVVKGLEFVRRDWAPIARETQKEVLRILLEEADPEKAARLVRDVIERIRQRRVSLEDITIYTQLTKRIKSYKSLEPHVVAAQKLKERGREVAPGMIIGYIITKGTKGISQRATPVEFARLEDYDPEYYIDNQILPAIQRIFEAIGYTRDYLKEGITQTSLSRWF

SEQ ID NO: 2331 - protein, 792 aa, unidentified
  REGION 1..792: note = Description of Unknown: Synthetic polypeptide
MPRILKGFLIDADFETVEGRALIRLFLRGEEGSFVVYDDSFSPYFYALPGDEPERVKERILASGAAEAIQKVEIEEKRLFGTPRVALRITVSHPQDVPRIRERIRRVEGVDLILEHDILFVRRYLIDRGIKPLTWLRLEVEERDGRALLRGVEQLEEEPPELRVAAVAIAVYNPKGAPRSSKDEIIMISVATSDGVEKVLTWREVQGLEQVEVLQDEKEMLLRFAELIKEGDYDVIVGYNTDSFDFPYIRDRLKKLGISLPLGRLDAELEVSRRGALPEARIRGRAHVDLYPIVRRHVKLNNYVLESVVEELLGIKKEKLDGERLFTYWDEGGEKRALLARYALEDARVTLALAEKFLPLYCELSTIVGQSLNDVARMTSGQLVEWLLMRYATPRGELIPNHPAGEEYAARARATYAGGYVREPKRGLVEHIAVFDFRSFGPSIIVSHNIDPSTLIVGNCEENRAPELEYCFSLEREGFIPAILKELIRRRAEIKRELKRSEGDRRRTLSFAEKALKILANSFYGYMGYPRARWYRRECAESVAAFARMYIKQVMRIAEEEFKLEVVYGDTDSLFVVIPPEKRELAQKFLQKVNESMPGIIELEFEGFYRRGLFVTKKRYALLSEDGKMVVKGLEFVRRDWAPIARETQKEVLRILLEEADPEKAARLVRDVIERIRQRRVSLEDITIYTQLTKRIKSYKSLEPHVVAAQKLKERGREVAPGMIIGYIITKGTKGISQRATPVEFARLEDYDPEYYIDNQILPAIQRIFEAIGYTRDYLKEGITQTSLSRWF

SEQ ID NO: 2332 - protein, 779 aa, unidentified
  REGION 1..779: note = Description of Unknown: Synthetic polypeptide
MPRILKGFLIDADFETVEGRALIRLFLRGEEGSFVVYDDSFSPYFYALPGDEPERVKERILASGAAEAIQKVEIEEKRLFGTPRVALRITVSHPQDVPRIRERIRRVEGVDLILEHDILFVRRYLIDRGIKPLTWLRLEVEERDGRALLRGVEQLEEEPPELRVAAVAIAVYNPKGAPRSSKDEIIMISVATSDGVEKVLTWREVQGLEQVEVLQDEKEMLLRFAELIKEGDYDVIVGYNTDSFDFPYIRDRLKKLGISLPLGRLDAELEVSRRGALPEARIRGRAHVDLYPIVRRHVKLNSYVLESVVEELLGIKKEKLDGERLFTYWDEGGEKRALLARYALEDARVTLALAEKFLPLYCELSTIVGQSLNDVARMTSGQLVEWLLMRYATPRGELIPNHPAGEEYAARARATYAGGYVREPKRGLVEHIAVFDFRSFGPSIIVSHNIDPSTLIVGNCEENRAPELEYCFSLEREGFIPAILKELIRRRAEIKRELKRSEGDRRRTLSFAEKALKILANSFYGYMGYPRARWYRRECAESVAAFARMYIKQVMRIAEEEFKLEVVYGDTDSLFVVIPPEKRELAQKFLQKVNESMPGIIELEFEGFYRRGLFVTKKRYALLSEDGKMVVKGLEFVRRDWAPIARETQKEVLRILLEEADPEKAARLVRDVIDRIRQRRVSLEDITIYTQLTKRIKSYKSLEPHVVAAQKLKERGREVAPGMIIGYIITKGTKGISQRATPVEFARLEDYDPEYYIDNQILPAIQRIFEAIGYTRDYL

SEQ ID NO: 2333 - protein, 792 aa, unidentified
  REGION 1..792: note = Description of Unknown: Synthetic polypeptide
MPRILKGFLIDADFETVEGRALIRLFLRGEEGEFVVYDDSFSPYFYALPGDEPERVKERILASGAAEAIQKVEIEEKRLFGTPRVALRITVSHPQDVPRIRERIRRVEGVDLILEHDILFVRRYLIDRGIKPLTWLRLEVEERDGRALLRGVEQLEEEPPELRVAAVAIAVYNPKGAPRSSKDEIIMISVATSDGVEKVLTWREVQGLEQVEVLQDEKEMLLRFAELIKEGDYDVIVGYNTDSFDFPYIRDRLKKLGISLPLGRLDAELEVSRRGALPEARIRGRAHVDLYPIVRRHVKLNSYDLESVVEELLGIKKEKLDGERLFTYWDEGGEKRALLARYALEDARVTLALAEKFLPLYCELSTIVGQSLNDVARMTSGQLVEWLLMRYATPRGELIPNHPAGEEYAARARATYAGGYVREPKRGLVEHIAVFDFRSFGPSIIVSHNIDPSTLIVGNCEENRAPELEYCFSLEREGFIPAILKELIRRRAEIKRELKRSEGDRRRTLSFAEKALKILANSFYGYMGYPRARWYRRECAESVAAFARMYIKQVMRIAEEEFKLEVVYGDTDSLFVVIPPEKRELAQKFLQKVNESMPGIIELEFEGFYRRGLFVTKKRYALLSEDGKMVVKGLEFVRRDWAPIARETQKEVLRILLEEADPEKAARLVRDVIERIRQRRVSLEDITIYTQLTKRIKSYKSLEPHVVAAQKLKERGREVAPGMIIGYIITKGTKGISQRATPVEFARLEDYDPEYYIDNQILPAIQRIFEAIGYTRDYLKEGITQTSLSRWF

SEQ ID NO: 2334 - protein, 792 aa, unidentified
  REGION 1..792: note = Description of Unknown: Synthetic polypeptide
MPRILKGFLIDADFETVEGRALIRLFLRGEEGSFVVYDDSFSPYFYALPGDEPERVKERILASGAAEAIQKVEIEEKRLFGTPRVALRITVSHPQDVPRIRERIRRVEGVDLILEHDILFVRRYLNDRGIKPLTWLRLEVEERDGRALLRGVEQLEEEPPELRVAAVAIAVYNPKGAPRSSKDEIIMISVATSDGVEKVLTWREVQGLEQVEVLQDEKEMLLRFAELIKEGDYDVIVGYNTDSFDFPYIRDRLKKLGISLPLGRLDAELEVSRRGALPEARIRGRAHVDLYPIVRRHVKLNSYVLESVVEELLGIKKEKLDGERLFTYWDEGGEKRALLARYALEDARVTLALAEKFLPLYCELSTIVGQSLNDVARMTSGQLVEWLLMRYATPRGELIPNHPAGEEYAARARATYAGGYVREPKRGLVEHIAVFDFRSFGPSIIVSHNIDPSTLIVGNCEENRAPELEYCFSLEREGFIPAILKELIRRRAEIKRELKRSEGDRRRTLSFAEKALKILANSFYGYMGYPRARWYRRECAESVAAFARMYIKQVMRIAEEEFKLEVVYGDTDSLFVVIPPEKRELAQKFLQKVNESMPGIIELEFEGFYRRGLFVTKKRYALLSEDGKMVVKGLEFVRRDWAPIARETQKEVLRILLEEADPEKAARLVRDVIERIRQRRVSLEDITIYTQLTKRIKSYKSLEPHVVAAQKLKERGREVAPGMIIGYIITKGTKGISQRATPVEFARLEDYDPEYYIDNQILPAIQRIFEAIGYTRDYLKEGITQTSLSRWF

SEQ ID NO: 2335 - protein, 792 aa, unidentified
  REGION 1..792: note = Description of Unknown: Synthetic polypeptide
MPRILKGFLIDADFETVEGRALIRLFLRGEEGSFVVYDDSFSPYFYALPGDEPERVKERILASGAAEAIQKVEIEEKRLFGTPRVALRITVSHPQDVPRIRERIRRVEGVDLDLEHDILFVRRYLIDRGIKPLTWLRLEVEERDGRALLRGVEQLEEEPPELRVAAVAIAVYNPKGAPRSSKDEIIMISVATSDGVEKVLTWREVQGLEQVEVLQDEKEMLLRFAELIKEGDYDVIVGYNTDSFDFPYIRDRLKKLGISLPLGRLDAELEVSRRGALPEARIRGRAHVDLYPIVRRHVKLNSYDLESVVEELLGIKKEKLDGERLFTYWDEGGEKRALLARYALEDARVTLALAEKFLPLYCELSTIVGQSLNDVARMTSGQLVEWLLMRYATPRGELIPNHPAGEEYAARARATYAGGYVREPKRGLVEHIAVFDFRSFGPSIIVSHNIDPSTLIVGNCEENRAPELEYCFSLEREGFIPAILKELIRRRAEIKRELKRSEGDRRRTLSFAEKALKILANSFYGYMGYPRARWYRRECAESVAAFARMYIKQVMRIAEEEFKLEVVYGDTDSLFVVIPPEKRELAQKFLQKVNESMPGIIELEFEGFYRRGLFVTKKRYALLSEDGKMVVKGLEFVRRDWAPIARETQKEVLRILLEEADPEKAARLVRDVIERIRQRRVSLEDITIYTQLTKRIKSYKSLEPHVVAAQKLKERGREVAPGMIIGYIITKGTKGISQRATPVEFARLEDYDPEYYIDNQILPAIQRIFEAIGYTRDYLKEGITQTSLSRWF

SEQ ID NO: 2336 - protein, 792 aa, unidentified
  REGION 1..792: note = Description of Unknown: Synthetic polypeptide
MPRILKGFLIDADFETVEGRALIRLFLRGEEGSFVVYDDSFSPYFYALPGDEPERVKERILASGAAEAIQKVEIEEKRLFGTPRVALRITVSHPQDVPRIRERIRRVEGVDLILEHDILFVRRYLIDRGIKPLTWLRLEVEERDGRALLRGVEQLEEEPPELRVAAVSISVYNPKGAPRSSKDEIIMISVATSDGVEKVLTWREVQGLEQVEVLQDEKEMLLRFAELIKEGDYDVIVGYNTDSFDFPYIRDRLKKLGISLPLGRLDAELEVSRRGALPEARIRGRAHVDLYPIVRRHVKLNSYVLESVVEELLGIKKEKLDGERLFTYWDEGGEKRALLARYALEDARVTLALAEKFLPLYVELSTIVGQSLNDVARMTSGQLVEWLLMRYATPRGELIPNHPAGEEYAARARATYAGGYVREPKRGLVEHIAVFDFRSFGPSIIVSHNIDPSTLIVGNCEENRAPELEYCFSLEREGFIPAILKELIRRRAEIKRELKRSEGDRRRTLSFAEKALKILANSFYGYMGYPRARWYRREVAESVAAFARMYIKQVMRIAEEEFKLEVVYGDTDSLFVVIPPEKRELAQKFLQKVNESMPGIIELEFEGFYRRGLFVTKKRYALLSEDGKMVVKGLEFVRRDWAPIARETQKEVLRILLEEADPEKAARLVRDVIERIRQRRVSLEDITIYTQLTKRIKSYKSLEPHVVAAQKLKERGREVAPGMIIGYIITKGTKGISQRATPVEFARLEDYDPEYYIDNQILPAIQRIFEAIGYTRDYLKEGITQTSLSRWF

SEQ ID NO: 2337 - protein, 789 aa, unidentified
  REGION 1..789: note = Description of Unknown: Synthetic polypeptide
MPRILKGFLIDADFETVEGRALIRLFLRGEEGSFVVYDDSFSPYFYALPGDEPERVKERILASGAAEAIQKVEIEEKRLFGTPRVALRITVSHPQDVPRIRERIRRVEGVDLILEHDILFVRRYLIDRGIKPLTWLRLEVEERDGRALLRGVEQLEEEPPELRVAAVAIAVYNPKGAPRSSKDEIRMISVATSDGVEKVLTWREVQGLEQVEVLQDEKEMLLRFAELIKEGDYDVIVGYNTDSFDFPYIRDRLKKLGISLPLGRLDAELEVSRRGALPEARIRGRAHVDLYPIVRRHVKLNSYVLESVVEELLGIKKEKLDGERLFTYWDEGGEKRALLARYALEDARVTLALAEKFLPLYLELSTIVGQSLNDVARMTSGQLVEWLLMRYATPRGELIPNHPAGEEYAARARATYAGGYVREPKRGLVEHIAVFDFRSFGPSIIVSHNIDPSTLIVGNCEENRAPELEYCFSLEREGFIPAILKELIRRRAEIKRELKRSEGDRRRTLSFAEKALKILANSFYGYMGYPRARWYRRECAESVAAFARMYIKQVMRIAEEEFKLEVVYGDTDSLFVVIPPEKRELAQKFLQKVNESMPGIIELEFEGFYRRGLFVTKKRYALLSEDGKMVVKGLEFVRRDWAPIARETQKEVLRILLEEADPEKAARLVRDVIERIRQRRVSLEDITIYTQLTKRIKSYKSLEPHVVAAQKLKERGREVAPGMIIGYIITKGTKGISQRATPVEFARLEDYDPEYYIDNQILPAIQRIFEAIGYTRDYLKEGITQTSLS

SEQ ID NO: 2338 - protein, 791 aa, unidentified; identical to SEQ ID NO: 1802
  REGION 1..791: note = Description of Unknown: Synthetic polypeptide

SEQ ID NO: 2339 - protein, 792 aa, unidentified
  REGION 1..792: note = Description of Unknown: Synthetic polypeptide
MPRILKGFLIDADFETVEGRALIRLFLRGEEGSFVVYDDSFSPYFYALPGDEPERVKERILASGAAEAIQKVEIEEKRLFGTPRVALRITVSHPQDVPRIRERIRRVEGVDLILEHDILFVRRYLIDRGIKPLTWLRLEVEERDGRALLRGVEQLEEESPELRVAAVAIAVYNPKGAPRSSKDEIIMISVATSDGVEKVLTWREVQGLEQVEVLQDEKEMLLRFAELIKEGDYDVIVGYNTDSFDFPYIRDRLKKLGISLPLGRLDAELEVSRRGALPEARIRGRAHVDLYPIVRRHVKLNSYDLESVVEELLGIKKEKLDGERLFTYWDEGGEKRALLARYALEDARVTLALAEKFLPLYCELSTIVGQSLNDVARMTSGQLVEWLLMRYATPRGELIPNHPAGEEYAARARATYAGGYVREPKRGLVEHIAVFDFRSFGPSIIVSHNIDPSTLIVGNCEENRAPELEYCFSLEREGFIPAILKELIRRRAEIKRELKRSEGDRRRTLSFAEKALKILANSFYGYMGYPRARWYRRECAESVAAFARMYIKQVMRIAEEEFKLEVVYGDTDSLFVVIPPEKRELAQKFLQKVNESMPGIIELEFEGFYRRGLFVTKKRYALLSEDGKMVVKGLEFVRRDWAPIARETQKEVLRILLEEADPEKAARLVRDVIERIRQRRVSLEDITIYTQLTKRIKSYKSLEPHVVAAQKLKERGREVAPGMIIGYIITKGTKGISQRATPVEFARLEDYDPEYYIDNQILPAIQRIFEAIGYTRDYLKEGITQTSLSRWF

SEQ ID NO: 2340 - protein, 792 aa, unidentified
  REGION 1..792: note = Description of Unknown: Synthetic polypeptide
MPRILKGFLIDADFETVEGRALIRLFLRGEEGSFVVYDDSFSPYFYALPGDEPERVKERILASGAAEAIQKVEIEEKRLFGTPRVALRITVSHPQDVPRIRERIRRVEGVDLILELDILFVRRYLIDRGIKPLTWLRLEVEERDGRALLRGVEQLEEEPPELRVAAVAIAVYNPKGAPRSSKDEIIMISVATSDGVEKVLTWREVQGLEQVEVLQDEKEMLLRFAELIKEGDYDVIVGYNTDSFDFPYIRDRLKKLGISLPLGRLDAELEVSRRGALPEARIRGRAHVDLYPIVRRHVKLNSYDLESVVEELLGIKKEKLDGERLFTYWDEGGEKRALLARYALEDARVTLALAEKFLPLYLELSTIVGQSLNDVARMTSGQLVEWLLMRYATPRGELIPNHPAGEEYAARARATYAGGYVREPKRGLVEHIAVFDFRSFGPSIIVSHNIDPSTLIVGNCEENRAPELEYCFSLEREGFIPAILKELIRRRAEIKRELKRSEGDRRRTLSFAEKALKILANSFYGYMGYPRARWYRRECAESVAAFARMYIKQVMRIAEEEFKLEVVYGDTDSLFVVIPPEKRELAQKFLQKVNESMPGIIELEFEGFYRRGLFVTKKRYALLSEDGKMVVKGLEFVRRDWAPIARETQKEVLRILLEEADPEKAARLVRDVIERIRQRRVSLEDITIYTQLTKRIKSYKSLEPHVVAAQKLKERGREVAPGMIIGYIITKGTKGISQRATPVEFARLEDYDPEYYIDNQILPAIQRIFEAIGYTRDYLKEGITQTSLSRWF

SEQ ID NO: 2341 - protein, 792 aa, unidentified
  REGION 1..792: note = Description of Unknown: Synthetic polypeptide
MPRILKGFLIDADFETVEGRALIRLFLRGEEGSFVVYDDSFSPYFYALPGDEPERVKERILASGAAEAIQKVEIEEKRLFGTPRVALRITVSHPQDVPRIRERIRRVEGVDLILEHDILFVRRYLIDRGIKPLTWLRLEVEERDGRALLRGVEQLEEEPPELRVAAVAIAVYNPKGAPRSSKDEIIMISVATSDGVEKVLTWREVQGLEQVEVLQDEKEMLLRFAELIKEGDYDVIVGYNTDSFDFPYIRDRLKKLGISLPLGRLDAELEVSRRGALPEARIRGRAHVDLYPIVRRHVKLNSYVLESVVEELLGIKKEKLDGERLFTYWDEGGEKRALLARYALEDARVTLALAEKFLPLYCELSTIVGQSLNDVARMTSGQLVEWLLMRYATPRGELIPNHPAGEEYAARARATYAGGYVREPKRGLVEHIAVFDFRSFGPSIIVSHNIDPSTLIVGNCEENRAPELEYCFSLEREGFIPAILKELIRRRAEIKRELKRSEGDRRRTLSFAEKALKILANSFYGYMGYPRARWYRRECAESVAAFARMYIKQVMRIAEEEFKLEVVYGDTDSLFVVIPPEKRELAQKFLQKVNESMPGIIELEFEGFYRRGLFVTKKRYALLSEDGKMVVKGLEFVRRDWAPIARETQKEVLRILLEEADPEKAARLVRDVIERIRQRRVSLEDITIYTQLTKRIKSYKSLEPHVVAAQKLKERGREVAPGVIIGYIITKGTKGISQRATPVEFARLEDYDPEYYIDNQILPAIQRIFEAIGYTRDYLKEGITQTSLSRWF

SEQ ID NO: 2342 - protein, 789 aa, unidentified; identical to SEQ ID NO: 2087
  REGION 1..789: note = Description of Unknown: Synthetic polypeptide

SEQ ID NO: 2343 - protein, 792 aa, unidentified
  REGION 1..792: note = Description of Unknown: Synthetic polypeptide
MPRILKGFLIDADFETVEGRALIRLFLRGEEGSFVVYDDSFSPYFYALPGDEPERVKERILASGAAEAIQKVEIEEKRLFGTPRVALRITVSHPQDVPRIRERIRRVEGVDLILEHDILFVRRYLIDRGIKPLTWLRLEVEERDGRALLRGVEQLEEEPPELRVAAVAIAVYNPKGAPRSSKDEIIMISVATSDGVEKVLTWREVQGLEQVEVLQDEKEMLLRFAELIKEGDYDVIVGYNTDSFDFPYIRDRLKKLGISLPLGRLDAELEVSRRGALPEARIRGRAHVDLYPIVRRHVKLNSYVLESVVEELLGIKKEKLDGERLFTYWDEGGEKRALLARYALEDARVTLALAEKFLPLYCELSTIVGQSLNDVARMTSGQLVEWLLMRYATPRGELIPNHPAGEEYAARARATYAGGYVREPKRGLVEHIAVFDFRSFGPSIIVSHNIDPSTLIVGNCEENRAPELEYCFSLEREGFIPAILKELIRRRAEIKRELKRSEGDRRRTLSFAEKALKILANSFYGYMGYPRARWYRRECAESVAAFARMYIKQVMRIAEEEFKLEVVYGDTDSLFVVIPPEKRELAQKFLQKVNESMPGIIELEFEGFYRRGLFVTKKRYALLSEDGKMVVKGLEFVRRDWAPIARETQKEVLRILLEEADPEKAARLVRDVIERIRQRRVSLEDITIYTQLTKRIKSYKSLEPHVVAAQKLKERGREVAPGMIIGYIITKGTKGISQRATPVEFARSEDYDPEYYIDNQILPAIQRIFEAIGYTRDYLKEGITQTSLSRWF

SEQ ID NO: 2344 - protein, 792 aa, unidentified
  REGION 1..792: note = Description of Unknown: Synthetic polypeptide
MPRILKGFLIDADFETVEGRALIRLFLRGEEGSFVVYDDSFSPYFYALPGDEPERVKERILASGAAEAIQKVEIEEKRLFGTPRVALRITVSHPQDVPRIRERIRRVEGVDLILEHDILFVRRYLIDRGIKPLTWLRLEVEERDGRALLRGVEQLEEEPPELRVAAIAIAVYNPKGAPRSSKDEIIMISVATSDGVEKVLTWREVQGLEQVEVLQDEKEMLLRFAELIKEGDYDVIVGYNTDSFDFPYIRDRLKKLGISLPLGRLDAELEVSRRGALPEARIRGRAHVDLYPIMRRHVKLNSYVLESVVEELLGIKKVKLDGERLFTYWDEGGEKRALLARYALEDARVTLALAEKFLPLYYELSTIVGQSLNDVARMTSGQLVEWLLMRYATPRGELIPNHPAGEEYAARARATYAGGYVREPKRGLVEHIAVFDFRSFGPSIIVSHNIDPSTLIVGNCEENRAPELEYCFSLEREGFIPAILKELIRRRAEIKRELKRSEGDRRRTLSFAEKALKILANSFYGYMGYPRARWYRRECAESVAAFARMYIKQVMRIAEEEFKLEVVYGDTDSLFVVIPPEKRELAQKFLQKVNESMPGIIELEFEGFYRRGLFVTKKRYALLSEDGKMVVKGLEFVRRDWAPIARETQKEVLRILLEEADPEKAARLVRDVIERIRQRRVSLEDITIYTQLTKRIKSYKSLEPHVVAAQKLKERGREVAPGMIIGYIITKGTKGISQRATPVEFARLEDYDPEYYIDNQILPAIQRIFEAIGYTRDYLKEGITQTSLSRWF

SEQ ID NO: 2345 - protein, 792 aa, unidentified
  REGION 1..792: note = Description of Unknown: Synthetic polypeptide
MPRILKGFLIDADFETVEGRALIRLFLRGEEGSFVVYDDSFSPYFYALPGDEPERVKERILASGAAEAIQKVEIEEKRLFGTPRVALRITVSHPQDVPRIRERIRRVEGVDLILEHDILFVRRYLIDRGIKPLTWLRLEVEERDGRALLRGVEQLEEEPPELRVAAVAIAVYNPKGAPRSSKDEIIMISVATSDGVEKVLTWREVQGLEQVEVLQDEKEMLLRFAELIKEGDYDVIVGYNTDSFDFPYIRDRLKKLGISLPLGRLDAELEVSRRGALPEARIRGRAHVDLYPIVRRHVKLNSYDLESVVEELLGIKKEKLDGERLFTYWDEGGEKRALLARYALEDARVTLALAEKFLPLYCELSTIVGQSLNDVARMTSGQLVEWLLMRYATPRGELIPNHPAGEEYAARARATYAGGYVREPKRGLVEHIAVFDFRSFGPSIIVSHNIDPSTLIVGNCEENRAPELEYCFSLEREGFIPAILKELIRRRAEIKRELKRSEGDRRRTLSFAEKALKILANSFYGYLGYPRARWYRRECAESVAAFARMYIKQVMRIAEEEFKLEVVYGDTDSLFVVIPPEKRELAQKFLQKVNESMPGIIELEFEGFYRRGLFVTKKRYALLSEDGKMVVKGLEFVRRDWAPIARETQKEVLRILLEEADPEKAARLVRDVIERIRQRRVSLEDITIYTQLTKRIKSYKSLEPHVVAAQKLKERGREVAPGMIIGYIITKGTKGISQRATPVEFARLEDYDPEYYIDNQILPAIQRIFEAIGYTRDYLKEGITQTSLSRWF

SEQ ID NO: 2346 - protein, 792 aa, unidentified
  REGION 1..792: note = Description of Unknown: Synthetic polypeptide
MPRILKGFLIDADFETVEGRALIRLFLRGEEGSFVVYDDSFSPYFYALPGDEPERVKERILASGAAEAIQKVEIEEKRLFGTPRVALRITVSHPQDVPRIRERIRRVEGVDLILEHDILFVRRYLIDRGIKPLTWLRLEVEERDGRALLRGVEQLEEEPPELRVAAVAIAVYNPKGAPRSSKDEIIMISVATSDGVEKVLTWREVQGLEQVEVLQDEKEMLLRFAELIKEGDYDVIVGYNTDSFDFPYIRDRLKKLGISLPLGRLDAELEVSRRGALPEARIRGRAHVDLYPIVRRHVKLNSYVLESVVEELLGIKKEKLDGERLFTYWDEGGEKRALLARYALEDARVTLALAEDFLPLYCELSTIVGQSLNDVARMTSGQLVEWLLMRYATPRGELIPNHPAGEEYAARARATYAGGYVREPKRGLVEHIAVFDFRSFGPSIIVSHNIDPSTLIVGNCEENRAPELEYCFSLEREGFIPAILKELIRRRAEIKRELKRSEGDRRRTLSFAEKALKILANSFYGYMGYPRARWYRRECAESVAAFARMYIKQVMRIAEEEFKLEVVYGDTDSLFVVIPPEKRELAQKFLQKVNESMPGIIELEFEGFYRRGLFVTKKRYALLSEDGKMVVKGLEFVRRDWAPIARETQKEVLRILLEEADPEKAARLVRDVIERIRQRRVSLEDITIYTQLTKRIKSYKSLEPHVVAAQKLKERGREVAPGMIIGYIITKGTKGISQRATPVEFARLEDYDPEYYIDNQILPAIQRIFEAIGYTRDYLKEGITQTSLSRWF

SEQ ID NO: 2347 - protein, 792 aa, unidentified
  REGION 1..792: note = Description of Unknown: Synthetic polypeptide
MPRILKGFLIDADFETVEGRALIRLFLRGEEGSFVVYDDSFSPYFYALPGDEPERVKERILASGAAEAIQKVEIEEKRLFGTPRVALRITVSHPQDVPRIRERIRRVEGVDLILEHDILFVRRYLIDRGIKPLTWLRLEVEERDGRALLRGVEQLEEEPPELRVAAVAIAVYNPKGAPRSSKDEIIMISVATSDGVEKVLTWREVQGLEQVEVLQDEKEMLLRFAELIKEGDYDVIVGYNTDSFDFPYIRDRLKKLGISLPLGRLDAELEVSRRGADPEARIRGRAHVDLYPIVRRHVKLNSYVLESVVEELLGIKKEKLDGERLFTYWDEGGEKRALLARYALEDARVTLALAEKFLPLYCELSTIVGQSLNDVARMTSGQLVEWLLMRYATPRGELIPNHPAGEEYAARARATYAGGYVREPKRGLVEHIAVFDFRSFGPSIIVSHNIDPSTLIVGNCEENRAPELEYCFSLEREGFIPAILKELIRRRAEIKRELKRSEGDRRRTLSFAEKALKILANSFYGYMGYPRARWYRRECAESVAAFARMYIKQVMRIAEEEFKLEVVYGDTDSLFVVIPPEKRELAQKFLQKVNESMPGIIELEFEGFYRRGLFVTKKRYALLSEDGKMVVKGLEFVRRDWAPIARETQKEVLRILLEEADPEKAARLVRDVIERIRQRRVSLEDITIYTQLTKRIKSYKSLEPHVVAAQKLKERGREVAPGMIIGYIITKGTKGISQRATPVEFARLEDYDPEYYIDNQILPAIQRIFEAIGYTRDYLKEGITQTSLSRWF

SEQ ID NO: 2348 - protein, 792 aa, unidentified; identical to SEQ ID NO: 2044
  REGION 1..792: note = Description of Unknown: Synthetic polypeptide

SEQ ID NO: 2349 - protein, 792 aa, unidentified
  REGION 1..792: note = Description of Unknown: Synthetic polypeptide
MPRILKGFLIDADFETVEGRALIRLFLRGEEGSFVVYDDSFSPYFYALPGDEPERVKERILASGAAEAIQKVEIEEKRLFGTPRVALRITVSHPQDVPRIRERIRRVEGVDLILEHDILFVRRYLIDRGIKPLTWLRLEVEERDGRALLRGVEQLEEEPPELRVAAVAIAVYNPKGAPRSSKDEIIMISVATSDGVEKVLTWREVQGLEQVEVLQDEKEMLLRFAELIKEGDYDVIVGYNTDSFDFPYIRDRLKKLGISLPLGRLDAELEVSRRGALPEARIRGRAHVDLYPIVRRHVKLNSYVLESVVEELLGIKKEKLDGERLFTYWDEGGEKRALLARYALEDARVTLALAEKFLPLYCELSTIVGQSLNDVARMTSGQLVEWLLMRYATPRGELIPNHPAGEEYAARARATYAGGYVREPKRGLVEHIAVFDFRSFGPSIIVSHNIDPSTLIVGNCEENRAPELEYCFSLEREGFIPAILKELIRRRAEIKRELKRSEGDRRRTLSFAEKALKILANSFYGYMGYPRARWYRRECAESVAAFARMYIKQVMRIAEEEFKLEVVYGDTDSLFVVIPPEKRELAQKFLQKVNESMPGIIELEFEGFYRRGLFVTKKRYALLPEDGKMVVKGLEFVRRDWAPIARETQKEVLRILLEEADPEEAARLVRDVIERIRQRRVSLEDITIYTQLTKRIKSYKSLEPHVVAAQKLKERGREVAPGMIIGYIITKGTKGISQRATPVEFARLEDYDPEYYIDSQILPAIQRIFEAIGYTRDYLKEGITQTSLSRWF

SEQ ID NO: 2350 - protein, 792 aa, unidentified
  REGION 1..792: note = Description of Unknown: Synthetic polypeptide
MPRILKGFLIDADFETVEGRALIRLFLRGEEGSFVVYDDSFSPYFYALPGDEPERVKERILASGAAEAIQKVEIEEKRLFGTPRVALRITVSHPQDVPRIRERIRRVEGVDLILEHDILFVRRYLIDRGIKPLTWLRLEVEERDGRALLRGVEQLEEEPPELRVAAVAIAVYNPKGAPRSSKDEIIMISVATSDGVEKVLTWREVQGLEQVEVLQDEKEMLLRFAELIKEGDYDVIVGYNTDSFDFPYIRDRLKKLGISLPLGRLDAELEVSRRGALPEARIRGRAHVDLYPIVRRHVKLNSYVLESVVEELLGIKKEKLDGERLFTYWDEGGEKRALLARYALEAARVTLALAEKFLPLYLELSTIVGQSLNDVARMTSGQLVEWLLMRYATPRGELAPNHPAGEEYAARARATYAGGYVREPKRGLVEHIAVFDFRSFGPSIIVSHNIDPSTLIVGNCEENRAPELEYCFSLEREGFIPAILKELIRRRAEIKRELKRSEGDRRRTLSFAEKALKILANSFYGYMGYPRARWYRRECAESVAAFARMYIKQVMRIAEEEFKLEVVYGDTDSLFVVIPPEKRELAQKFLQKVNESMPGIIELEFEGFYRRGLFVTKKRYALLSEDGKMVVKGLEFVRRDWAPIARETQKEVLRILLEEADPEKAARLVRDVIERIRQRRVSLEDITIYTQLTKRIKSYKSLEPHVVAAQKLKERGREVAPGMIIGYIITKGTKGISQRATPVEFARLEDYDPEYYIDNQILPAIQRIFEAIGYTRDYLKEGITQTSLSRWF

SEQ ID NO: 2351 - protein, 792 aa, unidentified; identical to SEQ ID NO: 2104
  REGION 1..792: note = Description of Unknown: Synthetic polypeptide

SEQ ID NO: 2352 - protein, 792 aa, unidentified; identical to SEQ ID NO: 1745
  REGION 1..792: note = Description of Unknown: Synthetic polypeptide

SEQ ID NO: 2353 - protein, 792 aa, unidentified
  REGION 1..792: note = Description of Unknown: Synthetic polypeptide
MPRILKGFLIDADFETVEGRALIRLFLRGEEGSFVVYDDSFSPYFYALPGDEPERVKERILASGAAEAIQKVEIEEKRLFGTPRVALRITVSHPQDVPRIRERIRRVEGVDLILEHDILFVRRYLIDRGIKPLTWLRLEVEERDGRALLRGVEQLEEEPPELRVAAVAIAVYNPKGAPRSSKDEIIMISVATSDGVEKVLTWREVQGLEQVEVLQDEKEMLLRFAELIKEGDYDVIVGYNTDSFDFPYIRDRLKKLGISLPLGRLDAELEVSRRGALPEARIRGRAHVDLYPIVRRHVKLNSYVLESVVEELLGIKKEKLDGERLFTYWDEGGEKRALLARYALEDARVTLALAEKFLPLYCELSTIVGQSLNDVARMTSGQLVEWLLMRYATPRGELIPNHPAGEEYAARARATYAGGYVREPKRGLVEHIAVFDFRSFGPSIIVSHNIDPSTLIVGNCEENRAPELEYCFRLEREGFIPAILKELIRRRAEIKRELKRSEGDRRRTLSFAEKALKILANSFYGYMGYPRARWYRRECAESVAAFARMYIKQVMRIAEEEFKLEVVYGDTDSLFVVIPPEKRELAQKFLQKVNESMPGIIELEFEGFYRRGLFVTKKRYALLSEDGKMVVKGLEFVRRDWAPIARETQKEVLRILLEEADPEKAARLVRDVIERIRQRRVSLEDITIYTQLTKRIKSYKSLEPHVVAAQKLKERGREVAPGMIIGYIITKGTKGISQRATPVEFARLEDYDPEYYIDNQILPAIQRIFEAIGYTRDYLKEGITQTSLSRWF

SEQ ID NO: 2354 - protein, 792 aa, unidentified
  REGION 1..792: note = Description of Unknown: Synthetic polypeptide
MPRILKGFLIDADFETVEGRALIRLFLRGEEGSFVVYDDSFSPYFYALPGDEPERVKERILASGAAEAIQKVEIEEKRLFGTPRVALRITVSHPQDVPRIRERIRRVEGVDLILEHDILFVRRYLIDRGIKPLTWLRLEVEERDGRALLRGVEQLEEEPPELRVAAVAIAVYNPKGAPRSSKDEIIMISVATSDGVEKVLTWREVQGLEQVEVLQDEKEMLLRFAELIKEGDYDVIVGYNTDSFDFPYIRDRLKKLGISLPLGRLDAELEVSRRGALPEARIRGRAHVDLYPIVRRHVKLNSYDLESVVEELLGIKKEKLDGERLFTYWDEGGEKRALLARYALEDARVTLALAEKFLPLYCELSTIVGQSLNDVARMTSGQLVEWLLMRYATPRGELIPNHPAGEEYAARARATYAGGYVREPKRGLVEHIAVFDFRSFGPSIIVSHNIDPSTLIVGNCEENRAPELEYCFSLEREGFIPAILKELIRRRAEIKRELKRSEGDRRRTLSFAEKALKILANSFYGYMGYPRARWYRRECAESVAAFARMYIKQVMRIAEEEFKLEVVYGDTDSLFVVIPPEKRELAQKFLQKVNESMPGIIELEFEGFYRRGLFVTKKRYALLSEDGKMVVKGLEFVRRDWAPIARETQKEVLRILLEEADPEKAARLVRDVIEYIRQRRVSLEDITIYTQLTKRIKSYKSLEPHVVAAQKLKERGREVAPGMIIGYIITKGTKGISQRATPVEFARLEDYDPEYYIDNQILPAIQRIFEAIGYTRDYLKEGITQTSLSRWF

SEQ ID NO: 2355 - protein, 792 aa, unidentified
  REGION 1..792: note = Description of Unknown: Synthetic polypeptide
MPRILKGFLIDADFETVEGRALIRLFLRGEEGSFVVYDDSFSPYFYALPGDEPERVKERILASGAAEAIQKVEIEEKRLFGTPRVALRITVSHPQDVPRIRERIRRVEGVDLILEHDILFVRRYLIDRGIKPLTYLRLEVEERDGRALLRGVEQLEEEPPELRVAAVAIAVYNPKGAPRSSKDEIIMISVATSDGVEKVLTWREVQGLEQVEVLQDEKEMLLRFAELIKEGDYDVIVGYNTDSFDFPYIRDRLKKLGISLPLGRLDAELEVSRRGALPEARIRGRAHVDLYPIVRRHVKLNSYVLESVVEELLGIKKEKLDGERLFTYWDEGGEKRALLARYALEDARVTLALAEKFLPLYCELSTIVGQSLNDVARMTSGQLVEWLLMRYATPRGELIPNHPAGEEYAARARATYAGGYVREPKRGLVEHIAVFDFRSFGPSIIVSHNIDPSTLIVGNCEENRAPELEYCFSLEREGFIPAILKELIRRRAEIKRELKRSEGDRRRTLSFAEKALKILANSFYGYMGYPRARWYRRECAESVAAFARMYIKQVMRIAEEEFKLEVVYGDTDSLFVVIPPEKRELAQKFLQKVNESMPGIIELEFEGFYRRGLFVTKKRYALLSEDGKMVVKGLEFVRRDWAPIARETQKEVLRILLEEADPEKAARLVRDVIERIRQRRVSLEDITIYTQLTKRIKSYKSLEPHVVAAQKLKERGREVAPGMIIGYIITKGTKGISQRATPVEFARLEDYDPEYYIDNQILPAIQRIFEAIGYTRDYLKEGITQTSLSRWF

SEQ ID NO: 2356 - protein, 792 aa, unidentified
  REGION 1..792: note = Description of Unknown: Synthetic polypeptide
MPRILKGFLIDADFETVEGRALIRLFLRGEEGSFVVYDDSFSPYFYALPGDEPERVKERILASGAAEAIQKVEIEEKRLFGTPRVALRITVSHPQDVPRIRERIRRVEGVDLILEHDILFVRRYLIDRGIKPLTWLRLEVEERDGRALLRGVEQLEEEPPELRVAAVAIAVYNPKGAPRSSKDEIIMISVATSDGVEKVLTWREVQGLEQVEVLQDEKEMLLRFAELIKEGDYDVIVGYNTDSFDFPYIRDRLKKLGISLPLGRLDAELEVSRRGALPEARIRGRAHVDLYPIVRRHVKLNSYDLESVVEELLGIKKEKLDGERLFTYWDEGGEKRALLARYALEDARVTLALAEKFLPLYCELSTIVGQSLNDVARMTSGQLVEWLLMRYATPRGELIPNHPAGEEYAARARATYAGGYVREPKRGLVEHIAVFDFRSFGPSIIVSHNICPSTLIVGNCEENRDPELEYCFSLEREGFIPAILKELIRRRAEIKRELKRSEGDRRRTLSFAEKALKILANSFYGYMGYPRARWYRRECAESVAAFARMYIKQVMRIAEEEFKLEVVYGDTDSLFVVIPPEKRELAQKFLQKVNESMPGIIELEFEGFYRRGLFVTKKRYALLSEDGKMVVKGLEFVRRDWAPIARETQKEVLRILLEEADPEKAARLVRDVIERIRQRRVSLEDITIYTQLTKRIKSYKSLEPHVVAAQKLKERGREVAPGMIIGYIITKGTKGISQRATPVEFARLEDYDPEYYIDNQILPAIQRIFEAIGYTRDYLKEGITQTSLSRDF

SEQ ID NO: 2357 - protein, 792 aa, unidentified
  REGION 1..792: note = Description of Unknown: Synthetic polypeptide
MPRILKGFLIDADFETVEGRALIRLFLRGEEGSFVVYDDSFSPYFYALPGDEPERVKERILASGAAEAIQKVEIEEKRLFGTPRVALRITVSHPQDVPRIRERIRRVEGVDLILEHDILFVRRYLIDRGIKPLTWLRLEVEERDGRALLRGVEQLEEEPPELRVAAVAILVYNPKGAPRSSKDEIIMISVATSDGVEKVLTWREVQGLEQVEVLQDEKEMLLRFAELIKEGDYDVIVGYNTDSFDFPYIRDRLKKLGISLPLGRLDAELEVSRRGALPEARIRGRAHVDLYPIVRRHVKLNSYVLESVVEELLGIKKEKLDGERLFTYWDEGGEKRALLARYALEDARVTLALAEKFLPLYCELSTIVGQSLNDVARMTSGQLVEWLLMRYATPRGELIPNHPAGEEYAARARATYAGGYVREPKRGLVEHIAVFDFRSFGPSIIVSHNIDPSTLIVGNCEENRAPELEYCFSLEREGFIPAILKELIRRRAEIKRELKRSEGDRRRTLSFAEKALKILANSFYGYMGYPRARWYRREVAESVAAFARMYIKQVMRIAEEEFKLEVVYGDTDSLFVVIPPEKRELAQKFLQKVNESMPGIIELEFEGFYRRGLFVTKKRYALLSEDGKMVVKGLEFVRRDWAPIARETQKEVLRILLEEADPEKAARLVRDVIERIRQRRVSLEDITIYTQLTKRIKSYKSLEPHVVAAQKLKERGREVAPGMIIGYIITKGTKGISQRATPVEFARLEDYDPEYYIDNQILPAIQRIFEAIGYTRDYLKEGITQTSLSRWF

SEQ ID NO: 2358 - protein, 792 aa, unidentified
  REGION 1..792: note = Description of Unknown: Synthetic polypeptide
MPRILKGFLIDADFETVEGRALIRLFLRGEEGSFVVYDDSFSPYFYALPGDEPERVKERILASGAAEAIQKVEIEEKRLFGTPRVALRITVSHPQDVPRIRERIRRVEGVDLITEHDILFVRRYLIDRGIKPLTWLRLEVEERDGRALLRGVEQLEEEPPELRVAAVAIAVYNPKGAPRSSKDEIIMISVATSDGVEKVLTWREVQGLEQVEVLQDEKEMLLRFAELIKEGDYDVIVGYNTDSFDFPYIRDRLKKLGISLPLGRLDAELEVSRRGALPEARIRGRAHVDLYPIVRRHVKLNSYVLESVVEELLGIKKEKLDGERLFTYWDEGGEKRALLARYALEDARVTLALAEKFLPLYCELSTIVGQSLNDVARMTSGQLVEWLLMRYATPRGELIPNHPAGEEYAARARATYAGGYVREPKRGLVEHIAVFDFRSFGPSIIVSHNIDPSTLIVGNCEENRAPELEYCFSLEREGFIPAILKELIRRRAEIKRELKRSEGDRRRTLSFAEKALKILANSFYGYMGYPRARWYRRECAESVAAFARMYIKQVMRIAEEEFKLEVVYGDTDSLFVVIPPEKRELAQKFLQKVNESMPGIIELEFEGFYRRGLFVTKKRYALLSEDGKMVVKGLEFVRRDWAPIARETQKEVLRILLEEADPEKAARLVRDVIERIRQRRVSLEDITIYTQLTKRIKSYKSLEPHVVAAQKLKERGREVAPGMIIGYIITKGTKGISQRATPVEFARLEDYDPEYYIDNQILPAIQRIFEAIGYTRDYLKEGITQTSLSRWF

SEQ ID NO: 2359 - protein, 792 aa, unidentified
  REGION 1..792: note = Description of Unknown: Synthetic polypeptide
MPRILKGFLIDADFETVEGRALIRLFLRGEEGSFVVYDDSFSPYFYALPGDEPERVKERILASGAAEAIQKVEIEEKRLFGTPRVALRITVSHPQDVPRIRERIRRVEGVDLILEHDILFVRRYLIDRGIKPLTWLRLEVEERDGRALLRGVEQLEEEPPELRVAAVAIAVYNPKGAPRSSKDEIIMISVATSDGVEKVLTWREVQGLEQVEVLQDEKEMLLRFAELIKEGDYDVIVGYNTDSFDFPYIRDRLKKLGISLPLGRLDAELEVSRRGALPEARIRGRAHVDLYPIVRRHVKLNSYVLESVVEELLGIKKEKLDGERLFTYWDEGGEKRALLARYALEDARVTLALAEKFLPLYCELSTIVGQSLNDVARMTSGQLVEWLLMRYATPRGELIPNHPAGEEYAARARATYAGGYVREPKRGLVEHIAVFDFRSFGPSIIVSHNIDPSTLIVGNCEENRAPELEYCFSLEREGFIPAILKELIRRRAEIKRELKRSEGDRRRTLSFAEKALKILANSFYGYMGYPRARWYRRECAESVAAFARMYIKQVMRIAEEEFKLEVVYGDTDSLFVVIPPEKRELAQKFLQKVNESMPGIIELEFEGFYRRGLFVTKKRYALLSEDGKMVVKGLEFVRRDWAPIARETQKEVLRILLVEADPEKAARLVRDVIERIRQRRVSLEDITIYTQLTKRIKSYKSLEPHVVAAQKLKERGREVAPGMIIGYIITKGTKGISQRATPVEFARLEDYDPEYYIDNQILPAIQRIFEAIGYTRDYLKEGITQTSLSRWF

SEQ ID NO: 2360 - protein, 792 aa, unidentified
  REGION 1..792: note = Description of Unknown: Synthetic polypeptide
MPRILKGFLIDADFETVEGRALIRLFLRGEEGSFVVYDDSFSPYFYALPGDEPERVKERILASGAAEAIQKVEIEEKRLFGTPRVALRITVSHPQDVPRIRERIRRVEGVDLILEHDILFVRRYLIDRGIKPLTWLRLEVEERDGRALLRGVEQLEEEPPELRVAAVAIAVYNPKGAPRSSKDEIIMISVATSDGVEKVLTWREVQGLEQVEVLQDEKEMLLRFAELIKEGDYDVIVGYNTDSFDFPYIRDRLKKLGISLPLGRLDAELEVSRRGALPEARIRGRAHVDLYPIVRRHVKLNSYVLESVVEELLGIKKEKLDGERLFTYWDEGGEKRALLARYALEDARVTLALAEKFLPLYCELSTIVGQSLNDVARMTSGQLVEWLLLRYATPRGELIPNHPAGEEYAARARATYAGGYVREPKRGLVEHIAVFDFRSFGPSIIVSHNIDPSTLIVGNCEENRAPELEYCFSLEREGFIPAILKELIRRRAEIKRELKRSEGDRRRTLSFAEKALKILANSFYGYMGYPRARWYRRECAESVAAFARMYIKQVMRIAEEEFKLEVVYGDTDSLFVVIPPEKRELAQKFLQKVNESMPGIIELEFEGFYRRGLFVTKKRYALLSEDGKMVVKGLEFVRRDWAPIARETQKEVLRILLEEADPEKAARLVRDVIERIRQRRVSLEDITIYTQLTKRIKSYKSLEPHVVAAQKLKERGREVAPGMIIGYIITKGTKGISQRATPVEFARLEDYDPEYYIDNQILPAIQRIFEAIGYTRDYLKEGITQTSLSRWF

SEQ ID NO: 2361 - protein, 792 aa, unidentified
  REGION 1..792: note = Description of Unknown: Synthetic polypeptide
MPRILKGFLIDADFETVEGRALIRLFQRGEEGSFVVYDDSFSPYFYALPGDEPERVKERILASGAAEAIQKVEIEEKRLFGTPRVALRITVSHPQDVPRIHERIRRVEGVDLILEHDILFVRRYLIDRGIKPLTWLRLEVEERDGRALLRGVEQLEEEPPELRVAAVAIAVYNPKGAPRSSKDEIIMISVATSDGVEKVLTWREVQGLEQVEVLQDEKEMLLRFAELIKEGDYDVIVGYNTDSFDFPYIRDRLKKLGISLPLGRLDAELEVSRRGALPEARIRGRAHVDLYPIVRRHVKLNSYVLESVVEELLGIKKEKLDGERLFTYWDEGGEKRALLARYALEDARVTLALAEKFLPLYCELSTIVGQSLNDVARMTSGQLVEWLLMRYATPRGELIPNHPAGEEYAARARATYAGGYVREPKRGLVEHIAVFDFRSFGPSIIVSHNIDPSTLIVGNCEENRAPELEYCFSLEREGFIPAILKELIRRRAEIKRELKRSEGDRRRTLSFAEKALKILANSFYGYMGYPRARWYRRECAESVAAFARMYIKQVMRIAEEEFKLEVVYGDTDSLFVVIPPEKRELAQKFLQKVNESMPGIIELEFEGFYRRGLFVTKKRYALLSEDGKMVVKGLEFVRRDWAPIARETQKEVLRILLEEADPEKAARLVRDVIERIRQRRVSLEDITIYTQLTKRIKSYKSLEPHVVAAQKLKERGREVAPGMIIGYIITKGTKGISQRATPVEFARLEDYDPEYYIDNQILPAIQRIFEAIGYTRDYLKEGITQTSLSRWF

SEQ ID NO: 2362 - protein, 792 aa, unidentified
  REGION 1..792: note = Description of Unknown: Synthetic polypeptide
MPRILKGFLIDADFETVEGRALIRLFLRGEEGSFVVYDDSFSPYFYALPGDEPERVKERILASGAAEAIQKVEIEEKRLFGTPRVALRITVSHPQDVPRIRERIRRVEGVDLILEHDILFVRRYLIDRGIKPLTWLRLEVEERDGRALLRGVEQLEEEPPELRVAAVAIAVYNPKGAPRSSKDEIIMISVATSDGVEKVLTWREVQGLEQVEVLQDEKEMLLRFAELIKEGDYDVIVGYNTDSFDFPYIRDRLKKLGISLPLGRLDAELEVSRRGALPEARIRGRAHVDLYPIVRRHVKLNSYVLESVVEELLGIKKEKLDGERLFTYWDEGGEKRALLARYALEDARVTLALAEKFLPLYCELSTIVGQSLNDVARMTSGQLVEWLLMRYATPRGELIPNHPAGEEYAARARATYAGGYVREPKRGLVEHIAVFDFRSFGPSIIVSHNIDPSTLIVGNCEENRAPELEYCFSLEREGFIPAILKELIRRRAEIKRELKRSEGDRRRTLSFAEKALKILANSFYGYMGYPRARWYRRECAESVAAFARMYIKQVMRIAEEEFKLEVVYGDTDSLFVVIPPEKRELAQKFLQKVNESMPGIIELEFEGFYRRGLFVTKKRYALLSEDGKAVVKGLEFVRRDWAPIARETQKEVLRILLEEADPEKAARLVRDVIERIRQRRVSLEDITIYTQLTKRIKSYKSLEPHVVAAQKLKERGREVAPGMIIGYIITKGTKGISQRATPVEFARLEDYDPEYYIDNQILPAIQRIFEAIGYTRDYLKEGITQTSLSRWF

SEQ ID NO: 2363 - protein, 792 aa, unidentified
  REGION 1..792: note = Description of Unknown: Synthetic polypeptide
MPRILKGFLIDADFETVEGRALIRLFLRGEEGSFVVYDDSFSPYFYALPGDEPERVKERILASGAAEAIQKVEIEEKRLFGTPRVALRITVSHPQDVPRIRERIRRVEGVDLILEHDILFVRRYLIDRGIKPLTWLRLEVEERDGRALLRGVEQLEEEPPELRVAAVAIAVYNPKGAPRSSKDEIIMISVATSDGVEKVLTWREVQGLEQVEVLQDEKEMLLRFAELIKEGDYDVIVGYNTDSFDFPYIRDRLKKLGISLPLGRLDAELEVSRRGALPEARIRGRAHVDLYPIVRRHVKLNSYVLESVVEELLGIKKEKLDGERLFTYWDEGGEKRALLARYALEDARVTLALAEKFLPLYCELSTIVGQSLNDVARMTSGQLVEWLLMRYATPRGELIPNHPAGEEYAARARATYAGGYVREPKRGLVEHIAVFDFRSFGPSIIVSHNIDPSTLIVGNCEENRAPELEYCFSLEREGFIPAILKELIRRRAEIKRELKRSEGDRRRTLSFAEKALKILAASFYGYMGYPRARWYRRECAESVAAFARMYIKQVMRIAEEEFKLEVVYGDTDSLFVVIPPEKRELAQKFLQKVNESMPGIIELEFEGFYRRGLFVTKKRYALLSEDGKMVVKGLEFVRRDWAPIARETQKEVLRILLEEADPEKAARLVRDVIERIRQRRVSLEDITIYTQLTKRIKSYKSLEPHVVAAQKLKERGREVAPGMIIGYIITKGTKGISQRATPVEFARLEDYDPEYYIDNQILPAIQRIFEAIGYTRDYLKEGITQTSLSRWF

SEQ ID NO: 2364 - protein, 792 aa, unidentified
  REGION 1..792: note = Description of Unknown: Synthetic polypeptide
MPRILKGFLIDADFETVEGRALIRLFLRGEEGSFVVYDDSFSPYFYALPGDEPERVKERILASGAAEAIQKVEIEEKRLFGTPRVALRITVSHPQDVPRIRERIRRVEGVDLILEHDILFVRRYLIDRGIKPLTWLRLEVEERDGRALLRGVEQLEEEPPELRVAAVAIAVYNPKGAPRSSKDEIIMISVATSDGVEKVLTWREVQGLEQVEVLQDEKEMLLRFAELIKEGDYDVIVGYNTDSFDFPYIRDRLKKLGISLPLGRLDAELEVSRRGALPEARIRGRAHVDLYPIVRRHVKLNSYDLESVVEELLGIKKEKLDGERLFTYWDEGGEKRALLARYALEDARVTLALAEKFLPLYCELSTIVGQSLNDVARMTSGQLVEWLLMRYATPRGELIPNHPAGEEYAARARATYAGGYVREPKRGLVEHIAVFDFRSFGPSIIVSHNIDPSTLIVGNCEENRAPELEYCFSLEREGFIPAILKELIRRRAEIKRELKRSEGDRRRTLSFAEKALKILANSFYGYMGYPRARWYRRECAESVAAFARMYIKQVMRIAEEEFKLEVVYGDTDSLFVVIPPEKRELAQKFLQKVNESMPGIIELEFEGFYRRGLFVTKKRYALLSEDGKMVVKGLEFVRRDWAPIARETQKEVLRILLEEADPEKAARLVRDVIERIRQRRVSLEDITIYTQLTKRIKSYKSLEPHVVAAQKLKERGREVAPGMIIGYIITKGTKGISQRATPVEFARLEDYDPEYYIDNQILPAVQRIFEAIGYTRDYLKEGITQTSLSRWF

(The sequence listing continues in the following parts.)
